United States Patent Application Publication US 2008/0034453 A1 - sequence listing, part 24

SEQ ID NO: 205842 - DNA, 502 bp, Glycine max
cgacgtcctcgcttcgccgcatggagatgagacgctcaaggaactcgtgctggacacgctcatggagttcgtaaaggtctccaatggcggcgccttccactcttctctgtaccacaagcttctttgtagtattgtttactctactagtccccctacttttttggtggatttactggcgtcgaagtatttcaagtatatcgatgtccggtattttacgtttataagtctaaaaaagctcgctagtactttggagggaaaagatgtctcagatgataaaattgcaaatgctgatggttccagtgaaagtcaaatgagctcaaatatggaatgtgtcatccacaacatgtattacactatatcacatgttcccccacatcaaggctcggataatacatctgaattggaaatgtggagcagctcagaaagtgaccataagcagctttatggagataagggtgctgatgataagccacagaagttccagaagccctaacaaaatgta

SEQ ID NO: 205843 - DNA, 394 bp, Glycine max
  unsure (1)..(394): unsure at all n locations
aaacaaaagaaatagtctatccccactcatttataataattcagttttatgaacagtacttgtttctactaaactgcaaaagtcaagaaatggtgctttttgagatgacatcaaaggatattccattttgttgaagtctttcctggagatcagttggaccaaagatgatcccaggagggtaaactcctccttttggaaggttgtcacgttggcagagaagaacaagagcacactgaataagaattattggtgtggtcagatatccaacttcaggtcccataacccttgttacaatctccatgtcaggttttgtgtttccctgtgaagcaatgctcccatcactataaccatgtccaacaaaccacatcttgaaggaagcactttccacctnctc

SEQ ID NO: 205844 - DNA, 514 bp, Glycine max
aacattcacatattaacctgtgaaacctctgatctgagacttctcacccattttcctaaacctctaattaagccaccaattagaagaggcaattttctcaagtcagagagagaagaacatctttgtatcagtgttgcatccactctctgatgggtgtagtgaggggggtgatattggatgaatcagtactcttggctgaaagtgatgatgataaaactgtatctttactccgaccaggagctgagtctctcatccaaacactcgttctatccagaacgcatagtggaattgctcatggtgttggcctttcagatgacaaggtgagtgttcttaaaaaatttgctagtttgaactcacttgattgctttatcttaaatgatcatgtaagtgaggttatggctggatggagtaatgctgatgatggcagtgttattatttatctgatttctaataagaaggagttcttacctaaattaagcagctataattggctggatgttgtctgaatgttgga

SEQ ID NO: 205845 - DNA, 575 bp, Glycine max
ggaaaaatcaggcacaacaatctaaaggcaaagtctggaatttgttcaagcttcgctttctcacacctccaactctgtttcttcccttgccagatcgctcctccccgcacctcgtcgtcttaagcttcatccttccaacaagctctacttcccttagccgggcaagcaggctaagagtgccgtcaggattaaaaacaccagcaaatccaatgtagctttcaagtttcaaacaaatgcacccaagagctgtttcatgcgacctcctgggggaattctagcacctggcgagagtataattgcaactgtgttcaagtttatagagcatccactgaataatgaaaagccacaaaaaactggagtcaaatttaaaatcacgagcttgaaggtcaaaggaccaattgattatgtccctgaaatgtttgatgagctgaaggatcaagtaacagtggagcagattttgcaagttgtttttctggatccagagcgtagctgtcctgctttggaaaaactgaagcctcagcttgctgaagctgatgcctgctgtgttgaggcacgtaagagagccccagaagatg

SEQ ID NO: 205846 - DNA, 324 bp, Glycine max
gtaaaaattacgctcatcattctaagggcgaagatcggcatttgctcacgctaagaggaatcacaccgtctacttatggttcttcacttggcagatcgatggtccccacacctcgctgcttgaggctgattgctttcaccaagctttactttccttagccgggcaagcaggctagaagtgccgtcaggattaaacagaccatggagaccaatgtagcgttctagttgcagacggacgcacccaagagcatgtatgtgcgacctcctgaacgaagattaacgcctggcgagcgtttcattgcaactgtgttcaagtatatagggc

SEQ ID NO: 205847 - DNA, 540 bp, Glycine max
attgtgccctccctctttctagctatttccctctcttaacacaattaacaaagatatatcatatcatatcaactccaaatgatgaaaaatattgggttgtttcttcttgtggtggtggctacttttgtggtggcagccacagctggtagcttttaccaagactttgaaataacatggggtggtgagcgtgccaaaatctatgaaaatggaaatcttctcaccctctccctagacagagcctctggctctggctttcgttccaaaaaagaatacttgttcggaaaaattgacatgcagctcaagctcgtgcctggtaactctgctggaacagtcactgcctattatttatcttctctggggcctactcatgacgaaatagacttcgagtttttgggtaacttgagtggtgatccttatactctccacacgaacgtattcagccaagggaaagggaacagagaacaacagtttcatctatggttcgaccccaccaaggacttccacacatactccgtccaatggaatccttgcagcatcata

SEQ ID NO: 205848 - DNA, 401 bp, Glycine max
aaaccaaaacagcaaacaagttcaggggagaaattgaacataacagacatgacatacaagaacccttgaaaaaagacacgcttaaaacaagaacccttggaaaaaaaacacgcttaaaaaccaccgcgaaggcgaaggacgagatgcaagggggattccttctgaatattggaatctgccaagggacgaccatcttccagttgcttcccagcaaaaataagcctctggtgatcagggggaatgccctccttggcctgaatctttgccttcacattatcaatgggatcagaactttcaacctccaaagttatggtttttccagtcaaagtcttaacaaagatttgcgtgccaccacgaagccgcaacaccaagggcaggggagattccttctggatgttata

SEQ ID NO: 205849 - DNA, 559 bp, Glycine max
  unsure (1)..(559): unsure at all n locations
cattagcaaaagcaagaagaactagtctaagcagaaatggcctcttcagtgatggcatctgtggccctcaaacctgcccctttcactgttgagaagtcctcagttagaggccttccctccctctcaaggaactcctcttcattcagagttgtggccagtggtggcaagaagatcaagactgacaagccttatggaattaatggtggcatggctttgagggaaggagttgatgcatctggcaggaaaggaaagggaaagggcgtttaccagtttgtagacaaatacggtgctaatgtcgatggttacagtcctatctacgacaccaaggactggtctccaaccggtgatgtctacgctggcggtacgactggcttggctatctgggctgtgactctacttggtcttcttgctggtggtgcacttcttgtctacaacacaagtgctttggcgcaataaactctgcanatcgatgtttaagctcaaacttagtccatgttactatctaaaaatgaagaattattcatgaagtactttgtggatacgtgttccttctgttcta

SEQ ID NO: 205850 - DNA, 553 bp, Glycine max
atacaaactgttctacacatgtatcttcaaaatcattgtataaaattcagaccctttacttatttataaacataagcctgatattgaccaccaaagtaaactagtttgttttgtttatcttgtcaaaagagagcttccttctttgataagaacaaacacactgccaccatcgccccttgagatacgcaattcttcgtcgaggtatgtggtgagtaaccaggactgagcattgctgttggaaattgggatcttcaagggaggcctacttgaaattgttttcactaccgatgtggctgtgtcttggacagaggtaaggatgcctttgaaaagtgtaaggtcaatcttttgacccagaaattccacattttccggtatctctaatgagtccgtaagctgtggagtgccaattatgccttcctcaaactttatctgcacacgttttggacttcgaacatcaaatttggcattagtactaattgaggtggtggccaaaggaccagcgaactgaacagagttttggacggtaaaattcagcgagtcaataatctgggat

SEQ ID NO: 205851 - DNA, 540 bp, Glycine max
gaacagtcagatgatgaggacattgagggagagacatctatgaatgacaacacagaccctgctgatgtaaaacgagtaaggaggatgctatccaatagggagtcagcccgtcgctctagaagaagaaagcaggctcatttaactgacctagaaacacaggtttctcaattaagaggtgaaaattctaccttgttaaagcgccttactgatgttagtcagaaatacagcgactctgctgttgacaacagagttttaaaagctgatgttgaaacattaagagcaaaggtgaagatggctgaagagaccgtcaaaagaattactgggttgaacccaatgcctcatgccatgtctgatatatcatcattgggcctgccatcatttgatggaagaagcccttcagacacttcagctgatgcatctgttcctgtgcaagatgatccacatcatcacttctatcaacccacattgaataatcctattcccagtcatgatccgatagtcaacaatggtttggggggcatttcttcaattgaaaatgtg

SEQ ID NO: 205852 - DNA, 543 bp, Glycine max
gaacatcaaatacacatgacaagttgaagagtaacattattattgatttgtgtgagttaattatgagctcacatgtattccaatacgatggaaaatatcataacatgaatctatataaattcatgatgctattatttattcttaatatgtatggtatataactcatcatcttaaatggtagccatctcgctgctacaaatgtaacaacctagtagggtctttggccaacatagttgccaggaggagcatagttgcaagtgatgaaagtgcctccattatcacatgctactttggcacatccaagacgcacagagtctctccaaacaacctgagtgtaatgcagacactctccaccaacacaggaattagaattgtagtcatagttagacttctcatcaacccacaatttcactgcatctgtgccacttaggtcaccagtgctcatagcaagattctccccgtattggccaccaccaccagagtggatcagttgacaatcacctttacgttgattagcatagttctgtgcaaaagcagcaaccg

SEQ ID NO: 205853 - DNA, 503 bp, Glycine max
ttccttttcttgaaacttccctctttccttaaaggattccctcctaatttggtgggattatcccaagtttcagctgctaccactcatcagcattgccatttcctgtttcactcaccacatggaaaagcttattcgcatgttccctttgcttcttcttcttcttctgttccccacttttgccttcgctggccatgactatggccaagctctgagcaagagccttctcttctttgaagcccagagatctggctaccttccccacaaccagagagtcacatggagagcacattctggtttgcaagatggcaaagcaagcggggtggatctagttggagggtactatgatgcaggggacaatgtgaagttcgggttacccatggcgtttaccgttacgatgatgtcgtggagcatcattgaatacggcaaacaaatggctgctagtggtgaacttggtcacgccatggaagccgttaagtggggtaccgactactttatcaaagctc

SEQ ID NO: 205854 - DNA, 522 bp, Glycine max
gacacagtgaagttggattcatctatattgcatcatccctcaaaaatagtactagtaaaactggcaatgaagttgttcatgaacagtataaaaatcgtcaaagaaaaattacagggtcgtcatatatctacacaacgcaggagggttgatagacttgctgcagcataaagtaggagatgatatttgtgcaagtgaacagaaattaatagacttcgacattccattgctctgctttcttcaattgcctcttgtactcagtccaatcaatgccatctttggcagccaatgacaccataatgtcatcaattcccttttccattccttttagtccacacatgtacacaaaagtgttatccttcttcagtaattcccaaagctcttctgcgtattgagccattcgggtttggatgtacatcttctcccctttctcgtttgtttgctctcgactcacagcgaagtcaagcctgaagttttcaggacttttctcttgcatcttctcaaactcctccttgtaaagcaatg

SEQ ID NO: 205855 - DNA, 473 bp, Glycine max
aaaaggaatccatatgcgctccattataatccttattggccacagtataaaaaagcccatccaccataaatagaaaggcgcccatcatcataatcattttgatgacaaaagtgtaaaatagccctccaaaagatctattgtacggattcgacgaccattacaaaaaaataaactggtaaatatcggagactctcaagtccatataactgaatttttattgggccccctggtttcctttgggcaagatattttctgtagaactgtggtaccttcgaggggggttttatcaagaaagaacaggcctagctcttttttcaacattaaactgtgcgtccacaaggcctgtaacgccagcagtaattgtttgaccctctttgacagggccaacacccgggggagtaccagttagtatgacatcccctttaaacaatgtgatgacagagccaaggtagctaattagaaatgggatctta

SEQ ID NO: 205856 - DNA, 638 bp, Glycine max
aaaatcaattttctgtcttctttgcgtcttcttcctctatcaatcgttttgcatgggtcgtaccaagcaaaccgctcgcaaatccaccggtggaaaggctcctaggaagcaactcgccaccaaggctgcaaggaattctgcaccgacaaccggtggagtcaagaagcctcatcgctatcgccctggaactgttgctcttcgtgagatccgaaaataccaaaagagcacagagcttctgatccgcaagctccccttccagcgtcttgttcgtgaaattgcgcaagacttcaagaccgatttgaggttccagagtcacgctgttcttgcgcttcatgaagctgcggaggcttacttggtgggtttgtttgaggacaccaacttgtgtgcgattcacgccaagagggtgaccattattgccaaaggacatttaacttgcactccgcattcgtggagaacgtgcttaggcttattaatagaagtaatacgtagctgctgctgcttttattcttttgcaatacatttttgtttaaggtatttttatgtaagttccgttggctgtttgggtgtatagaaatagattatcattcacactttgctctgtatgatctaactgaattttgataatgattacctctggc

SEQ ID NO: 205857 - DNA, 466 bp, Glycine max
aaaagacaacctccaacggctaaaagaaaaagaacaccacattgataaattgacttaactagttaaattatctttcccagtcaaaccataggttcttaacaaaattaagccacataacctatccagccttcaaataaacatcaaaatgatatcgcaaattgctagctcaacggcgactgcacggtagcaaaacccatgaaagttgatacattctctaagcaaccagagtgctagcagttgttgattcgtacttccagactggtgggagcttcttagtcttcttgtaatagcgagcaagtcggtggattctgctctcaacaagaatcaacctgaacttggagtccttgtccttcctgttcctctcaagatgcttcctaattgaaactgccttcttaatcaaatggtacaggtcctctggaatttcaggcgcaagtccgtgagctttgaggatgcgaaggattttgct

SEQ ID NO: 205858 - DNA, 581 bp, Glycine max
gcagaaagcaagctcatcctagagttttaaaaatggcagcagcctcctccatggctctctcttccccatccttggctggcaaggccgtgaagctgggcccatcagcccccgaagtcgggagggtcagcatgaggaagaccgtcaccaagcaggcctcctccggaagcccatggtacggcccagaccgcgtcaagtacttgggcccattctctggcgagcccccgtcctacctcactggcgagttcccaggtgactacggctgggacactgctgggctttcggccgacccagaaaccttcgccagaaaccgtgagctcgaagtgatccactccaggtgggccatgctcggggccttgggctgcgtcttccccgaactgttgtcccgcaacggggtcaagtttggagaagctgcgtggctcaaggccgggtcccagatcttcagcgagggtgggctggactacttgggcaacccaagccttgtccacgcccagagcattctcgccatctgggccacccaagttatcctaatgggtgctgatgacggttatcgaattgctggtgggcccctcgtgagtcactga

SEQ ID NO: 205859 - DNA, 547 bp, Glycine max
  unsure (1)..(547): unsure at all n locations
ccttatcgtatacccataaaaagtacgttgaatctttttggaaacatatcctataatcaaaatccaatttgcattaattatataagggaacttgaaacataccccggggaaatgattcatgggtaagttattcatttagtaattaaatcttcgtgaatcccccctttttttaattccagttaaatcccttatcacattcacaaatatacataaagggggaagttctattagaaacttgcgttttctctttctttttttttttaccaaaaatggatcgaagtttctcatataattcgggtgttagaaagattaccatatataacataaaacttctccgccaattctttctaatcgagcctctcgatctgtcattatacctctagaagttgaaagaattacaatccccatgccccctaaaattcgagggattcgttgataattagaatatattcgtagaccgggtgtactgatccgttttaaatttaaaaaacttttatatgatccctttctatttcttctatanccgagagttaaaactaaaaaaata

SEQ ID NO: 205860 - DNA, 560 bp, Glycine max
cttcctgtcctgaatcagaattaactttgggaacgataaagcatgctgacgttgatttcattacagtgcttctacaagaccatataggtggcctccaagttcttcatcaggacacgtggatcgatgtaacccctgtgcctggggctctagttgttaacattggtgattttctacagctaatctcaaatgacaaattcaagagtgctcaacacagagtactggccaaaactgttggtccaagagtctctattgcatgcttttttagtccagcattccatccatcttcaaggacttatgctcccattaaggaacttttatctgaagacaatcctgcaaaatacagagaattttcaattgcagaatttacagctcactacagaacaaaatgcatgaagggtacttctcctctactacatttcaagatttgacaagtacaatgttgtaaaagtgactatgtccttgatccattgctcttcgttaacggagctgaatgtagcaaattttggaacttccactgtgtcatttcttgagggagaattaatgataaacttggaagagat

SEQ ID NO: 205861 - DNA, 548 bp, Glycine max
  unsure (1)..(548): unsure at all n locations
aatcaagatttgcataaccattaaaatagcttaaatataacaaaactttcactagacaatcaaatttcaaccacgcatgagcaatccaaacgagtcttaattatttcaaccaaaaggggggggctcaaactccaggattataagctgatggcatgaaacaacaaaaatgaaaattcttgatcgcaagactatgggttctaagtatcaaggtcctaaatttgggaaaatatcaataccaatatttctcatccataattattcaaatgacaaggcaatcggcatgattatcccaggaaattgtcgtcatcatttttagccgccgccagatccatatttctttccaaacaaaatgagctgcagcttgtcataaccagcaagcacaccagcacctgcaacagcacgcaatatgttcgcaccagcacctttgaagagtgacttggcaccctcatttgcgacgattgtttggaatgcatgcaaagagctcttgtacttcacagcttctncagaagtcatcatcattcttcttncgacagtgtcaatggggatag

SEQ ID NO: 205862 - DNA, 485 bp, Glycine max
ctttattctctcacacaaaattttggacaagaagcttggcaacacgtctcatgatcctgaagtgagaaaggggccatggacaatggaagaagacttaatcttgatcacctatattgccaatcacggggaaggggtttggaactctttggccaaggctgctggacttaaacgtaccggaaagagttgccggctccggtggctaaactacctccgtcctgatgttagaagagggaatattacacccgaggaacagcttttgatcatggaacttcatgcaaagtggggaaacaggtggtccaaaattgccaagcatctacccggaaggactgataatgagattaagaactactggaggacaaggatccagaagcacctcaagcaagctttcagcagcttccagcaacagagtagtaattctgagataatttatcatccccaagcttgcactagccaagtgtccaccatggcgcaacccatagaaacct

SEQ ID NO: 205863 - DNA, 458 bp, Glycine max
aaaaaaaaaaaaaaaaaaaaaataaaaaaaaaaaaaaaaaaaaaaaaaaaaaaaaaaaaaaaaaaaaaaatataaaaaaaaaaaaaaacaaaaaaaaaaaaaataaagggggcggccccccctttttggccttccccccccggaatttaatttcggcccggtccctgggggcctcccccttttcccttttgggggctctttttaagctgggcgtaatcagggccttagttgtttccgggggaaaattgttttccgttcaaaattccccacaacattcgacccggaaacttaaagtgtaaaccccgggggccctatgggggggcctcccccccttttattgggttggcctcccttccccttttccatacggaaaacctgttggcccacctgttttaattaaatccccccacccccgggggggggcgtttttttttttggccccccgggggttttttttt

SEQ ID NO: 205864 - DNA, 436 bp, Glycine max
gtaggaagaacccaaggccttttttgaaaaaagagcaaaccagtttttttttaaacccaaacaaacaaaaggggtagggtgtaatcaaccccccccctttttgtaaaaaatttgcccgttcccggatttaaagccgccttgaaaaaaaaaaaaaccttgaaccccccttgggggtcgttttttttggttgggccccccacctcaaaggggggggggggtagggccccccttccgggtataatttcccccatcaaagggaaaaccaaaccccattgggcccatcttcccccaaaaagcccggttggtttcgggaatcccaaaaaagggcccggaccaagaccaaaaacttccctgaagcctttggctggggggaaaacaccccccgggggggggtcggcatcaaaaaatttttcacggcacctaaacccccaatggg

SEQ ID NO: 205865 - DNA, 549 bp, Glycine max
tgctcctgatcctgttattgacacctgcaacggattctactgtgaaaacttcaagcccaacaagaacaccaaacccaaaatgtggactgagaattggactggctggtacactgattttggcggtgcagtccctcgtagaccagcagaagacttggcgttctcagttgcaagattcatacagaatggtggttcattcgttaactactatatgtaccatggaggaacgaactttggccggacatcaggtggcctcttcattgccactagctatgactatgatgcgccgcttgatgaatacggacttgaaaatgaaccaaagtatgagcatttgagagctttgcataaagcaataaaacaaagtgaacctgctttagtggctacagatcccaaagtgcaatcgcttggatataaccttgaggcccacgtgttctcggccccaggtgcttgtgctgcattcattgctaattatgacaccaaatcttatgcaaaagctaaatttggagatgggcaatatgatctaccgccttggtctatcagtattcttcctga

SEQ ID NO: 205866 - DNA, 496 bp, Glycine max
atggcaacatactgataggatagaaagatatatatagtgtttaaaggttcttaggtattacaactttatttccatcaccacaaaaatagctagttgatgtaattggtagcaaacttgtgtgtttctgttctctatcaactttagtccttgttgaccttttctagacaacttgggtgaaggtcatagtcacagacatcacaagagaatgtccaaaacttgccttgctttttacatgaatcacatacatatgctttggccatatccaatttcagtacatgttcatgcttcacatcctcaacctgctgaggcaaagcctctccttcctttctaagagctgcttcgaggtctcttatccgtgattcggtgaacgggaaagcttctgcaccgtatgaggagaccattaacttcccattcacactaatgactttgccatctggtccaatgagaaccaaagcaggaatgccctttacatcaaagattcttcgaaggtcatgcc

SEQ ID NO: 205867 - DNA, 522 bp, Glycine max
ggcctagctgttttctcaatgagaaagccttcatctctgcaaagcgcacttttgcgctttggggttcccttgttgcttgttatcaccttctgttatgctacttctactgctgcagcaacaactcaagtttcagggaatgaagagctgccaaagacaaacctaaatgggcatgatgaagaagcaaaattcggattttttcatcataaaccaatattcaagaaacatattccaattccagtatataaacctgtaccaaagccatttccagtgtataaacctataccaaagccagttccagttccagtgtacaagcctattccaaagccagtgtataagcctattccaaagccagttccagtgtacaagcctataccaaagccagttccagttccagtgtataagcctattccaaagccagtgtacaagcctattccgaagccagtgtataagcctattccaaagccagttccagtgtacaagcctataccaaagccagttccagttccagtgtataagcctatt

SEQ ID NO: 205868 - DNA, 450 bp, Glycine max
cttcgttccttccccaacccaatcttcgccttcgcccacaacaactcctgtcttcaggatcgctgccaacgttactttccatttttacccttcatcctcgagaaaaaaatggcgaacgcagcatctggtctggccgtccatgatgagtgcaagctaaagtttctggagctcaaggcgaagaggacgtaccggtatatcgtttttaagattgaggagaaatcgtagcaagttattgtggagaagctgggtgaccctgcaaatggctatgatgaattcgctgccagtctttctgctgatgagtgtcgatatgctgcttatgattttgattttgtcactgaagagaattgccaaaagagcagaatcttcttcattgcttggtcccctgatacatctagggttaggagcaagatgatttatgccagctccaaagattgattcaagagggagctt

SEQ ID NO: 205869 - DNA, 480 bp, Glycine max
ggaagcagaaaccaaacacaactcaatcacgaaaatgtcgaatttgccccaatcgctgtcgatgggcgcggccttcggcggcggtggcgctccaacgccgacttacagtggcggcgccggagcacagggctccggcgctggcaaggatcggaagatggcgttcgcggagcaggtcgtgctcgaactcaccaaccctgaactccgtgaaaacgcgcttctcgaactctgcaagaagagggagctatttcaagatcttgctccgctgctatggaattcttttggtactatcgctgcacttgtgcaggaaataggttcaatataccctgttctttcaccaccaaatcttactcctgcacaatcgaaccgagtatgcaatgctcttgctcttcttcagtgtgtagcatctcaccctgatacaaggatgctattcctcaatgctcatatacctctatatctgtatccctttcttaaaacaacaag

SEQ ID NO: 205870 - DNA, 586 bp, Glycine max
  unsure (1)..(586): unsure at all n locations
cggggcgtgtgtgatttattcccgggccgactgagctcagctagtccgggcgggcccgcccctttnntttttgtgtttatattttctatttttatttatctatatgttctctttcattatgttttatcttattattggtgtattttagcgttgtgtttatttggagttatacttagcgcacataaacatattatcgcgtttatttgttctgtggactataaatggcatagaaccctataggcggtgggctccacagaaaagaaagcgctatgtgcattttatttttatggggatgaggcttagatagaaacaatacatcttaactatatgtggatgctttgccaagtgattctgccatcatactggcaatacagtgagatgtagactgaatggttaccatggggttgacacccactgcactagggggaacactcccatcacacacatactagccttctgcttgcgaagactcaccattctcattgggtgcaccttcttcttcagaggcacccattctacatcttgacatctgatgtgcagtggttaacactgtacacactttattccttgaccttggacccccaac

SEQ ID NO: 205871 - DNA, 489 bp, Glycine max
agcaagaaaagagggtttttggctgcggttaaggtttttgaggagctgatttccaagggctatgaatcgggtcaagtcacctatgcttcggttataaatgcatattggcgtctcgggcaatatagcaaagcagaagaggtgtttttagagatggagcaaaaggggtttgataaatgtgtttatgcttactctaccatgattgtgatgtatggaagaacggagagggtgagaagcgcgatgaagttggtggccaagatgaaagaaagagggcgcaaaccaaatgtgtggatctataactccttgatagacatgcatgggagggacaagaatttgaagcagcttgagaagctgtggaaagaaatgaagagaagaagggtagcaccggataaggtgagttatactagcatcattggtgcttatagtaaagcaggtgaggtcgcaacctgggtgaggtttttcaatgagtataggatgaatggagggcttatt

SEQ ID NO: 205872 - DNA, 417 bp, Glycine max
agaaattgtattaggaatgattgattggtgtacagtatcttcagttgtcgtgtgacaacacgagaaaacaaatgttgcacccccatgactgtcgtattccatccatctatgggttccgttgacgtttatttttggaccgtggtgcttgttcaattatgaatgttagtagtagttatacataaaaaaaaaaaaaaaaataaaaaataaaaaaaaaaaaaaaaaaaaaaaaaaaaaaataaaaaaaaaaaaaaaaaaaaaaaaaaaaatacatataaaataaaaaaaaaaaaaagggggggcccccacatagggacctctttacccggggaattaatccgggaccggtccctgggggtttaccatttttccctttagagggtctttttaaagttggggttaacttgggccaaacttttt

SEQ ID NO: 205873 - DNA, 530 bp, Glycine max
gatgttaccttgtcatttcatcatatatatgaacatagtaaaatcctttctttttctttccattattcaacaaacctatatacatatctggaaggttatttccgtctataggggcgttaatacaatagataagagatgaactaccccaagaagtttggggcctggtttattcagcaaatatctgctcaagcatacagagaatccccacataagttctaatcacatattactgctgagtttttccatatagcttgatcagatatagctactcaactctactttcttcctactaaatcagttataagtcattcattccctcttgacatcagactcttcagtccttgcaaatctcccacggattcttggctgactgtcagcaagagccttcctgcaagcatacttgattttcctcccaaaattcctctttgtcctcttattcctgtatcttgagagcttttgaaagcgttcctcactggtgcaattgctgataagcaagggcctctcacggggtgattggacgatgttcatgt

SEQ ID NO: 205874 - DNA, 508 bp, Glycine max
aaataacacaacacattaacgttcttttatttctctgtctagagaagaatctagcaggccttgctcgtcacaaaatcaaaggttgcaactgagaactcactccttcgaatcaaaatcaaaaaatgtcggtgactttgcacacaaacctaggcgacatcaagtgtgaaatcttttgcgacgaggtccctaaaacctccgagaattttttagcgctatgtgcaagtggttactatgatgggactatatttcaccgcaacattaagggttttatgattcacggtggagatccaactggaactggcaaagggggaaccagtatatggggcaagaaatttaacgatgagataagagaatctctgaagcacaatgcaagaggaatattagcaatggccaatagtggtccaaatactaatggaagccaatttttcttgacttattcaaagcagtctcatttaaatgggctatacaccgcgttctgcaaagtaattcatggatttgaagttcttga

SEQ ID NO: 205875 - DNA, 343 bp, Glycine max
atacatggacataaaccgcaaaatatacatgtactatgctatcaaaaatctaagctgatggaaatgctgcataggcatcttgggctaatcaatcaaactggctggactgcggcactgaattgggcaccagcatacacagctactaaaccaattacctactaacttctcaggagctgcatggacttggcaagcctttcagatcggctgggaactccagtcacggtccaaccagctgcatattcaactggacggcctaccttgagcgcgtcctacgagatagcactactggggatagccatgacaccaaagccagcttggggaaacattctcacagctccgatac

SEQ ID NO: 205876 - DNA, 531 bp, Glycine max
  unsure (1)..(531): unsure at all n locations
aaataacacaacacaaaacgatcttttatttctctgtctagagaagaatctagcaagccttgctcgtcacaaaatcaaaggttgcaactgagaactcactccttcgaatcaaaatcaaaaaatgtcggtgactctgcacacaaacctaggcgacatcaagtgtgaaatcttttgcgacgaggtccctaaaacctccgagaattttttagcgctatgtgcaagtggttactatgatgggactatatttcaccgcaacattaagggttttatgattcaaggtggagatccaactggaactggcaaagggggaaccagtttatggggcaagaaatttaacgatgagataagagaatctctgaagcacaatgcaagaggaatattagcaatggccaatagtggtccaaatactaatggaagccaanttttcttgacttatgcaaagcagcctcatttaaatgggctatacaccgtgtttggcaagtaattcatggatttgaagttcttgatctcatggagaagacacaaacaggg

SEQ ID NO: 205877 - DNA, 463 bp, Glycine max
ttttttttttttttttttttttttttttttttttttttttttttttttttttttttttttttttttttttttttttaaaaaaaaaaaccccccattttcttttttttttttccgggttccaaaacccccaaaaggaaaaatggggggaaaaaatttcccgccccccttttttggtcccaaaagggaattttttttgtccctggcctttgcggggggccgccaattttttaaatggtgaaaatgccccctttttttcccctttaatgactttaaaagcccccccaaagttccccaaggggaaatttgcttgaaattcttgaaaagacaaaaagtccaggggtttttcctccctttttttggccccaaaaaatctttttgggttttttttttaccaaggggtgattagcttgcccaagcttttgcaatcccggggagggtttttgcccccctttttttaggggct

SEQ ID NO: 205878 - DNA, 590 bp, Glycine max
  unsure (1)..(590): unsure at all n locations
agaagaacaagtagttgagaactaagaaggagaagcaaatggcttcctcaatgatctcttccccagctgttaccactgtcaaccgtgccggtgccggcatggttgctccattcactggcctcaagtccatggctggcttccccaccaggaagaccaacaatgacattacctccattgctagcaacggtggaagagtgcaatgcatgcaggtgtggccaccagttggcaagaagaagtttgagactctttcctacctgccagaccttgatgatgcacaattggcaaaggaagtagaataccttcttaggaagggatggattccttgcttggaattcgagttggagcacggtttcgtgtaccgtgagcacaacaggtcaccaggatactacgatggacgctactggaccatgtggaagctgcctatgtttggttgcactgatgcttctcaagtgttgaaggagcttcaagaggctaagactgcatcnccaacggcttcatccgtatcatcggattcgacaacgttcgccaagtgcagtgcatcagcttcatcgcctacaagccccatgcttttaagtgtgaaaaatatgcaa

SEQ ID NO: 205879 - DNA, 473 bp, Glycine max
aaactaaaaatacttttattttttaaataattatgctgttcaaatgttttctcatcgtacattataagctatttctcaagtcaccactatattcctaccatctgaaaggagatataacggggaaaggaaaattcaatccagtaaacacgtaatgagctgtttttttcttacatgcgagactttgcctgctgctccaaagaggcactcagaggaattcctttggcagctcttgcagccaagtaggcacaaggcttgaagaattccccatacaactctgaccatttctccaatcttgaatatatgtacttggatccaagagaatcagcccagaatatgatgcctcccctgtaagggggaaaacccatgcccatgatagcagaaatatcaagatctgctgctttgactgcgataccttcatcaaggacccgacaagcctcattcaccacaggaaagaatatcatctctatgatatc

SEQ ID NO: 205880 - DNA, 491 bp, Glycine max
  unsure (1)..(491): unsure at all n locations
gtttcaagaaggctaatattgggaaggatttggccctgcatgcatgcgccggggagcctcccctcgcattcctcgactctcttcttcttggagagtgggaagatcgcatgcagagaggactttttcgctatgatgttaccgcctgtgaaaccaaggtgattcctggtgaatatggtttcgttgcccagcttaacgagggtcgtcacctcaagaagaggccaactgagttccgagttgataaggtccttcaaccctttgatgaaaacaaattcaactttaccaaagtcgggcaagaagaggtcctcttccaatttgaagctagcgaggatggacaagtccagttctttccaaatgctccagttgatgttgacaattctcccagctttgttgccatcaatgtcagtcctattgagtatgggcatgttttgctgattccgcgcatatttgagtgtttgcctcanaggattgaccgtgagagctctctccttgca

SEQ ID NO: 205881 - DNA, 559 bp, Glycine max
ggtattgctcaggtcaatagcgtcactggcagcaaaatccttcgcatcctcaaagctcacggacttgcgcctgaaattccagaggacctgtaccatttgattaagaaggcagtttcaattaggaagcatcttgagaggaacaggaaggacaaggactccaagttcaggttgattcttgttgagagcagaatccaccgacttgctcgctattacaagaagactaagaagctcccaccagtctggaagtacgaatcaacaactgctagcactctggttgcttagagaatgtatcaactttcatgggttttgctaccgtgcagtcgccgttgagctagcaatttgcgatatcattttgatgtttatttgaaggctggataggttatgtggcttaattttgttaagaacctatggtttgactgggaaagataatttaactagttaagtcaatttatcaatgtggtgttctttttttttagccggtggaggttgtcttttaaagagatgactatgtgttttggctttattttcaagtaatatatatgcttagaagatttgaagg

SEQ ID NO: 205882 - DNA, 580 bp, Glycine max
gttgtgagatataaattgtttgacattgaatctaatttgcaaaatcaattgttctatggcgtaattgagttctatcaattacatctgaatcaaaaaaatgaaaattagggtacaaaattaacagaaggaaaatgatcccataacatgggcagatgagaaatcctgcttactaaatgtaaatctgatgccgcccctaaaccttaatgatacaattctgctacaaaaccttatctttccttctcccctaactgattttttcttcttttcttttcctgttcttcgggcatatacagatacatcgatgagtaaaatatcccagtgttggtggactttatactgtgtcaaaaaacacatccttggcaagttcaatatatcacaacacgaagtaggcctggctgagtttccgtgaagtcaatgccctcttcaagatgaaaacgctgtgcagctattggaagtcttgcaggagtgcgagaacccctggtatgatgacctgtgcccacaagaatataaacctgcagacgctgctcggcagctatggcagtgcttttcagcacactcaactcatgtttcagcacatgaa

SEQ ID NO: 205883 - DNA, 528 bp, Glycine max
agtttgccaattttacttgcaaccaagccctcattgaagctgtggaaaggtctgacagaattcatgttatcgatttcgatattgggtttggagtgcagtggtcatcttttatgcaagagattgccttgagaagtagtggtgcaccttcactcaaagtcactgccattgtgtcaccctccacttgtgatgaggttgagctcaatttcactagagagaatttgattcaatacgcgaaagacatcaatgtgtcatttgaattcaatgttttgagcattgaatccttgaactctccttcctgtccactgcttggtaaattctttgataatgaggcaattgtggtgaatatgccagtctcaagtttcacaaactatccatcattgttcccttccgttcttcactttgtgaagcaactcaggccaaaagttgtggtcactttggacaagaattgtgatcaaatggatgtaccacttcctaccaacgtagtccatgttctccaatgttattcggccctgcttgaatcgttggatg

SEQ ID NO: 205884 - DNA, 474 bp, Glycine max
gcaggatataaatgataactgtcttataaatccctctttgcagtaattaattaaactggggatgcacccctagttctaatttgccaggagctaatggctttacaatgattagtatccataccatctccactaaaaccaagtgtatgtttggattaccgttccaatccttccaaagttattaactcaaaagtaacaaaagcatgcttctccctacttactttgaatatagattcaccacctgcaaacggtaatccaaacattatgagagcttcattttagaactgatgcagaattcccgctgacaatgtggtttgagagcttaccatcagatccccaaaatgctgcacactttaaatcatcctgaaccattaatctggagaactcctcatggttataactcattatgctctttccacccagttctttgggcagattttcctcatcagaataagacttcatgacctgcacactatc

SEQ ID NO: 205885 - DNA, 443 bp, Glycine max
aaaggaaaaggcaccaaattcaatttatgtggacacttaagcggaaaacgcttgaggacgacagaccaatatgaaaaatataggaaaatcggggggaacttggaatcctctttttgcaccttttactttcgagaattataagaatgttacacgcgggtccgatcacatcttctatctctcggatcagcacaaccttgaggaacagaaatattcacttgccaagtttgctttggctccaagtcaagattgggagaaagttcccctgccaatagcatcctcgtttgcattttcaagtgcagacaagttcaagttctcgccagcccattggactctatggacattctctagttggtggacaaggatgttaccatacgtcaagagcttctccatagtcatcgggggctgctcaaaggacggaggtccatctttcgagttcacaagct

SEQ ID NO: 205886 - DNA, 339 bp, Glycine max
  unsure (1)..(339): unsure at all n locations
gtcttgaaatcaagtatcaatataatggaccaaaggcttccattgttgggaagatatgtgaattgcaatgcaaaggcttgggtccaaccggagtgcaaagagatgcaaggaaaaatgggataacatcaacaatttctttaagaaagttagggagagtagcaaagaaaggcgtgaagatagcaagacatgtncctatttccacgagcttgaagctctatacaaagaaaagggaaaatctcnnancctctttggcatgtttcagaatatgacgccaaatgatacgattatgatgtagtcatttgatggtgcatccggagcaacaatagatgtctccacctt

SEQ ID NO: 205887 - DNA, 355 bp, Glycine max
tttttttttttttttttttttttttttttttttttttttttttttttttttttttttttttttttttttttttttttttttttttaaccccccgcccctaaaattttgggttccggggcccaaaatttttttttttttccaacctgggcggggggggggaaaaaaaaccgcaaaaacttttattttgcctccaacaaatgttccaaaaaaaattttttgtaacccccccctaaagcaggggggaaaaacaaataaaaaaaaagggccccccctctaaaaagggggcccaaaaacaaaaaaaaaggggcccgaaaaaagatttttgtttttttccccgcccaaatgttttggaact

SEQ ID NO: 205888 - DNA, 550 bp, Glycine max
gggtccgtgtcgtaaacccttccttgcatttctctcggttgttctatttctgggtctctatgaggcagcagcagaacagactcagactcacaagagtacttacattgtacacgtggcgaaatcggagatgcccgagagcttcgagcaccacgctgcgtggtatgagtcgtcactgaagaccgtgtctgactcggcggagatgatttacacctacgacaacgccattcacggctacgcgacgagattaaccgctgaggaagcgcgtttgctccagcgccaaacggggattctggctgttttgccggagacgaggtacgagcttttcacgacgcgaacgcctttgcttctcggacttgacaagagcgccgacttgttccccgagtcgagttcgggaagtgacgtcatcgtcggagtcctcgacaccggcgtctggccggagagcaagagcttcgacgacaccggactcggacccgatccgagcacgtggaaaggcgcgtgcgagacgggaacgaatttcaccgcgtcgaactgcaacagaaagttgatcgga

SEQ ID NO: 205889 - DNA, 385 bp, Glycine max
ggtcggcgggggtggggggaagggggaaaacaagaaagacaaacagacaagcagaaacaccagaagccgaggggcacgacgcccgagcgccacacacggggggcaggacgaagaggcccacgggggggggggggggaaaaaaggacgggaggggcggggggggggggggggggggaacgcggggggagggggcacggggggggggggaccaagcgcgggggggcgcccgggagcgggaacgaccgggggcccgcaggggggggggaaaaagacacccgggggggcaagggggggggggccgcaacaggggcggccggcggggagggcaccccggggggcgcagggacggaggcccgggggcaaccggggggggggcaccccgggg

SEQ ID NO: 205890 - DNA, 582 bp, Glycine max
ctccaagaaccccgccgatgccgtcttcgacttcgccaacgacgactccttccccgcctccgccgacgacgacgcctccttccgcctcgtcgacggaaagcccccgccgcgccccaaattcggccccaagtggcgcttccagcagcagcgccagctccctcagcggcgcgacgaggaagtcgaggccaagaagcgcgagcaggagaaggaacgagcccgcagagaccgtctctaccacatgaaccgctcaaaccctaaccaacagcgccgcgaagccgccgtcttcaaatcctccgtggatatccaacccgagtggaacatgcacgaccagatccccttcagcaccttctccaagctctccttcaccgttcccgaacccgaagacctcctcctctgcggcgccctcgagtattacgaccgcacctacgatcggatcactcccaaaaacgaacgccgcctcgaacgcttcaagaatcggaacttcttcaaagtcaccaccaccgacgaccccgtcattcgcagactcgtcaacgaggaccaagccaccgttttcgccaccgacacgattctctccactctcat

SEQ ID NO: 205891 - DNA, 513 bp, Glycine max
ctttgtgggtcatactgattataaatacctgaggtaccaagtaattgatacgccagggattttggacaggccttttgaagatcgtaatattattgagatgtgcagtatcactgctctagcacatttgagagctgcaatcttgtttttcttggacgtctctggatcttgtggttacagtattgctcagcaggcagcgctgtttcacagcattaagtctttgtttatgaacaagccgttgattatagtctgcaacaagactgacttgcagccactggaggggatatcagaggaagacatgaagttggtcaatgagatgaaagctgaagccttgaagactctagttggtcaaggaggtgagcctacagacaataacagtgtattgttgaccatgagcactttgacagaagaaggggtaattgctgtaaaaaatgcagcatgtgagaggttattggatcagagggtggagataaagatgaagtcaaagaacattaacgactgcttgataggtttatg

SEQ ID NO: 205892 - DNA, 496 bp, Glycine max
gtgtacaatcaccgggtttgactccttctctttgcaacctaatgctggtgctgctggagaatatgctggactgatggttattcgtgcatatcatttggcaagaggagaccaccatcgcaatgtctgcattatacccgtctcagcacatggtacaaatcctgccagtgctgctatgtgtgcaatgaaaattgtatctgttggaactgatgccaagggaaacatcaatattgaagagttgaggaaggctgctgaaacacataaggacaacctagctgctcttatggtaacatatccttcaacccatggtgtttatgaagaaggtattgatgagatatgcaaggttattcatgataacggaggtcaagtatatatggatggtgctaacatgaatgcacaggtgggacttacaagcccaagttggattggagcagatgtttgccatctgaatctccataagacattttgcattcctcatggaagaagtggccctggcatg

SEQ ID NO: 205893 - DNA, 475 bp, Glycine max
gaagaacaagcaaatattgctttattaagcattgctagaaagaaatatcttatggagatgtctttttgaacaccatatgaccagaatcatccacatcaaacaggcgtccaacaaattcattccaattttgtgctcgttttttgtgagacaaggaggaacctaggacacttgatcttccagaatcctccccaacatcaatttgattaaatgttccatataatgaaggtgaatatgcttgtggaatatccaaagcaactgccctcttaagggctgcatggtactcttcactgtgttctcgggctatagattcatgcctctccatcttctgctcttctgggatctccatatgctgctcatctttatctcgcattaaatcgagagcccgtcgggattctctctctatccaaatgatggcatggtcagaagttgcattgcatgaaagaactaaatgctcaaacctcccatcacaggtact

SEQ ID NO: 205894 - DNA, 524 bp, Glycine max
acgggttgctgatgccaaagactatgcattggagaaactttatgagaaacgcatgcaaaagaatgctctcaagaaagaaaaagaagaaactggtttgcaggttgatcgtgtagatgctcttccaatcaagacattggatggaaagatccattaccagacagctacgaagacagtattggaaaatgatccaagtgaagagagaactggagagaatgtcaaaaaagataaaggtatggtcaagctaactaaggctgaaaagagagccaagcttaagaaaatgagaaaagacgcacaacaacaagggaaagaggtggctaaagcagaagtggaagagacaccacaagcagcagtattggctgaggtaaaggaagatcttacagctgaggaggcatttgaaagtaagaagcataaacttgcagaattggggaatgccttgcttacagatccagagtccaatattaaaattttgaggagatggtgcagatatctaaagataatgatgatacccattgtaaacttggact

SEQ ID NO: 205895 - DNA, 408 bp, Glycine max
acggggaaaaagggaatgcccttataaaaaattggtgaagccccccatttcaaatttaaacatggaataaaaagggaagagactccttagtttaaaaatctaggccatggtcacgggctgcttcaaaagtgcttgaacacggccatggtatgggtatccacctcgatcaaaggcaacctttgggatccccttttccaaacaggattttgcaatgatctcacccctcctttttggtacttaaactggtgggcccgcggagttatttaactcattaacaaccgttttttggtttggttacaccgaaacaagcgtgcgccttggggtgtcatcaatcacctgcacagaaagatgctttgtttaccggaacacggacagccttggccttttgggcgtcccttcaaccttttt

SEQ ID NO: 205896 - DNA, 542 bp, Glycine max
ggaaccgcgccaaccctctcttcttctttttcttcaatccttttataacatttatagtttcattcttaatcgttgggaaaaatgttcatcgagaattttaaggtagagagtcctaatgtgaagtacaccgagactgagattcagtccgtgtacaactacgaaaccaccgaacttgttcacgagaacaggaatggcacctatcagtggattgtcaaacccaaatccgtcaactaccaatttaaaaccaacacccatgttccaaaattgggggtgatgcttgtgggttggggtggaaacaacggctctaccctcaccggtggtgttattgctaacagagagggcatttcatgggctacaaaggacaagattcaacaagccaattactttggctccctcacccaagcctcagctattcgagttggatccttccagggagaggaaatctatgccccattcaagagtctgcttccaatggttaatcctgacgacattgtgtttgggggatgggatatcagcaacatgaacctggctgatgccatggc

SEQ ID NO: 205897 - DNA, 516 bp, Glycine max
gagaatcacatatggtgtaatcatccttttatatttccggaaatgagttagtgaatagatacatgattatacaaaggctgtgtagcttaacccaatatgctagctacatcaccttctggcggtaaattagtgtaacaatgaaatggttcactcaattccatctcttggcatttctcacgcctttggacttctgttttgctgcctgaaaggcctgcatcttttgtttcttccgtgcctctttctcagccttggacatcttatatttggctttcactttaggagctttgctatcaagctcaacctcgcgttcaagttctgtttacctagcatcaaaattcttctctaaataataagtcgaatcacctgcataatcctgaatggcgccatctttaagtcctatcactctattaactatttgctttataaagtatcggtcatgagatactgtgataacagtgccctggtattcattaattgcttgctcgagcatttctttagaaggtgtatccaagtgat

SEQ ID NO: 205898 - DNA, 547 bp, Glycine max
cacaagccaagtgaaagtgattaaaattttaaatcaaagagcataatgtcagggatcattgagcaagattggggagacccttcatgtgggagggcacaagaaggaggaggagcataagggtgagcaccatgctggagaatacaaaggggagcaccatggtgaacacagtagtgagtacaaaggagagcatcatggtgaacacaaagctggagagtaccatggtgagcacaagccagagcacaaagaggggttcctagacaaagtcaaggacaagatccatggtgagggcggcgccgccgacggcgagaagaagaagaaggagaagaagaagaaggagcatggccatgagcatggccatgacagcagcagcagcagtgacagtgattaaactgctgcatcacctatatatttaaaaggtttatgggaccatagtagcgagggctgggccttaattactctctatctctctctctatgtgtatatctctctctctttttcctttggccctatcttgtgatctatttatgagtgagaaaaacataagtga

SEQ ID NO: 205899 - DNA, 579 bp, Glycine max
caggaaagaaaatcccagatgtgttgctgaattcaggacacaaaatgccagttataggcatgggaacttcagtggagaatcgtccatcaaatgagacccttgcttctatctatgttgaagccattgaggtgggttaccgtcattttgacactgctgcagtgtatggaacagaggaagccataggcctagccgtggccaaagccatagacaaaggccttataaagagtagagatgaagttttcatcacttcaaagccttggaacacagatgcacaccgtgaccttattgtcccagctcttaagaccacattaaagaagctggggacggagtatgtggatctttatctgattcattggccagtgaggctgagacatgatcttgaaaatcctactgtttttaccaaggaagatgtgctgccttttgatatagaagggacatggaaagctatggaagagtgttacaagttgggaatagcaaagtccattggcatatgcaattatggtatcaaaaaactcactaaactcttggaaatagccaccattcctcctgcagtcattaggtggaaatgaacccatcttg

SEQ ID NO: 205900 - DNA, 526 bp, Glycine max
gtatattctttttttttgatttctacttcataggatctcatgtctcaattaagaggagtcatggaaagaactggttcaaaatctcgatcaattcctttttcaaatcctgcggcagctgcgcgagctcttcccgcgtgccataaatggcctacaaataggaagaatcctagaacaaaatgagaagtagctaaccaacttctaggagaaacataattgactgcattaatctctgtagctacgccacccacggaatttaaggaacctaaaggagcatgagtcatatattccgcagaacggcgttcttgccaaggctgtatatcttttttcagtctactcaagtctaaaccattcggaccccttagaggttctaaccaaggagcacgcaaatcccaaaaacgcatagtttctcccccaaaaataacttctcctgtcggggaacgcattagatatttacctaaacctgtaggtccttgagcagatcctacattagccccaagacgttggtctctaactagaaaagtaaatg

SEQ ID NO: 205901 - DNA, 550 bp, Glycine max
cacttactggaagccttgttgtgagtaagagaaaaggcttcctgcaccgagcacaccaacttgatacctctgattctttctttgcttagaattccacagaatatggagactgttcttttcaatcactccccacctttggaattcaagggtttgagcaaggaggaggaagactcattgctagggcaagtggaaatatggaggtacatgacatgcttcacggactccgtggccttgaaagctgtcatagagcttcgtatagcggacatactagaccgttatggtaaaccactatccttgtcgcaaattgtggagaacatagaagacgcaccctccccagatgcctctcttctctagagagtcctgagagtgatggtgcgcagaaagatcttcagtgcacaagaatcagagacaggagaaaccctcttcggcttgacacgagcctcgaagtggatccttcgcgacacgaaaatgaccctagcacccatgttgctgctggagaaccacccaattcacctgaaccctgcgcactacatcagtgagattattagag

SEQ ID NO: 205902 - DNA, 517 bp, Glycine max
accacatgcagtgtcgcctctcagctacaattagatgtctttctcatccaagtgcacatgtccgagctctgagtatatcagttcgtgacattttgcatactggttcaatcagatgtagtcctaaacctcggagattaaatggcacccacaacccttcttatcaatacttcaatttggatgccgttgactggcaagctgacatagaaaaatgcttgacttgggaagctcacagccgactttcaaacggattgtctattaactttcttgatatcgctgccaaagagttaggctgtactatttccatgtgaaatgaaatcatccatcttagtctgtgacaattttttgctagacttatagaaaaagaaaaagaaaacagaagttattgatatgcttatggaactaacgggtttgcaaataagcataattctgctagtcctgttaaaaagagctgcaatcataattctagtatgtttatagaaagctcattttgcatcatgcatgtactctagctaaacta

SEQ ID NO: 205903 - DNA, 458 bp, Glycine max
ttttttttttttttttttttttttttttttttttttttttttttttttttttttttttttttttttttttttctttttatttatgttttatttttctttaaaaaaacccaaaaacctagaaaggggacggggcaacccagggaacctttacaacaaaaaaaaaaagggggccccgtttcctaaaaaggggacacccccgagagggaaaagggggcccaaaaacttgaaaagaatcatttttggcccctaaagggggggaaaaaaacctgaaaaaaaaaaaatgccaaggcaccggggggcccccttggacaggccccccccaaaatgggggcccgaaaagttccccaatgggtgacaacactcccggatttgggaaccaccccattttcccccgggggggacaaaaggggtttaggaaacccacccaaagaggcagttttttatcccccaattttgag

SEQ ID NO: 205904 - DNA, 466 bp, Glycine max
ggcagtggcattgagaaaccagggagacatgtcggccatgttctactgcgccatgcacggttaccaagacacattgaacgtccacgcgaaccgtgaattctaccgcaactgcgaaatctccggcaccatagactttatctggggagcatatgcaaccttaattcagaactcaagagtcatagtaaggaagccagactcacaccaattcaacacagtgaccgcaaatggaaccaagcatatgaacatggccacaggaattgtgctccagaactgctagatcttgccggagcaggctctgttccctgcaaggtgccaaacgacatcgtacttggggaggccgtggaaggagtccgcgagaacagtggttatggaatcgaacattgtcgactgcatttagcccgaagggtggaccccttgggatgggaacctgtatctcgatacgtagtactatgctgagtatgcttac

SEQ ID NO: 205905 - DNA, 500 bp, Glycine max
aaagggaaagtcgtgtttataatcaagtacaaaatttcatcgctaatctactatttatgaacaacttttgacaataatccattgtatactagacacctagcaacagagcaagccccaaagatatactagttgacaagaatttgttttcggaacccactctcgtcccccacaaaaaacaaataatgtgcaggcaaggaacggaattgcatatgacacaatgatctaactatcagcggctctgaaaatagtgagcagagacaggaagaggttaatgatgtccagatacaaggagatcgaagcccaaatgtattcatcgtacgagtatctcttgatcaggttgtctgtgtcatagatgatgtagccgcaaaatataatggctgccaagcaaccatagatcatcacggacaatttacccagtggaaacagaacctgaatcagagcaaagaccataagaactagcactgcaccaaacaagaagggtccaaggaagttgaaatcat

SEQ ID NO: 205906 - DNA, 436 bp, Glycine max
aaattctcgacgaagcaaccctgaccataaccacactctctcaagtcccaagaaagaaccctctcacctagctagctatcaaactaccgattcatagcactcttctcttcctcacttatgcgaaacgcaaacatggttctcgttctccttttccttatggcaatcttctccgccatgaccactccgtcaacctccgcgatcgacaccttcatcttcggcggctgctcccaggccaagttcacgccgggttccgcctacgaaaacaccgtcaactccctcctaacctcgctggtcaactctgcggccttcgccaactacaacaacttcaccgttccagcctcttccgacaccgtctacggcctcttccagtgccgtggcgacctccccaacgaccagtgctcgcgctgcgtctcgcgtgcggtcacccagctcggca

SEQ ID NO: 205907 - DNA, 547 bp, Glycine max
cttgatttctcgtcgaaggtggatcagcacggtgctccgccggagcagaggatcactccccggcaacagcaggtgaagaagagccgaagaggaccgcggtcgcgaagctcgcagtatcgcggcgttactttctatcgcagaaccggaagatgggaatcgcacatttgggactgtgggaaacaagtgtacttgggtggatttgacaccgcgcatgttgcggcaagggcttatgatcgagctgcgatcaagttccgtggcgttgatgcggatatcaattttaacgttagcgattacgatgaagatataaagcagatgagtaacttcacgaaggaggagtttgtgcacattttgcggcgacagagcactggtttttcgaggggaagctccaaatacaggggagttactctgcataagtgcgggcgatgggaagctcgtatggggcagtttcttggtaaaaagtatatatatcttgggctattcgacagtgaattagaggctgcaagagcgtatgataaggcagctataaaatgcattggaagggaagcag

SEQ ID NO: 205908 - DNA, 502 bp, Glycine max
ctcttattttattcttcatccaatgactatacattcattatctttttgtgtaaatagatgaacaactctgtggaaacccggcgtgttaattgtctcttgatggatgagaagcttaaatacaagcgccaatctagtaaatccatgggtggtctcggtcctattgacaataccagtctcaggggagaccctaatattttacccgatattgaaaaaaaccttcacaggcatttgccttatctcaaaatggggggtttttttttatagcgagccgaaaactgtttctaggactgatcctgctcattccatgtgtgaaactcagtttagatttaacaagaacattgctattatcattgacatgaccattgagagtttcaattcaggtgatatcgtcaactacaccgatatttatttttatagtatcgtacctttgaagggcagacattgccgtgaaagcgataactctagtactagtataataacttgtacgaatgatacctatgat

SEQ ID NO: 205909 - DNA, 477 bp, Glycine max
gggggaaatgtagggactaatgatagtataacacgttaaatccaaataatgctaccggttggtagcaatttatgtcctgtataagtactaactactaactaactagcactttcactttccttacctaggtaataattttctatacaaccatcttcagtggttggaaacatgcacattatggaactgtgaaaattgaaatgtgtatgatatgatatgatacgtcacctctccaatgaaactattaggccaaaagctcatgtcaatggtctctctatgtatcaacaaccaccaccatcagctggctcaattgaacttagaaggccgtttcctcttaactgcatgcagtggtcttcagcatccacttgagcacatactatcaccactgctagtccattataatgtgcctcctgcatgatgttaaccgcactatcaattgtcattccaggtatcaccttcatcaacacttgcacaacatat

SEQ ID NO: 205910 - DNA, 548 bp, Glycine max
ctcgagccgaatcggctcgagccctccttcagccacacgtgtgggacactcttggatgttgagctagtcctcaggttggttaagaggtttatgagtttggaccgtgatggtgctgctttggttaaggtggccaagttggttgattgctacctcgctgaggctgctgtggatgccaatttgaccttgtctgagttcattgcacttgctggagctcttccaagtcattcaagagccacggatgatggcttgtaccgagccattgacacgtatctaaaagcacatccagatgtgtcaaagcaagaaaggaagggcctgtgtaggctgcttgatagccggaaactcacaacggaggcctcacttcatgcagctcagaatgaacggttgcctgtgagagctgtgattcaggtgctcttctccgaacaaaccaaactcaaccgccacatagattggagtggctcctttagtagcttgaggaagcccaatggaggccttgacccaccaggacgatgcctttcatagcgtgaaacaaatgctcagcaaatggagat

SEQ ID NO: 205911 - DNA, 513 bp, Glycine max
  unsure (1)..(513): unsure at all n locations
acttgccttatttttggttttgagattgagctaaaggccaactcaaccatcgaatttgttggtgattgaaagagaaggaagaagaagcaggaaatggaagcagtgagagctggtcgagaaggagcaataggtctaggtcaaggtgatggcgtagccaaggacagcactgagactgaactcaccaaaatccgtctcctcagggcaattgttgaaacccgtgatccctcttccaagatctattgtagccaggaagaggatgattttatgattagaagattcctgcgtgctcgtgatttagatgtagagaaggcttcggcaatgctcctcaagtacttgaaatggagaaattcatttgttccaaatggctctgtatctgtgtcagatgttcctaacgaacttgcacaagataaggtgttcatgcaaggacacgacangataggtcgacctatacttatggtcttcggtggaagacattttcagaacaaggatggtcttgatgaattcaagcgattt

SEQ ID NO: 205912 - DNA, 551 bp, Glycine max
gcttctttccttattatgctttcaatgttttgggtggccttgacaatgaaggaaagggatgtgtcttcacatatgatgctgttggttcctatgagagggttggatatagctctcagggttctggatccacacttattatgccatttcttgataaccagctgaagtctcctagcccactcctgttacctgcgcaggatgctgttactccattgtctgaagcagaagcagttgatctggtcaaaactgtttttgcatctgcaactgagagagatatatacactggagataaggttgaaatcgtcgtcctaaatgccagtggtattcgtcgtgaatacatggacctaaggaaagattaatgctttacagaaatttactgttggagataccagacttggattgagaatgtttgaaatgcttctagaattttaaatgacatagtgggtttttcacatgaggtgaaaattaaaatagcgtttccagtgaaattgctttgaacaagtactagtctgctcacattataactagactgtgctttcacttaaatttgcatt

SEQ ID NO: 205913 - DNA, 518 bp, Glycine max
ccaattcccgaaaccctaaccctacctcctcgcccccatgcccatggctaagaaacgaaagcttcgatcctccaacccagaacccaccaaacccgtcgagccacagcaacagaaccatgagactgttgaactcgaccaacagcaacccatccccgaaccaaccctagaagactccaacaccatggccatcgacgaaccaaaacatgaacaagaagaagaaccgcaaaacgccgaaagcgaacaagaggtagaggaagaggaagaggaagaagatgaacaacaagaggagcaggaaccagaaactcgagaagggcaaccgggaccagaaaccctagaagctgcaaaccaagccgaagcgaacggtagcaatgaaggaaacaacgaagaagaggaagaggaggatctcacactagaagaagagcccgtggagaagcttctggaaccgttcacgaaggagcagctccactctctcgtcacgcaggccgtggatatgttccccgaattcgtcgatagcgtgc

SEQ ID NO: 205914 - DNA, 644 bp, Glycine max
gttttctattataagacagggtgttaacggctagaagccaaggaatcagtaacataaaatggaggttcaatttgccctcccatttcactaacgcacacatcacatcataccagagactccatctccctctcgcacgcgacgagggagtcccgcttcggaatctcaccccctctttctgctaattcgcaagatggttgctcagaaattcgttgtcgacttgaacaagccccttgtattccaggttgggtatcttggggaagcctacgatgattgggttcacgatcctatcgtaagcaaagaaggtcctcggtttttccaaagcggtttcctcgagttgttcacacgcactgcatggtgggtgattccaaccgtttgggtgccggttgcgagttggttcatttccaactctgtcaaatcaggcctcccttctcttgatgtagctctgctcgtctatctcggcattcttgcttggactttggctgaatacaccttgcaccgtttcctcttccatgttaaaacccagagctactggggaaatacctggcattatcttcttcatggcttgcaccacaagcaccccatggatagctatagacttgttttccccctgagcagcagctatatagcccctccgatttctcttc

SEQ ID NO: 205915 - DNA, 534 bp, Glycine max
caaaacaacagaaccaaactcagaaccaaactcagaaccaaactcgccaaaactagggttttgcattgatggcactgtgcaaccgcgtcagatcgggaatctctctcttcaccaaatccacgttccttacttcccagcgatccagtctccaacgatccctcgttgcccctttcatttccctcgcctccagaaattacgccaacgtgccggggcaaaaggaaaccaaagttaaggtccctctggctttgtttggaggttcaggaaactatgcctctgctttgtatattgcatctgtgaaagccaatgcagtggaaaaggttgagactgagcttctgcaatttgttgaggcagtaaagaatagtcccatattttcacagtttataagggacttgtctgtggctaaggatgttagagtgaaagttatccaggatatttgtggggaagccaagttttcggatgttacaaagaactttcttgttattggtgctgagaatggaaggcttaaaaacatagacaccattgcaaagagatttg

SEQ ID NO: 205916 - DNA, 530 bp, Glycine max
ggataaataacattttattacaaagtcctccatagcatacaataacaaagttacatggaaattcattaactaccactaacaataccgttatagccgggtcaaaatgctgaatttaaacaaaactaaagagatgaagcacatgtacatttatttttatttttatgaaacttagattgaaacaatacaacttaactatatgttgatgctttgccaagtgattctgcaatcttactggcaatacagtaagatgtagactgaatggttaccatggggttgacaccaactgcactaggcaaaacactcccatcacacacatacaagccttctgcttcccaagtctcaccattctcatcgagtgcaccttcttcttcagaggcacccattctacaacttgacatctgatgtgcagtggtaaacactgtccacacttcattccttgaccttggacccccaactattgtcacagtgtcaagaaactcctccaaatcttcctccttcatccccttacacttgattctttggccatcact

SEQ ID NO: 205917 - DNA, 550 bp, Glycine max
  unsure (1)..(550): unsure at all n locations
caatttataagaatggcactttctcctattcgttcttcttctttctcttcatcagctattgttgcattggctgtgttactgcttcttacagggacctcttcagctaacctctcaaagaacttctattccaagacatgtcccaacgttttcaacactgtaaaatctgtagttaaatctgctgttgtcagagaacctcgcattggggcatctattgttcgtctcttcttccatgactgctttgttcaaggctgtgatgggtcaatactacttgatgacactccaaccttccagggggagaaaactgcagctgctaacaacaattcagtgagaggctttgaagtaattgatgctatcaagtctgaggtcgagaaaatatgccctggtgtggtctcatgtgctgatatcttggacattgcttctcgtgactctgttgttcttcttggagggccattttggaaagttagacttggaagaagggattccagaactgcccactntactgctgctaacactggtgttattccaccctccacatctaacctcaccaacc

SEQ ID NO: 205918 - DNA, 549 bp, Glycine max
  unsure (1)..(549): unsure at all n locations
ctagcatagagctagtaataatattaatattgttaagctagctctaagccatggctaatgaacgtgatctgttctcggcggagattgtgaaccgtggaattgaatcgtcaggaccaaacgctgggtcgttgacgttttcggtgagggtgagaaggcgcttaccggattttcttcaatcggtgaaccttaagtacgtgaaattgggttaccattatctgataaaccatggcatatacttgttcaccataccggttcttctcgtggtgtttagtgctgaggttggaagcctcagcaaagaggacctatggaagaagctttgggaagacgcgcgttacgaccttgctacggttcttgcttcctttggggtcttcgttttcaccttgtctgtctacttcatgtcgaggccacgtcccatttacctcattgattntgcatgttataaacccgatgatgaactcaaggtgtcaagggagcagttgatggaggtagcaagaaaatcatgcaagttcgacgaagcgagtctggagtttcagaagaggatgctgatgt

SEQ ID NO: 205919 - DNA, 552 bp, Glycine max
ttaaattcaattaaggttctctctcttgtaaaatgctccaagggaagggagttttataacatgacctagtaacgattcaccacatcatgcgtgccactcctctttaactctctcatcctttttctctttccgtgtcaccctctttcaggttaatttgcaatgactgaaccttccaaggtcattcacgttcgaaatgtggggcacgaaatatctgaaaatgatttacttcagctgtttcagccttttggagtcataacaaagcttgtcatgctgcgtgcaaaaaatcaggctcttatccaaatgcaagatgttccttctgcagttaatgccttacaattttatgcaaatgttcagccaagcataagggggaggaatgtttatgttcaattttcctcacatcaggaattaacaacaatggagcaaagtcaaggacgaggagatgagccaaaccgaattctcttagtcacagttcatcacatgctgtatcctatgacagtggatgtgctgtatcaagtattttctcctcatggatctgtggaaaagattgaacat

SEQ ID NO: 205920 - DNA, 541 bp, Glycine max
gttcgcactgggaactgggaagaatagaaagaaaaagaaaccttccgattccttcatcgccgccattattcggtggccactgcatgcacctttcccttttctcatccaacaccttctcagatctactccttttcctcttcccaaaatcattctccgattgcgcctagggttcacacttcgaatcgccgttttctgtcatgaattgggctccgttagcacacctcgccgactctcgctgacggaggagattcgaaattcggccgccaaatggtttcaatcttgttgtacatcgtcgctttcatttgcacgtgcggagccattgcgttgtccttgcttcacatttataagcacctcctcaattacaccgagcctacttatcagcgcttcatcgttcggatcgtttttatggtcccggtttatgcgttgatgtcattcttatcactttttctaccacagggttcaatctattttaattcaatccgggaaatctatgaagcttgggttatttaataattcctatcactatgtctcgaatgggttg

SEQ ID NO: 205921 - DNA, 507 bp, Glycine max
cattcgaattcattttatttatatattaatattatattcaaatgaaataaaaagatattaaaagatactaattataagaatttgaaagtgaaattataaagttattaaatgattaatcaatttttttctacctgttcctgtagtaaaaagagttccatctgttcttgaatagcttccttcaaaaggacttctgcttccccagtgaatgtcttggtagaagatatgatttctttgaattgaggtttattcgtgtttaagtaagcacgtaactcaacaagaaatttccttacctgtccaatttctaatgaatcaagataaccattcgttccagtataaatagttattatctgttcttccacggtaagaggagctgattgggattgtttaagcaactcgcgcaatcgttgacctcttgctaattgattttgagtagctttatcgagatcagaagcgaattgggcaaaagcttctaattctgcgaattgtgctaattccaattttaattta

SEQ ID NO: 205922 - DNA, 518 bp, Glycine max
atgtcagacgcgttctgcagcgactgcaagaggcagacggaggtggtgtttgaccactctgccggcgacacggtgtgctcggagtgcggcctcgtactggagtcccactctatcgacgagacctctgagtggcgtaccttcgccaacgagtccggtgacaacgatcccaatcgtgtcggcgggccctccaaccccctcctcaccgacggcggcctctccaccgtcatcgccaagcccaacggcggcggaggtggcggcgagttcctctcctcctccctcggtcgctggcagaaccgcggctccaaccctgatcgcgccctcatcatcgccttcaagaccatcgccaccatgtccgacaggttgggactcgttgcgaccatcaaggatcgggcaaatgagatatataagagggttgaagatcaaaagtctagtagaggaagaaatcaagatgctttattggctgcttgtctctacatcgctggccgacaagaagacaaacctcgtactggaaaggaaat

SEQ ID NO: 205923 - DNA, 453 bp, Glycine max
aacctcaattacatcgaattgaaagtttacatgtatattgtaaaccgacatacacttcaaatcaatacaatatatgatgaattacatccacacaaatctttatttaatagacttgattttcagccatcaagtcatgctagcttcttcataatattttggttgatagcccagcccaacactaggatctccaatattgaaacacctaataccctaccttcggacccccaatatattgaaagactcaaacaacatcattgtgaagaacctccttcactaatcgatggaaatcattatatgatgatcctcccatatcagtggcttctattgctttctttttccactccagacacttttgtctcattcccttccccctttctccggttatcatttctttcacaagtgttgtcacctcctccctttttacatcatctttaatatccattcctatccccc

SEQ ID NO: 205924 - DNA, 530 bp, Glycine max
  unsure (1)..(530): unsure at all n locations
gcattccaggaactgttatagagggctggttcaggttctgtccaaggccgagaatgcccgaaactcctcgcagtgtgactctatgctcattggtgacaatgcagctgcaaatacctatccttacattcaggtgaaaaatccaacagcaagaatcgaacatgaagctagtacgtccaaaattggtgaagatcaattgttttattttcagcaaaggggaatagactatgaaaaagcaatggctgctatgatctctggattttgccgtgatgtctttaatgagcttcctgatgaatttggttctgaggtgaaccaactcatgagcttgaagcttgagggatcagtaggttaaacttaaacagcttgttaagcatatcattatatggaatttgctcaggccatttgttcctgaaattgtcaaagtccttataggtagtgtattcggaaggatgtgtatatgtttggatatagatgctgtcttcaactgcaccctgcanaagtggcctgaaacatagccagttttgaaccttaat

SEQ ID NO: 205925 - DNA, 490 bp, Glycine max
atgggaaattcttggtattaatgacgaaattattctcaaccatagacatggcacatggaggctcaaaaagaccacttaaaaattcctaactaaacatcaccttgcaaatataaatttttagatcaaatgactattgaacacaatttttagtggtccaaatctagagactatatgactgtttttcatggtttccagaggatggtagtctctgcgatcatggaggtgactacatatggatccatattagaagcaggccttctgtcctcaaagtaacctttgccatttttctctgtgtctcttccaactctaatggagcttccacggtttgccacaccccaagaaaaggtgttgatgtctgcagtttcatgtcttccagtgagacgtctctcgttgccttctccatatgctgcaatgtgctccttgtgcctcaatccaagcttttcaatggccttcttaatcacctcataaccaccctcatctctcatggact

SEQ ID NO: 205926 - DNA, 433 bp, Glycine max
ctttctttctctcacaaatcacaatgtgctccgataactacaatctctcaattccccattaattaaaatcaaaatcaaaatctaatctgggtttctcccatcagaggacaaagcttccgactttgcgggattcgttcgtatttgtttcagtgctgagatggggaaggtcgcggtgggagctgccgttgtctgcgccgccgccgtatgcgctgcggcggcgctggtggtgcgccaccgcatgattagttcccggaagtggagtcgcgccatggcgatactgaaggagtttgaggagaagcgtggcaccccaattgtgaagctaagacaagtggctgatgccatggatgatgagatgcacgcgggtctcgcatctgaaggtggtagccagctcaatatgttgatcagttttgtcgatatctcccactggtgatga

SEQ ID NO: 205927 - DNA, 412 bp, Glycine max
agggattccgaaattcgggcccctcaacttggtatgaaatcacattggtagcccctactcggggcctagctcggctaaaagctagatttgccccacattggttggctcttgccctccgccttattcaaattagcttctggtatttcaagaggttggtgggcttcttgggggtcaatggcactacccttttccggattatttactaaaacaggggtctcattattggttattttagcaaaaccgcccattagagcccttgttaaccattgggctttaagaagacgttttttcaaaatacctatatctacgggtgggggaataggcgcctgatttgggaataccccaatttggccgctattagtagataaaaagatttccttcacttccgaatcccaaacaattggattggggg

SEQ ID NO: 205928 - DNA, 473 bp, Glycine max
cgtagattggtttctgagcttcgtttaaaagaatacaataaagaaagctggcagtcttggtatgacaggaatggttctggacagttattgcggcaagctagcacagctgcatgcatgctgaatgagatgatatttggtctatcagatcaagcaactaatgattttgctaggatatttcataggtctactctaagcagaggagttcaggttcagtcttacaaacatgatagtgcatttcatgaattttcctggaagaagtccaaggataaaggtgtaaggagttgtttagttgagtgcattggtgggatcttacacgagtatttatctactgaggtatggaatgttccaattgatggcagaattgctgacttgcagcttaatgctgcagttgaagaagatattagcctatactttttccaagatgctgcaatgctacgtgaggttattattgatggagtaagattctttaatct

SEQ ID NO: 205929 - DNA, 523 bp, Glycine max
gggggcaaagagaactctaacgagcacagtatgggaacggctcacttcaaagacatagcattggcacatattttggcacttgagaacaagaaagcagcaggaaggcacttgtgtgtggaatctattcgttactttagtgatcttgtggacaaggttgctgagttataccctgaatacgatgtggctaagttgccaaaggatacccaaccagggttgttgagagcaagtggaaaggatgcatcaaagaagctgattgatttaggtctagaattcactcctgttgagcaaatcatcaaggatgcagtggagagtttgaagagcaggggctttgtctaattctttgctactgcagatgaactgagtgcactgttacaagtggtggtggcgtaatattattgttctgccattgctttgactcaatggtcatgccatttatgtttctacctatggtcttgtgttgtgcacttgtgcgtgtaactgctttctaaaataatgatcacttgcatcagtggttgtaacgatt

SEQ ID NO: 205930 - DNA, 529 bp, Glycine max
gaatatccaatatatactaatatatgctaatatatgctaatcgaatatctatctatatctatctacctatatctatatagatataggtagatagatatagatgtttactaagtagattatattgagccgcaatatatgtgcggcaagctaaacgaaaaggactattttgtagaaaactggtcaatgatggccttccatggattcacctatataagccgcagctaaagtagcaaaaatgagagcttgaataccgcttgtgaataatccaaggaacatgacaggtataggaactactaaaggtactaaagaaacaagaacaacaactactaattcatcagctaatatatttccgaaaagtcgaaaactaagagataagggttttgtgaaatcttctaagatgttaatcggtaaaaggattggggttggttggatgtatttattaaaataagctaatcctttttttgaaagacccgcatagaaatatgcaattgatgtaagtaaagctaaagcaacggtagtatttatatca

SEQ ID NO: 205931 - DNA, 524 bp, Glycine max
atgaagagctcataagccattacctctacaagaaggtcattgacaccaagttctgcgccagggcaattggagaagtggacctcaacaagtccgagccttgggatttgccatgtaagtgaaaccaaaccaattcgatcaatctacctttcatgtattatattgattttccttgaaaagttaaaattgcaagtttgtgtttagggaaagccaaaatgggagaaaaagagtggtactttttctgtgtgagagacagaaaataccccactggcttgagaaccaacagggccacagaagctgggtactggaaggccacagggaaagacaaagagattttcagaggaaaatctttggttggaatgaagaaaactctggttttctacagaggtcgagcacccaaaggagagaaaagcaattgggtcatgcacgagtaccgactcgagggaaaattctctgctcacaacctcccaaaaactgcagagggatattattattctcttccttatcttgcttttcaaacttggatt

SEQ ID NO: 205932 - DNA, 581 bp, Glycine max
tctctttctcttctcaccggctggtcaccggcttctctcattctccgaccgtccccacccccttcattcccgattcgttcgtcttcgctgcttcgcgtcaacactttttttctcttctaggtcatttatgatttcgatcttttcctttaatttctcctccatttgttttgatttgatttgaatttccacggttaagttaaggtagtgttcgggaagatgtcgagtcacggtggttcttctttaaggaacggttccttgtccaatagccccacgcgggccaagaagaaagcctttggctctgagcattcaacgcctgactttattgctcgtaaaacctttacctcaccgcgcaccatgggagagagaactgtgaaatcattgcggctttcaaaggcattgacagttcctgaaacaacaaccgtctatgaagcttgccgtaggatggctgctcgcaaagttgatgctctattactaactgattctaatgctttgctctgtggaatcctcacagacaaggatatagcaacaagagttattgctcgtgagttaatctcgaagaaacacctgtttcaggttatgac

SEQ ID NO: 205933 - DNA, 510 bp, Glycine max
  unsure (1)..(510): unsure at all n locations
gaaatgcaaagctattgagacacacgaactatgtaggaataatcttacaagcaatccaatgatgcacacagaagtgttacacactctttaacacatactttctgacaccacactctcctactagttgaaaattatcagaaaatacaaaataaggaggttcgttaaatatgtagcatccaccaatttgtgattttcaatcaataagaaagattgtgttcaaaagagtatttgagagtattttcctaacatttctcgtgatacaaatatgatgataaaagcctgctaagaagagaactgtgaatctcccaacaagtaaatttacaccaagccctccagatagcacatacccactctgtattagcagaataagttgcctgagataaatgaggagcatgtctagaatcgacggatgtctttaggaggcctgaagttaaggggatgggtttctggagtggcactctcatcttctttccacattnttatcgtcttgtcagcttcgcaggttatgag

SEQ ID NO: 205934 - DNA, 526 bp, Glycine max
gaaagcaagctcatcctagagttttaaaaatggcagcagcctcctccatggctctctcttccccatccttggctggcaaggccgtgaagctgggcccatcagcccccgaagtcgggagggtcagcatgaggaagaccgtcaccaagcaggcctcctccggaagcccatggtacggcccagaccgcgtcaagtacttgggcccattctctggcgagcccccgtcctacctcactggcgagttcccaggtgactacggctgggacactgctgggctttcggccgacccagaaaccttcgccagaaaccgtgagctcgaagtgatccactccaggtgggccatgctcggggccttgggctgcgtcttccccgaactgttgtcccgcaacggggtcaagtttggagaagctgtgtggttcaaggccgggtcccagatcttcagcgagggtgggctggactacttgggcaacccaagccttgtccacgcccagagcatcctcgccatctgggccacccaagttattctaat

SEQ ID NO: 205935 - DNA, 488 bp, Glycine max
gacacaagttatgaatatataaggtccacttttttttacagtgaaaacagttgaaacgaagttgttaataatagattgccgagagaaatgggtaaaagaaatttccacccaagatttaataattgatctattcttagcctaggcaaagtccatcttgttgcgatagaaaggaataagaataaataagttttagctagtgtaataaagataccaattatcgttacaaaaactccatatgtttgatttatttcaaaaaagtcagaaacgaatatgtatggaatagagatatttgaaccaccaaagtaaagaactgttacaaataaggaagaaatgaataggtttaaataggaagcaacataaaataaaccaaatttgatacccgagtattcggtttgataacccgctactagttcttcttccgcttccggtaaatcaaaaggtaatctttcacattctgcttgggacgagattagaaaaacaatgaaacc

SEQ ID NO: 205936 - DNA, 445 bp, Glycine max
gaaactggagccaagtgggaatgttaaaattattgaaccaattttttggagaaaaccaaaagggggaccccaccccacattttaatttttaacaaaagaaaaacccgatgcccactccttgcccaaacaaaacatgcttattaaacccagatgggttctctatgtcagaaaccaacgggatgtttttccccttacccgttccacccactttaacagaaattcctcggcaatcaaaaataaaaaacgctaaacgggggcgaccccttatctgaaaagtttaacaacaaaacttccaaaaaatggataattccacactcaatccgattcataaacccgggggggggtttccctctctttcccgtgataatctcaactactgaggacctgtaatgaccaggcttgtattgaccctaaccaggcccactgacgtaaccagcctggggcg

SEQ ID NO: 205937 - DNA, 517 bp, Glycine max
ctcttcactttcattcactccgttgccatctcaaacccgaatccaaatccaaatccaacacgatgtcgtatcgaccttccgccaacgccaggaccgaggttcggcggaaccgctacaaggtcgccgtggacgccgatgaaggtcgccggcgccgagaggataccatggtggagatccgaaagaaccgtagggaagagagtttgctgaagaagagacgcgagggtctccaatcccagcagattccttcgtcacttcactctactgtaattgagaagaagttggaacaccttccagccatggttactggtgttttcaccgatgacaataacatgcagtttgaggccacaactcagtttcggaagttgctttcgattgaacgtagcccacctatcgaggaggttattcaagctggtgtagttccacgctttgttgagttcttgatgagggaagattttccacagctgcagtttgaggcagcttgtgctttgacaaatatagcttctggaacttctgaaaa

SEQ ID NO: 205938 - DNA, 493 bp, Glycine max
  unsure (1)..(493): unsure at all n locations
gacgtgtcacgcaacaaggaatatattccgattgttgggctagctgattttaataaattgagtgctaagctcatttttggggctgacagccctgctattcaagacaacagggttaccactgttcaatgcttgtctggaactggttcattaagagttgggggtgaatttttggctaaacactatcaccaacggactatatacttgccaacaccaacttggggtaatcacccaaaggttttcaacttagcagggttgtctgtcaaaacatatcgctactatgctccagcaacacgagggcttgattttcaaggacttctagaagatcttggttctgctccatctggatctattgttttgctacatgcatgcgcacataaccccactggtgtggatccaacccttgagcaatgggagcagattaggctgctaataagatcaaaagctttgttacctttctttgacagtgcttatcanggttctgctagcggaagtc

SEQ ID NO: 205939 - DNA, 541 bp, Glycine max
agagggaatatttcatatcaatgtcatggtaactaaaaaaacaacatagagaaagttaataaatttctcaaaattaagaatatacaatgagtgaattaatgcagcagcagcagtagtcacacaagtatcatcatataatgcttaaaagaaattaagcatagagttttccaaatacaaccttaaatgagttctccaaaaaggaaaagaaaggaggttcatgaaacacatatagaactgtttcctccattgttctgcaccacattatacaaacttggctcaaatgaggagcaaatttttcataatcttggcaatgcgcggggaagaatgcgaggttggtcccaatcagtgacaatgtgatcacgagtgatatccttgagtgaggtgcaaccactcaaggccatggttagctcaaactcctcacgtagcatccgcagcacgtttcttacaccagcctattctttagcagccaaggagaacaccacagggcgtccaataaatatgccagaggcacctagtgctaatgccttgaagacatcagttc

SEQ ID NO: 205940 - DNA, 578 bp, Glycine max
cgttgatgggattcagattaaacaatcatcaaaattcattattattaatgatttacggggtaaagtagttcatatggatgtagtgaaaagaaagggaaaggaacatgagaaattgctgatttctgatgatgatgctccacaagataagaagaaagaaagtagctggaattctaacttactgaaatgggcttctggtttcattagtagtaatgaacaacctaaaaatgctgaaaccaattcaccagagaaaggaaggggtggacgccatggaaaaacgattaatatcttttcaattgcttctggacacttatatgaacgctttctaaagattatgattctaagtgttctaaagaatacacaccgtccagttaaattctggttcataaagaactacctgtctcctccttttaaggatctgattcctcacatggctcaagaatatggttttgaatgcgaactaatcacctacaaatggcctacatggttgcataagcagaaagaatagcaccgaataattgggcatataaaattttatttcttgatgtcatctttcccctttcttgagaagtcattttgta

SEQ ID NO: 205941 - DNA, 394 bp, Glycine max
cctaacttattctattacaattgtaaaaaaaagaagaaataaaagacgaaataaagaagaggagattaattacatattaattacatatatttaatacttaattggatctataaatcttcttcacccctttccgtgtcaataactagaatgaaaaaaaagggaatatcaatgcatctggaaaaaaacgattgatctctatcaagagacccgccaaagccccgaaccatagagtacttactactggtgccacggaaagatatgtttttagatctcgcatttcaaatcctcctttttaagtcttttttctatctaaaatttatttgaatttaatattctttttgattattctaaagaatattagttatatttctttagaatcttttttttctttttc

SEQ ID NO: 205942 - DNA, 489 bp, Glycine max
gggaaaagaatattgactttgcagctcatagtccccaagaagagtcaggttctcttttagctaacctgattgggaatctggctttccctttgctcttgattggaggattgttccttctctcgagacgatccggagggatgggaggtcctggtggccctggatttcctcttgcttttggtcaatccaaagccaagtttcaaatggaaccaaacaccggagtgacatttgatgatgttgctggggtggatgaagccaagcaggactttatggaggtggtggagtttttaaagaagcctgagaggtttactgctgttggggctcgcattcctaaaggagttcttcttgttggtcctccaggaactgggaagaccttgttagccaaggctattgctggtgaagctggtgttccatttttctctatatcaggttctgagtatgttgagatgtttgttggtgttggtgcttctcgtgttcgtgatttgttcaaga

SEQ ID NO: 205943 - DNA, 419 bp, Glycine max
  unsure (1)..(419): unsure at all n locations
gagccgtagcagcggaagctctagcttgggtagcgaatcacaatggcgagaggattaaagaagcatctgaagaggcttaatgccccaaagcattggatgcttgacaaactgggtggtgcatttgctcctaagccctcatctggaccacaccaaattgagggaatgcctgccactcatactcattntgcgaaaccggctgaagtatgctctaacataccgtgaagtcattgctattctgatgcagcgacatgtccttgttgatggcaaagtcaggactgacaaaacataccctgctggttttatggatgttgtatcaatccctaaaacaaatgagaacttccgcctgctgtatgacaccaaaggtcgattccgtctccactcagtcagggatgacgaggctaagttcaagctttgcaaag

SEQ ID NO: 205944 - DNA, 497 bp, Glycine max
aagctctggaactggaaccctctccttcttcctcctcgtttttcttcactcaaacatgcttttccatcaacaactactcgcctcgtagctcacaattcagtctcagaaaccgttcccattcataaggaaaaggaacaaaccctaccttctgtcaaacctacttactcccccactcctcccaatcgaggccttcgaacccctcacagcgggtaccattttgatgggactactcgcaaattcttcgagggttggtacttcaaagtctccattcccgaacggaagcagagcttttgctttatgtataccgtcgagagtcccctgtttcgtaaaccattgacgcagctcgaactggcccaatacgggcccaggtttactggtgtcggggcccaaattctcggtgctgatgacaaatatgtttgccaacactctccccaatcacattttttctggggaagcaggcatgaactaatgttggggaacacgttcgagcccaacca

SEQ ID NO: 205945 - DNA, 484 bp, Glycine max
tgagtttcgaaggggaagtgaaatatgtgaggctatggaggctagcaaggctgattgggatactctttttgagccttatcccttttttgaatcatacaagaattatctacagatagatataacagcagagaatgcagatgaccttagacaatggaaaggttgggttgagtctcgtctccgccagttgacattgaagattgagaggcacacttatggtatgcttcaatgtcatccacatcctggtgaattctcagacaattctagaccctttcaccactgttactttatgggtctgcagcgtaagcaaggagttccagtgaatgaaggtgaacagtttgatataaggctaactgttgaagaatttaaacattctgtcaatgcttacactctatggaaacctggaatgaatatccatgtgtcccatgtgaaacgccgtaacattcctaactacatatttgctggtggtgtccgacctaccttccca

SEQ ID NO: 205946 - DNA, 510 bp, Glycine max
cattcgaattcattttatttatatattaatattatattcaaatgaaataaaaagatattaaaagatactaattataagaatttgaaagtgaaattataaaggttattaaatgattaatcaatttttttctacctgttcctgtagtaaaaagagttccatctgttcttgaatagcttccttcaaaaggacttctgcttccccagtgaatgtcttggtagaagatatgatttctttgaattgaggtttattcgtgtttaagtaagcacgtaactcaacaagaaatttccttacctgtccaatttctaatgaatcaagataaccattcgttccagtataaatagttattatctgttcttccacggtaagaggagctgattgggattgtttaagcaactcgcgcaatcgttgacctctgctaattgattctgagtagctttatcgagatcagaagcgaattgggcaaaagcttctaattctgcgaattgtgctaattccaatttttaattacca

SEQ ID NO: 205947 - DNA, 515 bp, Glycine max
gttcatttgtattttatgacttcagtggaagcttgtgccgcttgttacacagaaacacatctaaacttgactggagacggcgagttcatatggccttggatattgcacgaggtgtaaattatcttcatcattgtaacccacctatcatccacagagatttgaagtcatcaaatcttctagttgataagaactggactgtgaaggttggtgattttggtctttcacgtcttaagcatgaaacatatctcacaactaagacaggaaggggcacgcctcaatggatggcaccggaagttcttcgtaatgaaccctctgatgagaaatctgacgtttacagctttggagtaatattatgggaaattgcaactgaaaagataccttgggataatctcaactcaatgcaggtattgctttcatctgtagatgaacctttgaaaatatatacacgtgcagcctgaaatggtagtaaagcctattgaatggaaatccactgcagagtgtctgtttatcttttg

SEQ ID NO: 205948 - DNA, 384 bp, Glycine max
atcgaatcgcatcctatgggtagcagcagaggacacacgctcatggaggttggacccgacggggttgccgtcatcaccatcgtcaaccctcccgttaattcactttcctttgatgtattgcgcagtttaaaggagagttttgatcaggcgatacagagagatgatgtcaaggcaattgttgttacaggtgcaaagggaaaattttctggaggttttgatatttctgcatttggtggtattcaagaggcaaaagagcgtccaaaacctggttggatatcagtagaaatcatcactgatactattgaagcggctaggaaaccatcagtcgctgccattgatggccttgccttgggtggaagattaaaagttgcaatggcatgccat

SEQ ID NO: 205949 - DNA, 537 bp, Glycine max
caaaatttcaaatgctagtgatcaatcatcaacacagagctgagtgtgttgctctgtgaatccaccttcttcttccattggaggaccatttcctcctgcaatagaaatactaccacacttttcttctttcacttctctaagctgcttagctaaacgctccttcatttcttcactcttcgttctcgcgtacccgtgtcacggtaactcgtggtgaagtgttcgaaaatgactgtcacacctatgatctcagatcacgactgggaaacttggtgtccatggtcagaccattctgactggagtgccagaccacgttgggctgactccaggttctggatagtgtcttgtgactggtgcttctgatggtgccacagcttcacacagcaaaagtctccatgtgcttacaatggctgatagacaggggctccggttcatgtactgatcacggttcaagctatggtggatgactcacagaatggctacttgtgcgcaggatgactctctggagatcaaatcatgcttactgagagccatgagagt

SEQ ID NO: 205950 - DNA, 478 bp, Glycine max
caggctgcgcagtgtttgaacgttgaaggagagcgtagaggcagtggttttctttttttgatttctctttgtagaatcgaatcgagttaatttttgatcgtgtgagtgtccgatcttgaaatccacaacatcaatggtgagaggattgctcaacaagctcgtctctcgctccctctcggtcgccggaaaatggcagcacaattaactccgccgccttaacatacacgagtaccagtgtgctgaattgatgagcaaacacggagtcaacgttccgagaggcgtggctgtttcctctgttgaagaggccagaaaggtcatcaaggaccttttccctaatgaaaatgagttggtggttaagagtcaaactttagccggcggacgaagtttgggaactttcaaaagcggccttaaggaggagtgcacattgttaagactgaccaaggtgaagacatagctgggaagatgcttggacagatac

SEQ ID NO: 205951 - DNA, 555 bp, Glycine max
aaacaaatcacgggtgaatttattatatgatgaatccatcttcaattactgagtttttcaatacaatggtaaccccagaacggatgtaaaacccttccgaagatctatcagcctcttgtataccctctgagtttgctattacaacattctttccgattctagcgtttttgtcaataatacagtccttgatttttgtattttctcctattccaattggaactcttccttcagctaagagtgctgccacttctgcatcggtttcataataatcagcaccaagcatcactgtatcctttaagtgaatatttgagtttattctggatctgattccaacaacactgtgctctatgaaggaattattcaagaagcttccatgtgatataattgaatcaacaatcttgctattgtcaatctttgatggtggtaagtttctccgtgatgtatacattggtttggctgcatcataaaagctaaacctgggtggatgctcagtgagggcaagatttgcctcaaagatgatctgtagtacctatgtttccagtatcattgatagat

SEQ ID NO: 205952 - DNA, 434 bp, Glycine max
gaacggcaattaatttacaatggccgtcacgaaaagcctctcaatcttcctcttcatcgcaatgagctgcgtcgccgcagctcaggcagcgaacttcaacatcacaaataactgcacctacacggtgtgggccgctgccgtgcccggcggcggcgcaaggcttaaccctggcgaatcgtggaacatcagcgtgacgaacggcacaacaggaggacgcatctggggtcgaacaaactgcaccttcgacaacgcgggacgcgggaagtgcctcaccggcgactgcgagggtgttctggagtgcaacaaaacaggtacacccccgaacacggtcgttgatttcgcgttgaaccagtattacaacctcgacttctacgacatcttcctcgtcgacggtttcaacgttcccctacagctgaccccgacctacaactgca

SEQ ID NO: 205953 - DNA, 555 bp, Glycine max
gaacggcaattaatttacaatggccgtcacgaaaagcctctcaatcttcctcttcatcgcaatgagctgcgtcgccgcagctcaggcagcgaacttcaacatcacaaataactgcacctacacggtgtgggccgctgccgtgcccggcggcggcgcaaggcttaaccctggcgaatcgtggaacatcagcgtgacgaacggcacaacaggaggacgcatctggggtcgaacaaactgcaccttcgacaacgcgggacgcgggaagtgcctcaccggcgactgcgagggtgttctggagtgcaacaaaacaggtacacccccgaacacggtcgttgatttcgcgttgaaccagtataacaacctcgacttctacgacatctccctcgtcgacggtttcaacgttcccctacagctgaccccgacctacaactgcagttccgttaaatgcgccgccgacatcatcggagagtgccccactcagctccaggttcctggcgggctgcacaacccctgcacggttttcattacgactcagtactgttgtagcaccggagc

SEQ ID NO: 205954 - DNA, 352 bp, Glycine max
aattgaaccacattttattgaatccaatatctatgatgactacaactattataatgttcgagctcttaaaagcttacttttcaaggaagtgctgctcttgaggagcgggttaaagcttacaggactttcagcccctcttgaggagatttggccttaccatgcaccttcactataggactgccaacgatgtcaccgtcagctgcccataccggtaccctgtatagatgctcaggttttgaacatccttgccaactgggagggtttagtttcagcctcttggtttcctggagaaagaactgaacgttgcccctaaccgatgcccgggctacaacgacccccactgtgctcacag

SEQ ID NO: 205955 - DNA, 560 bp, Glycine max
  unsure (1)..(560): unsure at all n locations
tttttcttgaaaaatgatggaactttgacgccattggccattgagttaagtaagccacatcctcagggtgaagcatatggtcctgttagtgaagtctacgtgccttcgagtgaaggagttgaagcttacatttggttactggcaaaagcttacgttgttgtgaatgatgcttgctaccatcaaatcattagccattggctaaacactcatgcggttgtggagccattcgtcatagcgacaaacaggcatctgagcgtggttcaccctatttacaaacttctgtttcctcactatcgtgacaccatgaacattaattcacttgcccgcaaatccttggtcaatgccgacggtattatagagaaaacattcttgtggggtaggtactctttggaaatgtctgctgttatttacaaggattgggtnttcaccgatcaagcattgcctaatgatcttgtcaagagaggagttgctgttaaagatccatctgctccccatggagttcgacttttgatcgaggactatccttatgcttctgatgggctagagatatggatgctatc

SEQ ID NO: 205956 - DNA, 533 bp, Glycine max
acaaatcaaatcgacaagtatatataatcttagcgttatactccaaagtctatctacaaatgaaatcaaatagaaacaggggtaaggcaaaagaaaagaatttaatctttctggatgaacattattctagtccatcaatattatctaactcaccttcacagttgctgatatagcattcccatacaaatcattcttaccgaggttctcaaaattttgaggaaactgcccaaaagcaatttcttggcctttctcttaatccatgaaaaaacaaagggcatctctcactgattgtgaatggtttgagtacatgtcacaatctataattagaatgatttttgcgttgctaatccttgaagagactcttagcaatgaatttatagctccagctttggagttgtgatgatattgaggtctcttctcacgagccatttacaccagagttggcataacaaacccatctacatccttcgaattgtgcgggttcctttcatgaagtagtttcttgaggattgtatcgtgatcatgtcgagaat

SEQ ID NO: 205957 - DNA, 460 bp, Glycine max
ataatcgacaacaactcctcgatgtccatctcgggtcattactgcattcgccttttcaacaattcccctttctgggtaaaagacgacacaccccagaggccaaaacataacaatagaagcaagcaaataactaaaatatctcagtcctgaaacaagaattaacaaaaacaactacaaaggaacgacaattagcatgggagtcttggttgttcttcaagcgagtgtaggattctctgcaggagaagtcctacacacgatatctttaagagctggacgaagctccttgctacagaactggttatactccaaggtgtcaccgttgtccttcttaacctacaccaccaaaaacgacggcgtcacggcgtacaagtccgcagcaatagcgagtttaccttttcgccctttgtcttgaccctgcaacctaaccttagtctagctcttcttcacgtggaacttcacc

SEQ ID NO: 205958 - DNA, 493 bp, Glycine max
ttttcttacaacttattcaccactcgttcccgttactccccagcaaccataattattttttttgacaagcagctcaagaaaaatctgcaaagaataaaacaagaggaggaaatgcaacttacttgttgatataaacttcagacagagcgagttgttgtaaagctagccttgttgcagccatggccacccacgcggctctagcttctacaaggatccccactaacaccaagttcccatccaaggcttcacactctttcccaacccaatgcgcctcaaagagacttgaggtgacagaattctctgggctaagatccacttcatgtgtgacatatgctaacgatgctagagaatcttccttttttgatcttgtagcttcccaactcactcccaagaccaatggatcatcaactcctgtgaggggagagacagtggccaagttgaaggtggcaatcaatggtttccgacgcattggtagaaacttccttcgctgctg

SEQ ID NO: 205959 - DNA, 543 bp, Glycine max
gcggtcgtcctttttttttttttttttttttgagcataaatcggaaaaaaattttattgacactttattttctccctttacaaactacaaaatttagaactatactgaaaaaaagagaaaaaatacatttaaaatctggcatcctcgaagccatgcaagtcactgactctgttcatagactttctcataatagccactttagccagtctctcagctactctccaagccgacatcggcgtaagtggctcccccttttcatcgaagcaattattattacaactacttcttaacttttggctcctcagctcggcttgttcggattcgagccagcgcaagcactcatcaccctgttcgcggctcacagatgctcgagccgaggatagcaactcaagcgcgccagacacgtcgttacgagccatcaaccttctcgactcggctacggcgcgagcgctgacctggcaacgtcttaaccgttcgattctggggtcgcatgatcgaaccgtgcggtgtcgcggaacgttaactcacgatccttggaaatac

SEQ ID NO: 205960 - DNA, 500 bp, Glycine max
gaaatctgaagctaacttaagggaaatgagatggccaatggcaacactagtcatcgcttcaagctcttgcttttccttctaactctgcactcttcattcgctgagattttcttcgaagagagattcgaagatggatggaagagccgttgggtgctatccgattggaaaaggagtgaaggaaaagcgggtaccttcaagcacacagcaggaaaatggtctggggatcctgatgacaaaggtcttcagacatataatgacgccaagcattttgccatatctgcaaagatacccgagctaagcaacaaggacagaaccctggtgctgcagtattctattaggtttgagcaggacattgaatgcggtggcggttacatcaaacttctttctggttatgtcaatcagaagaagtttggtggtgataccccttatagtttgatgtttggaccagatatatgtggttcacagacaaagaagcttcatcttatactatcataccaggg

SEQ ID NO: 205961 - DNA, 449 bp, Glycine max
acagaaatgtaacttgatattcaagtgcctcttggaccctgtagatggaaggaaggagattcagggtaccgtgcttcaattcaaatccttatacatcctttaaaaaaaatgcaaaaactaaaatcaataaacacttttttttgctcggcaaaataaataaacactgactaatgagagcatcaaacctcaggagtacaatacaaataatgacccggataaaccatttgtcactcaatccttgaatctctgaagtaaacaccaaatcaggtcctcttcctagcaattacacagatacaacacgagccttgtacatgattatatacgccatgtgccaatcaccttctccggatagtctagttatgtcttcttctagttttggtttgggattggcatcgtcaaactctatccatttgccattttcttgctagacccaaccaacataatgtcct

SEQ ID NO: 205962 - DNA, 332 bp, Glycine max
ctgaagcagaagggttcctcactctcttcatctgattgaacaaaatgtacacctcgaggaagaaaattcacaaggataaggatgccgagcccactgaatttgaggagacagttggacagtacttgttcgacttggagaacaccaatcaggatctgaaaagtgacttgaaagatctctacataaaccaagctattcaaatggatgtggctggtaatcgcaaggctgtagtcatctatgtgcctttcagattgaggaaggcattccgcaagattcatcttcgacttgtcagagagttggagaagaagtttagtgggaaggatgttgtcttgatt

SEQ ID NO: 205963 - DNA, 432 bp, Glycine max
cacgtggcagagcctcttctgaattgctggcccttttccatgctgagagagaaggcactagaagtcgcaattgatcatattcgttatgaggacgagaacagtggatacctttgtattggtagtgtagagaaggtgttgtgtttgattgcacgttgggtcgaagatccaaactcagaggcatacaagcttcatttagccagaatccctgattacttttggcttgcagaagatggattgaaaatccagagtttgggttctcaactgtgggatgctacattagctatacaagcaataatatcatgtgatttgagtgaagagtatggacctacacttcgtaaagcacaccacttttgtaaggcttcccaagtgcttgaaaattcatcaagtaatttcaaagcaatgcatcgacacatatccaaaggagcatggaca

SEQ ID NO: 205964 - DNA, 489 bp, Glycine max
ccaagattaatctgaacaagttgcgtgtccctgctgtcactgctctctgagcaaaaccagaagaacacatcaatccaaccctgccaaaatcaatccccagataccattccccttcccataacaaagacaacccaatcattgtttgttcacatccgaatccacaaaatactgttataattattctgattcacgaaaaacaggaaaacccgaatctctctctttgttcctctcggggtcacgaaaatgggcacagagacctcatcggtggatatttctgaacccttgctcgtggattctcacgggaacgaggaaaaggaggagtatttgcgcgaggaggttccggaatggaaggagcagataacaataagagggttggtggtgagtgctgtgttggggaccttgttctgcatcatcacccacaagctgaacctcaccgttgggatcattccttctcttaatgtggctgctggcttggtggggttcttcttt

SEQ ID NO: 205965 - DNA, 498 bp, Glycine max
tggtggtgaaattgcctggccaacccaaggttgggtttaagcaatttgctggatatgttgatgtagatgccaagcatggaaggagcctcttctactattttgtggaggctgagcaagaccctcacaagaagcccctcacactttggctcaatggaggtcctggatgttcctccattggaggaggtgcttttactgaattgggacccttttatcctaaaggtgatggacgtggtctccgaagaaattcgatgtcttggaataaagcatccaaccttctttttgtggagtctccagctggagttggttggtcatactcaaatacaacttcagattataattctggagatgcctccactgccaatgatatgtatttgttcatgctgaaatggtacgagaagttttcatcttatataacaagggagctgttccttactggagaaagctatgcaggacactatataccccaatttaactaatgttttattggaccataatgct

SEQ ID NO: 205966 - DNA, 494 bp, Glycine max
tgcacgttttgcaatcgaactcgacaatggccaacagcaacctccctcgaagaatcatcaaggaaacgcagcgtttgctcagtgagccagcacctggtattagtgcctccccctctgaagagaatatgcgatatttcaatgtgatgatccttgggcctacccagtcgccttatgaaggaggcgttttcaagttagaactatttttgccagaagaatatccaatggctgctccaaaggtacatatttactattattctttctaatggcaccatggcattcttttggtgttaagtttctaccgaattcttatacaccaaaaagaaatgaaactaagtctgtaaagtgtttgctggataattgcttagagtaaactacacaaacctcccccggggtttaaggaaattagagatgtctcccctcaatttttaaaagctacacaaacctcccttgaggtttaaggaaattatagatgtctcccctcggtttttaaaata

SEQ ID NO: 205967 - DNA, 523 bp, Glycine max
gacattcatagatcagaatatcagacttacatacgggtgaacatgatacgggtgaacatgataggagcacaatactatacataaaaactgacacaacaccctattagatatgaaaaactagatagcatccaattacaaaacttaagcatacataagaaaattatgcacacataagtttgcacgtttatttgtcaatgagaggtacgttggaaggaaagaaaaccacacaccacacaccacacactctcattagatagagatgctgttgggaattcctctgaaagtaaggccttccccactggtaggaagaagcacagtgtagggcatctgcgccggtccattacggttcctaaggcttgaattcttgttcctccctgagattttgtcctcaatttccttcagcttgtttccaaacttcttaaaggcttgaattgcctttgtgtcatcagtccaatttggattgtccctctgtccaaggtagacctcatcagaagcatgccttgacaatatctctatcactgta

SEQ ID NO: 205968 - DNA, 522 bp, Glycine max
accgcatcagaaagcttgctgacaactgcacaggtctccaaggttttctggttttcaatgctgtgggtgggggaactggctctggacttggttcccttttgctggaacgcctttcagtggactatggcaagaagtccaagcttggtttcactgtctatccttcaccccaagtttcgacctctgttgttgagccttacaacagtgtcctctccactcattctcttcttgagcacactgatgtggctgtcctgctcgacaatgaagccatttatgacatctgcaggcgttcactggacattgagaggccaacctacaccaaccttaatcgtttagtttctcaggtgatatcatcactgactgcttccctgaggtttgatggagccttgaatgttgatgtcaatgaattccagaccaaccttgtgccataccccaggattcattttatgctttcatcttatgctcctgtaatttcagccgagaaggctcaccatgagcagctatcagttggtgaaatcaccaaca

SEQ ID NO: 205969 - DNA, 588 bp, Glycine max
  unsure (1)..(588): unsure at all n locations
atcaattccgaataaaaattaggtttttctcttcgtctttcattttcttattcttcaccaaaccgataagcaggtgagactaatccatcatccaaacctttccgatccaatgacctctaaactaattgcttccaatctccgtcaccaaatcacaaaaatcagctcaaaaccttcgccgccagcttttttccacggcggcggcggtggcggtgcctgaacacgatgggaacaactccaactcgtcgggaatgacgatgaagggcgttcgaatctccggaagacccctttacctggacgtgcaggcaacatctccggtggacccgcgcgtgctcgacgcgatgctccctttctacctctctcgctacggaaaccctcactcccgcacccacttctacggntgggaatccgacgaggccgtggaacacgcgcgcgctcaggtagcgtccctcatcggcgcgtcccccaaggagatagtcttcacctccggcgccaccgagtccaataacatcttcgtcaagggcgtcatgcatttctacaaggacaagaagcgccacgtcataaccacgcaaacggagcacaaagtgcgtc

SEQ ID NO: 205970 - DNA, 541 bp, Glycine max
cagaagagctcgacaacggggactcaacgaaatcccaatcacttaagattaaagtagcaactcgtcaccccaagaaacaattattttccttcgatttttctctttgtgaaaccaaatttaataatttattctttaatctaggaaggaagcaaacattggttgttacattttctattgtagaacatccaacatatatgctcaacacttggctttctcatagacgtgccattgactttggagtagatgaagcaggtgcactcaagggaatgcctttgagtgctctttcttccaaataccttgagggtttatagaagttaccatataattgtgcccatttttttaggctggtatatatatgattggccccaaccaagtctgcccagaaaacaatgccaccccggtaatttgggaagctcattccaagaacagatgcaatgtcaaggtctgatgctcgaataacaactccatcttctagaacacggcatgcctcattaactactgggaagagtatcatcttcacgatctcttggtcagtaacaga

SEQ ID NO: 205971 - DNA, 462 bp, Glycine max
aacccccaacgccacgccactgtcactttctttctctcacaaatcacaatgtgctccgataactacaatctctcaattccccattaattaaaatcaaaatcaaaatctaatctgggtttctcccatcagaggacaaagcttccgactttgcgggattcgttcgtatttgtttcagtgctgtgatggggaaggtcgcggtgggagctgccgttgtctgcgccgccgccgtatgcgctgcggcggcgctggtggtgcgccaccgcatgattagttcccggaagtggagtcgcgccatggcgatactgaaggagtttgaggagaagtgtggcaccccaattgtgaagctaagacaagtggctgatgccatggatgttgagatgcacgcgggtctcgcatctgaaggtggtagcaagctcaatatgttgatcagttttgtcgataatctcccaactggggatgagg

SEQ ID NO: 205972 - DNA, 501 bp, Glycine max
ggcactgttcggagatggcgccgcagcgttgatcatcggatcagaccccgacccagcagtggagcggccgatattcgagatgatatcggccgcccagacaatcctgcccgactctgacggtgctatagatgggcaccttcgggaggtgggactcacgttccacctcttgaaagatgtgcccgggatcatctcgaagaacattgagaagagtcttgttgaagcttttgagcccatcgggatcagcgactggaactctatcttctggatcgcacatcccggtggtcccgcgatcctcgatcaagtcgaggagaagctccggctcaagccggagaaactccaatccacccggcatgtgctgagtgagtacggaaacatgtcaagcgcgtgtgttttgttcattctggatgaaatgaggaagaagtctaaggaggaagggaagagcaccactggagaagggttagagtggggggtgctattcggattcgggccgggtctaacccg

SEQ ID NO: 205973 - DNA, 380 bp, Glycine max
tgaagttgctgatcagaattattcccggagcgacaatgctcactggccgcggtcgcccttttttttgaagtttcaatattttactaatatatgctaatatatgctaatctaatatttatttatatctatctacctatatctataaaagaataggtagatggatctcgctgtttacttggggggatctattgagccggaatacatgtgcggcaagctaaacgaaaaggaccattttgtaaaaaactggtcaaggagggccaaacatggattcacctatataagccgaagctccagaaccacaagggacagcttgaataccgcttgtgaataatccaaggaacatgacaggtacacgaacctgcaaaggtactgatgaaaca

SEQ ID NO: 205974 - DNA, 323 bp, Glycine max
gcttaaaggaaatcatatgcatttctcattaatactaatgaaactaaactgataatagcgatatgaaaaggtttgcatctctattgttgaaatgttattacattataaacttttcaatatgagctaataattattgctacatatttccaccttatgcagaatgagatgagcaccatgttggggtcctagagtcataacccatgttggagcaccattataggtggtagaaagttcaaacgagaaacgctgtatgaacattgacaaagcaacctttgctgtctaaacagctacgtcatgtccgatgcatttactaagaccccctc

SEQ ID NO: 205975 - DNA, 470 bp, Glycine max
cctaaacataaactgtttttcccaaatccccttcccaattttcaccaaaacctaagactccgaaaccaatcttcgatcatggccgccgaatcacaacctcaactaatcgaagagagaagagaggagcaagaactttaagtcctggtatatgagccaattcgcgaccatccatgccctgatgcgctgtgccatcctctactcctacgccaaggagcgcgcgggtcctctgaagcccggcgccaacaccgtcgaggaggccgtgaataccgtcgtggctccggtctacgacaggttccaccttgtccccggcgaggtccttaaatactccgatcgtatggtcgccgaattggaccgccacgttcccttcaacgtgaagtaggtcttcttccaggcccgctccgtattctacgaagtccgccgtgatggagtcttccgctacaccaaaatcgtttacttgaagtatgagccca

SEQ ID NO: 205976 - DNA, 514 bp, Glycine max
  unsure (1)..(514): unsure at all n locations
ctggtgtgatgtctagnagattaattctccgtgtcgacgagtctcacatactcagcgtaggtcggcggtcgccctttttttttttttttgcacgcaaacaaagtgatttattaatccattcgatgttcaaatgtgtatagaaacatttaaggtctaaatgcccaaatggtctctaacagaagctaatatagacaactatgaaataacaataacgtatctggcaaaccagacttattttcacagggacagactattcaagacacttatggaaactactctttctcatcttcctcattccagcactttaaagttgatctaagggaaccacagtcactagtcttaccgaattcttggtcgacaacagaaccagccattgcaagcccttcgtggctgctctcttacgacagtatgccttagcatccagaaagcgggtctgatcaatcgacttgcttgcaccatccacatggactgcaccagtaaactcagatgggaggaaacatgcctaatccctctg

SEQ ID NO: 205977 - DNA, 494 bp, Glycine max
ctcaaattcgatttgttccaaattttcttcacaaaatgtctggtcgtgggaaaggtggcaagggtttgggaaagggaggtgccaagaggcacagaaaagttcttcgtgataacattcaaggtatcacgaaacctgcgattcgtaggttagcgagaagaggtggcgttaagaggatcagtggtttgatctatgaggaaaccagaggagttctgaagattttcttggagaacgtgattcgagatgctgtgacctacaccgagcacgctaggaggaagacggtgactgccatggatgtggtttatgcgctcaagaggcagggaaggaccctctatggtttcggaggctgaatgattgattcttagtattattaaattatgttgcaggatataatattatgcctgttcttctgaaattcggtgtgatgtttagtttaaattcgttctgtaacatatgaatctttaaaggttctgttcggacagaaaatgtactacttt

SEQ ID NO: 205978 - DNA, 548 bp, Glycine max
tggtcggcgttcgtccttttttttttttttttaaatgaaatccatagttacattctcaacgagaagacattatttaattacattggaaccaacagtttgattacaagtactaacaaaatgaggcaaaaagaaaacaaacatttttttcctgataaagctaaagctatagccatttttgaagcctggacaaaaagtgcaaatactaaatactaattactaaaaaaacatatgacacaaacacacacatgaacatggaagaaaacttagtatgcccaggtccaaagggcgtgatcttcctcagaaaatccaaaattacaagaactttcaggcgggtcggagtaatccacatcttcttcaagtttgggaaagaggtacgaagggtagagacttttgctgaggttatcttcttcatcttgtgacatatccgattgatcatgctcaaacacataagaagaatcaccatgctctagcagtgcggagttaactccatcggtgtaatgtggactatctgaatccaaaatatcactcctggctgaactgatatcttc

SEQ ID NO: 205979 - DNA, 438 bp, Glycine max
ctcaacccacaagaatcccttcctttctggctttctctcgctaaaactatcatgtactacaacgcggctcccgaccttcccatatccaacccccaaaccaccgacgcaggcggcggcgccatcgaggctccagcgaacaacccggccttccgcgccttcatcaacaacctctccgaggacctccgacacggtctagaccagcgccgtccgtggtcggagctcggggaccgatccgcgttcgcgaagcccgagtccttcttcgaagccaccctccgcgtacgcaagaacttctgctacttccgcgtcaactactacgccgacgtttcactcagtctcgcagtctctctcgtcaccaatccttgtgctctgatcctcctcgacggcctcctcgcctactggaccttgctgtacctgttacgtccgtcagatgaaccactc

SEQ ID NO: 205980 - DNA, 470 bp, Glycine max
cacatccacacatttatagaacagaaggaacacgtttccacaaagtacttcatgaataattcttcatttttagatagttacatggactaagtttgagcttaaaacatcgatttgcaaagtttattgcgccaaagcccttgtgttgtagacaaaaagtgcaccaccagcaagaagaccaagtagagtcacagcccaaatagccaagccagtcgtaccgccagcgtaaacatcaccggttggaaaccagtccttggggttctaaataggactgtaaccttcgacattagcaccgtatttgtttacaaactggtaaacgccttttccctttcctttcctgccagatgcataaactctttcctttaaagccttgccaccattaattccataaggctttgtaatcttgatctttttgccaccattggccacaactttgaatgaaaaggagttccttgaaagggagggaaggcctt

SEQ ID NO: 205981 - DNA, 531 bp, Glycine max
ctaattcagaagctttagtaaaagaaatagttgggcagacatctggttacatgcccagggatatatgtgctttaattgctgatgctggtgccaacttatttcccagaaacaatgctaaagtagacaaagatgtacatgatgatgtaggtagttcccttagttccaagatggcagaggacaacaatcacgggaaagtttcacctcagattactggaaaagaagacttgttgaatgctttggaacgatcaaagaaaagaaatgcatcagcattgggtactccaaaggttccgaatgtgaaatgggaggatgttggtgggcttgaagatgtcaaaaaatcaattctggatactgttcagttacctctcctgcataaagatctattttcatctggattacgtaagcgatctggtgttcttttgtatggtccccctggaactggcaaaacattattagcaaaagctgttgctacagagtgctccttaaattttcttagtgtgaaaggtcctgaactgatcaacatgtacattggag

SEQ ID NO: 205982 - DNA, 434 bp, Glycine max
cgaagtcgctggtccggaattagtcccggagctcctgctcactaggccgcggttcgccctttttttttttttttttttacttttgcattcgaatccatgagattcacagattaggattatcttcaaatgctatacggagacattaaaagagactcctgattagaatacgacagcgaggttataaagttaccaacgtgatccatcaatgatgctctacctgttcccgtagatcacagagatccatatgttcttgcatagctgccttgagaaggactggtggtttgccagctgactgttttggaacaagatctgggtccttcgacttgaggctcctacgtgtgtgcatgggctcgcaggtcctctggaaactcccttacgtgcccggggactcatgagtcaagataaccattcgttgcccgttttcttgggatcat

SEQ ID NO: 205983 - DNA, 527 bp, Glycine max
tgttggtgagtgtcactgctgaagagagaaccacgcagaactgacgcaatgggaagcacaagtttgcttcatctattacttggtgttgttttggctctgctgagtgtgtctcttgtggaaggagaagatgcatacaaatactacacgtggactgtgacatatggcattctttctccactaggtagtcctcagcaggtggttcttatcgatggtcagtttcctgggcctcaactagacttggtaactaatgaaaatgttgttctcaaccttgtaaacaagttagatgagccatttcttcttacttggaatggcatcaaacaaaggaaaaactcatggcaagatggggtattgggaaccaattgccccattcctccaaactcaaattacacatacaagtttcaggtcaaggatcagattggaacctacacatactttccatcgacttcactgcataaagcagctggagggtgtggaggactcaatgtctaccatagatctgtcatcccagtttcttatccgtaccctga

SEQ ID NO: 205984 - DNA, 526 bp, Glycine max
  unsure (1)..(526): unsure at all n locations
gttgattgttgaagtttctcttctcttgctctgactccaatatttcctttaaaataaaaatagcattctcttccttcttccttcttccattcattcattcacattccacgctttcttcagagcctgcacttgttccaccctttaacataccactcctnctcttncacaattctcttatccgtaatctggcactcttcagagaagactttgtaagataaaaagagaaatggccttagaccagtattttgatgaggctgtgccccagttggattccttggaagataaatcgtctctcgaaacatggaaatgtggcagtgacgatattgcagattcggatagaaatgcctctggtggctttgattgcaacatatgcctggagtgtgtgcaagatccagtggtcactctctgtggccatctctactgctggccctgtatttacaaatggcttaatttacaaactgcctcttctgaanatgaagaagagaagcaaccatgtccagtctgcaaatcagaaatctcacagtcg

SEQ ID NO: 205985 - DNA, 585 bp, Glycine max
atctgactggtcggcggccgccctttttttttttttttgaaataaacaaacttcacattgatctcattaatgataaatccatgcaccaaaggaaacaactttaaacctagcttattaattactatacaataactcgtactgacgacaaactgttatattattcatgatcattatgatacataactattcttcacatgatacataatgaagtgttattaccattttttctaaaactaaaaatcttgattatgtaaattttagtctgcatgaccatacacatgtacgtagtggtatggaatgatcatgtatacggacacatcaatctgctttaaaatgtttttcaattgatcccagaagagtggaattaatataatcttgtggaccgtgagcaggtaagccaggaatcagcagaccaaccaacctgaaactaaagagaaaccatccttctctatagtgaggtccatttttgtacgctatggtaaagctccttattagttccaaaacagcattgaacatcatgggtatcacacaccatggcgagaaatagttcttattcggctcttcttcgagaactctgagttcata

SEQ ID NO: 205986 - DNA, 470 bp, Glycine max
tgggatatgcgctaattcagaacagggtcgacgagctacacatactcgcgtaggccggccttcgtcctttttttttttttttttttgtttctattttcattcgaattcattttatttatatattaatattatattcaaatgaaataaaaagatattaaaagatactaattataagaatttgaaagtgaaattaataagttattaaatgattaatcaatctttttctacctgtacctgtagtgaaaagagttccatctgttcttgaatagcttccttcaaaaggacttctgcttccccattgaatgtcttggcagaagatatgagttctttgaattgcggtttattcgtgtgaaagtaagcacgtaactcagcaggaaattcccttacctgtccaatttctaatgaatcatgataaccattcgtttcagtataaataggcataatactgaacttccacgggaagaggagct

SEQ ID NO: 205987 - DNA, 505 bp, Glycine max
caaaaagctcttttccttctaaatttgattccttagttcagcattctattattatatatggcttcttcaccttcctcagaaaacaaaaacctagagggagtagctggtggtgccggagagaaacccattccacttggtgagaaccgtttggagaagcatgctgcattcttttgacttgaataaagatggtgtcatctacccatgggagacttttaaagggttgcgtgaaatcgggactggggttttgctgtccgttggaggtgctattttcatcaatgtgtttctcagtcagagtactcgtcccggaaagtttccatctatactttttccaattgaaattaaaaatatccaacgcggcaaacacggctgtgacactggagtctacgatactgaaggaaggtttgtacctccaaaatttgaagaaaattttaacaagcatgcacatacacatccaaatgctttgacatatgatgagttaacggagatgataaaggcaaatagagag

SEQ ID NO: 205988 - DNA, 423 bp, Glycine max
taggccggcggtcgccctttttttttaaatttttaaatttttttatacttattaactttattctgagcatctcgggccgctcgagggataaaggacttgaactgaacttagaagcatgaggaaacacacgcaatcaactgaatagtatgcatagaaacaagatgacgtaactatatatattagaacgaaaattcctaaccattttcaaaaggaaaaacatgaaattctaaggctccactgttgtgacctgctgccattccccatcaactgctgccttccacaatgtgacattgacggttccatcatccacagacaatatgattcctgttaatgaccatgagaccctccaaacacgggtgttgaaatcattcaaaacctttggttaccactgatcccactgtttcaccagggagcatattatca

SEQ ID NO: 205989 - DNA, 501 bp, Glycine max
cctaaacataaactgaatttcccaaatccccttcccaattttcaccaaaacctaatactcccaaaccaatcttcgatcatggccgccgaatcacaacctcaactaatcgaagagagaagagaggagcaagaacttaagttcctggaaattgggcaatttcgcgaccatccaggccctgatgcgctgcgccatcctctactcctacgccaaggagcgcgcgggtcctctgaagcccggcgtcaacaccgtcgaggaggccgtgaagaccgtcgtggctccggtctacgacaggttccacctcgtccccggcgaggtcctcaaatacgccgatcgcaaggtcgccgaattggaccgccacgttccctccaacgtgaagaaggtctcctcccaggcccgctccgtcgtctccgaagtccgtcgtgatggtgtctccgcctacgccaaaatcgtttacttgaagtatgagcccacggcggagcagtgtgccgtcttcgcatggag

SEQ ID NO: 205990 - DNA, 526 bp, Glycine max
acctaacgcagcatcgctattctcttcattccatggctttgcccaaccagcaaaccgtggattaccctagtttcaaactcgttatcgtcggcgatggtggcacaggaaagacaacctttgtgaaaaggcatctcaccggagaattcgagaagaaatatgagccaaccatcggtgtggaggttcacccattggattttttcacaaactgtggaaagattcgattttactgctgggatactgctggacaggagaaatttggtggcctcagagatggatactatatccatggacaatgtgctattatcatgtttgatgttactgcccggctaacatacaaaaatgttcccacctggcaccgtgatctttgcagggtctgtgagaacatcccaattgttctttgcggtaacaaggttgatgtcaagaacaggcaagttaaggcaaagcaggttacattccacaggaagaagaatttgagtactatgagatttcagctaagagcaacttcaactttgaaaagccattctta

SEQ ID NO: 205991 - DNA, 525 bp, Glycine max
  unsure (1)..(525): unsure at all n locations
gcggaaatggaacaagccttcaaataagaaaaaatcacaaaaggggaattatgcaaggatgttggcattggctgcacatgccttggcagagaataaacgcgaacctaaagatttgtggcaagaacccttcgttcctgcttcttcttggagaccttgtgctgatcagcggaattgggaacccaatggtatgtgtggttgaaatttaacaatgattcatattgtgtatgtttataagtgtgcaactacaaaaggaaaataaaagttcaagctgatactcatagcctgctctcttgtactgtactccaatagagggaaaaaatggatacattttggttactgcaaatggtgggatcaatcaacaacgagtagctgtttgtaatgctgtcgttgtggctcgtttactcaattcaactttagttatccccaaatttatgtacagtagtgtatggagagatgtgaggtaatgcccgtctattctctcgtctttnccattccaacttgcctatactcatatatntcctaatg

SEQ ID NO: 205992 - DNA, 501 bp, Glycine max
  unsure (1)..(501): unsure at all n locations
agttattcagttaaaccaatgattcgttattggagcagatagcaacaaccatctcatctgggaaaagccatctttttctcaacaatgtctttgtcatttgatccaatagcgcttcgttagataggaacagatttgataaatattgataactctcagatagagtattagaacggaaaaatccattagataatgaactattgattctaagccatctctggcaatgaatcaacaattcaaaatgcttttcttgcgtattcttgataaaccagtgtttatatatagatgtaggaagatctgtttgggaagtaagaagttcccttgacatctcttcatctgtaaagaattgtcgatgtgaaaacacagagacaaaaggctgatctttgaataggaaaaagagtggatccgcggggtcccaaatgaattggcttattcgaaaaaagccctgttctttggaagatctatctcgtgtctggtactgcatggntccaccctgcaagaact

SEQ ID NO: 205993 - DNA, 525 bp, Glycine max
cactgatctccattcccattccatggcttccactgaatcatcccctttcaagaaaattcagattcaaagggatgacactacatttgacgcatatgtggttggaaaagaggatgctcctggaattgttgtgattcaggagtggtggggtgtggattacgaaattaagaaccatgccgtgaagatttctcagcttggtagtgggtttaaagctcttattccagatttatacagaggaaaggttggtctggatgttgctgaagctcagcatttgatggatggtcttgattggcaaggtgctgtgaaggatattgctgcttcgggtaactggcttaaagcaaatggctcaaagaaggctggtgtaactggattttgtatgggaggtgctctctctattgccagttctgtcttggttcaagaggttgacgcttctgtagcattctatggagttcctgcttttaacttgctgaccctgacacgccaaggctcctgttcaggctcattttggagaggtggacaattttgttg

SEQ ID NO: 205994 - DNA, 523 bp, Glycine max
agaaacgaaataacatctgcataatcacacaagtgaagtgaagctacacaacaagttcattgcttcactcacatcataacccccatatttatttatttaggtaataacacactcgacagtaaagataaataacaacagaacataaaaaccagaagtacttatatctccctcacttcatcttcgttctcgtcctcactccagcagcatttcagaatagacctaggagatgcactaccatcgcagccttgaacaaatgtttggtacacaactgcaccacctactccaagctcttcagtgctcctctcaccacagtagtatcctttgatgtctaagggaaatttattaagcttctcaccatgcatgtcaatgtgcaaagcaacagaaaactctgctggacaaaagcaagctaaaatcctttccacaagttcacctagagccatgtcattaaagtcataaccaacagcttcaaaacttgcgtaactgaaaccatcttcaggagtgacatggatggtggatatagcac

SEQ ID NO: 205995 - DNA, 554 bp, Glycine max
taaatttttcttctctcccttctttctctctctctctctctgaccattctcttcttcttctttttcttctcctctctctctctcccctccgccatggctgaggataaggagatgtctacctctgtcatcaatgggaatgattccctaactggtcacatcatatctacaactattggaggcaaaaatggggaacccaaacagactattagctacatggcagaacgggttgtaggaactggatcatttggaatcgttttccaggcaaaatgcttggaaactggggaggcagtggcaattaaaaaggttttacaagacagaagatacaagaatcgtgaactgcagttaatgcgtgtgatggatcatccaaatgtgatctctttgaagcattgtttcttttcaactacaagtacagatgaactttttctcaatttggtgatggagtatgttccagagtccatgtatagagtcttaaagcactatagcaatgctaatcaaagaatgccaatcatctacgtaaaactttatttgtaccagattttcaggggggtggctta

SEQ ID NO: 205996 - DNA, 549 bp, Glycine max
cgctcgtagctgattatactcggtcgaccgagctcactactcctaggccgcccttctcctttttttttataaattacaacttctgtgctttgtccatcatgtgttatgactgcggtcgccttgttaacaattcccctttctgggttaaagacgtctcaccccataggccatttcatatcattatatcctgcctattactcaaatatctcattcctgaaacaagaattaacaacatcaactacaaaggatcgacaattagcatgggagtcttggttgtcctacaagccagtgtaagattctttgcaggagaagtcctgcacacgatatctttaagagctggacgaagctcctcgctacagaactggttatactccaaggagtcaccgttgtccttcttaacctgcaccaccaaaaacgactgcgtcacggcgtgcacgtgcgcagcaatagcgagtttaccttttcgccctatatcttgaccctgcaacctgaccttagttctgctcttcttgacgtcgaacttcaccggctttggcaaatgttccaatc

SEQ ID NO: 205997 - DNA, 556 bp, Glycine max
tggaatttgaaggttatcatcatcatttatagatattattattattataagaagttcatcagaaatattcaatggggagctttgaaactgaactgatgaatcttaaggccacagagttgaggttgggactgcccggctgtgatgaaactaatgagaaaagttcatccagtagtggatctgttgttagaagcaacaagagatcttcaccagaacccagtgtggaagagtccaggtgcaactctaatggttcttcagattctaccaccacaagtgatcatgatcaagacagtgcccaacctgaaaaggtacaagtagtggggtggccaccaattagatcttttaggaagaacagtctgcaacaacagaagaaggtggagcagctgcagggtgatggaggtggaatgtacgtgaaagtgagcatggctggtgcaccttacttgaggaagatagatctcaaggtttacaatagctacccagaactcctcgcagccttgcaaagtttgttcacgtgcacatttggtgaatattcagagagggaaggttatcatggatctga

SEQ ID NO: 205998 - DNA, 495 bp, Glycine max
aaccacacacctcacctattagaagtaacaaaagaccctccctctcaaaagaataaacaagtataaaaaagaaggcacttccctcaaacagaaactaccctctatctctctcttttcaagccttaaatgagtaaaaaagagtgaagaaaggaaagaaaggagcaccatttttggtttgagaaacataattagcaagagagttcaaaatggggaagagagagtttaatggggtggtgttgatgatgctgtgtttgtgggtttgcggtgtcacagcctctgtgacttatgaccacaaagccattgtggttgatggcaagagaagaattttgatctctggctccattcattatcctagaagcacacctcaaatgtggccagaccttattcaaaaggccaaagatggaggccttgatgtcattcagacctatgtgttttggaatggccatgaaccttctcctggacaatactatttcgaagataggttcgacttggtta

SEQ ID NO: 205999 - DNA, 465 bp, Glycine max
tacaataattatcaaacctaaccagtaaaaatggtgaccgtggaggaaatccgcaacgctcagcgttcccatggacccgccaccatcttggccttcggcaccgccacgccgtccaactgcgtctcccaagccgattaccctgactactactttcgcattaccaacagcgaacacatgactgatctcaaagaaaagttcaagcgcatgtgtgaaaagtccatgataaagaagcgatacatgcacctgacggaggagtttctgaaagagaacccgaacatgtgcgagtacatggcgccatcgctggacgtgagacaagacgtagtggtgatggaggtgccgaagctgggaaaacaagccgcaacgaaagcgattaaggagtggggtcaaccaaagtcaaagatcacacaccttgtgttctgcaccacttcaggcgtggacatgcccggagcagattaccagctcacg

SEQ ID NO: 206000 - DNA, 461 bp, Glycine max
ctgggttactatactttggttacatgctcatagcatcctacgccttctttgtcgtaaccggaaccattggattttatgcgtgcttttggttcacaaggctcatctactcttcagtcaagattgattagttatagcaaccactggtttggattaatctaactcacttctgaaaggatgaagaccggtttgtgtaaggattccgaacatgacagtacctgaatttcaaaatccttacacaaaccggcggctcgagggagctcacctctattacaactgtcccagtggaaactattttgaatatcaggcttttgctattgggtctcgctctcaagctgcaaagacatatttggaacgcaggtttgagaattttgtgggctcttcacgagaagatctgatcaagatgcacttattgcaactagggagtccttgcaaggtgaaaaactcaggagttctgtgtgcac

SEQ ID NO: 206001 - DNA, 450 bp, Glycine max
taggtcggcggtcgccctttttttttttttttttttttttttttttttttttttacattctcaacgagaagacattatttaattacattggaaccaacagtttgatttcaagtactaacaaaatgagggaaaaagaaaacaaacatttttttcctgataaagctaaagctatagccatttttgaagcctggacaaaaagtgcaaattctaaatactaattactaaaaaaacatatgacacaaacacacacatgaacatggaagaaaacttagtatgcccaggtccaaagggcgtgatcttcctcagaaaatccaaaattacaagaactttcaggcgggtcggagtaatccacatcttcttcaagtttgggaaagaggtaccaagggtagagacttttgctgaggttatcttcttcatcttgtgacatatccgattgatcatgctcaaaca

SEQ ID NO: 206002 - DNA, 504 bp, Glycine max
ctgggttactatactttggctacatgctcatagcatcctacgccttctttgtcgtaaccggaaccattggattttatgcgtgcttttggctcacaaggctcatctactcttcagtcaagattgattagttatagcaaccactggtttggattaaatctaccaacactttctgaaaggatgaagaccggtttgtgttaggattccgaacatgacagtgcctgaatttcaaaatccttacacaaaccggcggctcgagggagctcacctctattacaactgttccagtggaaactattttgaatatcaggcttttgctatagggtctcgctctcaagctggatagacatatttggaacgcatgtttgagaattttgtgggctcttcacgagaagatctgatcaagatgcacctattgcaactagggagtccctgcaaggtgcaaaactcacgagtttctgtgtgcacacttgctgtggttggtgttggagagccattccacatttt

SEQ ID NO: 206003 - DNA, 403 bp, Glycine max
cttactaaagccaaataaaagaaacataagatgacgtacaatgctaaaagcatatgaatgtcgctaattagataccctgctcatttaaccatattcaaaccggcgaccaaattgatatttaacatacatactgatcggaaagtgctcgttcatttgatactgaaccacatttccagcccatcagtgatcttccaactttgtcaacaatctgagttcttgctcggcttctggccaatggacagtcacggctttactgcaacaaatttctatacactgcccattgacgatcttgcgttgaatgtctaacaacttcagccgttaaaatgcctactaccaacgcttttaaagtcaacgtaacatcatataatacacggggtataccctttcactcagctccacagga

SEQ ID NO: 206004 - DNA, 557 bp, Glycine max
cggctcgagcccggttttaagctgctttggaacacggtgaaatcatttcttgatcccaaaactacttcaaagataaatgttcttggaaacaagttccataacagattacttgaaattattgatgcaagcgagctgcctgaatttctaggtggtaattgcacttgtatggatcgaggtggttgtatgagatctgataaagggccatggcaggatccaaacattttaaagatggttcttagtggtgaagtacaatgttctagacaaatagtaacagtttctaatgatgaggggaccgtgatcgaatgtgataaggcatgttatccaatgccaataagaagtagtgatacatcaacagcagaatcaggatctgaagtcgaagatattacttctcccaagcaagtgggaattatacaaacccaaggttaactcctgtccacgaagaagcaagattgattggtagggctagtggtttctctgagtatgatgagtatgttcccatggttgacaaggcttgtgaactcgggtggaatgagaaacaagtaacaactcaaaactca

SEQ ID NO: 206005 - DNA, 603 bp, Glycine max
aaaagagtaaatattcgcccgcgataattttgattttattgaattttttttttatttttgccaattctatttattctttctaataataaaaaatattctaataactaataataaaaaggaaaataaagattcattagaatattataaaataacaaataatagaacaaaacaagattctttagttatatatgtaaaaaaaaatggtttatttataagaatacatattccattctatatcaaaacaaaatataaaaatttggaatagattctatgaaatctcaaaaaatcccgctattcaattattcattaaacatatgaatattagtgcatattattttatcgattagattaaatagattatctatatatatagatagatatctatttgaattgcttcattcgcgaggagccgtatgaggtgaaaatctcatgtacggttctgtaataaagatggaattgagaaacaaccatcaattataacccccaaagaaccagatttcgtaaacaacatagaggacgaatgaaaggaatatcctatcgagggaatcatatttgctttcgaagatatgctcttcaagcacttgagccagcttggataacatc

SEQ ID NO: 206006 - DNA, 591 bp, Glycine max
ggcaagtgttcttcaaaaaattgctagtttgtactcacttgattgcttcatcttaaatgattctgtaagtgaggttatgcctggatggagtaatactgatgatggcagtattattatttatctgatttctgataagaaggagttcttacctaaattaagcagctataattggctggttgttgttctaaatgttggaggcgaaagcttatgtcacaatccaaatatacttcagattgaaaacttagaggagtttccattgaccatatgccacttaaataaaagatcaattggaaccaatgctgtgactgtgagttatacaatgaagccttctcgtgtcgaagattttgcaaagaggggtgcatttcctttgtgtcctactcaaaatgggttgatgtttgtgcctctcgcatccaagctgcctttatcatctcaattaaagggtgttgacatagttcttcacaagccactgatgaaatattatcaattgaagataataatattacttttacacagaacatccaagcattgcaaagatacttggatcagcaccaggatttttgtgtattgatccactgagaatgtttattctta

SEQ ID NO: 206007 - DNA, 542 bp, Glycine max
atgcgcaatatgttaaaagtgtatatatgtggtgacagggtaaataatttacaaaagtgtgacccggagatgttgtatggagagcactcaaaggatgcagttgctcacctttcacaatagttggtctcaagctaaagcatttacacactataattgaggtggagtggattcccattgataaatgtagatgtcagctcagctcccatccaaattgttggtttcttgagttttgcttaattacgatcagttgaagtcgaagtactcggacccgatatcacgatgacaatgatagatcaggaggggacggtatgtatgttgaattgatatagaagccattactgattgaaagacaaaggtttactaactcgtcctgcaaatcaaggatgctgctataacttcgagtgttgcctccaagggcacccaccatcaaaagcatgttctaacacatcttccactcgtttagcaagcaggatctccatattggatagcacagacgatggtacttcaaccaagtccttcaagttcctttcaggtagaataac

SEQ ID NO: 206008 - DNA, 551 bp, Glycine max
tggaatttgaaggttatcatcatcatttatagatattattattattataagaagttcatcagaaatattcaatggggagctttgaaactgaactgatgaatcttaaggccacagagttgaggttgggactgcccggctgtgatgaaactaatgagaaaagttcatccagtagtggatctgttgttagaagcaacaagagatcttcaccagaacccagtgtggaagagtccaggtgcaactctaatggttcttcagattctaccaccacaagtgatcatgatcaagacagtgcccaacctgaaaaggtacaagtagtggggtggccaccaattatatcttttaggaagaacagtctgcaacaacagaagaaggtggagcatctgcagggtgatggaggtggaatgcacgtgaaagtgagcatggctggtgcaccttacttgaggaagatagatctgaggtttacaatagctacccagaactcctcgcaggcttgcaaagtttgttacgtgcacatttggtgaatattcagagagggaagggttcaatggatc

SEQ ID NO: 206009 - DNA, 494 bp, Glycine max
ctccaaacacaccaattgcatttgcattaccattcacaatggcaatctcctccacttccaactacctcattcccaccaaatctctaatcccccaatcccaccccctcattgccaacaccaggcccgccctccggcccaagcctggtccatacccttccttctttgccggtcacgccgccgagcccgccaaaaaccccgtcggttaccgagaagctcaagcgcctggcccaacaaccttccccggccttggcccgggctacgaaatgggccgcggacagctggaagtcaaagaaagccctgccgctgcccgaatacccgagccaggaggagctggagcccgtgctcaaaaccctcgaggctgtttcttcaatcgtcttcggcggtgaggccacgacttgggaagagcatcgtcgccgatgccgccatgggaaatgcctctcctcctcagggcggagactgtgctgagagctgcaaggaggttattggcaacacca

SEQ ID NO: 206010 - DNA, 493 bp, Glycine max
  unsure (1)..(493): unsure at all n locations
cttcgtcctttttttttaaagtagtagttctagcggatgactcgcttttttcaaatgggccttcattactaatgaaaaggtaacagagagaatatacgagctcgtgctatagcaaatgttattaatcgttcgttgatcaaggtccatctacttacgcgtatggacactattttttgttgggcactaataattcacactgactaacgcatgcattaatcctcaagagtgcacccccgattggtgacccgggcaatacgcactantaactgatatccttggatctcatgaaagaaacacttagatagttccatggtcctatgcatcactcttgcaacactcagagcctttaccataattactatcgccgagtgcgctttaccttctgactatagtaaatatgtgcatcttctagttttggatcgggattgtcatcgtcaaactctatccatttggcattttcttgcttgacccatcccacataatgtcctgaatc

SEQ ID NO: 206011 - DNA, 446 bp, Glycine max
gtgattgtagcttccgcgattgatgatgggggctactccagaggcgaacggaaatgtcgcggacgaagaaaacgggagcaacgtctgtggctcaatcgatttcggcacggcggaggccgtcgaatacgttcgctccctcaccgacgttggcgccatgacgcgccttcttcacgaatgcatcgctcaccagagagcggtggacgttgaactcgacgagcttctgtcgcagcgcaccgacctcgaccgacacctcctgcagctccagcgctcctccgacgtcctcgacatcgtcaactccgacgccgactacatgctctccaacgtcggcttcacctccgacctcgccgaccaggtcagacgcaaggtccgcgagcttgatctagcccagtcgcgcgtccgcaacacgctcctccgtatcgacgccatcgtcgaacgcgccaactccc

SEQ ID NO: 206012 - DNA, 528 bp, Glycine max
gttgtaaacttcatttctattacacccgcggatttaatagtgatatatatctaacttttacatgatctgcatcataggtatgccctaaacatagggtctgtagatgttaaaactaaactagttctttggtgaactaagtacaaaatcagacaactaaaactgctctatactattaatcatctctgctttacaagttctcttgtaatgtccagtttgattacaccgactacaatgcactgtatgtttctcgcgattaaggtcatccacacacatccgtttctcagggcgtcctggtggtcgccgtaattttggtggccttacaacaaggatattatcatccatagaagagttgcctgttttactccattcaagttttccggggatggggtgtatagtctctgcataggtatccctgaaacttgcagcagtaaaacacttctgggaaaatgcatagacatcctttcgacatgagataagagcagcagcagcatgggaacatggaataccattaagctgccaatcacggca

SEQ ID NO: 206013 - DNA, 382 bp, Glycine max
caggagcgtccatgctcactaggtcgcggtcgcccttttttttatttaattttttttttgtcgtttttagtttatgatttttttctttcttattgctgagtgtgtcaataccagggtcgcctcataacggatgtattaccctaccgcagatctatcaacccttttggataccctaagagtgggctattacaacatcctttccgaatcttacgtttttgtctttttcacaggtcttgatgctcgtatattcgactatgacagtggcaactgttggttcaactcccagtgctgtcacttctgaatctgttacatgatagtgaggcccttgcgacactgtatgcttgcagtgaatatttgagtggattctggatccagattccac

SEQ ID NO: 206014 - DNA, 448 bp, Glycine max
aattgaaccacattttattgaatccaatatctatgatgacaacaactattataagttcgagctcttaaaagcttatttttcaaggaagtgctgcttttaaggagcgggttaaaacttccagttctttcagtccctcttgaggagatttggcctcaccaagcaccttcactatagcactgccaacaatcacaccatcagctccccatcccgctacctgtttcacatgctcaggttttgatattccaaaaccaactgcgacaggtttagtagttgcctctttaatttcctgtagaagggactgaacagaaccactaacagatgcgcgggctccagtgacccccactgagctcacaagatacacaaatccttctgccacatcaacaatggctttcattcggtctggtggaatggtggctgttgtgaggagtaccagttcaatccatgtttc

SEQ ID NO: 206015 - DNA, 428 bp, Glycine max
atctgctactgccctgggtcaccataaccataatcatatcccaaacccaagccaacccagcacaacacagcaccacctcctatcacataataacaaccgtaaccttaaccttaaacccccacaagattaatgtttgggaccccgggattgggatccccaactacaaaaagaaaccgggtgtttgctgttttgggcagagccggctgggaacactcatgacgcggtgtagcttgctttgcaaacacggtgggcacaggtacagaacctgccctacccgtggggctaagctatctggggtgcgattcaccgacgggttgatgcggaagagcgccagcatgggcaacctaacccactacgctggttccgggtcggccccgccccatgacgggatgaataacccgggatcacccggtgagacccccgatcac

SEQ ID NO: 206016 - DNA, 344 bp, Glycine max
  unsure (1)..(344): unsure at all n locations
cggagactcattgggctttgccgcttgctttgatcttcactggagctgccggcggtggagcccaaggcccatccacctgtcccgcgccttccacaccccagtgttcaccacctgccatccagtcttctccgccacctgttgcttactcacctcctccggctcagtctccaccaccagcttgcactcccacaccagccccactcaggtctcctccccctgcctgcccttctccttcatctgcaccacccggatatgctccccctgcctctgctcctgcgggatctccaccacgccgattctnctccccctgcctgccctcctgcggcatctcctaccccagccac

SEQ ID NO: 206017 - DNA, 541 bp, Glycine max
tggacttggaaccgaatcaagggggttctaccaaaattactactgcatcatccaatcattcttgcaatggtgagccagattgcatgaattcaagccaaaactgtggaacatctaccctgatgggatgcttgaagagatttacaagagcagaaagattggggtcagaccaaaaatttttctgtcggcagtgtcaggtgaggcaagaaactctcaaacagatgtccattaggaagcttccccttgtttcttgcttccatataaaaagatttgagcactcttcaacaagaaagatgtcaaggaaagtggatcgctacctgcagttcccattttcactggacatgtctccttatctatcatcaacaattttaaggaatcgatttgggaataggatcttttcttttgatggggatgagccggatgcttcagatgagttgtgttcaaagtttgagtttgttgccgttggcacgcacagtggtaagctagacgctggccattattgtcacttatctgcgaataagtaatcagtggtccagtgtgatga

SEQ ID NO: 206018 - DNA, 488 bp, Glycine max
  unsure (1)..(488): unsure at all n locations
attcttcaagattcaggtactgcgtttcggaagcagacacagatggctcgtacgaagcaaaccgctcgtaagtccacaggaggaaaggctcctaggaagcagcttgcaaccaaggctgcacgtaagtctgcaccaactactggtggtgtgaagaagccccaccgttatcgtcctggtaccgttgctcttcgtgagattaggaaataccagaagagtaccgagcttttgatccggaagctccccttccagaggctggttcgtgaaattgctcaggacttcaagactgatctgcgtttccagagccacgccgtgcttgcattgcaagaagctgctgaggcataccttgatgggctctttgaagacactaacctgtgtgccattcacgccaagcgtgtaaccattatgcccaaggatattcagctggcangaaggattcgtggtgagcgtgcttgattggtggttggaaagatgaagatgattggtggctg

SEQ ID NO: 206019 - DNA, 508 bp, Glycine max
gctagaaaaccgtatttcaggaccttttcggccattgctgagaaatatggtccaattttcattctcaaattgggttgccaccccaccttagtcgtgaatagcagggaaattgccaaggagtgcctgacaactaatgactaaggttttgcctcaaggcctatcacatcagcagggaaaatcttaggttacaacaatgcagttaccggtttttccccttatgggaagtattggcgcgaaattagaaaaatggccatccttgagatcctctcaagctataagcttgaaaagctaaagcatgtgagagacactgaaacattgtctcttgtcaaagacctgtgctcatcaatatcatgtccaaagaacgtgaatggctcaacaactcacggcctataagcaatttattggagcacatgtccttcaatataattgtgaggatgatagctgggaagagatttggaggggacacagttaatcaagaagacaatgaggcatggaagctaagatacgc

SEQ ID NO: 206020 - DNA, 499 bp, Glycine max
caatccaaaatcatttcatattcaggacttaaattaaattgaatatttaaacagttcttacatggacgtacacaaatagcatgttcattactcctctacaagtcacaatgtagaaaatgaactacataatgtcgaaatgcagaaattttcatgaaatgaaatgggggaagggaactcataataaggcatacattttgtctcaaataggattaagcaggctttgcttccacgacggactcactaggtaagccttttaccgtgatggttatatgacaagtgcgctttttaattggatgggcacgccctcgagctacaggttttacccttttcattgttttcccttcattaacctctgctttactgataactaaacttcctttgcttaaacccagattattgctagcattagctccagccgaaaacactattttgagaatggcttcacaggctcgataaggcatgagttctaataccataagtgtttcgtcatatttacgtc

SEQ ID NO: 206021 - DNA, 499 bp, Glycine max
gtgtgttgttctgtgctttttgtggaccgaattgcccctactcaggtaaagagaatgattctcacaaagcagtatcgatgcgtacattcagctagctgtcaatgcaccaagggtcatttaagtgaagatgtgatattcttggtgtttcagcatttgaattggaacccgaagctaattgctgctctgtcatgtgtgtgcaaatggtttgacgatctttcaaagcaagttctatggaaagaattttgtaaaacgagagctccgaagatgatgcttgatctgcaatctagtggaagccacagtgttgatgggaactggagggctctggggaagcttcttatattctgttcaggttgcaggcaaggcagtttgttcaataacgttcaggttcctggccattttgttaacaagactcgattttctagaacatcaagaaagagctttctcatgccacaatgcataaatgatgttttgtatgtgtctgatccttgtgagcatattg

SEQ ID NO: 206022 - DNA, 437 bp, Glycine max
gaaaacaatacttgagacgaccttattctgattgtttcatgctacctgatgaccatgatgcaagctagggccatgacacgatggttgcttgttggaaaaaaccgccctctgctgggaacaggagcccagggcttatcataaattcgtaataactacggcatatttacacgacattcattcacgatcctgcttgcttcaagccatgcatattacatcactatcaaagaatggaccaaatgttccaccacagatgccaccagggacttgttatcggcacttctagcggagcaattgtaacgatttttgccttgcatgccggtgagctcattatgctggcccatcatgcgcatacttgagacccgattctccaaaaccaggttctggttgacggtaaaggtggtgacaatgcccttattatgcggatcagtgtccaagtc

SEQ ID NO: 206023 - DNA, 550 bp, Glycine max
  unsure (1)..(550): unsure at all n locations
gcttggagttcccaacaactatcttattccttcactcactcctctctgcgcttggctatggaaaaaacgcacagctccagcgcagaggagcaggatccgacccggcgccacctggatcccccacccgggttaactgctgaagagttcgaggacctcaaaccctccgtgctggagcaccacacctactccgtcacacccacccgccaaagctcctccctcctcgcgcagcgcatccacgcgccaccacacgcggtgtggtccgtcgtgcgctgcttcgacaacccacaggcctacaagcacttcatcaagagctgccacgtcaaggagggcttccagctcgccgtggggtccacccgcgatgtccacgtcatctcagggctaccggctgccaccagcaccgagcgcctcgacctgctcgacgacgacagacacgtcatcggcttcaccatcgtcggnggcgaccacaggctcatgaactatccgtcagtcacctcggtgcacgggttcgagtgcgacagaaagatctggaccgttgttctggaatcgtacg

SEQ ID NO: 206024 - DNA, 490 bp, Glycine max
gcttggagttcccaacaactatcttattccttcactcactcctctctgcgcttggctatggaaaaaacgcacagctccagcgcagaggagcaggatccgacccggcgccacctggatcccccacccgggttaactgctgaagagttcgaggacctcaaaccctccgtgctggagcaccacacctacttcgtcacacccacccgccaaagcttctccctcctcgcgcagcgcatccacgcgccaccacacgcggtgtggtccgtcgtgcgctgcttcgacaacccacaggcctacaagcacttcatcaagagctgccacgtcaaggagggcttccagctcgccgtggggtccacccgcgatgtccacgtcatctcatggctaccggctgccaccagcaccgagcgcctcgacctgctcgacgacgacagacacgtcatctgcttcaccatcgtcgggggcgaccacaggctcaagaactaccggtcagtca

SEQ ID NO: 206025 - DNA, 484 bp, Glycine max
gatcgagataactagaaacagtgtgatgaaaatgaaggtccttgttttcttcgttgctacaattttggtagcatggcaatgccatgcgtacgatatgttccctctccgaatgaacactggctatggtgcccgtactccggaggtgaaatgcgcaagttggaggcttgctgtggaagcacacaacatctttggctttgagaccattcctgaagagtgcgttgaagcaacaaaggaatacatccatggcgaacaatatagatcagactccaaaacagttaaccaacaagcttacttttatgccagagacctcgaagtccatcccaaggacacatttgtgttcagtatagatggcaccgtactctctaatattccatactacaaaaaacatggatatggggtggagaaatttaactcgaccttgtatgatgaatgggttaacaagggcaatgcaccggcactgcccgagactcttaagaattacaac

SEQ ID NO: 206026 - DNA, 400 bp, Glycine max
aacgcacatgtacgtaacacttaaaaatacatacacaaattaacatgggcatgtctgttgagatggacgtcaccacaaatatagtaaacataaattaaataaacatagtgacgaggatatacagattattccaatccaccatgtataagcaaattaattaagaacacaattaaatgaagcatgtctctcgtagctcaaatagcttggccagaattacaggtttgaggagctcctgaaagaccctagagcctttgctgcttgggcccttaacacggactggtggtagaatgcagcatgagcagcaccgatgaagggtccaacccagaagatccactggtcatcccaagccttctcgttggtgaatatgacagcaggcccaaggcttctagctgggttgatg

SEQ ID NO: 206027 - DNA, 547 bp, Glycine max
  unsure (1)..(547): unsure at all n locations
atctgcgaaagccaagggtcaccaaaaccatcatcataacccaaacccaacccaacccaacacaacacaacaccacctcctatcacataataacaaccttaaccttaaccttaaaccccccaattttcatgtctcggatcccgtgattcggatccccaacaaaaaaagaaacctcgtatttgttattttcgtcggatccggttgggaacgctcatgacgcggcgttgctcgcattgcagccacaatgggcacaactccagaacctgccctaaccgcggggttaagctcttcggggtccgattaaccgacgggtcgatccggaagagcgccagcatgggcaacctaacccactacgctggttccgggtcggccccgctccatgtcgggttgaataacccgggttcacccggggagacgcccgatcacgccgtcgtcgtcgtcgacggctacgcctncgaggacttcgttcccgggtcttcttctagctcccgtgaaagaaagaaggggttccatggactgaggaggaacatagaatgtttttgctcgg

SEQ ID NO: 206028 - DNA, 571 bp, Glycine max
cttcttcgcggtgtgcggttccattttgatacgtttgtcggtgatcttaagtctggagatttagaaaaggcacaacttggtctggggcatagttacagcagagcaaaggtgaagtttaatgttaaccgtgttgacaacatggttattcaagctatcttccttcttgatacacttgacaaggatgttaattcgttctccatgagagtcagagtggtattcatggcactttcctgagctggtgaaaattgtaaatgataattatctgtatgccaaagttgcaaaatttattgaggataaggcaaagttggctgaagacaagattccagccttaactgacatagttggagatgaagataaagcaaaggagattgtggaagctgccaaagcctccatgggacaggatttgtccccagtggacttgatcaacgtccatcaatttgcacagagggtaatggacctatctgagtacagaaaaaacttgtatgattacctggttgctaaaatgaatgatattgcaccaaatttggcctctttaattggtgaaagtgtggtgctcgtttgatttccatgc

SEQ ID NO: 206029 - DNA, 472 bp, Glycine max
cagaaaaattactattagagagatacaaaattgttcagagaactcatccagtctcaagaagcaaaattcataataattttttggatagactatagagaggacacgacccacaagcttaagacctaggcttctccttcttctccttgaaaagggccaggagagacacaccagaaaccttcacgaccttgaacctgactccaggaatatcacccacggcatgaccttttcgtccaaatccagctatcaagacttcatcattctcttcaatataatttaagcaaccgtcatttggcacaaatgcagcaatcttcttcccatttttgatgagttgaaccctggcacattttcgaatggcagagttgggctgcttagcctcaataccaatcttttcaagaacaatacccttggcatgggatgaaccagcaaaaggcttcttccattcatttcccagatgagactttctgtatgactt

SEQ ID NO: 206030 - DNA, 506 bp, Glycine max
gtagaagtagaattgttgattcgtaattatatacaaagctatgataccgttgttgcaaaatccctaggatgaaaaaacagtagataatacaacatactctgacaagtttaaaaaattaaaagacctgccacttatatatctcaaacaaaaatatttttatctcaagagaatgtatcctctcgatctccctcagcagttatctccacttcctccatattgctgaactctaagaaatgggttggtctatggtcctcgtggtaatattccctaggagtcccaagcttcactccatatttcatccctgatgcgtgtctcacccccatgaagttgtaattccatggaccattatcaggaaccatgtagaaaccaaggaagcgatcactaaggagcatctgaaccttctcataatgggtgggaaggtaaccatgtggattgcttcccgtatccttattaacacgcccccattcataaccagatggagtgagcttatatgcagttaaagaaca

SEQ ID NO: 206031 - DNA, 477 bp, Glycine max
tttgctaataagacatatcttccaaatgaaactccaactccactagtgaagtacagaaaagaagaattggaaaatctaagaggagatggaaaaggagagcgcaaggaatatgataggatctatgattatgatgtctataatgatttgggtaacccagacaagagcaatgatctagctcgtcctgttcttggagggtctagtgcctatccatatcctcgcaggggaagaactggtagaaaaccaacaacaaaagactctaagagtgagtcaccatccagcagcacctacatcccaagagatgagaactttggtcacttgaagtcatcagatttccttacatatggaataaaatccatagctcaaaccgttttacctacatttcaatctgcatttggtttaaatgccgagtttgataggtttgacgacgtgcgtggactctctgaaggtggaattcatctccctacagatgcactcagt

SEQ ID NO: 206032 - DNA, 537 bp, Glycine max
ttcgttctttttttttttcaatccaaaatcatttcatattcaggacttaaattaaatcgaatatttaaacagttcttacatggacgtacaccaatagcatgttcattactcctctacaagtcacaatgtagaaaatgaactacataatgtcgaaatgcagaaactttcatgacatgaaatgggggaagggaactcataattaggcatacattttgtctcaaataggattaagcaggctttgcttccacgacggactaactaggtaagccttttaccgagatggctatatgacaagtgcgctttttaattggatgggcacgccctctagctacaggttttaccctattcattgttttcccttcattaacctctgctttactgataactaaacttcctttgcttaaacccagattattgctagcattagctccagccgaaaacactattttgagaatggcttctcaggctcgataaggcatgagttctaataccataagcgtttcgtcatatttacgtccacgactctgatcgatcact

SEQ ID NO: 206033 - DNA, 544 bp, Glycine max
tttgtttttttttttgaatatccaatatatactaatatatgctaatatatgctaatcgaatatctatctatatctatctacctatatctatatagatataggtagatagatatagatgtttactaagtagattatattgagccgcaatatatgtgcggcaagctaaacgaaaaggactattttgtagaaaactggtcaatgatggccttccatggattcacctatataagccgcagctaaagtagcaaaaatgagagcttgaataccgcttgtgaataatccaaggaacatgacaggtataggaactactaaaggtactaaagaaacaagaacaacaactactaattcatcagctaatatatttccgaaaagtcgaaaactaagagataagggttttgtgaaatcttctaagatgttaatcggtaaaaggattggggttggttggatgtatttattaaaataagctaatcctttttttgaaagacccgcatagaaatatgcaattgatgtagtaaagctaaagcaacggtagtatttatatcat

SEQ ID NO: 206034 - DNA, 570 bp, Glycine max
aaatcttaaaacaactcaaactaattaacttcattcttccaatcacggaatactcaatggatcacaaacgtcaaggaacttagtgcattatgaagcacaatttatcaactgtatagtatgcaaagaaacaagatgccgtcaactatatattgtaaaacgaaaattctaaccattttgaaaaggaaaaatatcatattataaggctccactgttgtcacctgttggcattccccatcaactgctttcttccacaatgtcacattgatgttcccatcatccacagccaatatgtttcctgtcaatgaccatgagacccttcaaacaggggtgttgaaatcattcaaaaccttgccttaccactgatccccctatttcgccacggtccatataatcactttaccgtcctgtgatgcgctagcaatggtagatttagggagccctatattgggtgcccaagcaacatctcgaacccaatccgtgtgcatctgaagagcagggaagcagtccatctttcagagtccatcggttagcttccataccttcacagtattatcacaaccaccagagcac

SEQ ID NO: 206035 - DNA, 536 bp, Glycine max
  unsure (1)..(536): unsure at all n locations
aagaaaaaagaaagttctaattattaataaattatatctatatatatatatatacagatagatattctatatcttttatcttaattaatatttgacccctccttataatgtgttatagttttctttatttttaggaacttatccattccttttttaatgtgcccgacaatccgaaagaattctgggggaggggtcatttcgtttttgatctagaataaatagagcttcaagaaatgagagaattaagaatacccacgagaaacactaatccaatccataatgatgtaccggaaaatacaacatttttgttattcgaccaaccttcaggagaagcaaatacaacaggtacactaatcaataaaataaatgaaatagcaattaatgcaaaaacagctaattggaaagcaatagtcatgtttctaatcctccaatttaccaacaaaagaactttaccatttgatcccccaaccccttgatccctttatctgacaanaaatttatataaaaaaacgccagagggttctatcatgaattca

SEQ ID NO: 206036 - DNA, 450 bp, Glycine max
gttttagaaagacgcaggttgaattaattagtatcatggcagctttgatggatttttacagcagcagcccagagtttcaacttcactcagatccattcaggggagaactaatggaagttcttgaaccttttatgaaaagtccttctcccaactattttccttcctccccctccctccctaatctttactcaaacgggttatccagcaacacccaaagcttaattggcttcgggcaagcgcaacccacatctcttgtgggcctgaaccacctaaccccatctcagatctctcagatccaagcccaaatccagatccaggcccagcagcatcagaatcgcagcaacaccctgagcttccttgggccgaagcccatccccatgaagcacgcgggcatgcctccgaagcccacgaagctttacagaggggtgagacagaggcactggggaaagt

SEQ ID NO: 206037 - DNA, 541 bp, Glycine max
  unsure (1)..(541): unsure at all n locations
tgcaggcagtgtcatctctcctttgacgacaagatgagcatcccaattccccatcggcagttattcatagacggagactggaaagtccccgtcctcaagaatcggattcccatcatcaacccttccacccaacacatcattggggatatcccagcagctactaaggaagacgttgatctcgctgtcgctgccgccaaagctgccctctcccgcaacaagggcgccgattgggcctccgcttccggctccgttcgggctcgctacctccgcgccatcgctgccaagatcaccgagaaaaagcctgaactagcaaaactcgaagctattgactgtggaaaaccgctcgatgaagccgcctgggacatcgacgatgttgctggttgctttgagttctatgctgaccttgctgaaaaattggacgcacagcanaaggctcatgtgtctcttcccatggacacattcaagagttatgttcttaaggagccgattggagtcgttgctttaataactncttggnattatcctctgttgatggctacgt

SEQ ID NO: 206038 - DNA, 528 bp, Glycine max
tgccttgtctgattatctccgggtcgccgagctccatgctcactgtcggcggtcgccctttttttttttttttccatcttcacattatataacacgtatttggcccccataaccatagtgattaagaagcccttcatcttgtcgccaatttgctctaaccttcacttcaatctcaagataaactttcttctgtaaaaaatcttcaacatcaaggcgggcagctgttgcaagcagtttcaaagcctttccttctcttccaataaggataatcttctgagtgtgtttctcaaccaaaatctctacttgtatgtattcttttgcatttggccgagctttatagtttacaacatttacctgacatgcatatggaatttcatttcgatactgcataaaaatcttttctctaacaatttcagctacaaaaaatctctctggatgctcactgacaatatcctttggataataagctggtccattgggaaagcttgacagtatccagtccttgacatcttcacacccctgaccata

SEQ ID NO: 206039 - DNA, 522 bp, Glycine max
  unsure (1)..(522): unsure at all n locations
aacaaaacaagcactcaaagtgcttcgagttcgtcactgatcacgtttcggcaatgcaccgcgtgggtagcgcgagtaacggaaacaattcaactcgctctcgcaaggagaagagaataacctacgtgttgaatgattctgacgacacaaagcattgtgcaggcataaattgtctggctctacttacatctgctgcatctgatgggtctgattatctcttcactgggagccgtgatggcaggttaaaacgatgggcactagctgtggatagagcaacatgctcggctacctttgaatctcatgttgattgggttaatgatgctgttgttgtaggtgatagtacacttgtttcttgttcttcagatacaacccttaagacatggaatgccttgtcctttggaacctgtactaggacactccgacaacactctgactatgttacttgccttgcagcagcaggaaaaaatagcaatattgttgcctctggtggccctggcggggaggnttttatatgggatatcg

SEQ ID NO: 206040 - DNA, 519 bp, Glycine max
aacaaaacaagcactcaaagtgcttcgagttcgtcactgatcacgtttcggcaatgcaccgcgtgggtagcgcgagtaacggaaacaattcaactcgctctcgcaaggagaagagaataacctacgtgttgaatgattctgacgacacaaagcattgtgcaggcataaattgtctggctctacttacatctgctgcatctgatgggtctgattatctcttcactgggagccgtgatggcaggttaaaacgatgggcactagctgtggatagagcaacatgctcggctacctttgaatctcatgttgattgggttaatgatgctgttgttgtaggtgatagtacacttgtttcttgttcttcagatacaacccttaagacatggaatgccttgtcctttggaacctgtactaagacactccgtacacactctgactatgttacttgccttgcagcagcaggaaaaaatagcaatattgttgcctctggtggcccttgcggggagggttttatatgggata

SEQ ID NO: 206041 - DNA, 497 bp, Glycine max
gttcttgaattagaataatttcacctcgataactttcaaaatcctttaatgcaaattaccgaaataaaactctagttctagtacaaacaacacctagctataataattaggggttgataccatagagctttcgaatcccgtctatatcatcttgcgctagattcaccttcctagttcgaggtggtatagaaggatacatgatggctcttaggtccgacgagtggcctaatccgagcaagtgcccgatctcgtgcactgccacagattcaaggtcaaacgcacttgtcaccggcgatttggtgacatcgccagacgccacccaatattcgtcggcgtcaaagtggcacctcccatcagtgggagcgaatgcatggcccaatatcccacctggaccatcaaaaggatacggatcaccgtggttcttactcgcgaaaagaatcttaatgttggctgtttcatacgacgtcgtctcctggaacgcgatgttcaccactggg

SEQ ID NO: 206042 - DNA, 571 bp, Glycine max
  unsure (1)..(571): unsure at all n locations
aaactggttcttcttttcgcgttgcgttttcttggtgtctctgtcgattcttcttctgaattttaatacttaggaagtttagttttctctcttggcttctccggttggagtttccggcgaccttgtcggagattttgttgtttatttttcacaccacttgtgaaacttctcaagaaaaagaaaaaggatgtttcttgttgattggttctatggaattttggcgacccttggcctgtggcaaaaggaggcgaagattttgatcctagggttagataattctgggaagaccactttgcttcacatgctcaaagacgagagacttgttcagcatcaacctactcaatatcccacttcggaggagttgagtattgggaagataaagtttaaggctttcgacttgggtggtcaccagattgctcgtagggtctggaaggactattacgctcaggtggatgctgtagtgtacctggttgatgcantttgacaggaaaggttttcagaatcaaagaaggagtnggatgctcttctctctgacgagtcactagcaatgtgccttttctcatcttgggaa

SEQ ID NO: 206043 - DNA, 324 bp, Glycine max
ctcgagccgaatcggctcgagcgcacccaaaggtgacggggaacaaaattaaacataccatactctctgcttattagtcattgaacttcccttctgtaatgttttcaaagggagaaggtgttgaatgctaatctcaatgttactgagattttgggcattcgtgttcttcgttatgaattgtggatgtactgggctattttagtttgtccttccatttatacgcgtttctgaactgcctattttcttaatgacactgaaatctccattatgatgctgtttagaatattaccaagatgttgctctctttaaaaaaaacctcttcac

SEQ ID NO: 206044 - DNA, 540 bp, Glycine max
  unsure (1)..(540): unsure at all n locations
cacaaaacttgctatagcagtaagctataactcatttgaggctctgtgagaattgagaaatggctaaagatgttgaggttcaagagcaaggaggagagtactctgccaaagactaccatgaccctcctccagcacctttgttcgacccagaggagctcacacagtggtccttctatagagccctcatcgctgagttcatagcaacccttctcttcctttatgtcactgtgctcaccattattggctacaaaaggcagactgatacaacggtaggtggcaccgactgtgatggggttggcattntgggcatcgcttgggcctttggtggcatgatcttcatccttgtttactgcaccgncggtatttcaagaggacacataaacccggcggtgacattcgggttgttcctaggacgcaaggtgtncgtgataagggcgttgttgtacatggtggcacagtgtgccggtgctatctgtggtactgggatggccaaggggttccaaaagcatacttacacaggtatggaggtgtgccactctg

SEQ ID NO: 206045 - DNA, 554 bp, Glycine max
gctgaaagggcatgtgctgcagcaataactcttgatacgcctggtgcaaattatagaacagtttgggctttaagcaagtacttcccaaatgtgaagacttttgttcgtgcccatgacgttgatcatggattgaatttagaaaaggctggagctactgctgttgtcccagagaccttggaaccaagtcttcaactagcagctgctgtgctttctcaggctaaactccctacgtcggagattgcagctactataaatgaattcagatctcgacatctggctgagctcactgagctgtgtgaagcaagtggaagttctcttggttatggatttaatagaattatgaacaaacccaaatctccatccccagattcattagatgagacccctgtctccgaagggacactagcaatatgaagagtggcgcatatatacaaagtagatggcagaagaaaaggagaactaggaaaaaaaaataatcgtcaaaaaaatgtatatcagatcattagttccattgttatgtaccagaatatagcccaaattagttttattttctc

SEQ ID NO: 206046 - DNA, 359 bp, Glycine max
gtcgccctttttttttttttttttttttttttttttttttttttttttttttttttttttttttggttttttgggttttttttttttttttttttttttttttttgttttttttttttttttttttttttaacccccggggggggggggaaaaaaaaaaaaggggggggaaaaaaaaaagggggcccaaacgggggggggggggtttcaccctccccaaaaggttatattttgcccccccccaaaaaaaaccctttggtaaaaaagggggggggtttaaacccccccccgtttttggggggggaggaaaacttttaaccccccctgccaaagggggaaaggttccccccggggggcctc

SEQ ID NO: 206047 - DNA, 509 bp, Glycine max
caaggatccagagtggttcttcttctgtccgcaggaccggaagtatccaaacgggcacaggttgaaccgagctacgaatcatggctattggaaggcgacggggaaggatcgaaagattaagtctggctccaccttgattggaatgaagaagactcttgttttctataccggtcgtgctcccaaggggaagaggaccaattgggttatgcatgagtacaggcctaccttgaaggagcttgaaggaaccaatcctggacagaatccatatgtcctttgtcgattatttaagaaacaagatgagagtcttgaagcttcaaacggtgatgatctggagcggactgcttcaactcctacaactgccaattactgtcccgacgaaatacaatctgattcagctttggttccagcatctttctcacaggttactgaagatgataagcctctaccagttatttccgagaactccgaggaagcaatatccaacattataacccctggtgatattcata

SEQ ID NO: 206048 - DNA, 532 bp, Glycine max
  unsure (1)..(532): unsure at all n locations
tagagtggcaggtagatgaattggataaagcaattgctgtagcgtctagagatccttcttggtatgggattgatgaagctgaggttgaaagccgaaggagatgggcaagcagtgctcgttctcaggttggcacaatgaagaaagcaatggaatctggcaagggctcaagtaccacaagccatgctagtgtaaatgggatgcgccgagaactgatgaggctaccaaattctcatcaaactgatagctccaaccagtatgctgccagagataatgatgatttcatacaatcagaatcagatagacagacgcttcttataaagagacaggatgaggaattggatgagctcagtgaaagtgtacgaagaatcggaggtgttggactcacaatacatgatgaactcactgcacaggaaaagattctagatgagcttggttctgagatggacagtacaacanatcgtcttgattttgtccaaaaaaaagtggcaatggttatgaagaaggctagtgcaaagggtcagatcatgatgat

SEQ ID NO: 206049 - DNA, 412 bp, Glycine max
aggacaaaaggaaaaggcaccaaattcaatttaagtggacactgtaactcaaaattatagaggaagacgggccaatatgaaaaatatagtaagatcatctcaaacttagcatcttctctttgcacctaagacattgagaatgctaaaaatgttacacgcaagttccatcacaacttttagcacttggattagtacaacaacctttacgaacagaaatatttacttgccaagtttgctttgcctccaattcaagactggaagaaagttcccctctgaatagcatcctcgttagcatttccaagagcagcctcgttcaagtacttgtcagccaattggactctcttgacattctcttggtcttggacaagcatgttaccatacagcaagagcttcttcagagtcatcttgggct

SEQ ID NO: 206050 - DNA, 307 bp, Glycine max
cactaaccgtaaagaagtttatatcgtctatatgggagccgcggattcaacaaatgtttctcttcgcaatgaccacgctcaggttctcaatttagttctaagaaggaatgagaatgccctagtacggaactacaagcatggtttctcaggattcgcagctcgtctatcaaaggaggaggcagcctcaattgctcacaaacctggtgtggtgtctgttttccctgaccccattctgaatctccacacaacacgttcctgggaattccttaaataccaaacccacgtcaaaatcgacaccaaaccaaat

SEQ ID NO: 206051 - DNA, 480 bp, Glycine max
gtcagacaagtgcctagcgtagcattgcggggtttcctatgagacagtcaccgacgataatgagtctcctcacgatccacatgccttcactcagggccttctttatactggaaatgacacctcatttgagccaactggactttatggggagtcatctgtccgcaaagccgatcttcggactgcgaaggctgacattattcacaagatggatgatccttatttaggggaaggtataactctcctcaatagcaggctcttacatggaactcgagcgcggacacatggctccatatatgacccacaacatttacgcccaattgggacatttaatcatgatatgaatgatgctagccgtctggcaactgctggaacagtcttgttcggaagtgatcggcagttcaacattgcattaaatgatttaaactgatcctcatacatttaaagctgtatcacaacgtgtagactactaatgagggcatg

SEQ ID NO: 206052 - DNA, 494 bp, Glycine max
tttttttttttttttttttttttttttttttttttttttttttttttttttttttttttttttttttttttttttttttttttttttttttaaaattaaggggggattccaacccccccttttagggggggaaaaaatttccatccccccaaaaaaaaacctgtaaccttgaaaggggggggttttccaaaaggtgggtccccccaggttttaaaatttttttgaaaaaaagggtttttaaaaagggaaaatttttttacccaaaaggccccttcccttgaaaaaaacccccaaaaaaccccaaaaatttgggccaaccaaatttccaaaattccggggaattttttaaagggggcccaaaaaaaggcaaaaaacccctttggggccaagggaacccccctaaaacaacccctaaaaaaaaaaggggctttcccaaattaaatttggggggccaaaaacttttggccaatttaaaaagcccccaattgaacccc

SEQ ID NO: 206053 - DNA, 594 bp, Glycine max
ggggagcctctaagttcagactataaaggaggttattattgttgttatgatcaaacccagtgcaggttgagggaaggctttgagggcccaagaggagcctctacctaagatacacagtgaagtgggttgaatggaacaagttcattgtgcctgtaaagatttatatacttgatgtcactgatactttaaaaatatcagatgattctagtggaatgatccctgagcatgattgcaagaccgagtatgaagttgaatcttgcagcactggccaaaagaatggtaatggctgtcttgatgtgaagagaacaagcctcccaatgcaaaagggtggttatgtcatatatggtgttgctcatcagcattcaggtgccactggatcaactctctatgcacaggatggaagggttatatgttcttcaataccaaggtatggaaagggaaaggaagcaggaaacgaagtagactacattgtaggaatgagcacatgttatcctcaaccaggttctgtaagataattgatggtgaaactataactctagagtctaactacagcagcagccgttgccacacttgagtaatggtgcttttctacct

SEQ ID NO: 206054 - DNA, 459 bp, Glycine max
ggaacctacaactactgggcagactcctacacactgttcgtgtttgagatggcactgatgggatttgcagagcacagaagattccaagactgggccaaaccaggctctatgggcaaacaatacttcctaggactagagaagggtcttggaggttctggtgagccagcttatccaggaggacctttcttcaacccactaggctttggtaaggatgagaagtccttgaaggatttgaagctcaaggaagtgaagaatggaaggttggctatgttggcaatcttgggttactttgttcaagctcttgtcacaggtgttggcccataccagaacctcctagatcatttggctgaccccgtgcacaacaacatcttgaccagtctcaagttccactgaatgtattatatgttattgtacataatctttacgttgccaaaacttaactacctttctacctttcta

SEQ ID NO: 206055 - DNA, 537 bp, Glycine max
tcggaattcggctcgagaaaagagcctttgctttttctttaggcctttccgaattaagtacttgtttcattttctctcgaagcaagaaaaatgttcatcgagagtttcaaggttgagagtcctaacgtgaagtacacagagactgagattcagtccgtgtacaactatgaaaccactgaacttgttcacgagaacaagaatggcacttatcatggggttgcgacgtcctaagactgcctatgtgcctttaaaaccaacacccatgtccctaaactaggggtaatgcttgtggcgtggggtggaaacaatggctcaaccctcaccggtggtgttattgctaaccgagagggtatttcatgggcaacaaaggacaagattcaacaagccaattactttgggtcgctgacccaggcatcagctattagagttgggtctttcaaggggaggaaatatatgccccattcaagagcctgcttccattgtaaaccctgatgatgttgtgtttggtggatgggatatcagtaacttggacctggc

SEQ ID NO: 206056 - DNA, 465 bp, Glycine max
gcagaggactatgctcggtgaagctttatacccgcttgtggatcagctggaacacgatgctgcagcaaaggttactggcatgcttctggagatggaccagcctgaagttttacatctgattgagtcaccagatgctctgaaggcaaaagttgctgaagccatggatgtgttaagaaatgttgctcaacagcaaactaacccagctgatcaactagcttcactctctctcaatgacaatcttgtgtcttagattcctttagtcttttgactggaatctgctttccagttattcctattccgtatgcttccccccagtttatttgcaggtgtcttagatgttttgttttagtcagagtactaaggaagtttatgttcttggtacttttggtttcactttttttcgtatctgaattgctgtaagatggattagcataacttggtggatttattagatatgcatttgcg

SEQ ID NO: 206057 - DNA, 294 bp, Glycine max
gaccaatggagcgatctcctcggaggccacagaggcgaaagcaggacctttaagcttcctaatcccctgtactacattcagtagttccttcacctctcaacaatctagcttgctcctatctatctatatgtaataagatgcgttcaaataggggcactagcttcactttatgttgtttcagctgtgtgtcaacaagtcatgtaagagacttcactatgttgttttctctttcgtggctttaataaattatgcgcccttgttccaaaaaaaaacagaggtcatacgcattagaag

SEQ ID NO: 206058 - DNA, 444 bp, Glycine max
aaaaaaatcaatagagtttctttaaaatccctataaaaggaattgtaactttaatcattttcatctggacacaaaattaataacattacaacatgcaaatctaatctggaaccagctgccaaagaagatggaaaaaaaacgccactgtatacttagccattaaaaggaaactcaatcagccggacatggaagatcactcaagttaccactcaaaaagagctgcggctaggcctatcctgtgcaacattcactctgatagccctcccgtccaaactctgaccatcaagggcagcaattgcatcattcatatcagtctcactagacattgtgacaaagccaaaaccacgtgatcgaccagtctctctgtcatagaccacccgagcatcctcaaccttaccatgttcactgaaaatttgctccagccgagcatcgtaacttcccatg

SEQ ID NO: 206059 - DNA, 562 bp, Glycine max
gaaaacgaaattaaaattttatttataatttccattgatcactgatcagctctataacattaatttccaactgaacacttctcaattccattgcagccactttctatttgaatagattattaagtatgcatgatatataaagattcaacagcctacgttggaaactttcctccaactcagtatcttgaggaattaaagtactcatgcaactatcactctaaaactttctgcagcatgattctcaaactctcacgtcacatactgtaattaaggttaacaatgctttattttattaggcattgttccaaccttctgattcatccttcatggggttcggtttgtaggaatggagcatgaagttgcacgcaccaacagcctcttcaactgtcagatagatccatttttgccccagttcatcaaggaacttggatttgttcagcttcttcatcacctcgcttcctggattcaccaaagcaggctacacacatatgaaggaatgattataaaaaaacaatgtctctcaagtaaaactatttagcgaaaaatattagcttaatgagaa

SEQ ID NO: 206060 - DNA, 466 bp, Glycine max
gttggagcatcctttatatcttcattcaacgtggcaacgttggatcagctgaactgaacttctttgtatatgcactctgggatttgactctgctgcgccatcctatgggggacaacgacagcatcaacgatgccttcatgcgcaaccgagacgccggcgttcaggaccgcaccaaagcgcagaaccgctccaacgtccttcagctcaaactgattggacagagttacccaaccggtctcacagcgaacctgttgaagctcttcgagcctaggcactccgttgggggacaagccacctacggagagacgacaatgcccaccggtatcagggatggcacaatttgagagcaagtgtgccgagcctggccagccataatacgctccacctgtcccagaaactgagactcctgcacaaaaaagagccagaatacacaagctaaggcttgagaagggagctgcagaagctg

SEQ ID NO: 206061 - DNA, 452 bp, Glycine max
accaacctcatgaatttttataagctagaaaacaatgacgtactccaactttacattaaaagcaaaaaaaaaaaaaaaaaaagggtaaagcggagagatgaaaagaaggaaaagcaagagttaattacttttcctcctttattacagatcagaaattaacacaagggaacacaggggggatcatgaaattaaaaatcaggggcgaaaggggcatgctgggtggggatgaaggcataggtatagataagaccagccaaaccaccaccaataagagggccaacccagtagatccagttgtcatgaaagtcaccactgacaacagcagggccaaaggagcgtgcagggttcatggacccgccagaaaatggccctgctgctaaaatgttggcaccaacaatgaaaccaatggcaatgggtgcaattgggcccaatgaacccttcttagggtctgc

SEQ ID NO: 206062 - DNA, 395 bp, Glycine max
aaactggttcttcttttcgttttgcgttttcttggtgtctctgtcgattcttcttctgaattttaatacttaggacgtttagttttctctcttggcttctccggttggagttttcggcgaccttgtcggtgatcttgttgtttatttttcacaccacttgtgaaacttctcaagaaaaagaaaaaggatgtttcttgatgattggttctatggaattttggcgaccctaggcctgtggcacaaggaggcgaagattttgatcctagggttagataattctgggaagaccactttgcttcacatgctcaaagacgagagacttgttcagcatcaactaacttgatattccacttctgaggagttgagtatcgtgaagatatagtttaaggctttcg

SEQ ID NO: 206063 - DNA, 383 bp, Glycine max
tttgaaattaacaagtagcaaagatgtttggaatcatcggaggaaacaagggtcacaagataaaggggaacttggtgattatgcgaaagaatgtgttggatatcaacagcattaccagtgttaagggtgtcatcggaaccggcattaacatcattggaggagtcgtcgacaccgttactgctttggcgtcccacatcttcatccagctcattagtgccaccaaggctgatggacatgggaaaggaaaagttggaaaggctacaaatttaagaggacaagtgtcgttaccaaccttgggagctggcgaagatgcatacgaagttcattttgaatgggacagtgacttcggaattccccgtgcattttacattaagaacttcatg

SEQ ID NO: 206064 - DNA, 535 bp, Glycine max
cttgaaacttgagagatttcatcatggctccaaagaaggacaaggctccaccaccttcctccaagcccgccaaatctggcggtggcaagcagaagaagaagaagtggagcaagggaaagcaaaaggagaaggtgaacaatatggtgctgtttgatcagggcacctatgacaagctcctttctgaagctcccaaatacaagctcatcactccttgcattctctctgatcgtttgaggattaatggatcacttgcaaggaaggctataagagaattgatggcaagaggttctatcaggatggtgtctgcccatgcaagtcagcaaatttataccagggcaacaaacacctaggtggtgaactgatcttagtttacggagtattggtaggaatagtgaagtattgttcttttgaagtttgagatgcatctcatatagcttctatcagatctagattggtgctgaatccgaggctgagattgtatttttggattccttcaatgtttatctatttggatattatggcagttgtcttatac

SEQ ID NO: 206065 - DNA, 574 bp, Glycine max
ctcaaatcatggatttcttgcaagcacaagaaaatcagatacttgtgggtgtggccgtggccgttgtagccattgggcttggtgcagtatatctctattcatccaagaagaccaaaggttgcttggacccagagaactttaaggcattcaaacttgttaagcgtgcacagctgagccataatgttgcaaagttcacatttgcactcccaacacctacatctgttttgggtcttccaattgggcaacacataagttgcaggggtaaagatgctcaaggtgaagaggttatcaaaccatatactcctactactttggattccgatgctggacattttgaactagttattaagatgtacccacaaggaaggatgtcacaccatttccgtgagatgcgtgttggtgactacctttccgtgaaaggacctaagggacgtttcagtaccaacctggcgaggttagggcttttgggatgcttgctggaaggtctggaatcaccccaatgttccaagttgcctgagctatattagaaaaccctaatgacaggaccaaagtacatcttatctatgccaatgta

SEQ ID NO: 206066 - DNA, 491 bp, Glycine max
  unsure (1)..(491): unsure at all n locations
ncgccctttttttttttttttctattttcattcgaattcattttatttatatattaatattatattcaaatgaaataaaaagatattaaaagatactaattataagaatttgaaagtgaaattataaagttattaaatgattaatcaattgggttctacctgtgcctgtagtaaaaagagttccatctgttcttgaatagcttccttcaaaaggacttctgcttccccagtgaatgtcttggtagaagatatgatttctttgaattgaggtttattcgtgtttaagtaagcacgtaacttaacaagaaatttccttacctgtgcaatttctaatgaatcaagataaccattcggtccagtataaatagttattatctgatcttccacggtaagaggagctgattgggattgcttaagcaacttgcgcaatcgttgacctctcgctaattgattttgagtagctatatcgagatcagaagcgaattgggcaa

SEQ ID NO: 206067 - DNA, 552 bp, Glycine max
aatgttgaatagagaccaatatctgtattattgggtttataacgtcagcagataaactgttttttctccattgtagttggagttatacattacatgaaataaaataatatcttctcgatcatctcaggtgttggcatgacatatgccagtgttctgtatcatgatcctatgtcatttctcctttttttctgtagcttccctttttctataaaaaaatatcttatgatgcttttaactatataccaagatgcctgaacttgcaaaaatatgcaattacacaagagcagcctcttgtgtgtgcttttcctgtgttgctttgatgtgcccaacataaagatcactcccatgggaatcagctgccggaagtctctctctccgaccaccctcagacatgcttcttacgaaatccactaggtgccgccagttgtcagcttaaacaacctcttggtcattcttagatatgtgaatgcagccaatccacttgccgattctgacttactttgtgataaacttgagcatatgcatctgcatcatatctctcccatgcatttt

SEQ ID NO: 206068 - DNA, 612 bp, Glycine max
atccccccctagctacagagcagccaaaggggaggaataataataagcctatattctaaggccggaaaaataaaaaaggaataacaaaaatgtctggaaaggtaattatctcggctgtttctctcatcctggtggttggagtggccataggtgtggtggtggccgtcaacaagaagggcgaggatcccacacttcaatctcaacaaaaatcagtaggggttatctgccaaaacactgatgaccagaagctctgccacgaaaccctaagctccgtgaagggcatggacaccgctgatccaaaggcttacatcgccaaggcggtgaaagccaccatggacagcgtgaccagggccttcaacatgagtgataggctcagtaccgagtacggaggcaacgataacggaaccaagatggcccttgatgattgcaaggacctcttgcaatccgctatcgagagcctccaactcagcatcgacatggttcacaacaacaacttgcaggccgtgcataaccaacaggctgactttaagaactggctcagcgctgttatctcgtaccaacaggcctgcatggagggttttgaccatggcaaagaatgtgagaagaagatca

SEQ ID NO: 206069 - DNA, 544 bp, Glycine max
  unsure (1)..(544): unsure at all n locations
ctcgagccgaatcggctcgagcttcaattcatggaagtgtgattctaatctccacaacaaacctaaccctaaaaagctaaccctttttttttttttttttaaatattggttctttttttacttaccctagatgttagagccatggacataaccccaacaacaacgatcaacaacaacaacactactcccagtgcaacaacaaaatccccagaaaatgaaacagaaacaccgaccaggatcaccacccccatcactcccacaacgacaaaaacctcatctttctcgaatggtgtcctcaaacgcacccaccaccaccaccaccttcaccaccctatccctccggtggttacctacaaagaatgccttaaaaatcacgccgccaacttgggtggccacgccttagatggctgcggcgagttcatgccctctccgaccgccaccgctgccgaccccagctccataaaatgcgccgcctgcggctgccaccggaacttccaccgccgcgagccggaggagccctccatcgncttcaccaccacgcacg

SEQ ID NO: 206070 - DNA, 489 bp, Glycine max
ggaatagagggtgatggagaaatctccatatccacttttattattaggaaattcagcacatgcatgcattcataacaagggcaatattaatttcagagtacattttagataggagaatacttagggaaccaagatgaggtcattgataatggttgatgttcatacggagaaagaggatgcaaggccaaactgaaggccccagagctcaaaagatcccttaacaaagtcatagtatcctccttttagtgacaatgtcttgttcaccaagccatctctaacaaatgggtatgttagaaggtttccaagggaaacattcacagcttccttctcacagtgtgagcacaactcagcaaaaggtgcatccccatgttgtgtcttcacctttgcctttgcaggcaagccaattttgacccactcctcaataaaatcagtagagtaggttccatcatatgggaaagacagaagccccttaataccaccacaagcact

SEQ ID NO: 206071 - DNA, 509 bp, Glycine max
gccatttgacttcagcctctacagcagagtcccagatctctgcattccaattcccatggctggtcgctatgacagtaaccccttcgatgaggaagaagttaaccccttctataatcctggaagtgttcccgctgccactaattcaaggctttcacctctgaagccagaacctgttgattataattatggctttggtgcgacagttgatatacctcttgattcatcaacggatttgaaaaagaaggagaaggaacttcaagccaaggaaactgaattgagaaaaagggaacaggaagtgagacggagagaagaagctgcttcacgagctggaattgttcttgaggagaagaattggccgccttttttcccaataatccatcacgacattgctaatgaaattccaattcatcttcaaaaattgcaatatgttgcatttactacactgttaggattagtgttgtgccttttttggaatgttatagctgttactgcagcttggattaaaggtg

SEQ ID NO: 206072 - DNA, 447 bp, Glycine max
ttaagctcggtattctcgctattgtgctcgagaagaaaagtcaaagacaatgtcagggatcattcacaagattgaggagacccttcatgtgggaggccccaagatggaggaggagcacaaggttgagcttaagcttcgagaagaatgcaaaggtgtgccatcatggagaacacagttctgaataccgaggcaagtgtcatgccgatgagccaaggcttgggaagaagggaggatctgctttaagcaagagtgtttatagactggaatcacagtcctgatacactggccggtctgctgcggcaggctgttcgtgcaagctccagatctctacgagcggaccatgcggtgcattaacatcgacaccgtactggtccttgacatggccgcttatctaaccctaaagtgccgtgctaacggcctcatgaaactcgtcttcagaatattccc

SEQ ID NO: 206073 - DNA, 547 bp, Glycine max
acagtgttaggatatgggatcttcgggtaaatgcttgccagggcatcttacatctacgtggtagacccgctgttgcgtatgaccaacaaggcctggtctttgctgtagcaatggaagggggagctattaaattatttgattctcgttcttatgacaagggtccctttgacacctttctagttggtggtgacacagccgaagtttgtgatatcaaattcagtaatgacggcaaatcaatgcttctgactactactaataacaatatttatgttcttgatgcatatggaggagagaagcgttgtggatttagtttggaaccatctcctggtaccccaatagaggctacatttaccccagatgggaagtacatggtggcaggatctggaagcggaaccatgcaagtttggagtattgagaccaaaaatgaggtggcatgttggaccagccatattggggtgccttcgtgcttgaagtgggcccctcgcatggccatgttcgctgctgcttcagtgttcttacattttggatacccatatgattaaagctg

SEQ ID NO: 206074 - DNA, 616 bp, Glycine max
cacagttagtacaaaaaagggttacttcatcttccacatatcttgaagaattgatcaatgggcaagtctgtagttgagaagctactttggatggcaattgtgtgcttggtgctgggtgtaatttccattactcccaaggcccaagcagcagtgacatgcaaccaggtggtgagcaacctcaccccatgcatttcttatgtgctcaatggtggcaaaaccgtgcctggcccttgctgcaatgggatcaagaccctctttaacctcgctcactccacaccagaccgtcaaaccgtttgcaagtgcataaagaacgctgttagtgcgttccattatggcaagtccaatgtggaccgtgctgctgctcttcctaagcagtgtggggttaacattccttaccagatcagcccttccaccgactgtaccagagtgcagtgaggttaatgatatatggagcggtaactctagatgagaaggatatacaatatatagctagtgtgtgaataagtggctggctatacgtaggccacacattacattaatgactggcggctgctaatattacatccatcactaattttgtaacgaataatgaactttttatttgtagaatcaaaat

SEQ ID NO: 206075 - DNA, 559 bp, Glycine max
  unsure (1)..(559): unsure at all n locations
agactggtctgaactcccaaaggacctcctacacaaaatatcacaactcctcctcgaaagccctctctacctcctccgcttccgatccgtctgctcctcatggcgttcttccactcccccctctcccttcaacccctcaatctccctcaccaacaccttctccctctcccaccgcaccctcctcctcctcaaccctaaccctaaccctaaccctaacccccgcccctggctcgtcaagctctccctcgacccacacgccagcaccgcgcgtctcttccaccctctctcccgcttccccatgaaactgccccgtttcgccctcgacctcttcaccctccccgccctcgacctcggccgcgagttcctcctcaccaacacgcgccacacccgcgactccctctacattgaaaagctcgtcttcctccctctcacccatcgaaaagaccgttttgccctcctcacgatccacgtctnncggaaactcgccctcttccgctccggcgacgacggcttgaccgtgatccccgacatgccgaccccctacgacgacgtctgcgtc

SEQ ID NO: 206076 - DNA, 522 bp, Glycine max
  unsure (1)..(522): unsure at all n locations
nnngncgcaacatccttcatcctgtaatgactgacttgaaagtcaaacagcttcctttgttcactcttctggtccgcaaactgagcgagcagtcctgcgccgctaccgtttgtgaggctgagataacgggtgtctgtatggtttgatgattcttgaggcacctcgtaatcgacccagagttcgtcgacgctagatgctgtgtacttgcccacaggttgtgagagcttgctatcgcggtaggtctcgccgaagccgcggccaaaccattcgactcgttggaattgcttaggaagctccataacgagaccgatgcgtggaagggtccgaggtaggttctcaccctttggtgtaccgacaacatggacagacagagtattgttggcgctgaaagtgtacgtaagaacgcagtcgacagaccaagagagaactggaggtgcgacacgttgatgcacggtaaccttgagggtctctgagtcagactgtgaccattcgaccttgcgagtcaatggtttcgcgtgatgc

SEQ ID NO: 206077 - DNA, 475 bp, Glycine max
aagagcacaacagaacagatggagcacacaatcttccttcattcttttcgtgaaacagaagacaaccgaaattaggtcatcatgtcgggcatggagaggcttcacaggatgttcgctggtgcaggtggagcgctgggtcatcctccaccggattctcccaccctcgattcctacgagcaggtctacatctcctccctcgcccttctcaaaatgctcaaacacggaagagctggagtaccgatggaagtgatgggtctgatgttgggggaggtcgaggatgagtacaccgctcgcgttgaggatgtgtttgcgatgcctcagagtgggaccggcgttagcgttgaagctgttgatcatgttactcagactcatatgcttgaactgttgaagcagactgtaaggccggatatggatgtgccgtgagttcactcgcatgctgcattagggtgttgactttttggagtggacattaata

SEQ ID NO: 206078 - DNA, 355 bp, Glycine max
actaacataactgggggaaaaattctcaaatcacccatttttagttatattttatttacaaattttatgcatcacattatgcctttctatatattaggcaacacattccaagctgaacatgctaaatccctaagaagcatccatgtcaaggggtcacaccattggcaatcccattttgggaaacgatacttggggaggccaataaagggggcttttttaaccagtattggtgaaatctttgccttgcatactccttggagtcaaaggcaattggattgacctgactcgaaataagtccccacaagccccaaaatagatggtttgcaagagtggatttttctgcaagattcactag

SEQ ID NO: 206079 - DNA, 532 bp, Glycine max
ctctgacgatgctccaaatccacgcactcggaaggaccttgttctaatgatttgcggtttgtttttgctctcttcccttgttgcctttggagggtacagggcctccaacgcgccacatgctgacgtgtcatcgccagcatcgaacgatgaacaacctagtcccacatcggtgccttctccgaaatggtacccggtttcacggggtgtttcttctggggtgtcggagaagtcatcaagcatgttgtttgcggttaaagatggagcttcggaagcatttccttgggacaatagcatgctgtcgtggcagagaactgcttttcatttccaaccagagaaaaactggatgaacgatcctaacggtcctatgtactacaagggatggtatcacttcttctaccaatacaacccgaacggtgcagtttggggtgacatagtttggggacacgcagtgtcaagggacatgatccactggcttcaccttccactagcaatggtggctgatcaatggtatgacatgcaaggtgtgtggaca

SEQ ID NO: 206080 - DNA, 511 bp, Glycine max
gaggcatcaagctactcagattgtttcaatgagactgagtcgtgccgagccaccgctgagaaaggagatagtggaatatatgctagatgtgggttcccacatgtggagtatgagaagaagcaaggcgaactttttcaggattatgggagttttgggtggattaattgctgtaggaaaatggtttgaccagatttgcaactggaaaaatccaatcacaacagttctgatccatatcctgttcataatattggtcatgtaccctgagcttatcttaccaacaatcttcctttacctcttcttgatcggagtttggtactacagatggaggccaaggcacccacctcacatggacactcgcctctcccatgcagattctgcgcatactgatgaactggatgaagagtttgacacattcccaaccaccaggctcagacatcgtgaggatgcgatacgaccgacttagaagcattgctgggaggatacagactgtggttggtgatttggccactca

SEQ ID NO: 206081 - DNA, 458 bp, Glycine max
aaataaaaaaaaaaaaagaaataggaaggagataggaaagggttaattgaatccaaaaaaaagaagagaaaaacaaaatgggcagggtttggacttcgatgatagcattgttgctttgcctgatgacatcatcggttcggggcgaggacccttacatttactacacatggaacgtgacctacggcaccattgccccattgggtgtcccccaacagggtatcctcatcaatggtcagtttcccggccccgaaatcaactccaccagcaacaacaacgtggtcatcaatgtcttcaacaacctcgatgagcctctcttgatcacatggcatggtgtccaacagaggaagaactcttggcaagatggcacattgggtgcccagtgccctatcgccccaggcaccaactacacctaccgctttcagggtaaggatcaaattggaacttacttctactacccg

SEQ ID NO: 206082 - DNA, 514 bp, Glycine max
tgctattgccattagtatttttgttagtttcacctttgctgccatgtatggtattgctgttgctgcgcttggcatgctgagtaccattgccaccggattggccattgatgcatatggtccaatcagtgacaatgctggaggtattgctgaaatggctggtatgagtcacagaattagagagagaactgatgcccttgatgctgccggaaacacgactgccgctattgggaagggatttgccattggttctgctgcccttgtatcactggccctctttggtgcctttgtgagccgagctgctattacaactgttgatgtgttgactccaaaggttttcattggtttgattgtgggtgcaatgcttccttactggttttctgctatgactatgaagagtgtgggaagtgctgctctgaagatggttgaagaatacgcatgcaattcaacaccattccagggttgatggaaggaactgctaacctgactatgccaatgtgttagaactcactgatgc

SEQ ID NO: 206083 - DNA, 593 bp, Glycine max
caaagtttcttcctttctctgctctttgccttctctgacacatttggtgccttgtagagcgtgttttggcaggaaggtggtatggcgaaggacgttgaggttgctgagcgtggctccttctctgggaaggactaccaggaccctccaccagcaccactcattgatgctgaggagctcacaaagtggtccttttacagggctctcattgctgaattcattgccactttgctcttcctctacattactgtgctcacagtcatagggtacaagcaccagactgacctcaaggaaaatggtgaaatctgtggtggggttggcattcttggcattgcatgggcctttggtggcatgatcttcatccttgtctactgcactgctgggatctcagggggtcacattaacccagcggtgacatttgggcttgttttggctcgcaaggtgtctttgatccgagccatcatgtacatggtggctcaatgcttatgtgctatctgtggagttggtttggttttcgcttctcaaaagttctacttcaacaagtatggtggtggggctaatttcctcgctgctgggtacagcacaggtactggatt

SEQ ID NO: 206084 - DNA, 531 bp, Glycine max
  unsure (1)..(531): unsure at all n locations
ctcactaaagccaaataaaagaaacataagatgatgtacaatgctaaaagtatatgtttgtcgttaattagataccctgctaacttaaccatattcaaacggcaaaccaaattgatatttaacataaaaactgaacggaaagtgctttttcatttgatactgaaccagattaccagcccatcagtgttcttctaactttgtcaacaatctgagttcttgcttggcttctggtcaatggaaagtcacggctttcctccaacaaaaatctatacacttcccattgacgttcttgtgttgaatgtctaacaacttcagccgagaaaatgcctactcccaacgcttttaaagtcaacgtaacatcatagaatacacggggtctcccctttccactcagctccacaggattagcaaccagaagttctgtgtctggaccccggttcactatcgtcacccgcaacggatgaagcatctcttctttaagcatgaacacaaggttntctggctttaggatctatgatctttttccatcgt

SEQ ID NO: 206085 - DNA, 524 bp, Glycine max
ctcactaaagccaaataaaagaaacataagatgatgtacaatgctaaaagtatatgtttgtcgttaattagataccctgctaacttaaccatattcaaacggcaaaccaaattgatatttaacataaaaactgaacggaaagtgctttttcatttgatactgaaccagattaccagcccatcagtgttcttctaactttgtcaacaatctgagttcttgcttggcttctggtcaatggaaagtcacggctttcctccaacaaaaatctatacacttcccattgacgttcttgtgttgaatgtctaacaacttcagccgagaaaatgcctactcccaacgcttttaaagtcaacgtaacatcatagaatacacggggtctcccctttccactcagctccacaggattagcaaccagaagttctgtgtctggaccccggttcactatcgtcacccgcaacggatgaagcatctcttcttttaagcatgaacacaaggttttctggctttcaggatctatgatcttt

SEQ ID NO: 206086 - DNA, 523 bp, Glycine max
ccactttctatattttgcaactcttggagctgaaacactcacgcacttcatcaaaactctcctcagttatccctccaacagaagataaaacatggttctagttgcaagtcatggcgaggaggaaaagggggcagaaggcattgctgctgttgattttcgaggtcaccctgtggacaagacaaaaactggaggatggctagcagcagggctcatcttaggtactgaactggcagaaagaatatgtgtaatgggcataagcatgaacttagtgacctacttggttggagttttgaatctcccttcagctgattctgccaccatagttaccaatgtcatgggaactctcaacctgcttggccttcttggtggcttcatagctgatgccaaacttggcagatacgtaactgttgccatatctgcaatcatagctgctttgggggtgtgtttgttaactgtggctacaaccattcctagcatgaggcctcctgtgtgcagcagtgtcagataacaacaccatgaatgc

SEQ ID NO: 206087 - DNA, 532 bp, Glycine max
ctgtcatcttgtcattcaccgagaaagtcgtactgattcctcttcatctttcgttaaagcgagtacttttcgttcttgatctgttggttacgatgtcgtattcaaggagatctaggtattctccttctccttctccttctccatacaagcgatacggtaggtctgtgtccaggtctctctcaatatcaagatccagaagccgttcaaggagtttatcaagagatgcagaaaatccaggaaacaatttgtatgtgacaggattgtctcctaggattaccaagagagaactggagaaacattttgctgctgaaggaaaagtgatagatgtccatctggtagttgatccttggacaagggaatcccgtgggtttggctttgtgacaatggagactcttgaggaggctgaacgatgtgtaaagtatctgaatcgctctgtacttgaagggcgtgtcatcacggtggagaaggtataatacttacctagctatgccctattttgtgtgcctgggactttattagctatgatttttta

SEQ ID NO: 206088 - DNA, 521 bp, Glycine max
  unsure (1)..(521): unsure at all n locations
cacgatggttgaaatttgaagcaaagcacgtgtttgtgtgtgaccttctctctctctaaactccgatggctttctctgcaatcactaccttgccctctcctcaatttctccgccttcctcaatcttcaccctctcttcgattttcaccgccaattctcaaacgccccaaacccctctccattcgatcagtttcaatccccgctgcaccagcatctggttctctggcccctgcagtttcacttacggataatgcgctgaagcacttgaataagatgaggtctgaacgaaatcaagatttatgtttaagaataggtgtcaaacagggagggtgctctggtatgtcatacacaatggattttgaagacagggctaataaaaggccagatgattcaattattgagtatgaaggttntgaaattgtttgtgatcctaagagcctactcttcatatttggcatgcaattagattacagtgatgctctgattggnggaagcttctctttcaagaatcctaacgcgaca

SEQ ID NO: 206089 - DNA, 584 bp, Glycine max
aagaaaagtcaaagacaatgtcagggatcattcacaagattgaggagacccttcatgtgggaggccacaagaaggaggaggagcacaagggtgagcagcaccatggtggagaatacaaaggggagcatcatggtgaacacagtactgaatacaaaggagagcatcatgttggtgagcacaagccggagcaccatggaggagaagagcacaaagaggggttcctagacaagatcaaggacaagatccacggcgaggagggtggcgccaccgccgagggcgagaagaagaagatgaagaaggagaagaagaagcatgaacatggccatgacagcagcagcagcagtgaacagtgattagattatcttccactgctgcatcacctatatatcttataaggtgtatgggaccatagtagtgagggctgtgtctttctctttttttcctacttgtcatttatatttatgagcgagagaaatagtgcgtgtatcttgttgctaattcgagtgctattagtctgcggtttcgttgttcgtaacccctttgcttggttatgctggaatgatttatccttaaagaataaatga

SEQ ID NO: 206090 - DNA, 491 bp, Glycine max
agttattccgatattcggacgcatcaacttgttatgaaatcacattgatagcctctactcgtgtcctagctcgtctaagagctagatttgcctcaattgtttgtctcttgccttccgccttattcaaattagcttctgctatttcaagagtttgctgtgcttcttgtggatcaatgtcactacccttttccgcatcatttactaaaacagtgatctcattattgtttattctagcaaaaccgcccatcagagccatcgttaaccattggtctttaagaagacgtattctcaaaatacctatatctacggctgtggcaataggcgcatgatttggtaatactccaatttgtccgctattagtagataaaatgatttccttcacttccgaatcccaaacaattcgattgggggtcagtacacaaagatttaaagtcatttcttcaaattgctctccatttctaagttcgtagctttcgcagtagcttcatcga

SEQ ID NO: 206091 - DNA, 570 bp, Glycine max
  unsure (1)..(570): unsure at all n locations
gcttaaggtctacacaagttctctgcttcttctccccctattgacctttggtcatcacaagcgaaaacccacttctggatcttctggtgtaaaggccattagaagctttagaaattttctaattgagttggtgtatagtgttgaagggggtgaaatctggagcccagtttgttagttgttactcacttcatctgtaagctcataggttgaaccctctttttttggagacttacctgggaaaagatgatgatgtttgaagatatggggttttgtggcgatttggatatgttatgtgtttctcttggagagggggatattgctgtgagacaaactgaaccggatcctgtagttgaggatgactacagtgatgaagaaattgatgtggatgaacttgagaagaggatgtggagggacataatgcgtcacaagcgattgaaagaacaaaccaagtccaaggaagggactgatgcaacatagcanaggcaatcccaagagcaggcaaggaggaaaaagatgtcatgagctcaagatggaatactgaagtacatgctgaaaatgatgaagtttgca

SEQ ID NO: 206092 - DNA, 407 bp, Glycine max
gtaaaaagcaagtaacattaagttggattgggatacacaagataattcacattatctgaagtacattgcaataacatatacttcaccaaacacaaatctaaaaactctcaaaagtccacaagtcatccttttctttcatgctcacttgccggggacgaagttggtggcgtaggcccaggcattgttgttgactgggtccgcaaggtgatcagcaaggttctccaatggacccttaccggtgacaatggcctgaacaaagaacccaaacatagagaacatggccaatctcccgttcttgagttccttcaccttaagctcagcaaaagcctctgggtcatcagcaaggcccaatgggtcaaagctgccaccagggtagattgggtcagtgacctcaccgaggggcccac

SEQ ID NO: 206093 - DNA, 489 bp, Glycine max
caacaactaatcagtggggattgtgtactgttatattgggcttctacatctatttgggacttcatgagcttattgtcatcggccttttatgccatatttctattttacgtctttgggctgcatcagtttgttggacgggtatctttggaccaacaatcctcatgcttttggaatatggacttgtaatcgcattattaacttattgccttacatttctcttttttgaccataccatggcgcataatgtggctctgttgatccacttgatctctggattgatactgatggtcatctcatatcattatgggactcatgccatcaacaatgaatgccaattctttaattaagaatgtgctcagaatatctcctgtaatgtgtttcgctgatggtcttgctttactagctcttttacggcaaggaatgaaagataaaacatgtgatggggtgatcgattggaatgctactggggctttcatctggaatcttgct

SEQ ID NO: 206094 - DNA, 562 bp, Glycine max
atcgaaccagcagaatcagtccattaaggctcttaaggagcatgttgatgatgcccctaccattgcggatccatggtttcagagttacaactctaatgacttagaggtggaaagctctgaaatgggttattctgtggaggctcttcttttgctgcagaagtcaatgctggaaaagcaatggaacctttcctttgaaagagaagtgcttactgaaaattcgagtaagggaaaaaaatgtaggaaagtggcggtgacttgttctggggtgtctgcaaggcaaagaagaatgaataccaagaggaagaccgctattaaaacttgtggtgctatgcagctgaagtccaaaatcagtccagagctgcttcaacaccgtttgaagggctacgtaaaaggtctagtgagtgaggaattgctctctcatgcagaagttgtaaacctatcggagaaaataaaaagttgggctttccttagaggaacataaattcagactgaaagaaaaactatgatgtgaaccctctgatgatcaaatgcaacttctttgaagatttctcgaactgaacta

SEQ ID NO: 206095 - DNA, 497 bp, Glycine max
  unsure (1)..(497): unsure at all n locations
gaaagaaatcaagcgccaggcgctcatggacctcgtggacttcatccaatccggctccggcaagataagcgagaactgccaagaagagatgatcagaatgatctccgtcaacatttttcggtgcctcccgccggcgtcgcacgaaaacacaggccaagaacccaccgatcccgaagaggaggaaccttccttggacccttcttggccccaccttcagctcgtctacgagcttctcctcagatacgtggtttcctccgacaccgatacgaaaatcgcgaaacggtacatcgaccactcctttgttctcaagttgctcgatttgtttgactctgaggacccacgggagagggagtatttgaaaaccatactgcatcgtatatacgggaaattcatggtgcataggccctttattaggaaagctattaacaacattntttaccgctttatatatgagactgagaggcactctggtattggggagcttctggagattctgg

SEQ ID NO: 206096 - DNA, 575 bp, Glycine max
  unsure (1)..(575): unsure at all n locations
gtcgtcgtggtcgtgtcgcagcaaaaccaagccacccactaacttgtttggtccaagacatggctctgatcctgcatgctaccaaaacaaacaagaatgccttcaagactctgattgcggcagagtacagtggtgtccaagtggaattggcccctaatttcgagatgggtgtctctaacaaaactcctgaatttctcaagatgaatcctattggaaaggttcctgttttggaaacgcccgatggtccagtctttgagagcaatgcaatcgctcgttacgttgctcgactaaagggtgacaacgctttgttctcatcttctgccattgataatgcccacattgaccagtggattgatttttcatccttggagatcgatgctaatctcatgaaattgctcctaccaagacttggatttgccccataccttccttcagttgaggagggtgcaaattctgcgttgaagagagcatttgaggccttgaacactcatcttgcctncaatacttacctttgttggccattcctgttacccttgctgacatcataacaacatgcaacttgtatttaggattca

SEQ ID NO: 206097 - DNA, 533 bp, Glycine max
gtggaagcacacaacatgtttggctatgagaccattcctgaagagtgcgttgaagcaacaaaggaatacatccatggcgaacaatatagatcagactacaaaacagttaaccaacaagcttacttttatgccagagacctcgaagtccattccaaggacacatttgtgttcagtatagatggcaccgtactctctaatattccatactacaaaaaacatggatatggggtggagaaatttaactcgaccttgtatgatgaatgggttaacaagggcaatgcaccggcactgcccgagactcttaagaattacaacacgctggtgtctcttggcttcaagattatattgttgtcaggaagaacactggacaaacaggccgtaacagaagcaaacttaaagaaagctggctaccacacatgggaagaattaattctcaaggatccacacgatccttccactgcaaatgcagatgcatacaaaacagcagcgagagagagactgatcatgcaaggatacaacatcggtgggatcat

SEQ ID NO: 206098 - DNA, 510 bp, Glycine max
  unsure (1)..(510): unsure at all n locations
aagttgaaaggcgttgatttatagtgataactaaagattaatcgttaaacaattaccaataataaaacaaaaacaagtgaaagaatttactctgccatcaactcagttatctgatttaacaacacattttttcatcatataaaacgagaacgccgtattttaatttctttcaccaagctaccctgtaggctgtgcagcatttagaagcatttcctgtgtacaattgaaggaccagcctcatcgtactcagcctttgcaatccacatctgttggaaagtgctgagagaagccaagatagagccaccaatccagacactgtactttctctcaggtggagcaaccaccttaatcttcatgctgcttggggccaaagctgagatttccttgctcattctgtcagcaatacctgggaacatggtagaaccaccactgagaacgatgtttccatacaagtccttcctaatatcgacatcacatttcatgattggaatgtangtggtttcatgaatg

SEQ ID NO: 206099 - DNA, 452 bp, Glycine max
cattgattgccgagattcaaccatgttatattgagacaatcaatcaagtacacaactcacagcaaaaaggtttataagctgtaaaggtacatgtaaccataaacaaaaatagtctccaagactataaaaacattacattttagacaaattagtcttcttccacttcatcctccgtcaacacctactacaactgctggtgttgctgctgcctaacatgtatcatattcactacaaacatcttagtaggagtagcctttgacgaacaactccttcttggcttcctcagattcaccctcaccggtgtacttcccaagctgggcgagcgagttggacttggcacggaaaagaagtgcatcttgtgccgccttcacattctctgggcggcctccccatgtcttcaggcagtgttttggagggctctggcatacgagaacgacacgtgccacgggttt

SEQ ID NO: 206100 - DNA, 538 bp, Glycine max
ccaaaagaacaacatggacattgatctttctcctcagttgcccaagaaagtttacggtgccaatggtggctcctactacgcatggtccccctccgaccttcccatgctccaccaaggcaacattggtgccgctaagcttgctctcaacaaaaacgcctttgctcttcctcgttactctgactcttccaaagtcgcttatgttcttcaaggtagtggagtggctggaatagtgttgcctgaatcagaagagaaggttgttgcaataaagaagggtgatgccttggcactcccctttggtgttgtgacctggtggtataacaaggaagaaactgagttggttgttctgttccttggggacacttccaaggctcacaaggctggtgaattcactgacttttttctgactggttccaatggaatcttcactggcttttccaccgagtttgtgggcagggcttgggacttggaagagagtcatgtcaagaccctttgtggaaaacaaccagcccaagggattgtgcagctggaaggaaacatc

SEQ ID NO: 206101 - DNA, 506 bp, Glycine max
  unsure (1)..(506): unsure at all n locations
cttaaagtagtagttctagcggttgactcgcttttttcaaattgtttttcattattaagaaaaggtaacaaagataaaatacgagcttgttttatagcaattgttattaatcgttgttgttttaaggtcaatctatttacgcgtctggataatatttttccttgttcactaataaatcgactaattaaacccatgtttttataatcaattcggtcccccgattggatcgggggcaaacgcctacgaaaagatcgcttggatttcataaagagtcgcttagatttttccatggtttatttatccctattccaaaatcacatttattacaagaaatactataaaggatttgtttttttattctgactnttttaatatantgttgtatttttttaatatatgttgntatatactgatatttgtatatattcaactgtaaatgatagaatacagatagatctatctatatagattagaaaaatagatcattttacatgttaagttctttg

SEQ ID NO: 206102 - DNA, 581 bp, Glycine max
  unsure (1)..(581): unsure at all n locations
cgcgcagcagcacgagctcgccgccacctccgactcctacctccagctccggagccgtcgcctccagaagcctccgattttggtccactctccgaagcgccctaagcacccgaaccctaaatccccaatccccgaacctcccaggctcggactcgcttcggagcgcgacgctaccctcaaccacaacaaggacaatactttgcatgagaatgccgagcctcaggaagcgtcgttcggggaaaatgttttggattttgaaggtagagagagaagcactagggaatccacaccttgcagtttgataagggactcggatactgtcaggactccgggttcaactaccaggcctacttgttcagctgaagcttatcgaagaacagagcatgcagctagaaggcaaatcccaacctcccgtgaaatggatgaattctttgctgaaattgaagaggctcagcaaaaaaaattcattgagaagtacaactntgatcctgtgaatgagaagccgctctcagggcgctatgaatggngaaaagtgaaaccctagaagggtaatgagtggtccatcaagacatccttgaagt

SEQ ID NO: 206103 - DNA, 553 bp, Glycine max
  unsure (1)..(553): unsure at all n locations
cgctgacagaataaggagagggccgcactgaacctttgccgcatggcacttcgatcctcgaaacttctctatcgcccttataatcttctctccgttcagttgcagatgcagatgcaaccctcttctcctcccctcactcgaaagatgagcacggatgcgcagagtattgcttcccagcttaatagttctggattgttgaggactcagggccttattgcagggaaatggagtgatgcttatgatggtaaaaccataaaggtttataatccagcaactggtgaatctgttgtagatgttgcatgcatgggtggaagagagacaaacgatgcaatttctgcagcctatgatgcatatggatcttggagccaaaccactgctgctgaacgaagcaaattactgaggaaatggtatgatttgctaatggtacattaaagatgaacttgcacagcttataaccttggagcaggtgaaacctcttaaagagtctgtgggtgagatagtctatggtgctggctttatcgagtntgcagctgaagaggcaatacgtatatat

SEQ ID NO: 206104 - DNA, 505 bp, Glycine max
tccaccttcaacaaaccctgtttctcttcttaaggaagcgatccatgtcatcagctgtggttacgaagacaagacagagtggggaaaagagattggatggatctatggctctgtgacagaagatatcttgactgggttcaagatgcatgctcgtggttggatttccatctattgcatgccacctcgcccagcatttaagggttctgcccctatcaatctttctgatcgtctcaatcaggtgcttcggtgggccttaggttcaattgagatctttcttagcaggcattgtcccttgtggtatggctacaatgggaagttgaagcctctgatgaggcttgcttatatcaacaccattgtctacccatttacctcaatcccattgattgcttactgtacgctttctgcattctggcctctcacaaataaatttattatttctcgggataagcaactttgccagcatgtggatcattcttctttcggctccatttttacactttaattc

SEQ ID NO: 206105 - DNA, 540 bp, Glycine max
aagcactatagtaaaaaaaggacattcattcatctatggctacccttattgctcccagcaaccactctccccaagaagatgctgaagctctcagaaaggcttttgaaggatggggaactgatgagaacactgtcatagtaattttgggtcatagaactgtgtatcagaggcagcaaatcagaagagtttatgaggaaatttaccaggaggatcttgtgaagcgcctagagtctgagatcaaaggagactttgagaaagccgtgtaccgatggatactggaacctgcagatcgtgatgctgttttggccaatgttgccatcaagagtggcaaaaactacaatgtcattgtggaaaatgccactatcctctccccggaagagcttttggcggttagacgcgcctatctcaaccgctacaagcactccttggaagatgatgttgcagcttatacctctggccatctacgccagcttttagcgtggttggtgaccgcattcaggcatgttggtgatgagatcaatccaaatttggcacaatctg

SEQ ID NO: 206106 - DNA, 615 bp, Glycine max
gtcgtcgtggtcgtgtcgcagcaaaaccaagccacccactaacttgtttggtccaagacatggctctgatcctgcatgctaccaaaacaaacaagaatgccttcaagactctgattgcggcagagtacagtggcgtccaagtggaattggcccctaatttcgagatgggtgtctctaacaaaactcctgaatttctcaagatgaatcctattggaaaggttcctgttttggaaacgcccgatggtccagtctttgagagcaatgcaatcgctcgttacgttgctcgactaaagggtgacaacgctttgttctcatcttctgccattgataatgcccacattgaccagtggattgatttttcatccttggagatcgatgctaatctcatgaaattgctcctaccaagacttggatttgccccataccttcctccagttgaggagggtgcaaattctgcgttgaagagagcatttgaggccttgaacacttatcttgcctacatacttaccttgttggcattctgtacccttgtgacatataaaacatgcacttgatttaggatcacccgctcttagtaaagcttaccttgagttcctacgttgacgatctttggac

SEQ ID NO: 206107 - DNA, 518 bp, Glycine max
caaaaacacaccacaacacaactcgttccagaattgccgactgaaatggaacgagttgtgttgtgctgtgtttttgtggaaaaagtcaaatcattctggaattttcattcatttgagagaaaagagaaaaacaagtgttctttgaatctgttgaaggtggtgatttgatttgatttgaataattcacataaccaattcatctattcattatctctccgatctttcaatggattctgacttctggacctcgcgtcttgccgccgctaaacgccaatacacgcttcagcatcaccatccaaactctcacttagatcggttgggaatcgatgattttgatatggaagaagaggtgagacccgatttcccttgcccctattgttatgaagactttgacatcgcgtctttgtgttctcatcttgaagatgaacattcttgtgaatcaagagtcacgatttgtcctatatgctccgataaagttgcacggaacatgttaagtcacataacgctgcaacatgggc

SEQ ID NO: 206108 - DNA, 603 bp, Glycine max
agcatcccgacagagtgagttgtatagctaggcttagctatttcttacctcttggcatggccattcaaatgtcttcttttgtctttgtttctcttacaattttattttgcttctcttccttggagaagagttttgcctttcaaacaacaaaggaggacacagaaagcaacaatcttcatcaatatactcatcttgttcacctcagctcactccttccttcatcttcctgcagctcttctgccaaaggtcccaaaagaaaagcatcattagaagtggtacacaaacatgggccatgctcccaactgaataatcatgatggcaaagcaaagtctacaacaccacacagtgagattctgaaccaagacaaagaaagggttaagtacattaactcaaggatctcaaagaacttgggccaagatagtagtgtgagtgaattggactcagctacactaccagccaagtctggtagccttattgggtctgggaattactttgtggttgttggctttgaacacccaaggggacttgtactcatctttgacactgcagtgatctcacttggactcaatgtgaccatgtgcttgtcttgctacagcacaagat

SEQ ID NO: 206109 - DNA, 441 bp, Glycine max
aaacacactcattgcacatagtaatgcgctttatttaagtgaataaaatattacatactagttcacaaatgcaaaaggacacttatcaaccagatatttgagactcttacagttctcaagaagtcgcgtcagcatagggttagtggcgttagaactcagaatttcattcttaacgccaaaaagaacagccagtaaagctactggaaaaggatcaactctagtaagaaaaacaattttcttacctttcccaagtgctgtgcgaatccttttgttgatatctgaggagcgattgttaactgcagaactaatccaagcagtgggtgggtaaaccaccacgttcactaccacatgtaacatttacaacgacagcttctgaaggtaattgacttacaggataaagacaattcacaaaattggtaaccaagaatccactggaaaatt

SEQ ID NO: 206110 - DNA, 485 bp, Glycine max
aaaccaaatcctccttagcacaaccacattcattatattacagagagttggcatgcacaattgcaccataagtgcaagaggctgtctaatgccatacatacagagagaggcaatgtatctgtgcctgtgccctccccagagttttaattattattattattattaaattgggccaggagtatgtatcttagcaggagaatacataaagcttaaggtttctcccaatcatgagatatacattataatacaagattaagctggaacagcttccggcactttgccattgcttgagagtactaagctatcatagtattcaaccagtaccttccaaccaccagggcacataaatccatcaggagggctttctttggtccttgccagtgtgcgcatctttgtgcctgatatgaacaggaagtcctgaggccttgaagggtcaaagaatgccattttaccctgagtcttgtcatatgcagcaaccctgaaag

SEQ ID NO: 206111 - DNA, 469 bp, Glycine max
ggaggttgcttctgtcgcttataggtataggaggtggaagcttgatgatgatatgtatcttgttgcgaggtgtgaggttcatagtgttgttgacgtgaacaagcagaggtcgttccttactttgaatgcgttgaatgagtttgatcccaagtattcgggtgtggactggaggcagaagttggagactcagaggggtgctgtgttggccactgagcttaagaacaatgcaaataagttggctaagtggactgctcaggctcttttggcgagcgcggatacgatgaagttggggtatgtgtcgaggattcatccccgtgatcatttcaatcatgtgattttggctgtggttggatataaacccagggactttgcggcacagattaatttgaacacgacgaatatgtgggggattgtgaagtctattgtggatttgtgcatgatattgaatgacgggaagtatgttcttgtg

SEQ ID NO: 206112 - DNA, 522 bp, Glycine max
  unsure (1)..(522): unsure at all n locations
gagggtcgacgagctcactacgcccttttttttttttttttggcataaatgatgaaaacttccctacagcacattgattctgcggaccagtaactataacttcattaattgagaatagtacataagtttacatgctcggtagcagacagccaaaatggctgattactattatttacaaaggaaacagatcatgagccactacacttgtcttgactcccttttaaccctttcatttttatgttcaagtgggaaaaagcagggcacacgaattggatttttcatacaaatgaccaatttatgaaagagaaagccaagcagtgaacatggttgtcttcccaagtaggaacttttccatgcaatggcttggtcatatgacacatggcgccccatcgtcgacatgcagatttcagctggcagattagcaaaaccctgctccattaacttggcaaagtctgtacacaatgccttgcgtncagcctcatcanatattttatccaatgtgatatcttgtaaggcaaacta

SEQ ID NO: 206113 - DNA, 524 bp, Glycine max
gaagcaattcctcactcctgaaaatctcatcctcttcttttacatttgttttggataaaacattttgctgatattgaatttttattttctcttgttttcgtttcttttcgacattttcttcttcttcttctgcttcggtgttttcagggagatagggataggagtaacaaagggagagtgcaatcagtttggttcttcgcttcgggactcgaatcttcgatgcctctctgttttttcttctctgccgcctctttttctgttctcaaattagggtttctgtgagagtgcctcttttctcgattctccgcaaactatcatcattgtaagggaaagcgatttgcgtttggacataatgtcgccaaaatatcagattctccacaatcgccccatcaatcagtggaaggttacagagctgaaagatgagctgaagaggaggaagataagtaccaagggtttgaaggatgatttggtcaaacgtttggacgaagtccttcgtctggaaaaggaggttgatgaggcttctg

SEQ ID NO: 206114 - DNA, 304 bp, Glycine max
gaataaaaacacacatcatattactatgtgttgtcatacatgcattgtaatgagtggatattccaaagcaattggtccctttatccctccttaatccttatgccgtaaatggcaccatcccttgtaaattgtaattgcttcttcagaaatagaattatacaaaggtagttgcaatatctatttgccaaactataaatgtaaagacccttcttcccaatcctagtagtgtcccaattgtatttacaaaggtgggacaagatatgtatatacaagtacaaccatgctcgagccgaatcggctcgag

SEQ ID NO: 206115 - DNA, 446 bp, Glycine max
attactagtatagtaatcgattccctaaatctatgaacccctccaactaaatccaataatttttttattttattattaatcaagaatttcgtatatagctagaacggccctcacaaattgcaaatactaatttgttaagaattaatcgaattgaggctatagcatcatcattagctggaattgaaatatcggcgaggtccgggtcacaatttgtatcgattaaacaaattgttggaatttccaaagttatacattctcgaagagccgtatattcttcttgttgatcgacgattattacaatatcaggtaaccccgtcatatatttaatgccgccaagatatgtttccaaatgagctaaatgtctcttcaatatagcggcatctctttttggaaaactattgagtctccccgtttttgttgcattctcaagtccctgaacttttgaa

SEQ ID NO: 206116 - DNA, 564 bp, Glycine max
gcggatgaggacacttttaggttggtatttaagaatcccggcatggaggatgaccccacttgtggccccatcattgacaacattgctattaagaagcttttcactcctgataaacccaaagacaacgcagtgatcaatggggattttgaagagggtccatggatgttcaggaacacttcactgggtgtgttgcttcccacaaatttggatgaagaagcgtcctcactacccggttggatagtcgaatccaaccgtgccgtccggtacattgattctgatcattactctgttccacaaggcaggagagccattgagttgctctcaggaaaggaaggaatcatatctcaaatggttgagaccaaaccagacaagctctacagcttgaccttctcattgggtcatgctgatgacaagtgcaaggagcctcttgctgttatggcctttgctggtgaccaggctcagaacattcactacactcccaattccaattccaccttccaaactgctaacgtcaatttcactgccaatgctgagaagactagaattgcattctatagcatatac

SEQ ID NO: 206117 - DNA, 525 bp, Glycine max
ggatatccaaacgaagccctatttcttgtcaaccagggcctctgaaaatttttaagtgcatagcatattttaactgtcatggtaaattattattacctacttcactgttccaaagaacaatctgattatgttttacagcacggaaaggagcgcagataagcaaagaaatggatttgtattatatactgtacatgatgctccacatccatgcaaaggagaaattttttccatcaagttgcctgcaataattctctgatatcgtacccttgaagctgcagaaaagtaagaaataatataactcctgagttccaaaaagaatggatagtgatgggagtgagaaggttgtgagtttgagcatatgaaaaccccaaagcagtccctagaacaaacaattggggaaattcttcaggagtgagatgtgcaagggcaaaaacagcagcactaatgacaacagcaactggcgtaggaacccacttagtgagggaagtcattaaaaatccccgaaaacagtcttctcaggagtgg

SEQ ID NO: 206118 - DNA, 461 bp, Glycine max
gaaagaagttctaaggaagagggaatatgcagaatacaaggtgctagttgtctatgtgcaataacaacatcagcgatccaaccttagtattcttcaacccagagagatttgtaataataaattacaacaacttaaacgatggcaggaggagcttatgtagattcgggaaatgcaaagcaatttgatgggaaggtcacggtattcgtattggttacatgctttgtggcagccatgggaggcttactcttcggttatgatcttggaataaccggaggagtgacttctatggaaccatttctcatcaaattcttttccggtgattataaacaaatgcatgatgatgttggccatagaagccaatattgcaaatttgacaacgagcttcttacactcttcacctctttcttgtatcttgctgctatagtagctactttctttgctttcaccactacaaggatgat

SEQ ID NO: 206119 - DNA, 353 bp, Glycine max
aggggaaaaaaccaaaaattccggggaaaaattccaaaaccccatttcccccaaagggaaaaaaatccccaaaggggggggcccgggaatttatccaatttttccccaaaaaaaaaaaaaaccccattttcgggaaaaaaaaaagggcccccgcccatggcacccaaaaaaaaacccctttttaaaagggccccccattccattttggggaaaaaaagggcccccaaaaaccagtcccccccattaaggggccccttttaggccccccgaaaaatttgggggccccatttccaccccccacgggggcccccctaaaacaaatgggcccccaacccatttttggggcccccccc

SEQ ID NO: 206120 - DNA, 466 bp, Glycine max
gagagagtatagtcttactacataacaaaggaaactccctaccattatccccttcaagacttcgtactataggtgtcgttggacccaatgctgatgctaccgttacaatgattgggaactatgctggtgtggcatgtggatataccactcctttgcaaggaattgcgaggtatgtgaagacggctcatcaagtggggtgtaggggtgtggcttgtatgggaaatgaactatttggggctgcagagaccatagctaggcaagctgatgcgattgatttggtaatgggccttgaccagactgtagaagctgaaacaagagatagagttgggcttctcttaccgggccttcaacaagaacttgtgacaagggtggctagggccgctaagggcccagttatcttgctcattatgtctggaggcccagttgatatctcgtttgccaaaaatgaccccaagattagtgccat

SEQ ID NO: 206121 - DNA, 437 bp, Glycine max
agttcaaaacaaaattaagatgtcaatttgcaaaggactaacaagatagtttgcactaaaagatgtcatgtggcacaaaacatcaccttaaattgtaccaacaacatataaaagcaactaaagccatataaaaatctgggaaacactaaaatcaagcagcaccctttcccttctttttctggagttttttcatgtaaaactccaactccttaccttccaaaatgtagccgtcagctctgccacattgaccaggccgagaggaaatgcaagcaagcaaacgcccaccaccaaactgctcctcaatgtgagcatcaagcttacgatctttctggcgcttctccaattttctctgcagatgattactctttttggcttcttccacagcaacagcagcagcaccctcctctgcagtttccttcttggcagctgtcttcttc

SEQ ID NO: 206122 - DNA, 491 bp, Glycine max
tgcgcgagggggtttttctagggtttggaggctatgccgaaagcgggttgaataagctcaggaatttgagattttgtgggtggtacttgacatggattgaggaatgaagcgactttgtcatgttatttggttggcgattgtgtttgtgctaggaaattttcgaaaatgtgtttctcagttgccccaagtcctgattagtctttccccccaagtgtttggatatgttctatgttgtggagtatcggtgttagtcgaggctgggcacttcatggacgatttaagggatctgggacagtttgaactcctaggtgaagaaaatgattctcacaaagcagtaccgatgcatacactcagctagctgtcaatgtactaaagggcatttaagtgaagatgtgatattcttagtatttcataatttgaattggaatcccaagctaattgctactctatcatgtgtgtgcaaatggtttgatgatcttgccaagcgagtt

SEQ ID NO: 206123 - DNA, 428 bp, Glycine max
acaccatcagtctgacactaacaattttatatattttttgcctgtatgtataggatagaaaacgacagcgtttgtctagatggcataaatacccccataaagaactatccaaagggtttattccagtccctaaataaatcagtaaattatcattgcatccaggttgacacaatttacactatattcaaaagttgggatttgtctataagagaaattaatctcaaactaccatgtgagtttctttcaaagttgatgggatccccacgtccagccgcatggtcgatttatattgctctggttaaccagcaccagcctgaatgcacatttttactactgcaagcgcctggccataaaaattcctaagctctcgttctagcggtgcatttacattaggaacatgccacacaaatcttggagggatcaaatca

SEQ ID NO: 206124 - DNA, 374 bp, Glycine max
atagtcaccaaacgttatcctttttatgatccttggttgtcatgataaagaataatgtggtgacaaataatgtgaatagtaatttctatttgcttccctagcttgtctatgaggatactatcaggtgactaatatcaatacgagatgcagggatattgctgctggagaaaatggaatggatgtgatgttcaacttgcttacttctacatcctataagtggatccattcaccagaacttctgtcagcattaaaatcccctttgatgcgtttatgtgccaggtaccttctgcaagagaagaaaagaggaaaggctttggactcttgagcaaattttcacttgccaaatggagcgatggttgaaagaataaactgga

SEQ ID NO: 206125 - DNA, 502 bp, Glycine max
gttttgtttatttgaaattaacaagtagcaaagatgtttggaatcatcggaggaaacaagggtcacaagataaaggggaacttggtgattatgcgaaagaatgtgttggatatcaacagcattaccagtgttaagggtgtaatcggaaccggcattaacatcattggaggagtcgtcgacaccgttactgctttggcgtcccacatctccatccagctcattagtgccaccaaggctgatggacatgggaaaggaaaagttggaaaggctacaaatttaagaggacaagtgtcgttaccaaccttgggagctggcgaagatgcatacgatgttcattttgaatgggacagtgacttcggaattcccggtgcattttacattaagaacttcatgcaagttgagttctatctcaagtctctaactctcgaagacattccaaaccacggaaccattcacttcgtatgcaactcctgggtttacaactcaaaatcctaccattctg

SEQ ID NO: 206126 - DNA, 454 bp, Glycine max
tttcgttttttttttagttattccgatattcggacgcatcaacttgttatgaaatcacattgatagcctctactcgtgtcctagctcgtctaagagctagatttgcctcaattgtttgtctcttgccttccgccttattcaaattagcttctgctatttcaagagtttgctgtgcttcttgtggatcaatgtcactacccttttccgcatcatttactaaaacagtgatctcattattgtttattctagcaaaaccggccatcagagccatcgttaaccattggtctttaagaagacgtattctcaaaatacctatatctacggctgtggcaataggcgcatgatttggtaatactccaatttgtccgctattagtagataaaatgatttccttcacttccgaatcccaaacaattcgattgggggtcagtacacaaagatttaaagtcatttc

SEQ ID NO: 206127 - DNA, 398 bp, Glycine max
gattgctaaagtgaatgtaagggtatcacatgaatacctatagcaatcagcagtctgttatcttgatgagcttattaagccttgtcctgaagccatatgaaatgatattggaatctcttggtgaattccagttccacatttttaagattaatcgaggcactaacgatcctatatgaattggaagtctttgttaatcttattaggcctatcctgtatcctatggaaatgagatcggtatatctcggggaattgcacttccacattttcaagatataacgatgcccatatgttcatttatgaattggaattattgggattcttattaggccaattctgaagccactggatatgagattggaattcctcgggggtaccgagcttgaatgccctattgtgag

SEQ ID NO: 206128 - DNA, 496 bp, Glycine max
gtcattcaaaagtctcaacttcactctagcactaaataatttacaagattaattcaatttggtctctgcactaaataagaaataaattaaatcgaattaaatgcaaacctgatcctgatgtgttatacaaaaatttacgacttctttttccccccaaacttgtcttgtctcccttttaaccctttcatttttatgttcaagtgggaaaaagcagggcacacgaattggatttttcatacaaatgaccaatttatgaaagagaaagccaagcagtgaacagtgttgtcttccccagtaagaactttccatgcaatggcttggtcatatgacacatggcgccccatcgtcgacatgcagattccagctggcagataagcaaaaccctgctccattaacttggcaaagtctgtacacaatgccttgcgtccagcctcatcaaatattttatccaatgtgatatcttgtaaggcaactagggttgtttccaacatgtcaa

SEQ ID NO: 206129 - DNA, 534 bp, Glycine max
cacttagtggtttcccttagaaaatttcctttgtatacgtgatacggttgtagcaagcacttgcatcgcatattctttcccttggaaaaatgcaatccaaggaagagacaagaaacatgagttctttgggcacaatcctcaagcctcatgctgtgtgcgtaccgcacccaacacaaggccacataaacccaatgctaaaactagcaaagctccttcacttcaaaggctttcacataacctttgtcaacactgagtacacccacaaacgccttctcaaatcaagaggtccagattccatcaagggtctcccttcatttcgctttgagaccatccctgatggtctaccagagcctcttgtggatgccacacagcacataccttccctgtgtgactccactagaagaacttgcttgcctcacttcaggaaccttcttactaaaatcaatgattcagatgccccttcagtgagttgcataagtttctgatggtgtcatgagcttcactcttgatgctgctgaagaattgggtgtccac

SEQ ID NO: 206130 - DNA, 515 bp, Glycine max
gaaaattactggtttttgcttgcggattctgtttcaaataatgtgtggttttctcagaaggttagtttcatggatgaagctgctgctgtaacttctgcatctaaggcaattgaggagtctatggaggggtcaggagcaaatgtgaaggagaccagtaaggcagttgcagaagcagttgagaaggtgaaagggggctctagattagtattgggcaagttccaggccccatcagagggtaactacagtttgacttgctattgtttgtgtgattcttggttgggctgtgacagaaggacaaatttaaagctcaaagttttgaaacggactcgggctggcaccagggctgctgttttggctgatgaaggacctatcatggaagatggagttgaggaggatgaggacaacgaggatgaagagtatgatgatgactacgagagtgagtacagtgaagatgaagaggatgatcagaacacataatataagcaacaagctgccaatggcactgtgaataaaca

SEQ ID NO: 206131 - DNA, 365 bp, Glycine max
cccctattaattttggggaaaaaaccaaaaaatacggggaaaaatttcaaaacccgatttcccccaaagggtaaaaaacccctaaaaaggggggcccgggaatttatcccaattttcccaaaaaaaaaaaaaaacccctttttcgggaaaaaaaaaagggccccagaccagggcacccaaaaaaaaacccttttttaaaatggccccccattccattttggggaaaaaaagggcccccaaaaactaggcccccccattaagggggccctttaaatcccccggaaaaattggggggccccattagcaaccccccagggggcccccaaaagagaaatgggcccccaaacaatttttgggggcccccc

SEQ ID NO: 206132 - DNA, 583 bp, Glycine max
attccaatatattccattctctctgtgtatttccctacctctcccttcaagatgcagatcttcgtcaagaccctcaccggcaagaccatcacccttgaggtggaaagctctgacaccatcgacaacgtcaaggccaagatccaggacaaggaaggaatccccccggaccagcaacgtctcattttcgccggaaagcaacttgaggacggccgtacccttgctgactacaacattcagaaggagagtactcttcacctcgtcctccgtctccgtggtggcatgcagatcttcgttaagacactcaccggcaagaccataaccctagaggttgaaagctccgacaccatcgataacgtcaaggccaagatctcaggacaggagggtatccccccggaccagcaacgtctcatcttcgccggaaagcagctcgaggacggccgcaccctcgccgactacaacatccagaaggaatcaacccttcacctcgttctccgtctccgtggtggcatgcagatcttcgttaagacccttaccggcaagactattaccctagaagtcgaaagctccgacaccatcgacaacg

SEQ ID NO: 206133 - DNA, 432 bp, Glycine max
aacacatcacaatatgcttattcattagttctcatccattaatttccattgaagtccgaaaacagaaaccaaaaatacaggatgatgaaatctcataaagcaaaaacaaatgggaatgtagtttaagtacaacaaacaaagtggggtggctacagatgctttgcaaatttttcaatgacttagaagcctgggggcttgtaagcgatgaagctgatgcactgtacttggcgaacgttgtcaaatccaatgatacggatgaagccattggggtatgcagtcttagcctcttgaagctccttcaacacctgagaagcatcagtgcagccaaacataggcagcttccacatggtccagtagcgtccatcatagtatccaggtgacctgttgtgctcacggtacacgaaaccgtgctatatgcaaacacaacaaaca

SEQ ID NO: 206134 - DNA, 334 bp, Glycine max
aaccaaaaagtcaagtatagcacattaaaatttcttgatagaacattataccatgccttattatattatttggatcacaaagtccatctagaagctatatatggctcctagtcttggcacaaagacaaagatcgttcttactgaggcgggggagacctggcaatgcttgaacatcaaggtggtcctttatcatcccttgtggcaatttgcaatcgacggaatgaagaagattcgctggaacaagtgataatatcacaactggcataggtaaacctgggcaacttctgcgacctgatccaaaaggaattacttggaaatattggccacgaaaatc

SEQ ID NO: 206135 - DNA, 347 bp, Glycine max
ggatatgcagtaaggggactcaggcttaccgcgagactcgcttttcccaaatcgctgttcactattaagaaaatgggacgaagatgaaatgcccacttgttttatagcagttgtccttaatcggagttggattaagggcaatctatttacgcggacgggtaacagggcctcccgcacacttataaatcgactgatgaaacccatgtttgaatagccaaatcggccccccgattggaaccgggggcaacgcccactaaaggagcgcttggatttcataaagaggcgcttatattattccacggcacattcatccctatctcaaaaccctcatctattaccagaaatac

SEQ ID NO: 206136 - DNA, 516 bp, Glycine max
acgaaattgaaagaatttaccaagaatttccctcctgaactcaaaggtttggccatcaataacagtgaggccatacgtacagcccataatagctttgctaggccagaaccttttgttcctgaagagcaaaaggttgctaccagagatgatgatgtttaccacttcataagctatctacctgttgatggggtactgtatgagcttgatggattaaaggagggtcccatcagccttggtcagtgctctggtgggcaaggtgatattgaatggttgaagatagtgcagcctgtgatccaggaacgcattgaaaggtattcccaaagtgagataagattcaatctcctggcagtcatcaagaacaggaaagagttgtatacagctgagctgaaggaacttcagaagaggagggagcgcattttgcagcagctagcagcatcaaagtcagacagactggtcgacaatagcagttttgaggcactgaacaattctctctctgaagtgaatgctgggattgaa

SEQ ID NO: 206137 - DNA, 496 bp, Glycine max
aagtgaagaacccccattttttgtctgataacacaaaacagttacaaattcaactagtaagggataagacgactaaaatggcactcaaacgcaaaggttgtataaatcacaaatcataataaaacacactggaacaagcaaagcttgtcaaaaggtgcaatagaattttatgccacaacttggaaaattgagagtttgggaccataactacccaagttgaccatcccacaaactaggatattttccatatgagtaactaaggcttcaggggtgctgctcccaccagaaagcctactattttatataatcattttagttggcacggcttttgaacacatcaagacccatctcagtaggatcagttgcttgcaactctacttgaattccatccagctccctcttgaatctgtctttggagcttgcataaatcatcttgctcctcacccttgatgtgtcaggggaccacgcaatgaaaaaaattctgcttttagggaca

SEQ ID NO: 206138 - DNA, 524 bp, Glycine max
gcaaccacattttgcttcttactccttcatgttattaaatttccaccaaagaacatgcagtatcctgtggtagatctcctatcaacaattgatcctacatagtcagcatcagtatatactttcatggataaattttctcctttttaaacaacaatctctttcctggagaagacttcaagtactgaatgatcccattcaaccaagaatgtcaagaagaccatggaagggagtgggtcagaatgctgcaataatacagaggtccattcttggacaagaaagcatgtcaagaagaccatattagggagtgggtcaaaatgctgcgataatacagaggttcattcttggacaagaaaggtgcagttagcaacctttgggggttgcaccaagggagaaacaaaagaggatcactttgtttgtgtgttacatcaagcatgagaaacagaacaatacaatgaagtggtgaatgagagcaagatagggagattatcagaattcttgaagctagagaagaagcttgttttctt

SEQ ID NO: 206139 - DNA, 394 bp, Glycine max
aaaacttatcagagtcaaccacggatgaagagttgatgataaattttggagaatatggtaccattactagtgctttaataatgagagatgctgatggtaaatcaaggtgttttggctttgtcaattttgaaaacccagacgatgctgccaaagctgttgagggacttaatgggaagaaatttgatgataaggaatggtatgttggaaaagcccagaaaaaatctgagcgtgaacaagaactgaaaggacgatttgagcagagcataaaggaagctgctgacaaatatccaggtttgaacttgtatctcaagaacttggatgatacaatcagtgatgaaaaacttaaggaaatgtttgccgactatggtacaataacttcttgcaaggttatgcg

SEQ ID NO: 206140 - DNA, 358 bp, Glycine max
actagcacatcattttcaatctcactacatcaaaaaacccaacggcacaatacaaacaacaggagatggatataagattacagagatagctgctactgcatatagtaagctaaataaaaggaaaatacaaagtcttgctaccaaaactactgcaaactatgatgctcaccacaggccaaatcctgcaactatgaaagcattatcttatatatatattgtacaaaccaagcatcacggaacatttgatctaggcaatcagtacctcgttctaccgtctccctccgttatcacatccttgaaggatccattactgggaatcatcggcaacacatgctcctgatgtggcacaatgacatca

SEQ ID NO: 206141 - DNA, 427 bp, Glycine max
ggcactatgatgccagtgccccgatcgcagatcagggcattcgttgacagcatcacctgtggcatggtaagtgatgatgtagaaaattaacacaagctccaaaagccctctcaccctttaggggaatttaccccctggtcttggccctcttcataccaaggctgttgtggaagggtgaaacagaaccagacatgggagaacccttctcgcgaagagtgccattcagcattgctaactcccgaagttgctgcttcttgtagaaaccttggattcatcctgaaagataaacctttaaacaatcagaccaacaaagtccccattaagttgagtaccacaaccaatctcaatcaacctaacaagaacataccaccggtttgagcaaatcttcaagtatgtcacgtgcttgcatcatacgagcatctactat

SEQ ID NO: 206142 - DNA, 446 bp, Glycine max
aaaagcaaccgtaaatttacatacatactgaatctcaagttaaatagttcaaatacaagcatgcatgaaattatacaatcacatgacagggtgacaagtcccgcacattctatagatgcggtaactatttgtgattcacactattaattgccaaaaagtggggtttaataacctgcgtttgaatcaggaacaaccaaaacatcttcttacagagaaataaccagttggttgcggatctgcgtcagactctgattttttttgaggaagctgcttaaaaaatgctttcacagcttctgtcactccatcctaattttccatggcctttgcaggttacattgcacgttcctttaccttgggatccatcataagttttattgcatcaaccaacttgggaagtgaaaactcatacactgggatatgttgaggaccagctactctagcatgta

SEQ ID NO: 206143 - DNA, 544 bp, Glycine max
gacgaggaaagggttctgaagatgcacactctcaacacctcgtattgttacagtggggtcaaatgggactctataaatctcgagcatccttcaacttttgagacgctggcgatggagccggagttgaagaatgcggtgattgaggacttggataggttcgtgaagaggaaggagttttataagagggttgggagggcgtggaaacgtggctacttgctctatggccctcctggtactggcaagtctagcttgatagctgctatggccaattacttgaagtttgacatctttgacctccaacttgggaacatagtaagggattctgacctcaggaaactgcttctggcgactgctaatagatccattttggtcattgaagacattgattgcagtgtggatctgccagagcgtcgccatggtgatcatggacgtaaacaaactgacgtacagttgaccttgtctggattactgaacttcatagacgggttatggtctagttgtggagacgagagaatcatcatattcaccaccaaccacaaggaga

SEQ ID NO: 206144 - DNA, 559 bp, Glycine max
  unsure (1)..(559): unsure at all n locations
aagaaaaaagaaagttctaattattaataaattatatctatatatatatatatacagatagatattctatatcttttatcttaattaatatttgacccctccttataatgtgttatagttttctttatttttaggaacttatccattccttttttaatgtgcccgacaatccgaaagaattctgggggaggggtcatttcgtttttgatctagaataaatagagcttcaagaaatgagagaattaagaatacccacgagaaacactaatccaatccataatgatgtaccggaaaatacaacatttttgttattcgaccaaccttcaggagaagcaaatacaacaggtacactaatcaataaaataaatgaaatagcaattaatgcaaaaacagctaattggaaagcaatagtcatgtttctaatcctccaatttaccaacanaagaactttaccatttgatcccccaacccttgatccctttattgacaaaaaatttataataaaaaacgcagaaggtttatcatgaattcattgatttttttactattatcaaccttt

SEQ ID NO: 206145 - DNA, 483 bp, Glycine max
gtccagcacaacgatgggaaaaagatcatagatcctgaaagccagaaaaccttgtgttcatgcttaaaagaagagatgcttcatccgttgcgggtgacgatagtgaaccggggtccagacacagaacttctggttgctaattctgtggagctgagtggaaaggggagaccccgtgtattctatgatgttacgttgactttaaaagcgttgggagtaggcattttctcggctgaagttgttagacattcaacacaagaacgtcaatgggaagtgtatacatttttgttggaggaaagccgtgactttccattgaccagaagccaagcaagaactcagattgttgacaaagttagaagaacactgatgggctggttatctggttcagtatcaaatgaaaaagcactttccgttcagtttttatgttaaatatcaatttggtttgccgtttgaatatggttaagttagcagggtatctaattaacg

SEQ ID NO: 206146 - DNA, 454 bp, Glycine max
ctttcgttcttttttttagggagaacccaatattaaagtagatataactatgtgtaactcatacagagaaataacaacgcaacacaatttaaagctatccaatacaaatctctcatacaagaggagaggggcatataagtggagccctcatcaccctcgatcttattcttaatattaataatgctactcatatactagtgagtagtttccggtttcctgcgtccatgactttctcttcaaaccttgatggtagcgcagacggtggaggtgctgatcttgtaggggatggagactccgcatttgccggggagcgaggcggcgttgttggctttgaagccggagatttggctggcggccgacttgaggcaggtgcacgccgtctggcggacggcggtggtcttggcggcggcattgaggctcttcactcacgtgcagcatgccgacggcggcgttc

SEQ ID NO: 206147 - DNA, 486 bp, Glycine max
caaaatgactcaagcccagattcaaccagttaaacttggaacccaaggctttgaggtttcaaaattgggattcggatgtatgggccttactggagcgtacaatgaccctctccaagaacaggatggcatatctgttatcaagtatgcgttcagtaagggaatcacattttttgatactgcggatgtttatggagccaatgctaatgaacttttggttggaaaggctttgaagcagctgcccagagaaaagattcagatagccacaaaatttggtattgcttcacgaggttttcctgatatgaagatcaagggttcgcctgaatatgtgcgatcatgctgtgaagctagcttgaagcgtcttgatgttgaatacattgatctctattatcagcacagagtggacacatctgtacctatagaggaaacagtgggtgaacttaagaaattggtcgaagagggtaaagtcaaatatattggattatctga

SEQ ID NO: 206148 - DNA, 311 bp, Glycine max
attgctatattaagcttacttgtacttacaccacttgctgaacctgtgatcttcattacaaaacaaggggtctttaagactggtccaacaattagaggactatagaaagctacatgatgcaatgtaactgagcttataatagcattataagacgtttcacgtgacaaaagcgcatatgacgcatgtccatagcactaacatgatggatcaaaccttacaagtctgaaactgaacaagtttgctgacatgaccaaccatgaatctatgagtacctatgctggctcaaaggttaatcaccatatgaggactca

SEQ ID NO: 206149 - DNA, 407 bp, Glycine max
aaaacaacatagttcaatattgccattcagtttaggtccctaacaggggcagtgaagcataaaagccatgcttccaaattaaaaccccatggggactgggacccatttgaaccttaaacccaacaaaaaacagaccccaggaacaagaatctgaagttgattttagtagtcttcatcctttttcgggcccttaccaaacttagcacccactttttaaaaatccttttgaagggctgcaagggccttacgggcttcaaaaaattcacctttttccataccctaacccacgtaccaggggacaaaagcacccttggcatacatgagatccaacttgggatcaatgcgggcaaacacttgaaccacactgggggagtttgaaatcatgcaaactgcccctcgagcccaat

SEQ ID NO: 206150 - DNA, 484 bp, Glycine max
gcacaacacacccaacaaggacctcccacagagcgcgtcttaatacaacgctcttctctgaagaaccccgcatttcttgtcgtctctcttcttctcttgcgcttcttcgatgcttcgatcttcgtcgcggaaaatgagagagtgcatttcaatgcacattggccagaccgggattcacgttggaaacgcctgctgggagctttactgcctagaacacggcattcaggcctgatgggctgatgccatgcgacaagaccgatggtggaggtgatgatgctagcaacaccttcgttcagagaaactggggcatgaaagcacgtgccccgtgcgattcttgcagatcttgagcccactgcgaatgatgaggttaggactgggacataccgacaactattccatcctgagcagctcattagtggaaaggaggatgcagcaaacaactttgcccgtggccactataccatcggaaaggagatcgctgagc

SEQ ID NO: 206151 - DNA, 415 bp, Glycine max
gccagtgaaggataatttttaggaataagtaggctatacttcaacaaggagtttatatagtaagaaaggtacatccttggtaaaagcataaagcaaagctaatctaatggcacacacaaccatgagttcatgaaatccagtcattagttacattcgttgttggtgtgacaatatcttagtaaagtactcaaaatataaattaatagatataataaagtatctaaatgatggttcccccatcagacaaaagaccagttcatgaatacgaaggcaaggcagtgattggaatcatcatcatcgagaactttccatgcaatggcctgctcataagacactggtcgattcatacttgatacacatattcctgctggcagatatgcaaatccctgttgcattatcttggagaactcaatgc

SEQ ID NO: 206152 - DNA, 160 bp, Glycine max
acttaagggtctcttttggtctatgatttttttactgcttttcctttttttgaaactcatacgggagatgtttcatcttatactcctactaatggaattccactacagatggtcccatatcctcatctgacgatctgttcaatgctgccatcaaacccgc

SEQ ID NO: 206153 - DNA, 505 bp, Glycine max
  unsure (1)..(505): unsure at all n locations
ggaaatctggcaaaactaaaaacgtagattatgatagtgaagaaacaacataatacaaccataactctactcatctaacaaaacaggaaatcacattctcagaatgactactacaattatatttgtgaggaagattatctaaacctatacagggatacttctagctgagaatcttcgttttgctgtcaaaactgccattcccattttcagtgaattgccaaaactgtgaagaaatttattgccggtattgtacgacggaacattgagcaagatactcaattaaccatcaccgtaaagcattcacgaatgccgtcaatgaatcaacatctctcttttccgaagggtacttaattggttgagaagagtgtttgnggaagagtagtattgtgggggaagcttcccaactgcagttcagtctttgcatattccttctggtctccatacgctctgaattttgcaaccttcactcctgacccagctaacttttctgccaaatcaacatatg

SEQ ID NO: 206154 - DNA, 486 bp, Glycine max
gcctcggcgccgtgcaaaccgtcgtggtttcatcggccagaatcgccgaacaaatcttgaaaacccacgacctcaacttcgcttccaggcctctcttcgtgggcccgagaaagctctcttacgacgggttggacatgggcttcgcaccgtacggcccgtactggagagaaatgaagaaactctgcatcgttcacctcttcagcgcgcaacgcgttcggtcctttcgaccaattcgagagaacgaggttgcaaaaatggttccgaaactgtcggaacacgaagcttccggtactgtcgtgaacttgaccgaaactttgatgtctttcacgaactctttgatatgcagaatcgcgttggggaaaagttacggttgtgagtacgaggaagtagttgttgatgaggtactgggaaaccggaggagcaggttgcaggttctgctcaacgaggctcaagcgttgctttcggagtttttcttttcggattatt

SEQ ID NO: 206155 - DNA, 479 bp, Glycine max
aattagaggaaaaagaggctgagatttcatcaatgcacaatgctttgtggcaaaagaagaaaactcctctttcagcatctaaatgagagatctttgacaagatagatggatcaaaatcctatgagagtccaaagaagatgatttggagccacatacttcagcccctatgagaaaactcttttatattattgatagtgttcctaggttgcatgatcaaataaactctctgtctcatgataaagaaaagctgcaatcaatccttgaaactagggatcttgacattaaggatctgaaggatgaagtcaaacaactcaatagaatctgtgaagactctaaaatgatcaagaatgaattgtctgagctcacctatgtattagaaaaaattatggatattttgggagctggtgaatgggttgtagataggaaatctaaaggttcgaaggaattaataccagcattggagaagcatatcattgcca

SEQ ID NO: 206156 - DNA, 494 bp, Glycine max
cgggagtagttagtcccgggtcgacgagctactaggtcggtggtcggcctgtcgtcttttttttttttttttttttttttttttttttttttttttttttttttttttttttttttttgggttgaaaaacagcctttttttttcaagacccgtttttttaaacccggaaacataatcattaccaaccaaaaacccaaattcatttgaacaacccaacacaaaacttactggggcgtccatggttttctagcccaggaaccatggcccccttaaaccaagtttttagcaaggtttgtagttgaacaacccatgggggcaaaaagacccttaattggaaataaagggccttacccaagctagcaaacttttgttacggggaatgggggacaaattattcttccccgggttctgaatctgcattttggagcccacccatgaaagggggggcctttttccaaaacccaaaggttttggtatcacccttaaggcccttt

SEQ ID NO: 206157 - DNA, 530 bp, Glycine max
acaaagtgaaagtgagaacacactttattatatgaaaaccgagagcatccaaatacaatagtgcagaagttcaggcaataattacgcatagacatgcataaagtctatgttattcagaagtacaacatagataaggaaaccacaaactctttttaattagatagagatactgttgggaattcctttgaaagtcaacccttcctcacttgaacgatggagcaaagtgtatggcagctgaactggcccagtccggtttctcagacttggatcactgttccttgcattgatttttgcttcaattccagtcagtttgcttccaaaccttttgaaagcttctaatgccttcttatcagtagtccaatttggagtctccctctctccaaggtatatctcatcagaagcatgccttgacaatatctctatcactgaaagatcaataagggtctcaaacttgggtgtgattgttctcagataagccttttgaggattcttcaccatctcatcatactctggggtccttcagctgggat

SEQ ID NO: 206158 - DNA, 486 bp, Glycine max
ggagacatctgtgactgcttagatcattgatgaacaaaaaaagatgctagcagctttcaaatctttgacatcattggccattttgctcaacccaatccccacacagttttgccaaagacaccaattatttgcaaaccatcagaaaatgccattgagttggccctcaagatagccaaccttaatccacaaagaactttgttctttgaggatagtgtccgcaacacacaagctggaaaacgtgtgggtcttcacactgtgctggttggaaaatctcagagaattaaaggagcagattatgcattagaaagcatccacaaccttagggaggcagtgccagaactatgggaagatgacataaaatcagaagttgcttatcctggcaagcttgctgtggagacatctgtgactgcttagatcattgatgaacaaaaaaataaaataaaaaaataagaaaaagagagagaaagagagaagtcctttgtgaat

SEQ ID NO: 206159 - DNA, 504 bp, Glycine max
aaaatgcccactttttttcttccaacgctcctcctccttctcatagccttcgccacctctgtctccggccgccgtgacctcgtcggagactttctccggctgccctccgaaactgataacgacgacaacttcaagggcacccggtgggccgtcctcctcgccggttccaatggttactggaattacagacatcaggctgatgtttgtcacgcctatcaaatattgaggaaaggtggtctgaaagaagaaaatattattgtttttatgtatgatgacattgcattcaatggggaaaacccaaggcctggagtcatcattaacaaaccagatggaggtgatgtttataaaggagttccaaaggattacaccggcgaagatgttactgttgataacttttttgctgctttacttggaaataagtcagcactgactggtggcagtgggaaggttgtggacagtggtcctgatgatcatatatttggatactatactgaccatggaggt

SEQ ID NO: 206160 - DNA, 437 bp, Glycine max
actggttcattttccattttttagttattcccatatttggacccataaacttggtatgaaatcacattgatagcctttactcggggcctaactcgtttaaaagccagatttgcctcaattggttggctcttgccttccgccttattcaaattagcttctggtatttcaaaagtttgctgggctttttggggaacaagggcactacccttttccggatcatttactaaaacagggatctcattattggttattttagcaaaaccgcccattagagccatcgttaaccattgggctttaaaaaaacgtattctcaaaaaacctatatttacgggtggggcaataggcccatgatttgggaaaactccaatttggcccctattaggagaaaaaatgatttccctcacttccgaatcccaaacaattcgatgggggggcaa

SEQ ID NO: 206161 - DNA, 547 bp, Glycine max
  unsure (1)..(547): unsure at all n locations
aattcatcacttgttatattttgtccttggatcttgcagctacacatgggggctaggaaatatgggccagcttgggcattcttcactccagtacggggataaagagttactgccaaggagggtggttacccttgatggtattttcataaaggacgtggcatgtggcggtgtacacacatgttctgtaactcagggaggagcactttatgcctggggtggtggtcggtctgggcagctagggcttggcccccaaactggattattctcgtgtgttgctaatgactctcagacatttttccgaaacattccagttttagtagttcctaaaggtgtgcaacttgttgcatgtgggtattctcacacccttatctctatgagtgatggtcgaattcatggatggggttacaataattatggtcaggcagcaaatgagaaatgtacatatgcttggtatccatcaccaattgactggtgtgttggngaggttctgaaactagctgctggtggtggtcattcagctgtgttgactgatgcttattcattaaag

SEQ ID NO: 206162 - DNA, 396 bp, Glycine max
accatacccgctgctgtagcattatacacattattattactcttgctcccgtcaagataaatctgaccccttcccctgttcccacctacgtatataggatattttaagaaatgaacatctctctgagtagtgggatccggggaaagaataggaaaggttatttctttatatttttgaccaggaacagggcctaccacaagaatatttttttttgtaggacgatagttttgaaaagacagattgcctatcttctctttaatctcaggcgaaatacgatcggggggtgccaattcaaaaccttccggtaaaataagaacagcccccacattcaaagctccctttttaccattagcaagaacttgtttcacttgcatatcataaggaattcgaacaact

SEQ ID NO: 206163 - DNA, 473 bp, Glycine max
gttcattctctttgcgcagttccctacctctcctttcaagatgcagatcttcgtcaagaccctcaccggaaagaccatcacccttgaggtggaaagctctgacaccatcgacaacgtcaaggccaagatccaggacaaggaaagaattcccccggatcagcaacgtctcatcttcgccggaaagcagctcgaggacggccgtaccctcgccgactacaacatccagaaggagtcaacccttcaccttgtccttcgtctccgtggtggcatgcagatcttcgtcaagactctcactggcaaaaccataaccctagaggtcgaaagctctgacaccattgacaacgtcaaggccaagatccaggacaaggagggaatccccccagaccagcaacgtctcatcttcgccggaaagcaacttgaggacgggcgcaccctcgccgactacaacatccagaaggaatcaacccttcacc

SEQ ID NO: 206164 - DNA, 458 bp, Glycine max
gaattaaaaattctgatcgcatattaaattcccaagtcgtattcaaatccttatcaataaaaccatgaagccaaattaaaatatttctagtacacacccaaaaattcttcaaaagaaacttccgggaatctagcacgaccaaaatcataaattaatgaaattctaacccatcgataattaaatttgatgggaattatgatgtagcagtagcacacgtctcaccattaaaatcaaaataccaggtcaaagtttcaagtaacttaggacagaacgtaaaaaaaaactagattaaatgagtagatagctcggtacattaagtcacttagcacttgacctcctttaaggcatatgcaaagtacaggaatgttggatcagcagcgccgtccttgtagtaggcaaagaccaagcaagcatcatcacccatgctctcaccaacaaaaaattggaaatctttaatc

SEQ ID NO: 206165 - DNA, 487 bp, Glycine max
ccttacttgatttcgctactttcgtaacaacagtgtgggttatatatatgattcgttttaagctcaaggctagctacatggaggagaaggataactttgcaatatactatgtggtggcaccatgtgctatgttagccttaactcatcatccatcaacttctcatcatttattaaacaggatttcctgggcattctgtgtatatctagaagctgtctcactcctgccccaactgcgggtcatgcagaacaccaagattgttgagccattcacagctcactacgtatttgcactgggtgttgcaagattcttgagctgtgctcattgggttcttcaggtgttagatatccgtgggcatttgttggtggccttggggtatggtttatggccatcaatggttcttatctcggaaattgtccagaccttcatcttagcagatttctgttactattatgtcaaaagtgtcttcggtggacagcttgttctacg

SEQ ID NO: 206166 - DNA, 506 bp, Glycine max
acgttctattatatatatatctatctatattctatatatagatatattgtttaggttatcaagtattaatctgaaataaataagaattgctgcttctaatacttataataattactacaaattctaataattactacaaaagggatatatgttagataaaatagattaattaatctatttcacaaaaaaataatgtatccatagcacagtttcgtcttataatacctcgggtgctaatgaaactattttagtgaaatttaactgtctcaattcccgggcgattgcacaaaagattcgagttccttttggatttccttcttgatcaatgacaactgcagcattatcatcatactgaattattataccgttgctacgtttgagttctttacaagtacgtacaattacagctctgatcacttctgatctttctaagttcgtatttggtactgcttggttgattacagcaacaacaatgtcaccaatataagcatatcgtcgattactag

SEQ ID NO: 206167 - DNA, 512 bp, Glycine max
gaaagaaatcaagcgccaggcgctcatggacctcgtggacttcatccaatccggctccggcaagataagcgagaactgccaagaagagatgatcagaatgatctccgtcaacatttttcggtgcctcccgccggcgtcgcacgaaaacacaggccaagaacccaccgatcccgaagaggaggaaccttccttggacccttcttggccccaccttcagctcgtctacgagcttctcctcagatacgtggtttcctccgacaccgatacgaaaatcgcgaaacggtacatcgaccactcctttgttctcaagttgctcgatttgtttgactctgaggacccacgggagagggagtatttgaaaaccatactgcatcgtatatacgggaaattcatggtgcataggccctttattaggaaagctattaacaacattttttaccgctttatatatgagactgagaggcactctggtattggggagcttctggagattctgggcagcattattaatg

SEQ ID NO: 206168 - DNA, 471 bp, Glycine max
atagaagggtgcaatgtaattcattatagacttatagtaaaggtccattcatattaaaatgtagcaccgaacatgacagacatgtcaccaaggatgcatgggttgactttcagtatttatatatattaacacttctatcaaatctgggagtaatcataaatagctgacacaatcgtgtctaaatgatatggcaaccattaatcacaatgcttaaacagatttcacacggagcaaatgaagaaacatctggcatactcaagatagctcatagacttagctgatgtaaccctatagaagaggtgggtgttgcgtagcctgctgccggaccctggtctggatctctgctgcatactgggtcaatagatgagagccttctgtcggggcaggatctgcaagatttggctgaacaagtaaggctcggatgcccacaagaatttgcttaactgtgatggctggtatgcagccactatc

SEQ ID NO: 206169 - DNA, 544 bp, Glycine max
attgaataagcctgtcattgttgcctctcagctacttgaatccatgattgagtaccctacacctacaagagctgaagttgcagatgtttctgaagcagtcagacaacgagctgatgctttaatgctttctggtgaatcagccatgggccagtaccctgacaaggccttaactgttttaaggagtgtcagtttgagaattgagagatggtggagggaagaaaaacgctatgaagctatgttgctcccatcagttgggtcttatttttcagaaaagatatctgaagaaatctgcaattcagctgctaagatggccaataatttagaggtggatgcgctttttgtgtacacaaagacagggcacatggcgtctctattgtctcgttgccgtcctgactgcccaatctttgcttttactaccacttcatctgtgcgtaggcgactgaatcttcagtggggcttgatacctttccgcctgagcttcacagatgatatggagagcaatctcaacagaaccttttcattgctcaaggccagaaatctgatc

SEQ ID NO: 206170 - DNA, 550 bp, Glycine max
  unsure (1)..(550): unsure at all n locations
gcgtaacagcaatggagctgtcttccagtgcatttgtggtaatattgttggcagtcgcagctacagcagtactctcaaatgggttggatctatctttcttgcccagcgatttcctctttggcattgcttcttcctcttaccagtatgaaggagcttacaagagtgacggcaaaggactgagcaactgggataactacactcacggaccaggtagaagtgtaataatggatggaagcaatggggatatcgcgattgatcattatcatcgctacctggaggatatagatttaatggaaactttgggagtaaacagctaccggctatccctgtcatgggcaagaattctaccaaagggtagattcggagagcccaaccatgctggtatcgagttctataacagactaattgatgttctactactcaaagggatccaaccctttgtaactcttagtcactatgacattccccaagagcttgaagacagatacgggagttggctaatccccagttacaggaagattttgttnttatgccgacctatgtttaaaac

SEQ ID NO: 206171 - DNA, 446 bp, Glycine max
ccacttaacactgagcaatgattaaaagattcgaagaattgcaaatcagttacaagaattcagaaattcaatatcaatcaatatatgggtgatattcattcagtcacgccaaaacttattattggctgcaaataaatataaactttgaaaatctctcctcagatagactgtctgaacaatttccttctttttcacatgatacgttagaaaaggagctctcctctattcataaactttgcattcctcatcagcagggtttgtctcgcagaaatcctccaatgggtctccactccccgctttaggtgcccctggccacttgcttgctactagatgtgccaaatcgaccactctttggctgtaaccccattcattgtcataccaagcaaccactttaaccatatcatctcccatgaccatagtcaaggaggagtcaatagtagaggaaa

SEQ ID NO: 206172 - DNA, 499 bp, Glycine max
  unsure (1)..(499): unsure at all n locations
ctgaagctagaacttttattgaaacccttttaggagtacatatactttatatagctacccctttacattttacaagattgatgaaccaacaaatacatttacaaaatatgctagcagttgccaacaatccaccacagccccaacttctaaaatatgtcagaaatatgggattcaaacacttgaagctttttgcagactagcagcatattgtcgagcccattggtcatagtgaataatttcttcgagtgacggagatgctactaattccttttgatgttcctgacaagttagttccacaaccttgaatatatccagataactaatcttttcttcaacaaacatttctacagctttctcatttgctgcactaagaactcctgtcatggtgcctncagcacgtcccgcagcatagcaaagattcaccgatggaaacttcttgtcatccggtgcataanatggtagagaaccatacttgctaagatcaagacgagggccagta

SEQ ID NO: 206173 - DNA, 491 bp, Glycine max
agaaaagcgcagcttgttccatccacgtcactctctccatctgaaagcagcgccgccgttgagttagtttatatccgagacgccaccacagtgaatattcaacttgaatactctttagggtttttccatggccaccgtgatccgcaaccctatcctcttcccttccacctctcaccaccccaaccaaaaccacacattcctcactctccgcttctctcaaaccttacgctcttctctccgctccaaatcccgattcgccgtttcctgctcccaatcggaacctcctcctcctcatccttcttcttctcggcggcgtcctccgtacatccccaacctcattccggacccttcctatgtccgcattttcgacacgactctccgcgacggcgagcagtccccgggcgcctccatgacctcgaaggagaagctggacgtggcgcggcagctcgccaagctgggcgttgacatcatcgaggccggcttccccgccg

SEQ ID NO: 206174 - DNA, 303 bp, Glycine max
gcctttcgtctttttttttttttttttttttttttttttttttttttttttttttatttttttttggtttgcttattttttcttttttttttttttccttttcattcttatttacaggggggggggaggggaaaaaaagagaaaactgttccccccaagcacacgacaaaagagggcttgaaacacacggggaacctaacaggggccagcgggtggcgcactatattcggaagcccccgtactgagaacgggaaaaaaacgctggggccgcagaacgataacccttcaacgttcccagaaaat

SEQ ID NO: 206175 - DNA, 492 bp, Glycine max
ccttacttgatttcgctactttcgtaacaacagtgtgggttatatatatgattcgttttaagctcaaggctagctacatggaggagaaggataactttgcaatatactatgtggtggcaccatgtgctatgttagccttacttattcatccatcaacttctcatcatttattaaacaggatttcctgggcattctgtgtatatctagaagctgtctcagtcctgccccaactgcgggtcatgcagaacaccaagattgttgagccattcacagctcactacgtatttgcactgggtgttgcaagattcttgagctgtgctcattgggttcttcaggtgttagatagccgtgggcatttgttggtggccttggggtatggattatggccatcaatggttcttatctcggaaattgtccagaccttcatcttagcagatttctgttactattatgtcaaaagtgtcttcgggggacagcttgttctacgtcttc

SEQ ID NO: 206176 - DNA, 489 bp, Glycine max
cgggatgtcggaatcggtcacgagctactagccggtggccggcctgtcgttttttttttttcatcaactagaagaattatttcattaatcgagtgcttattcattgccaattcctacaatttgatacatggccattggaaataaactagtgcgacctatacgtattaaatcatctatgaagctatctatcagtccccctaaaaataatcctagttcaaatatcatgacaagagagaatatcaaggcggcgaacaatataagaaaaccacacaaatgtccacgaaaacgatttgctttctcaaggaaattccagcctccatcattggtgtcccaaaactccgtgatagaagagtatcaaatatccttcaaccaatcttgaacttaacagaccaaatagcatggaaggcacaacccagaaagatgaatactcagaaaatttaccagacatctctaagataacgtccatccatctggagtgttttaactata

SEQ ID NO: 206177 - DNA, 541 bp, Glycine max
aaaataacacacacttcacacatcattacgacaattaaaagaggtgtggaaattttcaaatagacagagcatactcaacaagagggtcatgtctaatttcctttattgaattaaacaaacgaacaaacgaaagaaaacacaaattccagatcatgcagaggattccgcattttcagaagatctggcagtagcctgtggaacagaaaaagctggcataagagtattaccagcaatttcaaaatcttgagaaattcccaagagaatatcaaaaactgtagactgtttgggattgtcaataaggaaactcaagtgccatgaagtttgatttgcccactcagaactccacatttcaaaaccattattaggaccacatacctctattgggaagatcaattcccaggaatgtggttccgattttggccacttacatgcatcgaaatgctctgtactggtgctgtttgttaaaaacacttgtaccaatgaggcccaatcactccttttgactgctgcattcccagacatcacaattttaaccattaaa

SEQ ID NO: 206178 - DNA, 476 bp, Glycine max
tcccaccttcctctccttctttctttctgcttaaggtctacacaagttctctgcttcttctccccctattgacctttggtcatcacaagcgaaaacccacttctggatcttctggtgtaaaggccattagaagctttagaaattttctaattgagttggtgtatagtgttgaagggggtgaaatctggagcccagtttgttagttgttactcacttcatctgtaagctcataggttgaaccctctttttttggagacttacctgggaaaagatgatgatgtttgaagatatggggttttgtggcgatttggatatgttatgtgtttctcttggagagggggatattgctgtgagacaaactgaaccggatcctgtagttgaggatgactacagtgatgaagaaattgatgtggatgaacttgagaagaggatgtggagggacaaaatgcgtcacaagcgattgaaagaacaaacca

SEQ ID NO: 206179 - DNA, 457 bp, Glycine max
accggcaccaagtcttgctccgaccaacacgccgatctcgaggctcaagactatgccggcgtgacccccatgcgccgcctcaccatgcggcggttccgtcagcgttacatgtactattcatattgctatgatactttaaggtaccctgtgccacaacccgagtgtgtcattgtaccctccgagaaacaaaggtttaaggagaccggaaggttgaaatttggcggcagtcaccaccggcaatctcgacggaggggccgtacaacaactccggtggatcataccgatcagggtgatatgtgatgattgatattgagatgtatataatagtgtcaattttttagatctttatttgtggttttttttttttacattatatatttatttgccgacaggcataaataaaccaatcgatttatatatggtctttatttttgtttaataaatgtgttttggtgtt

SEQ ID NO: 206180 - DNA, 312 bp, Glycine max
tttttttttttttttttttttttttttttttttttttttttttatttttttttgttttttttttttttatttattttttttgtttaaatttttttttttttttttttttttttggaaaaaggaaaaagggccccattgataaaaaaaaaaaaatggtttaaaaagggggtaatattttttataaaaaaacctaaaaaatgagggaaaaaaaccccggaaaagcattatttttttcgggaaaccaatttgggggaaaaatcttagcggagaattttttccccaaaattttttcgaggtaaaaacccttttttt

SEQ ID NO: 206181 - DNA, 364 bp, Glycine max
tttttttttttttttttttttttttttttttttttttttttttttttttgtttttttttttttttttttttttttttttttttttttttttttttttttggaaaaaaaaaaagggaaaaaaataaaaaaaaaaaaataaaaaaaggggggggacaaattacaaaaagggcccacccccaatttacaaaaccgccacccaaaaaacccacccggttaaaaaacaaccttctatataaaaaccccataaccccataggggagggaacccaatttttaaaaaaaacaaaccctaaaaaaaaaaaaaaaaccctccttaaaattccaaacccaaaaacccggggatcaaaaccggggaataatccgcg

SEQ ID NO: 206182 - DNA, 542 bp, Glycine max
  unsure (1)..(542): unsure at all n locations
caatgacgtccatggccactttcttcgcccaaacctccttcccctcccactctctctccaaaaccttcgatacccatttcgcccctgccccgaaagtcaacgtctttgtgaacttcagggcgaggaggcacgttggggtgcgagtttcgaacgcgctgatcgaaccagatggagggaagctcgtggagcttgtggtgacggattttgagagggatttgaagaagggtgaggctctttcgttgccgaggatcaagctctcaaggattgaccttgagtgggtccatgtcctcagcgaaggatgggccacacccctgaaaggcttcatgagagaagccgagttcctccaaacgcttcatttcaactcgctccgactcgatgatgggtcggtcgtgaacatgtcagtgcccatcgtgctggctattgatgatgcgcagaagcatcggatcggngataacaaaaaggttgctctttttgatccaagggagaccccgttgcaattctcaataatattgagatttataagcatcctaaagaagaaagaa

SEQ ID NO: 206183 - DNA, 525 bp, Glycine max
atggaagtcctttagactacactactacagtaccaccaacgatcaatgcaatattcatcaaaatgggtacaagagatgttcatgatgatcttcatactgatgatgatgatcaagaagactcagagttagaggatcaagaatcagcaaaggcagagaaatggaaaaaccattactcatcaaatcacaggattctccttgttggagacggtgacttttcattctctctttgtttggccagagcctttggttctgctcacaacctcgttgccacttctcttgattcctatgatagcattggaaagaagtacagtaatggattgagcaacgtgatggaacttcaagaaagaggttgccttgtttttcatggtgttgatgccaaggaaatgagtcagcatttttttctcaagacccagaggtttgatcgcattgtctataacttccctcatgttggctttatatacccagaaaatagccactgccagatccagttgaacaaaaggttgctgaagggtttttagcaaatgc

SEQ ID NO: 206184 - DNA, 539 bp, Glycine max
ctgaagcagaagggttcctcactctcttcatctgattgaacaaaatgtacacctcgaggaagaaaattcacaaggataaggatgccgagcccactgaatttgaggagacagttggacagtacttgttcgacttggagaacaccaatcaggatctgaaaagtgacttgaaagatctctacataaaccaagctattcaaatggatgtggctggtaatcgcaaggctgtagtcatctatgtgcctttcagattgaggaaggcattccgcaagattcatcttcgacttgtcagagagttggagaagaagtttagtgggaaggatgttgtcttgattgccacaaggaggatcgtgcgaccgccaaagaaaggctctgctgttcagcgaccccgaacccgcactttgaccgctgtccatgatgccatgctggaggatgttgtgtatcctgcagagattgttggcaaacgggccagatatagaattgatggctcaaaaataatgaaggttttcttggaccctaaggagcgcaacaacactgagtac

SEQ ID NO: 206185 - DNA, 534 bp, Glycine max
catcacaaattagtcactactcatgtttcacttgagactgagactagtttatttaaatgaaacatcgttaaaaaaacaatatatatacatggttcctgatttgaatggtatattataccttgtatgaacataaaacagtgataaagaattcagccacccaatctgaaaactgtacaattgagcagtaccacaccgcttgcatagatgcaaacctttatctattttagtgtggtcaaacctctgcacgtatccaaagaaatgaaagccagttatgtccagacgcaaacaatcccattcttatcagctgaagctaggggttttgcaattccgctccacctacaacacagaacagaggaagtgtgttccttcagagtactgactatatcacctttagatattgaccaaatatagacagatccatcagcagacccagcagcaacatgattgtcatctgggctgatacaggagcgactccaattagaagccactctgtttcccatggctttaatgtgccacaaacttccaagatcgaca

SEQ ID NO: 206186 - DNA, 499 bp, Glycine max
  unsure (1)..(499): unsure at all n locations
atgcaaaatatcaatcgtatgttcaaaatcaaaacatgtacaacaacacaggatatactttgtttttttgcaggtttggcacctagcagggtaattatttgagggagcggggtcaggcttaattctccgggtctttaacttttaataacttttgttggagaagaattaagacatctaaatggcttcaaattccgataaggattccccaacaccaccttcacctgattcatcttcatcccaatccccgccatcatctcctccaccatcccaagatagttcatcgcccccaccatcatctcaggataattcgtcgccgccaccatcgtcccccccgccatcatccccaccaccatcatcttcgcctcctccgtccccgccaccgccgtcatcaaatgatcagaaatccccgcctccgccatctgactcatcctcctcccccccatctccaccaccgncgccacctcctgataaggattcaggcagccaccggtcgccaccg

SEQ ID NO: 206187 - DNA, 495 bp, Glycine max
caaaaccctcttttttctctctcttgcaaaacctaattttcatttcttccctcaaatttcaaaatgcgtgagatccttcacatccagggtggccaatgcggcaaccagatcggcgccaagttctgggaggtggtttgcgcggagcacgggatcgaccctaccggaaggtacggtggggactcggagttgcagctcgagaggatcaatgtctactacaacgaggccagttgcggtcggttcgtgccgcgcgcggttctcatggacctcgaaccgggcaccatggacagcgtccggtccgggccgtacgggcagatcttcaggcccgacaactttgtgtttgggcagtccggggcagggaacaactgggccaaggggcattacactgagggtgcggaattgattgattccgttctcgatgttgtgcgcaaggaggctgagaactgcgattgcttgcaaggttttcaagtgtgccattccctggggggaggaactgga

SEQ ID NO: 206188 - DNA, 409 bp, Glycine max
cttcgtcctttttttgatattttgcacgcaaagcttcagcatacaattggaattcgattacattctgacttacatgttccttgcatggctttcatcaaggaaccctgcgaagcatttgtaacaggattgatttcacacagacttatttacacacaccaaatgctggatatcgacgtctacacctgtacacaaaataaaccgctcttcacgtagacaaaacctaacagaacctatcattatggaagaagagccctgttccaatccctaaggcatttcttaagtggatcagtgatcttccctcggcacaatgcaatgaacactacgtcacactcttgacccagtgagatgacccgtgcaccagttagcaatgctttgtccaactgctcttgtacatacttgtacccggggt

SEQ ID NO: 206189 - DNA, 487 bp, Glycine max
ttttttttttttttttttttttttttttttttttttttttttttttttttttttttttttttttttttttttttttttttttgggaaaaagccaaaagcaatcccttttcaaaaaacccttttcccttatggggaaaaaaggaaaccgtttatgaggcttggagcattaataaagccgcttataaaatatcccgatttttgggaaattagggggtccaaacaaacaaggtaatcaaacaatttggaaagaaaatttttttttctgggcttggaaaaaaataacccccctaatcccggggcaagggaaccttatttaaaagacatgggggggccttgacaggggcccaaaatttttggggaaactgggatgggaacccgaaaaacttggtgcaaaaagggggcttcaagaccttgggggagcccccccataaaaaggtccccaaggttgggggcttaagggtgctgaaaaacctcgtattttgggggg

SEQ ID NO: 206190 - DNA, 515 bp, Glycine max
cacaaaacttgctatcgcagtaagctataactcatttgaggctctgcgagaattgagaaatggctaaagatgttgaggttcaagagcaaggaggagagtactctgccaaagactaccatgaccctcctgcagcacctttgttcgacccagaggagctcacacagtggtccttctatagagccctcatcgctgagttcatagcaacccttctcttgctttatgtcactgtgctcaccattattggctacaaaaggcagactgatacaacggtaggtggcaccgactgtgatggggtaggcattttgggcatcgattgggcctttggtggcatgatcttcatccttgattactgcaccgccggtatttcaggaggacacataaaccctgcggagacattcgggttggacctaagacgcaaggaggtcgtgaatacggcgttgttgtacatggtggcacagtgtgcccgagctatctggaggactggattggccaaagggtttcaaaaagcatactac

SEQ ID NO: 206191 - DNA, 447 bp, Glycine max
aaaataaaaagatgcatatatgactcgggggttatttttgattttgcaaattacacaatcacagccgtacatcacacgtgagctgggccttttccaacttaaaagcagaggataacattggcccatgacgcaacacatgcaccacctaataatcataattttacatctttacatacaaaatacaaagactttaaattaaaattaaaaaaaaaaagataaacagatcatcttgatgaaatgaaaccgaaacccagaaacattggtttgattttttttggtggtcccaacttgattaagcatgaacggtttgattgaatcacttggacttgaagggaatggccctgattacgacctggtggtaaagtgctgcaagtgcagcaccaatgaaaggtcccacccagaagatccagtgatcattccaaccaaggtccttgttgaaaatgatag

SEQ ID NO: 206192 - DNA, 551 bp, Glycine max
  unsure (1)..(551): unsure at all n locations
caatgacgtccatggccactttcttcgcccaaacctccttcccctcccactctctctccaaaaccttcgatacccatttcgcccctgccccgaaagtcaacgtctttgtgaacttcagggcgaggaggcacgttggggtgcgagtttcgaacgcgctgatcgaaccagatggagggaagctcgtggagcttgtggtgacggattttgagagggatttgaagaagggtgaggctctttcgttgccgaggatcaagctctcaaggattgaccttgagtgggtccatgtcctcagcgaaggatgggccacacccctgaaaggcttcatgagagaagccgagttcctccaaacgcttcatttcaactcgctccgactcgatgatgggtcggtcgtgaacatgtcagtgcccatcgtgctggctattgatgatgcgcagaagcatcggatcggggataacaaacaggttgctctttntgattccaagggagaccccgttgcaattctcaataatattgagatgtatagcatcctaaagaagaaagatagcccgaac

SEQ ID NO: 206193 - DNA, 399 bp, Glycine max
tccaattgctcctcttcctatttcaatgctgcctttggcaagagaactgaaagattctggtctatgcagctgccagtgcttattgctgagatagtctttgctgatttcttagttagcattgtgtctataactgctgttttgtatgttcgctacaagctaagaaattgtcagtgctcagggccataggtgaagaaactaaaagggagctctataaaccaaaaggatcataaatgcaagatccgaccggacttggatgacttcaagattatgagggcacagatgttcccctacgaggagcttgatagggcaactagtggattcaaagactgagttcatattgtggaagggaagtttttcatgtggagtcaaaggaggtctcaaagatggtactgttgttgc

SEQ ID NO: 206194 - DNA, 464 bp, Glycine max
cacaaactaaattatgacacttcttatatatttgtcatttagggcataaataagcgttttacagatgtgcatatatacttgacacacttattcaaagtaaatagatataggagcatatatatatatatatatatttctgttagtttcaattagttgaaactaagttggtatttaggtgatttatcaggattgaagagaccaaaatgacgctcagtatcagcaccttgcttctggttttcgtcaaacatggcgaacaagtaagtctctatagactcaccaggcctctttggagttccattcccactcgaggcatgacgaatcaaattagcatagtaagtgcctgcattatcaattgaggctccagctccaccttcagatggccacccactctcagaaaccactatctgcaaattggacgctcccactttctccaaagcagcatatattgaatccaacatagcatc

SEQ ID NO: 206195 - DNA, 570 bp, Glycine max
  unsure (1)..(570): unsure at all n locations
aacacagaggagctatcccttccgttattgtgattggtgctggaatatctggacttgctgcagcacgaagtctccacgatgcatcttttaaggtgactgtactggagtcacgagataggcttggtggtcgcattcatactgacttctcatttggttgtccagttgacatgggagcctcatggctacatggagtttgtaatgagaatccattggctccattgattcgtggcctggggctttcattatatcgtaccagtggtgataactctgtcttatatgaccatgatttggaaagttatatgctttttaacattgatggtaagcaagttccacaacagatggtcattgaagttggagacatctttaagaaaattctggaagagacagggaaagtgagggatgagcataccgaggacatnttcagttcccaagctatttcaattgtgctagataggcacccagaactaaggcaacaaggaccttgcccatgaagtgctacaatggtttatatgcagaatggaagcttggttggctgctgatgcagatatgatttcattgaaaacctggatc

SEQ ID NO: 206196 - DNA, 489 bp, Glycine max
aatgatcatcaaaaattatttaatggaaaatcttgatactttaaaatatccaaattcacaaaaacataatatgtcaccacttaatattttctcaaacaagggaaccaaaggatgaaaatgtataacaaccaaaatcgattaggtaggcaaagtaaaaggtggcataagatctaatagcactagagaaagacataatgaacagtctaatcctcgtcttcctcgtctccgtctccacctgcggccttcttagcagcagccctttggtttcttctcttcactcttccagggcgtccgccaccaaggggacttgtaagtgagaagtcaatgtgcttctgtgagtcaaccctcaccaagaaagatgggatgttcaccacttgcctcccaaccctgatatgtctctgcttgatgagaaccctggcgtggtgaatggacttggccatcccggatttgaagacgagcgtctgaggcggcgctcgaggaaattctcga

SEQ ID NO: 206197 - DNA, 524 bp, Glycine max
ggaagtataccatttgctgcatctatccggtctaaatctcaaaactctcccctactatctattgggcttgtcattgtgggtgcaatccttctgattggttattgttacagcaattcaggtggagctagcggtggtattaaggatgtaagtaaacttgaaggtggtgcatcatgctcatcagaagtcctacaagcattgcccgttttgaagaaatcatatggagacagtttgcacaaggttttgcatgttggccctgactcttgttctgtgttatctagtttgttagaagaagaggatactgaggcttggggaatagaaccatatgagttagatgatgttggtgcaaagtgtaaaagtcttgtacgcaagggcattgttatccaggtcaacagagaactagaggtgaagaagtggccaaatttggtcgtccagccaaattgcgcagctcatcttggtggataaggtttttcgttcagtctagtttagatgaaaatgaaactgctggaaggaaagttgaacaggct

SEQ ID NO: 206198 - DNA, 496 bp, Glycine max
gccaccaccaccccttacctcaccaacctcggcttcggctactccatcgccatcgccctcggcgttctcttcctcctctccaccctcatcctctcctcctacctttgctgccgcaccctccgccgccgcaacaacaacaacaaccgccgtcacacccccgatggcgtcgtgctcccgcgcgtgatcttcgtacccgaggacgaggatgacgacgacgacgacacccgccagaacgacgtcgccaccggcctcgaccaggccgtcataaactcctaccccaagtttccattcgttaaggaaggtaattacgacagcacatgctcgatctgtttgtgcgagtacaaggattcggagatgctgaggatgatgccagagtgtcgacactactttcatctctgttgtctcgacccatggctcaagcttaacgggtcctgccccgtttgccggaactcccccatgccgacgccgctgtccacgccgctgcacgaggtcgtgc

SEQ ID NO: 206199 - DNA, 490 bp, Glycine max
ggttcagtccactgaggatccttctgaggttttcaagcgcaacgctattaacaagcttgtggagatggttcatggcgacgttgccgctttgaggaagaccagagaagatgaaatggaggggctgtttagtttgcagggcgtgctgaaacagcgcgaggagagtctcaataggggtgtgaaggagatgcagcaggagatggaggctttggagcagcagttacagatggtgttgatgaatactgatgttttggaggggtggttgagggataatcaggggaagaagatggccggtttggagaatcccgaggatgcttttgagtgtgcggatgtgctctccaagcagatgcttgactgtactgctgctgatttggcgattgaggacacgctttacgcgttggataaggcacttcaggttggaggtgtgccatttgatcagtacttgatgagcgtgagggccctgtccagggagcagttcttttaccgggccact

SEQ ID NO: 206200 - DNA, 496 bp, Glycine max
caaaaccctcttttttctctctcttgcaaaacctaattttcatttcttccctcaaatttcaaaatgcgtgagatccttcacatccagggtggccaatgcggcaaccagatcggcgccaagttctgggaggtggtttgcgcggagcacgggatcgaccctaccggaaggtacggtggggactcggagttgcagctcgagaggatcaatgtctactacaacgaggccagttgcggtcggttcgtgccgcgcgcggttctcatggacctcgaaccgggcaccatggacagcgtccggtccgggccgtacgggcagatcttcaggcccgacaactttgtgtttgggcagtccggggcagggaacaactgggccaaggggcattacactgagggtgcggaattgattgattccgttctcgatgttgtgcgcaaggaggctgagaactgcgattgcttgcaaggttttcaagtgtgccattccctggggggaggaactggat

SEQ ID NO: 206201 - DNA, 492 bp, Glycine max
aagtaaattaaccattatttatttggacaataatttattttatttcaagtccatatcgggtctacacatagacacaacataactcatgttgctagagtagttttctcacaaccatcgtgcacacaggccaaaacatctctgtagtctcttgaaatggtaaaggagtcgtagacctctccatcactacttttcttgtactcaaacaagagatatgaatgattgaaagcagtcaatttgccaaacccatagtcaacgtccctataaagactccaaatagggggtgatggtgtgaagtctgacaggtgacttccccctccaccaacaaccacatgaattgttccattcacagtgccagagtagtgatgcttttcttcattcacacattgattctgataaatggggcatactctttcatagttatggacatgaccataaaatccaatgtctactttgtacttttgccaaagcttctgcaaactttcccttcccatg

SEQ ID NO: 206202 - DNA, 479 bp, Glycine max
aaaacccaaagtgcttctctcctctgtctttttctctctcttgctatccttttggctagtggcactgctgcaagtgcaactccaagaagcgcagtgccaagccaccatgtttcaacattcaacagaagcctttttccttccacttttctctttggaattggttcttctgcttaccaggcagaaggagcagcaagtgtagatgggagaggaccaagcatatgggacacctacactagacagcatactgaaaagatttgggatcatagcaccggtgacatgggagctgatttttatcatcgatacaagggtgacataaaaatagcgaaagaaattgggctggactctttcagattctctatctcatggtcaagaatattcccaaagggcaagggagcagttaacccccttggggttaaattctacaacaatgtcatcgatgagatcctagcaaatggtttaaaaccttttgtcactctttt

SEQ ID NO: 206203 - DNA, 539 bp, Glycine max
  unsure (1)..(539): unsure at all n locations
accgaaaactggttcttgcttatcattcaagttttgcttccactttctgtaaatactaaataccagaaactgtggatacaaaattacaacacaacacaagacataactctggattatcccaaccactcatacgagttatatcctcgagttttattcattcattcattccatataatgatataaattacagggaaatacatacaaagacgcacatgagaaattaaacagaagcagcaagaagagaatgaattaaattcaaggcacaatcttataagccttggtcttgactatccaacttatgaacgaattcttggagttcctgaatcccaaaaacccatgttccttggccttgatcatgctatccaacattccctcccctgagaaaataagatccacaaaccaccaatcagcaacctcgtcaagcttggtaggcagaagctgattctcactcacaatctcatcccaaacaggacccttatccttcatcaattccgacanactcaaaccttcttcctcaaacccatactnctcaatcccaa

SEQ ID NO: 206204 - DNA, 495 bp, Glycine max
gtttttcttatacagccactctttcattctcattgccgtcacacagagagagaagagacaatgaagtttaacccaagggtttcctcaagccgtcgaaagagccgcaaggctcacttcaccgctccgtcgagcgtgcgtcgcgtcctgatgagcgcgcctctctcgaccgatctccggtcgaagtacaacgtgcggtccattccggttcgcaaggacgacgaggtgcaggtggtgaggggaacctacaagggccgcgagggcaaagtggtccaggtctatcgccgcaagtgggtcatccacatcgagcgcatcacccgcgagaaggttaacggctccaccgtcaacgttggcattcacccttccaaggttgtcgtcaccaagcttcgaatggacaaggaccgcaaatccttgctcgatcggaaagccaagggtcgcgccgacggcgacaaggaaaagggtaccaagttcgctcctgaagatgtcatgcagaccgtc

SEQ ID NO: 206205 - DNA, 487 bp, Glycine max
actgaaagcactcagtagggtttgcggtttcagagtttgtgacgcacgcatccatggccaccaccaccaacgccgccgcagccccgccgcgccagctctcccagaaggaagccgacatccagatgatgttagccggcgacgtccacctcggcaccaaaaactgcgacttccaaatggaacgttacatcttcaagcgccgcaacgacgggatttacattattaaccttgggaagacatgggagaagcttcagttagcagctagggttattgttgcaattgagaaccctcaggatatcattgttcaatccgcaaggccttatggtcaaagagcggttctgaagtttgctcagtacactggtgctcatgctattgctggaaggcacactcccggtaccttcaccaatcagcttcagacttcgttcagtgagcctcgtcttcttatcctcactgatccaagaacagatcaccagcctattaaggaagctgg

SEQ ID NO: 206206 - DNA, 393 bp, Glycine max
aagcacaaaagacgtggataacttgatattattttattacatacatgcatagatagcctgctctcaaataagtcggcaggaacaaagatagagagattcaacgatcttcaaatttcacatttgccagaaatatataacagaatagaggggtatgggatatgagttaagttttgatcacattcaactacactatcccaaaccgttactgttaagactttgaacttgacttgtactctaggatcatgtcgttctcaggagctaatccaacacaagccctcaggatgttttccagcatagctcgctgctttgacaacgcattcaccactggtgtacccggtggaaccagaggggccttggtcaggtaactaaggatggtcgcaactggatggaatg

SEQ ID NO: 206207 - DNA, 485 bp, Glycine max
gcttttgcagaattcaagtagatcaaagaagaaatggtttgggaagcaaaaattgcagacttcagaatcaacctcacaaacggataatgcaccacctcttcctccacctgagattattttaactcatgttgagagtgaaaatcagccatgagcgtattgaagttgcaactgcagtggatgctgtggaacctgttcctgctgttcagatggcagctgctgaagttcaagccaccacaactgttcagtttaacagtaaaccaacagaagaagtggctgcaatcaggattcaaaaagcttttcggggatacttggcaagaagagaattgcgcgcgttaagggggctggtcaggttgagatcgctgatggaagggccagtggtgaaacgtcaagccattagtactctccgttctatgcagacttttgctcatttgcaaactcagattcgttctaggaggctcaggatgttagaggagaatcaagaacta

SEQ ID NO: 206208 - DNA, 437 bp, Glycine max
accaacataatttaccttgttattatcgggataaacagaaatgagactaaattgcagggacttgtctgaagatagcaaatgatttttgctaaaagcagttagaaatagacaatgaattgcaggtttaacagattaggcaggatgatacaacagatgcaccacccttgagcctggatttaccgtacagggcttattcaaaccggattatctcatgcttggacccataagcaacttggggtctgaaatcaatgttactgatgactttggctagcgcagactgatgaccatcactggtggaacctccagttttgtcagtccagaaccccaagggggctaccttaaacaacagtcatagattggctttggctgatggtgacgacacgttggtgaagatttccttttcttctacaataatttgagtgacgtctggcgccatt

SEQ ID NO: 206209 - DNA, 516 bp, Glycine max
ctcaattgagaatgcgaaacgcatagaatcggacgaggggaaatgatattgagaagctaaggttacggattttgagagatggcgtgcactaagaagatcaccctgaagagttcggacggtgaggccttcgacgtggaggacgctgcggcgctggagtcgtagacgcacaatcacatgagcgatgacgactgcgccgacagcggattccgtgtgcccaatgttaccagctagattctggcgactgatatcgaggactgcacgaagcacgttgaggcgaacagtgctgatgagaagcccactgaggatgtgctcaaggcttgatacgtggatctcgtccacgtggatcaggccactctcttagatctcattctggctgcaaactacttgaacatcaagagccgtttggaccttacttgccagacagtagcatacttgatcacgggcaagactgctgaggaaatcgcatgacattcaacattaagaatgacttcaccccttgagaagaggaggaagttc

SEQ ID NO: 206210 - DNA, 430 bp, Glycine max
gtagttgagaactaagaagaaggaaatggctgcctcaatgatctcctgcccagctgttaccaccgtgaaccgtgccggtgccggcatggctgctccattcaccgggctcaaatccatggctggctttcccacgaggaagaccaacactgacattacctacattgctagcaacggtggaagagtacaaggcatgcaagcgtggccaccaatgggctagaatgaagatcggactctttactacttgccagagctcgatgatgccccattggcctaggaaggcgcataccttctaaggaaaggatggattccttgcttggaattccaggtggagcacggattcgtgtaccgtgagcacatcaagacatctggatactatgatggacgctactggaccatgtggaagctgcctatgtttggctgcactgatgct

SEQ ID NO: 206211 - DNA, 289 bp, Glycine max
gggtgggaaacacagggaacaagggagagagcaattaggaaatgtccaaaatatcaatccaaaagtaaaacctgaaggcacatcgtaccttgagggtacaaatggcgtttaagtcacaactccctcattgggtttaccccctgtactaatgttcacaatggtggctgccttgcacagtccaaatgtcacatatcccatggctgagatcttccggaggcaaggactgaatccaccagcggtgatttgggaactgaagttgcctgcttcctggagccggtcgatccgagcc

SEQ ID NO: 206212 - DNA, 424 bp, Glycine max
gcacacagaccgagagagagaatgctctcaggggatatacctcccaatcagaccatttacatcaagaatctcaatgagaaggtcaagaaagatgcattgaacagatctctgcattgcttattctctcaatatggaagaattttggatgttattgctctaaagacacccaagcttcggggacaggcatgggtttgtctcagtgaagtcactgctgccagcaatgcagcgcgacaaatgcacaacttccctttctatgacaaacctatgagacttcattatgcaaaaacaaagtcagactgtattgcaaaagaagagggtagctctgttccaagggaaaagaagacgaaaccagaggagacagctgacagaaagcggcgtgttgcggaagcacagcaatctggtgaggctaatggaacacatagcg

SEQ ID NO: 206213 - DNA, 511 bp, Glycine max
ctctccttccgttcttcttcttcacgtttttccttttcttcttcttcaagaagtttcatctgcttttctaatgtaatgatttctttgcatgctacatgaactcgttcttccagtagtttcagtgcaagacaaacaaatatgctgtgcgcattttggcgtgctgttccttctctgaaagccttttcaacctgttctttaaatataacggtagcagcatctagaagaaattctcgagcaagttcaggactctttgcatgcttttgaggacgggagcattctccatcaagctcatttccctcttcatccatcaaatcatcatcctcttcttcttctgcctcttcagcatgctcaaagaatcttctgatactttccccttttgtaattgtaacataaccatcccctacaattagcctgcaatgtacacatcgttgaccttttaatgcatgagctttaacagaaagttcagtacagcgtccgtctagcttccaagcctcgagggtgatgaagcatg

SEQ ID NO: 206214 - DNA, 423 bp, Glycine max
cgctggcgtcagaatacatgagctatgctctcgtacgtacgcttacaattctcgtaatgcggctcaaggagctcctggagattgtaggccgcagtaaatgtcctgtgattagacagagacatgacacttacaggtagcaatgtaaaacgagaatcggacgtatgcagattgccttgacgggcttgtggtaaagctctacatgaaaccctgccatagagagactaagaatgcctgcgtgggaccctacattgcatctgcctccaagtggactcgtgagggaatggctacactagcagctctaaacgtgctggggaagatcaaagggtacccagattggtccgatgccaatagggctgaacccttcctcaatgagaatgctcaaccaccaactggatccacaagcattgttaatgcaaaagccct

SEQ ID NO: 206215 - DNA, 507 bp, Glycine max
agatgactacccttatgctgttgatggactagagatatggagtgctatccagacatgggttaaggactacgtctccttgtactatgccacggatgatgcagttaagaaagactcagaactccaagcttggtggaaggaagctgttgagaagggtcacggtgacttgaaagacaagccatggtggcctaagttgaacactcttcaagatctgattcacatttgctgcattattatatggactgcttcagcactccatgcagctgtgaatttcggacaatacccttatggcggtttcatcctaaatcgtccaactctaaccagaagattgctcccagagccaggaaccaaagaatatggtgaacttaccagtaatcatcaaaaggcttatttgagaacaattacaggaaagactgaggcccttgtggacctaacagtgatagagatattgtcaaggcatgcttctgatgaggtctaccttggacagagggacaatccaaattggactga

SEQ ID NO: 206216 - DNA, 423 bp, Glycine max
ccagttataaatatgatcgcaaagaaattaggaaagactccagcacaggtagctcttcgatggggactgcaaatgggccatagtgtgcttcccaagagttctaatccagcaaggataaaggaaaactttgatatttttgactggtccattcctgaggacatgcttgataaattttttgagattcaacaggaaagattactcaaggctagcttcttccatgaaccaaatgggggttacttaccagaagacgaattgtgggatgggggtatatgaaaagtcggttgaatgattagttaaaaaagtggatggaataaaagaaacgcatcttctgtttggggtgttaggctatatgaaaatactcttatctttagctatgtgcatcctttgtcactatcagtcttttaagttgcaacccttcaactg

SEQ ID NO: 206217 - DNA, 482 bp, Glycine max
cgtgagattaagagtttacatgagacgttggctcggttagttagggagaaggatcaaattggttcttttcttaggagtgctttgtctaagagggtggcagttgatccgtcttctagaaagagtgagctgtttcaagctgcagaaaaatggtttgagagaggctggaatagattcaaattagtaagcttcttggagatgggaaagttgcagcttcaaatgacaagtctgatacaacggaaaaagaagaggatgaaatatactccctggctggtgctttggaggatgttgttaaggcatctcagcttgagatcatcgagctgaagcatactgtgggtgaattaagggcagagttgagcttacttaagcagcatgtataagctcatgccaaggagcttgaccatagaatgcatcgggtagaggaacttgaagagcaagagagagtggcaaatgaaaatattgagggactaatgatggacattgct

SEQ ID NO: 206218 - DNA, 386 bp, Glycine max
caattccaactagttcaaattcgatagagattatttaaaatcaaagtcccacacggaatttccttttatttctgtacatgaaaggactggcaagttaaattacaaatggcaaacaatggcaccaaaaattccactcgcccttaccaggctccccaactctgataattacactgcaagacttgagaagtatgacacacgacctcaatgagatattccatgtattgctctgaaaactcatttgcggaagatagatctgaatgtcttcccaacaatttgacaaccacgctaaattcagtgacaacccgccaggtaacttgaggcaccagctggtttcttcaagtataacaattgaagcagtgtaatgctgattaaacccctgctgcagt

SEQ ID NO: 206219 - DNA, 472 bp, Glycine max
ggttccacgggtctcactgctcggtggccgccctttttttttttttttttttatgatgaactcaatgcattttatgatagatgagcaaacgagtatttgtttaaacacaaacaaacaaaagggttagtgtctaatcatcctccccctcatctgtaacgaatttgccagttccaggattcaaagcagcaatgaagaagaaaagaacattgaacaacactaggggctcgatttcgttgattggtaccccagtctcaatgttgagttgggctagtgctacctttgcggttataatttctccaatcaatgagaaaacgaaacccaattgagccaatcttcccacaaatagctcgtttgctttcgtgaatccaaataaaggacctgaaccaagaccaagagcttccctgaagcctttgcctggaggaataacacctccagtagtaggttcgtcatcaacaaatcttccacggtcacc

SEQ ID NO: 206220 - DNA, 532 bp, Glycine max
gccgagattcaaccatgtttgttatatattgagacataatcaatcaagtacaccactcacagcagaaggtttataagctgtaaaggtacatgtaaccataaacaaaaatagtctccaagactataaaaacattacattttagacaaattagtcttcttccacttcatcctccgtcaacacctactataactgctggtgttgctgctgcctaacatgtatcatattcactacatacatcttagtaggagtagcctttgacgaacaactccttcttggcttcctcggattcaccctcaccggtgtacttcccaagctgggcgagcgagttggacttggcacggaaaaggagtgcatcttgtgccgacttcacgttctctgggcggcctacccatgtcttcaaggcagtgttatggagggctctggcatacgagaacgacacgtgccacgggtttggagattggatcatggcattcaagttgagggtagcttcaacctcagactgtccaccagacaaaaacataattccagggac

SEQ ID NO: 206221 - DNA, 456 bp, Glycine max
tgccaatatcaagagactacttgaggaaggggacttggtgatttgccctgaaggcacaacttgtagagagcctttcctcttgaggttcactgcactttttgctgaactcactgataggactgtcccagttgctattaacacacagcaaagcgtgttttacggaacaacgggtcgcggacacaagttgttggacccctactttgtgttcatgaatcctatgacaacatatgagatcactttcttgaaccagcttgccagggagctcacatgcagtggagggaaatcagcgatcgaagttgcaaactacattcatagggttcttgcagggactttgggatttgagtgcaccaatttgactaggaagagcacatatgcaatgctagcaggaacagatggaacagttccatctaaggagaaggctttgaaagagagagggcataattgagcccccttttg

SEQ ID NO: 206222 - DNA, 401 bp, Glycine max
aatgtaagtgaatatttgaatgcctgcaattctgagctatacaagctcagctatttctaggaaaagaaaatccgaggggacactgaatgtaaccaagcatcaatgcaaatttgacctgaagcaactagtaccaaccaaacttctgatatacaatatgcatttcatatgacaaccaataactgggcatggcaacctctttagtccaaacaagatcattataatatagatgatctaaaaggaaagtgaaagtatttaccagctcctgatcaatcaataggtttagaccttcaatgctaacttctgagctgcaagagcttcagcctccagagttggctcccacaatagtgtaggctctgcaagtcatgatgtcacaacatatggatccatgattgaagccggtc

SEQ ID NO: 206223 - DNA, 510 bp, Glycine max
  unsure (1)..(510): unsure at all n locations
gggagactataggatacggctttttatccgaactgaactcttggggaagggaattccacccactcatcaatggcatctactctcttcgcttgcccgtcgttgtgttcctcctcttcttctatattttctacttccgtcaaattctccttaaacccgaataaaatttctcttccgttcgccggaaacaaaaaacctctttcggctccaattcgaaggcggttcaatgtcattgctatggctccccctaaacccggtgggaaggccaagaaagtggttggaattataaagctggctcttgaagctgggaaggctacacctgctcctcccgttggccctgctcttggttccaagggtgtcaatattatggctttctgtaaggattacaacgctagaaccgncgacaagcccggttatgtcattcctgtggaaattacagtctacgacgataaaagctttactttcatattgaagaccccacctgcttcggttctacttcttaaagccgctggg

SEQ ID NO: 206224 - DNA, 470 bp, Glycine max
aaaaatataagatacaagtaatataaaaatagactcagcacaattcaatatgtctaaagaaaaagaatggctgaggctttagaaacaagtttattatcccttattttctacaagttgagatactgaatagaagaaaaaatgatcaaggagccaaccggtcaaccttccacagccgttgtccattgatctcatggggagtatattgcaacctgtcatgcaagcgagatttctgcccttgccaaaactggaaaagatgtggtgtaagcctatatccaccccagttcttacgtttagggattaaacttgcatcagagtattattcttccagctctttgaactcctgataaagaacatgcgtacccggcactacagtactctgcttgctgactattgctccaatctgactacctctagggcgggtatggaaatactgctctgattcctcatcgtagactttctgaacaggccct

SEQ ID NO: 206225 - DNA, 482 bp, Glycine max
attgtttgttgttgtaactcgttcttcttcttttgttgttctgtgtttgtgtttgttttttctctcacctgaaaatgtcttgctgcggtggtaactgtggttgcggaagctcctgcaagtgcggcaacggctgcggaggctgcaagatgtacccagacttgagctacactgagtcaaccaccaccgagaccttggtcatgggagtggcacctgttaaggctcaatttgagggtgctgaaatgggtgtgcccgctgagaacgatggctgcaaatgtggaccaaactgctcctgcaacccctgcacttgcaagtgaggtgttgggagagcaagcttcaagcagagatagcccttaattaggaataatgataaactattaatgtgtagctaaaaacttatgtattatgtctgtgatggttttcgtgcactctggtgttttgtgttaaacaaacatccttagaataaagtggtcatgtcttgcctt

SEQ ID NO: 206226 - DNA, 365 bp, Glycine max
gatagtcgtattttatcaaaaaaatatcaagacaacatcgaaacagagaaatgttaaacagtttctgtcacatccataaacacagttgataaaactagtctgacttagagtctccataactccggggtttaacaagatcatacaaaaatatataacttttgcataaatgaaaacagcaaactaccagcaattgaggctagttctttggcccaatatccttcagtgcacaaatctgctcctaacccattgcagacataactgacacaacaaggtccttaccctcagcagacccatcctttatctgagtaagcagactctcatctgtaggtaacttcaggtcatccttgggtgttcccattttcagt

SEQ ID NO: 206227 - DNA, 489 bp, Glycine max
gggtaccactaccacctttccgccttcagccgtttcaaccaccagcaaatggctgggcttcgtggcggccgtgtggattcaatgcatctccggcaacaactacactttctcaaactactccgacgccctcaaatccctcatgcacctcactcagctccaactcaacaacctctccgtcgctaaagacgttggcaaagcctttgggcttctcgcgggcctggcctccgaccgcttccccacttgggccattctcctcataggctccgtcgaaggcctaattggctacggaacccaatggctcgttgttagccaaagaattcaacccctcccctactggcagatgtgtgtgtttctgtgcatgggagggaacagcacgacgtggatgaacactgccgttttggtaacatccattcggaacttccgttcaaacagaagacccgtttcggggattctgaaaggctttgtagggttgagcactgcgatattcac

SEQ ID NO: 206228 - DNA, 408 bp, Glycine max
cggcactagtcggaataatcgacgagctcactagctcagctagtccggccggccgccctttttttatttatttacgatatacctatcgctacaaatcattcccaaggaaaaccgatagcctcgactcacatactagctcaactaacacctaaatttgtcacaatcgattggctttagcgttcacagcaaaccggattacactcctggtgttccaagacagcactgtgcttattgaggatcagagtcactacccgattacgcctcacttactaagacagcgaactcattactgggtaatctaataacaacggacatctgggccaagcctaaccataagtttttaagaacacgcatgctgaaaagaacgacatctactgctgtagccataggcacatgacttgacaatgc

SEQ ID NO: 206229 - DNA, 342 bp, Glycine max
attgcgccctacctatttctagctgtgtagctctttgaagacaattacacgagatatatcatttcatatcacctgcatgtgctgataaagattacgacgtttggtcatgtggcacgggtgactctcgtggccgcagtccccgatggtgcactcttaccaagactttgacatagcatggtgagcagagcgagccacattatatgagagtgagtagcttactaccctctccctagacagaggcttaaggctctggatttcgtggcagtaaggaatactggatcggaaaaattgacatgcagctcaagctagtgcctggtgactgtgatggaacagaaactgcct

SEQ ID NO: 206230 - DNA, 547 bp, Glycine max
  unsure (1)..(547): unsure at all n locations
aaacccatgatcattgaatctccacgtcataattgttaataatggatttaattcatacaaaaccttaaagttaataataataaaatgcaaccgataagcattagaaactaatagcagggcaaaaagattcattaaagactgcagggtggagaaaggggtggcagaagaaagattgagggggaaccaaagtatcatagacaaaatcatgcagcaggctgctcctcagtggcaggagcttctttctggggttcttctgtgaggccattagaggtggcatcctttggctgtgaatcaggtgcaccttctgctgcagatccagttgcttttgatgctgctttctcttttccatccttattatctttggcgtctttagcaggagccggtggtggaggaatcatgtgaggtggtggtgtatgcttcagctttaacagtattngccggaacctagacagatccgtgggttagccaagctttgggcctcggatgaccgtaattgatggcttcttgtactgatccattttgactcttttcttttcaatggtgggaa

SEQ ID NO: 206231 - DNA, 366 bp, Glycine max
aaattagttcattctctttgcgcagttccctacctctcctttcaagatgcagatcttcgatcaagaccctcaccggaaagaccatcacccttgaggcggaaagctctgacaccatcgacaacgtcaaggccaagattcaggacaaggaaggaattctcacggatcagccacgtcttatcttggccggaaagcaactcgaggacggccgtaccatcgtcgactacaacatgcagaaggagtcaacccttcagcttgtgcttggtctacgtggtggcatgcagatcttggtctagactctgactggcaaaaccataaccctagaagtacaaagctctgacaccattgacaacgtcaaggcctagatcc

SEQ ID NO: 206232 - DNA, 423 bp, Glycine max
ctcaattgagaaagcgaaacgcatagaatcgaaagaggggaaaagaaaaagaaaagttagggttagggattttgagagatggcatcgactaagaagatcaccctgaagagttcggacggtgaggccttcgaggtggaggaggcggtggcgctggagtcgcagacgatcaagcacatgatcgaggacgactgcgccgacagtggaatccctctccccaatgtcaccagcaagattctggcgaaggttatcgagtactgcaagaagcacgttgaggcgaacagtgctgatgagaagcccagtgaggatgtgctcaaggcttgcgacgtggatttcgtcaacgttgatcaggccactctcttcgatctcattctggctgaaactacttgaccatcacgagcctttgggaccttacttgccagacag

SEQ ID NO: 206233 - DNA, 426 bp, Glycine max
tccaatatgtgcagtaccaatttataatttattcgccggatctccctgctcactggtcggcgttcgtccttttttttttttttttacattctttttaaagaccattcatcttatcacattttcaacagaacattagacgaccaatgtttaatcgaatctccagatgtgataacaaacaaattgcacaattataaaagaaaccatactcgggtgaatcacgataactgtctatataggtcccagagcttgctggacatcagccttcaaattctccaaagcttcaactgcggagccgcatcgaaccattgttgtgataaattttgcactgggccctttctgactgcggatgacccccttacgaccacatgcctgggagatccacaatgctctaacaggcaccctacgaggccgtcatttatcggattt

SEQ ID NO: 206234 - DNA, 340 bp, Glycine max
caggccgactcggagtgcttgaggtggctggacgagcagccacgtggaagtgttttgtttgtttccttcggaagcggtgggacactctcgagtgcacagatcaacgagctggctctcgggttggaaaaaagtgagcaacggtttctgtgggtggtgaagagcccaaacgaagaaatagccaacgcgacgtacttcagcgccgagagccaagcggatcccttgcagttcttaccggaagggttcgtggagagaacaaaaggaagagggtttttggttcagtcttgggctccgcagcctcaggtattgggccatccatccacggttgggttcttgacccact

SEQ ID NO: 206235 - DNA, 402 bp, Glycine max
aattgggtaccggtcgaggacgacggtatcgatcggcgggcgccctttttttttttttttttttttttttttttttttttgttttttttttctttttttttttttttttttttttgaaaaagaaatcccgttttgattgacacaaaaatttttatcacggtctcacgaggggaatttctgaaactggaccccgcacaatctaaccatttcccccacgtgaccctcccaaaccccaacatttgttggaaccttatgacccttacaaaaggttcaagggcggtaaaactggggggaaggccgcatttttgaaaacctgaaaagccgggtacaagggggtaaaaaacgggccccggctttaggggagcccccatttgaagcgccctatccatggcgcaatgggga

SEQ ID NO: 206236 - DNA, 473 bp, Glycine max
caaaaaccctaggtagagagctcttcctccctttctcacagcaatggccgccgcagcacgccctctcgtcaccgtgcaggccctcgacggtgacatggcaaccgatgcctccgccaccgttcccatccctgacgtcatgaaggcctctatccgccccgacatcgtcaatttcgtacactcgaacatctccaagaacagccgccagccatacgccgtcagtcgtcgcgctggtcaccagacctccgccgaatcctggggtaccggccgagccgtctcccgtatcccccgtgttcccggcggcggaacccaccgcgccggccaaggagcctttggaaacatgtgccgcggcggacgcatgttcgccccgaccaagatctggcgccgctggcataggaagatcaacgtgaaccagaagcgctacgccgtcgtcttcgccattgctgcctccgccattccttccctcgtcctcgccc

SEQ ID NO: 206237 - DNA, 499 bp, Glycine max
aaacaaaacacacaaaccaattttaaataaccaaaaagaaaccacaagtttaaaaataaaaccgcaacaacatgattggtagttgagtacaacgcggcatgttataattggttgcaagatgttaccgaaggtttaatgcgacacgtggaccccattcactggttggaaatccagtttattctccaccctcacgcacgtaatcatatccctggagtcaagttcaagcatcgataggaccaaaaaagtaaaacagagaaaggggagggacatatttgacatttcacaaccgcgttcttttctacggagcctcgaccaagaagaatcgcagtgagaagaagagggggtcagagtgagaaagagatagagagaattcgtaaaccctaatttcggaaagatcggcgatgactgcctccaaggatcgcgagaacttcgtctacatcgccaaactcgccgagcaggccgagcgttacgaagagatggtggaatcaatgaagaacgt

SEQ ID NO: 206238 - DNA, 501 bp, Glycine max
agagtgggaagggaaggaggagagggagagggagagagaaagaaaggtgaattggattgcatctctctctgtgtgttggaagaggggaatcgtagatctgatttctttctttctttttaataattttgtgatcagaattattgagctgaacaaaagacaatgggattgtgggaagcttttctcaattggcttcgcagcctttttttcaagcaggaaatggagttatctctaataggacttcagaatgctgggaagacttcccttgtaaatgtagttgctaccggtggatatagtgaggacatgattccaactgtgggattcaatatgaggaaagtgacaaaagggaatgttacaataaagttatgggatcttggaaggcaacctaagttccgcagcatgtgggaacgttactgtcgtgccgtttctgctatcggttatgctgctgatgctgtcgatccagataaccttagcatatcaagaagtgagcttcatgatttgctg

SEQ ID NO: 206239 - DNA, 495 bp, Glycine max
  unsure (1)..(495): unsure at all n locations
tttgaaattaacaagtagcaaagatgtttggaatcatcggaggaaacaagggtcacaagataaaggggaacttggtgattatgcgaaagaatgtgttggatatcaacagcattaccagtgttaagggtgtcatcggaaccggcattaacatcattggaggagtcgtcgacaccgttactgctttggcgtcccacatctgcatccagctcattagtgccaccaaggctgatggacatgggaaaggaaaagctggaaaggctacaaatttaagaggacaagtgtcgttaccaaccttgggagctggcgaagatgcatacgatgttcattttgaatgggacagtgacttcggaattcccggtgcattttacattaagaacttcatgcaggttgagttctatctcaagtgtctaactctcgaagacatttcaaaccactgaaccattcacttcgtatgcaactnctgtgtttacaactcanaatcctaccatgctgatc

SEQ ID NO: 206240 - DNA, 437 bp, Glycine max
ccgccgtgcgtagcgtaccagtttggaactgagtcgacgagctcactagctcactggtcggccttcgtcctttttttaattttttttgggattgaacatgttaaaacctttatagctacataccgatgctatacacttaccctgcttatgttgactgctatgaccgtaaaacagtgaccaacactgacataacatgctgcgctctccacaaaacttgacgctcccttgaaccatgtcttgactccagcttgagcctggcaaatgaacagtcatggatctgtttacaggggctctaattatgtggcgctagccaccttcgtgcacatcagcggaccttgtcaccacagtcagttgatacttaggttccgcatcggtcactggggatgccgtcccttaaatgtgcaccgtgggcaccgacttcggttcaaagctacact

SEQ ID NO: 206241 - DNA, 483 bp, Glycine max
aagacttggagcagaagaacttgggtttattaattgaatgtcaaaaacacatggaggcatcaaaattttctgatgaagttatctctgagttggagagtgaaaaccttatgcaacagatggagctagagttcttgttagacgaaatcagaaagttcacaatggggattcatcaagttcttgcagctcttcagattgattcaggtggggggcatggcaaagggatcaagccagaggaaatgcctatatcgcatattctcaataatatcgagggcttgaaaggctctcttgtgaaaacccaagaggagaagctgctgctacttgtagagaatgctatcctcctaactgtacttttgcaacaagaatccgagggagaagaactggtgttagagaaaaggatcctagagcaagagtttgaaaatacacgagagcaacatgcaatgttgcagaaggtttagcttgaacttgtggagatgaacaagcaac

SEQ ID NO: 206242 - DNA, 457 bp, Glycine max
gtaaaaagcaagtaacattaagttggattcggatacacaagataattcacattatctgaagtacttcaccaaacacaaatctaaaaactctcaaaagtcatttcgttctttgacgctcactttccggggacgaagttggtggcataggcccaggcgttgttgttgacagggtcagcaaggtgatcggcgaggttctgcaatggaccctttccggtgacaatggcctgaacaaagaagccatacatagagaacatggccaatcgtgcgttcttgagttccttcaccttaagctcagcaaaaggccttgggtcatcagcaaggcccaatgggtcgaagctgccacctgcgtagatcgtgtcagtgacctcaccgagggggccaccagcaatacggtaaccttcaacggcacccattaggataacttgtgtggaccagatggcgaggatgctctgggcgt

SEQ ID NO: 206243 - DNA, 399 bp, Glycine max
gcagaatgagtctcatggtattgttaatcaacttcctgagcaagggatccctgtcatgattacatggaactatggtggtaacaatgtggctgtggagggatcttgggataactggacatctaggtgagatttaacgactgcttttttggtaacagtagtactgaattgtatttgacatgaaaagttatcataactgcaaatgatctacaatgagattagtaccagtgaattctattacttgcaggaaggcattacagcgatctggcaaggatcactcaatccttatagtgcttgcaccagggatatatcattacaggttcattgttgatggtgaagagagatttactccagagctatccaatgtagctgatgagatgggacatgtgtgcaatcttcttg

SEQ ID NO: 206244 - DNA, 300 bp, Glycine max
aagtagaaaaggtacaagtaataatcatcattaaaaatagtgtccaagactatataaaccacaaacacaatttagacaaattaatgttggatccttgggttactgtagcatgtgtggcaagatgatcttagtaggagtaacctttgacgaacattccccgagtggcttcctcagattcaccctaggcagtgtactttccaagctgagcgaatgagttggacttggcacggaaaaggagtgcattttgagcagcctttaagttctcaaggagtccaccccatgttttcaagcaagtgtttt

SEQ ID NO: 206245 - DNA, 506 bp, Glycine max
gtctaaatatggagtcctctaggaggtacaaagtggttgcacagagaaaggccttgtacagatgatgcttgctgtgttaagcgtctgagattatgtggcgccatacttgttgggaagactaatatgcatgaacttggggttggaattagtggtatcaatccacattatgggaggttcttctagtggatctgctactgtggtgtctgcaggattgtgccctgttgcccttggtgttgacgggggagcatgcttgttcaggttctgtgagggtgcctgcatctctttgtggtgtagttggtctaaaaccaacttttggccgtgtacctcattccggagtccttcctctaaactggacagttgggatggttggaatactagccggcactgttgaggatgcattgatcacttatgcagccattagtggagaaatttcatcccatcagccctctaatatgcttaccaagataaatctttcactgctgcccttgacgaaatccatatgtgac

SEQ ID NO: 206246 - DNA, 479 bp, Glycine max
cagccacacttcttcgccgtttcagctgaagagccatccgcaggtaagcaatggttaagcataataatgttatccccaatgggcacttccggaaacactggcaaaactatgtgaagacttggtttaatcaaccagcccgaaagaccagaagacggttggctcggcagaagaaggctgtcaagattttccccaggcctactgctggatctctcaggcctattgttcatggccagactctgaaatacaacatgaaagtcagagccgggagaggattttcactggaagaattgaaggctgcaggaattcccaagaaacttgctccaactattgggatttctgttgatcaccgcagaaagaatcgttctttggagagtctgcaggccaatgtgcagaggctcaaaacctacaaggctaagttggttgtgttcccaagaagggcacacaaagtcaaggctggtgattctagccttgaagagctg

SEQ ID NO: 206247 - DNA, 358 bp, Glycine max
  unsure (1)..(358): unsure at all n locations
accatacccgctgctgtagcattatacacattattattactcttgctcccgtcaagataaatctgaccccttcccctgttcccacctacgtatataggatattttaagaaatgaacatctctcttagtagtgggatccggggaaagaataggaaaggttatttctttatatttttgaccaggaacagggcctaccacaagaatatttttttttgtacgacgatagttttgaaaagacagattgcctatcttctcgttaatctcaggcgaaatacgatcggtgggtgccaattcaaaacctttcggtaaaatangaacagtccccacattcaaagctcccttttaccattagcaagaac

SEQ ID NO: 206248 - DNA, 381 bp, Glycine max
cgaaaaagtaacaaaatcgtaagaaacagacgcataagtgatccactgaaaccctaaacgcatcagtctcagccgtcgatgccgtccagcaagtgaggtcgcaccgtcgtcgcaagacgcactaccctggctgccggacaatttgggctcaaagtctccagccaattgatatgcacaaccctagcaggcagtgagtgaatgagtcaagatgggaagatgagggaggaagagatggctaagcatcgatgagtggtgcgagactgcgagagcaggcacctctactgctacgcatcttcttggccgacacagtgggagtcttaaccggcgacctctgatacatatacatgcaagctcaggtcctatttctcagacgtcactacc

SEQ ID NO: 206249 - DNA, 427 bp, Glycine max
tgtcgtccttttttttttttttttttttttttttttttttttttttttttttttttttgtttttggttttttttctttttttttttttttttttttggaaaatttccacctttccaaaaaacccacaaaagccaaaaaaaacccgggccccaaaatagaaccgggcccaaccccaccgggccgaaaaaccccccggggggcccacccccccgggggggcccccaataacccccccaacaaaagccccccccaaaccgaaaccccccagagggggacccccccaaaagccggttacccggcatccccccccccaaaagtttcgggcagaaccaaaacccgggcaccaaggaagcccccggacccccggccccctccaagcccccccccaacacccgggtcaaacccccctccagggaaacaaaaaccc

SEQ ID NO: 206250 - DNA, 503 bp, Glycine max
ggaagttttatttttcgggtgtgtagagattaaagagaggaaggggagggggctgacacattgttaccttgtaataggggtttactgaaggtcttggctggtgtgaacacaaacttcactgtgacgtcaaaagcagcagatgatggagaattctcagaactctacatcttcaagtggacatcactcttgatccctccaatgaccctactaatcatgaatattgttggggtggttgttggggtctcagatgccatcaacaatggttatgattcatggggacctctctttggtagattgctctttgcattgtgggtgatcctgcatctctaccccttcttgaaggggctgcttggaaaacaagatagaatgccaaccattatattggtttggtcaattcttctggcctacatcttgactctcatgtgggtcagaattaacccgtttgtgtcaagagactgccccgtagtagaaatttgttgattgaattgcgacgagtcttgaat

SEQ ID NO: 206251 - DNA, 420 bp, Glycine max
ggttgatttacattggaaatcaaagatgccaagttccgacatgccttccaaaactgtaaaactctctctctccgacaacaagtccttaccctctttgcaactacccttccgcaccacagatatctctcacgccgcaccttctgtctgcgccacttacgactactatctccgtcttcctcaactcagaaagctttggaactcctcagattttcctaattggaacaacgaaccaatcttaaaacctatcttgcaagctctcgaaatcaccttccggtttctgtacattgttctctccgatccaagaccttactccaaccacagagaatggactcgcaggatagagtctcttatcacacatcaaattgaaatcattgccctacttcgtgaagatgaggaaccaaattccgacccacgtggcac

SEQ ID NO: 206252 - DNA, 513 bp, Glycine max
acaagaattaagaaataccatatcaatcaatatatgggcgatattcatgaatttcagtcacgccaaaatttattattggctgcagataatgttaaactttgaaaatctctcctcagacaccgtctgaacgaacaatttccttctttttcacatgatacgttaacacaaggcaaagagtaaaaatggtttgctgctggtaatggtaatcatcaaatcagaaaaaggcgctctcctctattcatatactttgcattcctcatcagcagggtttgtctcgcagaattcctccaatgggtctccactccctgctttagctgcccctggccacttgcttgctactaggtgtgccaaatgcaccaccctttggctgtaaccccattcattgtcataccaagcaaccatcttaaccatgtcatctcccatgaccatagtcaaggaggagtcggtagtagaggaaacatcagagctgcggtagtcgatagacacatgtggaacatcacacacgttcaacac

SEQ ID NO: 206253 - DNA, 402 bp, Glycine max
aaagaaccctcaattttccgggaaaacccttcccacaatggtttcccgggaaaacaccaattggctcttcgattacggcttgatcgacgatattcccgttccggacgccaccttcggcgtcaattcctccgccttcacatggccccctaacgccttgaacgcttcctccaatgtcggcgttgaaattgatggctcgctgggggattctgacagcctcaaagagtctggctcatagaaaagggttaggcctgagtcatgtgctggttttggcatcaaggcatgtctggagacagtgagacgggatcggcttaatgacaaggctgttgaactcggcgccattttggagcctggaaagcctgccagaacagacaaggctgctatactgattgatgctgttcgaat

SEQ ID NO: 206254 - DNA, 435 bp, Glycine max
gttgaaacacaaagaagaaaaaatgggttcctctttgtggacttgtctgattttgttatcacttgcttctgcttacttcgccgccaacccaagaacaccaattgatgtgccatttggcagaaactatgtgcctacttgggcctttgatcacatcaaatacctcaatggtggttctgagattcagcttcatcttgataagtacactggtactggcttccaatccaaaggatcctacctgtttggtcacttcagcatgtacataaaattggttcctggcgattcagctggcacagtcactgctttctatttatcatccacaaactcagaacatgatgaacatagactttgagttccttgcgaaacagtacccgggcaagcttacatttttgcaaactaaatgtgttcactgggtggcagtgatgacagagaacaaag

SEQ ID NO: 206255 - DNA, 303 bp, Glycine max
atagagaaatctacacgaatatcttttattaaagcatatactcactaaagaatcacattgtaaatttaagaattataacagataaaaatcgctgtaaggctactaatttaatgtgataatttgaacgtcgaccaaagttcaaacttgcaagaaatttagaaaatcttgctaatgatcggacgtgctttacattgggcatccaatggaatggccttgggcactatagttccccccccttcgggcatatctactgtttcctcaccaatccttttccactcaaaacattgaatcaacgaaccttaa

SEQ ID NO: 206256 - DNA, 500 bp, Glycine max
gcaaaagttgtcattgataggctaactggccggaccaagggatatggctttgtaaggttttcagatgagagtgagcaagtgagggctatgactgagatgcaaggggttctttgctcaacaagacccatgaggattggacccgcctctaataaaacccccaccactcagtcccagcccaaaggtatgtctctttctttatcttgtttgttctttttgctgcaaatatctctttcatatgctgcttaagggaaaattgagctgtccttgttagatgagtgatactggttgaatttaatgctgtgtctcagaatgttgtttttggtgtatgctaaatgttattaagttttgattcttttcagttacacacttgaagattcgcagtcaaactcatttcttcctgcaatttcctttaaaaatttgggcaaaataaattatatataataataaaatcttatagaactcatgttgtctcgaagcagggtgtcaagaggctctgtcat

SEQ ID NO: 206257 - DNA, 156 bp, Glycine max
tttttttttttttttttatttttttttttttttttttttttttttttttttttttttttttttttttttttttttttttttttttttttttttttttttttttttttttttttttttttttttttttttttttttttttttttttttgaaactttt

SEQ ID NO: 206258 - DNA, 478 bp, Glycine max
tgtctctatctttggttcttggagtggccaatagctttgattttcacgacaaggatttggcgtccgaggaaagcttttgggacttgtacgagagatggaggagtcaccacacggtttcgcgaagcctcggtgaccagcacaagcggtttaacgtgtttaaagcaaatgtgatgcatgtccataacactaacaagatggataagccttacaagctgaaactaaacaagtttgctgacatgaccaaccatgaatttaggagtacctatgctggctcaaaggttaatcaccacagaatgttccaaggcacgccacgtgggaacgggaccttcatgtatgagaaggttggtagtgttcctccttctgtggattggaggaagaatggtgctgtcactggtgtaaaagatcaaggccaatgtggtagttgttgggcgttttcaactgttgtagctgttgaaggcattaaccaaatcaagacaaa

SEQ ID NO: 206259 - DNA, 506 bp, Glycine max
gctaaatgacctaagcaagagacgatcagaagaaaccatgagaatgaaagagatcatttctaaggaggagaaggcaaaagaattagcaaaactagaaagagagaaatatcaagatgcatcacgagaagctgaatatttgaaagaatgtgctgaaagagaagcggcagaacagaaagaaatggagttgagagccattcgcgctgcaaaagagaaagaaaagctggaggatgctctcagaggttccacgccccagtaccggaagtttacatgggatgaaataatcttagctacttcatctttctctgaagatctgaaaattggaatgggagcgtacggagtagtatacaagtgcaatttgtatcacacaactgtagctgtgaaagttctcactcttaacactaacgtatacagcataagatagcaattccagcaggagttagagattttgagcagaattcgtcatccaaacttgcttcttctactagtgcatgtgcggatcatggatg

SEQ ID NO: 206260 - DNA, 454 bp, Glycine max
aagatgaagaaggaagcaattcttataaactgcagtagaggacctgttattgatgaagctgcacttgtggagcatttaaaacagaacccgatgtttcgagtaggccttgacgtgtttgaggaagagccctacatgaaacccgggcttgcagagttgaagaatgccattgtggtaccccacattgcatctgcctccaagtggactcgtgagggaatggctacactagcagctctaaacgtgctggggaagatcaaagggtacccagtttggtttgatgccaatagggttgaaccattcctcaatgagaatgctcaaccaccagctgcatccccaagcattggtaattgcaaaagcctgtggtttgccaactccaagctataaacatacatggttctatcctacaagggccttcaattgcacaaatgaccaattttggcctgttgagttgggctct

SEQ ID NO: 206261 - DNA, 299 bp, Glycine max
ctttgttcactcttcttctcttgctgctagggttttagcgcagcttcttctagatttaaggaagatgggtaaggaaaaggttcacatcagtattgtggccattggccatgtcgactctgggacatccactaccactggtcacctgatttacaagcttggaggcattgaccagcgtgttattgcgaggtttgataacgaagctgatgagatgaacaagaggtctttcaagtatgcctgggtgctggacatacttaaagctgatcgtgcaagtggaatcaccatcgttagtggcttgtgga

SEQ ID NO: 206262 - DNA, 404 bp, Glycine max
ggagggaatgtgcatgttactagcatttctctttatccatatacaatacaataaccctgctgctgatgaatttgatgaccataacacagtgacaaataagatcataagatgcaatgatttttgatatacaggacaataaaagaagcaatgcattaaagctgaaagtagagtgtatgttcatcttcaaaggagtgtaaaagagggtaatatatattttacagaatttccgaaagagcagaaaaaaggaagtaaagacaagaatgacttgtgactcaaatcctggaagggatcataggaatagtgtcctgtaagtatgcactggcagcagcaactccacttccaagctttacaggatagcccacatctttcagtatcatcttcacaccagctagacatcccaacag

SEQ ID NO: 206263 - DNA, 495 bp, Glycine max
ggaactcttacttggataaatggggactcatacgaaggaaactggttaaatggcatgatgcatgggtttggagtttatacttggagtgatggaggatgctatgttgggacttggacatttggtctaaaagatggcaaaggaaccttttacccgagaggtagccgtcttccttgggtgcaagaaatttacctcagtgccttgagaaaaagagggttgctgccagatttgagaaaacagaaacaggtgagagatgtcaaggtaccagagaaccatatgtcaagtcatgtttcatctgataagtttgcaaaaggaaacctgttaaatctggaagagtctaatagaagaaatgtctctctcgaaaggcgttggagtcttgaggtgtctattgagaaggtgattggggatgattcagcattaagatttgcagaatctgtaccagaaagtagagatggagaagttgatgcaatgatcccaattttggaacgagagtacatg

SEQ ID NO: 206264 - DNA, 480 bp, Glycine max
gaagcattagcaaaagcaagaagaactagtctaagcagaaatggcctcttcagtgatggcatctgtggccctcaaacctgcccctttcactgttgagaagtcctcagttagaggccttccctccctctcaaggaactcctcttcattcagagttgtggccagtggtggcaagaagatcaagactgacaagccttatggaattaatggtggcatggctttgagggaaggagttgatgcatctggcaggaaaggaaagggaaagggcgtttaccagtttgtagacaaatacggtgctaatgtcgatggttacagtcctatctacgacaccaaggactggtctccaaccggtgatgtctacgctggcggtacgactggcttggctatctgggctgtgactctacttggtcttcttgctggtggtgcacttcttgtctacaacacaagtgctttggcgcaataaactttgcaaatcgatgtttt

SEQ ID NO: 206265 - DNA, 327 bp, Glycine max
ctttaccataccattacaataattatcaaacctaaccagtaaaaatggtgaccgtggaggaaatccgcaacgctcagcgttcccatggacccgccaccatcttggccttcggcaccgccacgccgtccaactgcgtctcccaagccgattaccctgactactacttgcgcattatcaacagcgaacacatgactgatctcaaagaaaagttcacgcgcatgtgtgaaaagcccatgataaagaagcgatccatgcacctgacggaggagtttctgaaagagaacccgaacatgtgcgagtacatggcgccatcgctggacgtgagac

SEQ ID NO: 206266 - DNA, 473 bp, Glycine max
aaggtaaatttgtcacatttattcattatcatatatgcatcacctagtatcagctggtttattcttaattaagagaaaactaaaatacaatatcttacatgctatttttgccggacttgaattagaataatttcacctcgataactttcaaaatcctttaatgcaaattaccgaaataaaactctagttctagttcaaacaacacctagctataataattaggggttgataccatagagctttcgaatcccgtctatatcatcttgcgctagattcaccttcctagttcgaggtggtatagaaggatacatgatggctcttaggtccgacgagtggcctaatccgagcaagtgcccgatctcgtgcactgccacagattcaaggtcaaacgcacttgtcaccggcgatttggtgacatcgccagacgccacccaatattcgtcggcgtcaaagtggcacctcccatcagtggg

SEQ ID NO: 206267 - DNA, 545 bp, Glycine max
tctttttttttttttttttttttttttttttttttttttttttttacattagtaaacaaatttattgcatagaaagatacctgcgtgtatggaaaaaaattcaatttttgttaagttgaagggaaatatccaaatacatgtcttattcttttaaataatccatatttgtagcaatgaaataaattcctccccaaaataaaaaatgattgggattaccaatatctatgatccatattcactattaaggaccagaaatgccttgcttacgtatcattaaaaagggcattaacataaataccgcagtaagaagaggtaattcaaaagtttgcaaactataaaaacgagttaaggtagattgtcccacactggaacttccgcgtaataactttaccaaagacgatcctattacaggaatagcgtcgggtacgcctgttacaattttgactgcccaataaccaatttgatcccaaggtaaggaataaccggttacaccaaaagatgcagtcaatacagccaaaacttcacccgtaacccaagttaatttc

SEQ ID NO: 206268 - DNA, 234 bp, Glycine max
gcaagcttggcacttgccgagaatggatacccacctgtacactcttgagtacatgaactgatggtcatccctacaagctgtgtgatcagatatctgatgcagtgcttgatgcctgactggagcaaagaccctgaaagcaaggttgcctgtgagacatgcaccaagaccaacttggtcatggtatttggagagatcaccacaaaaggcaatatagactatgagaagattgagcgc

SEQ ID NO: 206269 - DNA, 505 bp, Glycine max
  unsure (1)..(505): unsure at all n locations
acatatataactaaagaatcttgttttgttctattatttgttattttataatattctaatgaatctttattttcctttttattattagttattagaatattttttattattagaaagaataaatagaattggcaaaaatgaaaaaaaaattcaatgaaatcaaaattatcgcgggcgaatatttactcttttattatcaatcaaattcagatgtaatgtagggcacaactcctaaaaaaaggattgctttttggtttcttccgccatcccacctaatgaatcattaagattcgtttttaataaaatcttaagtatttgcaggtttcgtcgttcccatcacttctcgattaatggttaggtctgaattcgacaatggagcctttctcatatcttaaaattaataatctttttttttttcgaatattgatttgatttttcgtgaatcaatattctcagtttttattgattcagagctcttaatttggttacgttatanattaattca

SEQ ID NO: 206270 - DNA, 185 bp, Glycine max
tgcgagtcgtgatggatcgacatccatggttggcatcataccgaggaatgcaggggtgacacgattaaggggaactcggtgacaatgcgaaagactgtgttggatattaactgcattaccagtgttaagggtgtcacaggatcctggatttacataattgactgtgtcattgtcaccagttctgc

SEQ ID NO: 206271 - DNA, 507 bp, Glycine max
agacaacttcaaacatagatagcacttaaggtagatttacacatagcagatatatataaccagctattattgaagatttttaagcaacactgaaagaacttgctgcactctccacaaatcttcttgctcccttgaaccacctcttgtctccagcttgagccttgcaaatgaacagttttccatcttttacagttgctctaattatgtggtgcttgccaccttcatctccatcagcagtccttgtcaacacagacagaaaatagtacggcttcccatcaatcacaggtgttgccgtctctaagatgttagccgtggccaccgcatttggatcaaaaccaccctcggcttgtgtttcgccgaagaaggcctgttttcctagtaaataatccaccttagagaggaactcttcgggtgaaccatagtcagtgatagacttcttatcagtcggagtgatggtgacaaccacgttggtggttggaatcaaagtatcctcatatctaacaacct

SEQ ID NO: 206272 - DNA, 357 bp, Glycine max
ggttgatttacattggaaatcaaagatgccaagttccgacatgccttccaaaactctaaaactctctctctccgacaacaagtccttaccctctttgcaactacccttccgcaccacagatatctctcacgccgcaccttctgtttgcgccacttacgactactatctccgtcttcctcaactcagaaagctttggaactcctcagattttcctaattggaacaacgaaccaatcttaaaacctatcttgcaagctctcgaaatcaccttccgctttctctccattggtctcttcgatccaagaccttactccaaccacagagaatggactcgcaggatagagtctcttatcacaca

SEQ ID NO: 206273 - DNA, 385 bp, Glycine max
gagataactagaaacagtgtgatgaaaatgaaggtccttgttttcttcgttgctacaattttggtagcatggcaatgccatgcgtacgatatgttccctctccgaatgaacactggctatggtgcccgtactccggaggtgaaatgcgcaagttggaggcttgctgtggaagcacacaacatctttggctatgagaccattcctgaagagtgcgttgcagcaacaaaggaatacatccatggcgaacaatatagatcagactcccaaacagttaacccaccaagcttacttttatgccagagacctcgaagtccatcccaaggacacatctgtgctcagtatagatggcaccgtactctctaatattccatactacaaaaaccat

SEQ ID NO: 206274 - DNA, 499 bp, Glycine max
aaacaaaagaaatcacaatctgtggcttcattatccttgggtgcaccatctcctgcggttcatccatctatgcaaccatcatcatccgcattgaagcatggacctccatcaggaactaagaccaaaaagcaaaaatcattcccttctacaggacttacaagccaaagccaggtcactaatcaggggggttcttcaggtgcctttgcaacaaaaggacctgctgaagcagcttcttatgatccctggattggaaggaaagtttggacaaggtggcctgaagacaaccacttctatgaagctgttataacggattataatgctgctgagggactacatgctttggtttatgatatgaattcagcaaatgaaacatgggagtgggttaatcttaaagagatatctccagaagatattctttgggagggtgaagatcctggaatatcccataaaggatgccagcccggtccaggtagaggattgaagaagtctatgcctcacg

SEQ ID NO: 206275 - DNA, 484 bp, Glycine max
atccagaaacatttattatttattgctttctaccatctctgcatctctaattgctgtaaaaacactggctctttggaaaactcagaggatgcaattcctactgattgcaaagaaattgacgcagtaattttgataataaaaaccaatctgttattgtacacccatattattgccacatttaagactagcccgtctttatatccttaatgctctcttattgccaaaatcacaatatgtaatcaagttcaagccgcaactttcttggatgtgactgaattgacaatggtagcaaactcaggaccctttaatgaagcacctccaacgagaaatccatcaatatcttcttgctttgctagctcagcactgttccctccatttacagaccctccataaataattcgcgttttagatgcaacttcatcagggacattcttttttagccaatctcgaacagctacatgtacttcctgagcttgctggggag

SEQ ID NO: 206276 - DNA, 483 bp, Glycine max
gagagagagagaggcacttggaatccaaaaatgagagaaatcatcagcattcacataggtcaggccgggatccaggttggcaactcctgctgggaactctactgcctggaacatggcatccagcccgatggcatgatgcccaagtgactcctccttcggtgtagcccacgacgccttcaacaccttcttcagcgaaaccggatccggcaagcacgtccctcgcgccgtcttcgtcgatctcgagcccaccgtcatcgacgaagtccgttgtggcacttaccgtcaactcttccaccccgaacaactcatctccggcaaggaagatgccgccaacaactttgccagaggccactacaccgttggcaaagagatcgtagatctgtgcttggatcgcgtccgaaagctcgcagacaactgcactggtctccagggcttcctcgtcttcaacgctgtcggcggtggcaccggttccggtctcggatc

SEQ ID NO: 206277 - DNA, 323 bp, Glycine max
attcttatcatgctttactttgacgtttatggaaaacaaagcgaactcgaatccagcaagcgaacaaacgagtgattacaccgggggcatatcctgcgggagaagacgattttcagaacaacgggcaatatcctgtgggacacactaagctggcatacgaggattaccagcaaggtcaaacacttgagaaattcccaagagattatcaaaaactgaaaactgtttgggatcggcaatacagaaactcatcagccgtggagtgagatttggccactagaactcccctgctgggaccattaatgcgaccacataccccgattggg

SEQ ID NO: 206278 - DNA, 482 bp, Glycine max
tagatgatgtgatatatgtaattgattgtggaaagcataaagagaatcgctacaatcctcagaagaaattgtctagcatggttgaagattggatttctcgagcaaatgcaacgcaacgtcgtggtagagctggacgttgtaaaacctggaatttgtttttccttgtacactcgtcatagatttgaaaagctcatgcgcccatatcaggttccggagatgcttcggatgccattagttgaattgtgtttgcagattaagttactgtctcttggatatatcaagccatttttgtcagaggcattagaacctcccaaggttgaagcaatggattcggcaatatctttactgtatgaggttggtgctcttgaaggggatgaggagttgacaccacttgggcatcatctggcaaaacttcctgtggatgtgttaattgggaagatgatgctgtatggtgcaatgtttggttgtttgtctccaattct

SEQ ID NO: 206279 - DNA, 404 bp, Glycine max
gaacatcgacgctgagataaagggtgaataattagcagctccttctagttccggtgtcggtgtgggtgtttgaatctggtgaaggatgtcaattgttccaatcaaccagggtgatgccaacggctccaaccccttcgcttcgtggggtcaattcgtggattttcctctccctccttccatctacggcttcttacccggcttggaattccgattcggattcggatcatccgtgaacacacgtgcggactggagggagactcccagagcgcacgtgtggaagctggcgcttaccggcttctccaacgaggacgtgctggttgagctccaagacgagagggtgctccaagtcaacgtggaaagcggctacttcgtcacgaggttcaatgttcccgacatcggatacc

SEQ ID NO: 206280 - DNA, 363 bp, Glycine max
tcgaggcaccactaccacctttccgacttcagccgttgcaaccaccagcaaatggctgggcttcgtggcggccgtgtggattcaatgcatcttcggcaacaactacactttctcaaactactccgacgccctcaaatccctcatgcacctcactcagctacaactcaacaacctgtccgtcggtaaagacgttggcaaagcctttgggcttctcgcgggcctggccttctaccgcttacccacttgggccattctcctcataggctccgtcgaaggcctaattggctacggaacccaatggctcgtagctcgccaaagaattcaacccctcccctactggcatatgtgtgcgtttctgtgcat

SEQ ID NO: 206281 - DNA, 278 bp, Glycine max
tttcgttttttttttttgattttttttttttttataagggaacttagctacatcaagggattaagatatatgcataacctagttgaacctggatgctatgtaattaagagaaacctgaactgcgctatgtcacatgctatatgtgacgtcccagaattaccactaatttacctcgataactttcaaactacgcaaatgttaatgacggaacggaaactcttatgataggcccaacaacacactggctggtccactgcggaggcgataccatagagctt

SEQ ID NO: 206282 - DNA, 481 bp, Glycine max
cgcaagcaaaaagaaagaatcccaggcgaggagaaagatggaggggaaggagcaggatgtgtcgttgggagcgaacaagttccccgagagacagccgattgggacggcggcgcagagccaagacgacggcaaggactaccaggagccggcgccggcgccgctggttgacccgacggagtttacgtcatggtcgttttacagagcagggatagcagagtttgcggccacttttctgtttctctacatcaccgtcttaaccgttatgggagtcgccggggctaagtctaagtgtagtaccgttgggattcaaggaatcgcttgggccttcggtggcatgatcttcgccctcgtttactgcaccgctggcatctcagggggacacataaacccggcggtgacatttgggctgtttttggcgaggaagttgtcgttgcccagggcgattttctacatcgtgatgcaatgcttgggtgctatttgt

SEQ ID NO: 206283 - DNA, 412 bp, Glycine max
agtgcaactgcgaatatctgtaccgggcccccccatgacgcgtacgtaatctgctcgagcccccaattcttccccctacacccacccagcatatctctctattcctatttattagcacccctcacattaccttgtgtcaccaactactttgactcctttaccataccattacaataattatcaaacctaaccagtaaaaatggcgaccgtggaggaaatccgcagcgctcagcgttcccatggacccgccaccatcttggccttcagcaccgtcacgccgtacaactgcgtatcccaagccgattaccctgactactactttcgcattaccaacagcgaacacatgactgatctaaagagaagttcaagcgcatgtgtgaaaagtccatgactaagaagcgaaacatgcacc

SEQ ID NO: 206284 - DNA, 379 bp, Glycine max
tggaggcgaaatccgttcccctatctgcttttggagttgttgctaaagagtgatggactcaccgtccagcaatcaccacgcggtcgacggagacgccaacgacgtcgatagatccttttcccaccgcgacgacgatgaagacggcaagccccaaccgatcaccggggactgcgcctgtcctggaaagatattcatagggggcttagcgagagaaacgacgattgcgcaattcatgaagcactttggtacatacggctagataacggattgcgtcgtcatgaaagaccggaagaccggtcagccgcgtggcttcggcttcataacttacgctgatccctgcgaggctgatacagtgattgaggacactcacattatcaat

SEQ ID NO: 206285 - DNA, 525 bp, Glycine max
aattcacacccaaagagaaaagaaaaaaaaaacaacagtggtacgtgatgccaccgaagttcgatccctcgcaggtggtggacgtgttcgtccgagtcaccggcggcgaggtcggcgcggcgagttctctcgccccgaagatcggtcccttgggactctccccaaagaagatcggagaggatattgcgaaggaaaccgcgaaggactggaagggcctccgcgtgacggtgaagctaaccgtgcagaaccggcaggcgaaagtgacggtggtgccatccgccgtcgcgctggtcatcaaggcgctgaaggaacccgaaagggacaggaagaagacgaagaacatcaagcacaatgggaacatctccctcgacgacgtggttgagatcgctagggtgatgagcccgcgctccatggcgaaggatcttagtgggaccatcaaggagattctcgggacttgtgtttcggttgggtgcaccgtggatgggaagggaccccaggatctgcagcaggaaatttctgatggag

SEQ ID NO: 206286 - DNA, 338 bp, Glycine max
agtcctgaaacttgggtgcgattccttcactcacaacaacaacacatcactatggctcttctgagtcgagcctcttcacgcttccctcagctggtttcccctcaaagggtagtttcactccacacaacgctcccatctctgaacgcatacccatccacagccacgcctacaccatatgccccgccaccgcctgcgtccgcttactctcccgccggcgtttacaaggcggcggagttcgagatctcgcaggcggacgatctgattaactgggcccttcgcggcttcatctggcccatgaccttcggcctcgcctgctgcgccgtcgaaatgatgcacac

SEQ ID NO: 206287 - DNA, 525 bp, Glycine max
cgcccactctgccctagcttcaatccctctagcttatttcttagactgtgggggcaccaaagaggtaacggtagacaatctcacatacattcctgatgaaagttacatcaaggtgggcaaaaccaccaccatcaacaagccagacttgttgccaatactctcaacattgcgatactttcccgacacgtcggctaaaaaatattgttattcattgcccgtcattaaaggcagcaaataccttgtgaagacaatgtactactatggaggttttgatggaaggaataagcagcctccggtgtttgatcaaatcattgaagggacaagatggagtgttgtgaacaccacagacgattatgccaaagtcttagttcttactttgatattgtggtggtgccatcggagaagactttgagtgtgtgcttggcaaggaatgcacacacgggtggcgcaagccccttcttttcggcctggaggtgaagaggttggatgcttctttttataatcctaccgactttaacaaatatg

SEQ ID NO: 206288 - DNA, 465 bp, Glycine max
cattggttcaagaacatcctaaagaaacactagtaatatgtgtttatggaaattctggtggtttaggcaccagtttatgtgactatgtgtctatcttatgtttaaattaaaaacccataccggtttaggatcatacttcacacataatatcagtttgactttgtcaacttaaatagatatactacagggaacccccattccagtcacacctggctttgagaaaggtttcaaaagctcgtacggtacaatgccagctccatttctgttcttcaactttgtgtttccattcctctcatcaatcagtgtttctagtttcttcagtctctctctaaatctttcaaaggaagcctttatgacaggatcttcaccccatgatggttccatcttttctcctatgtattcctcatctggtgaatgagttgagagtatggccaagacagccatgactctagttgcttgaaattg

SEQ ID NO: 206289 - DNA, 321 bp, Glycine max
aatgcaaagagatggcctatttttggcctttgaagcttggaacttctgcaatgaagttggtcaagaagctccttacatgggtagtccaagagctgctgatcgttttgatctttcaggttctctgactcacaaggtcacagaagctgataacagacttggggtgggggactcatttactggttctatccagaaaatatcaacaccacagacctttatgcaattgaaaaggaatagtattggggttctatatagtgaagttgctgacaccccatgcccctggccgttttggatggtgatgctgaaccatggccactattacac

SEQ ID NO: 206290 - DNA, 293 bp, Glycine max
  unsure (1)..(293): unsure at all n locations
gccaattcttactcctccacccacccagcatatatggatatttctataaattagcacccctcacattaccttgtgtcaacaactactttgactcctttaccataccattactaattatacatcaaacnctaaccaacaaaaagatggtgaccggaggaggataatacggatacggtcagcgataccatggacccaccaacatcttggccttaggaaccgccacgccattgaactgtgtttagcaagccgaataccgtgactactactatcggattaccaaaaacgaacacatg

SEQ ID NO: 206291 - DNA, 406 bp, Glycine max
ctcattaattgcaagaatggcacttcgttgcttggtgatgtccctttctgttctcttcactcttggtcttgcgagagaaagccatgccagagacgaagatttttggcatgctgtttggccaaacactcccattccaagttcattgcgagatcttctaaagcctggccctgcaagtgttgaaatcgatgatcaccctatgcaaattgaagaaacacagtacccgaaaaccttcttgtataaagaagaccttcatccaggcaaaacaatgaaagtacaattcagcaagcctgcctttcaacaaccatggggtgttggtacatggttaaaggaaattaaagacactactaaagaaggatatagttctgaagagctatgcatcaagaaagacgccattgagggagaagag

SEQ ID NO: 206292 - DNA, 399 bp, Glycine max
agaaacacttcgagtcagggagaagggaattggaacttatacggcttcttgaggatggcccaggaaccttgatccaaatggtctacagaagaccacgatcatatgccagagggcgagatgcgcggtgtatctctatgtgaggggaagatggggaagactctggtgagaagctatgggccctaacaactactcctgactctgattgaagagctcgcaccgcccgtgaatgtgatgctgacaattcaccgctctacttatgcaaagggggagcataccaactctgtaattgcgtcttctttcggagtggcagcttcagctctatgtcctgatgtgaaagacatcactgtggatgacgacctcaagcagatacgtctaaggtgcagaggctagcttataagc

SEQ ID NO: 206293 - DNA, 416 bp, Glycine max
gtcacactggtgaaaacttttgctgtgataagaggatattggaacttactcaatcaattctgtggatgatccacaaaccttgaacagaattgtctacattagaccaccaactaataccttgtcgtttaacgagcattggtgctctctgggagggaaagactggacaaacatctgcaagaagctatggtccagaagaacgactcctgaagcaaattggatagtccgcaccacccgtgaatgagatcctgtcaattaacctctcttgttatgtgaagggggatcattctaactttgagattgaagcctgttattgcgtggaagcgctgactatatatcgtgatgcaaaatacatgactggggatgcgctccctaatcagtgcgtctaacgtgcaaagcctacctgatcggtttgatta

SEQ ID NO: 206294 - DNA, 301 bp, Glycine max
gatttacatgagacacctttcactacaactgttgctctacactatgcaaccttttttcctctgcattgggacccctgccagctacccctgtctataaatctgactttgactggcccatggagccagctagagcctacagatggaatctgacagcacatgctgctaggcctaacccacaatggtcattccattataggatgactactactgcgtcagtagggatggtggccacgacagcacctttgatgaatgggaaggtcccatctgtctgtaacagtgactcctatgctcaccctgacac

SEQ ID NO: 206295 - DNA, 489 bp, Glycine max
gatttacagagacacctctcactacaactgctgtactacactatgcaactctttttcctctgcattgggacccgtgcctgctccccctgttgataaatatgactttgactggtccatgaagcaagctataaccctacagatggaatctgacagcaaatgctgctaggcctaacccacaagggtcattccattatgggaagattactcctacaaaagtaattaagttggccaattcagcacctttgatcaatggaaagctccgttatgctgttaacagtgtctcctatgttaaccctgacacccctctcaagcttgctgattacttcaacattcccggaatcttcagtgtgaatttactccaaaactctccctcaaatggtccaggatacataggcacctcagtgttgcaaacttctctccatgattttattgaggttattttccagaacaacgaaaacaccattgcatcttggcatcttgatgggtatg

SEQ ID NO: 206296 - DNA, 449 bp, Glycine max
agaaagtatcatgcttgattactgattgatggacagtctaaataacaatgtaaaaccatcgtagttcctctgtacatgaaaatagacggatcataacaatcatgcccaaatcacttctaaaaattcatccattcaggattacacgagaaggacacaggcttatccatgtcattggatacaaacttagtagccacgaattgtattgatgatggtgttgtgccacgggtcagagaggtgctgcaataggttctcaaatggtcctttgcctgtcacgttgtgttgaactatgaatcccaagaatgccaacatagccaatctcccattggcaagttccttctccttggcctccaaagtaggtgcaaagttcaaggggttaaacacactaccagggtatccacactcatgttggggcaagctgtattgcttgaagatggggtcttggttgacag

SEQ ID NO: 206297 - DNA, 511 bp, Glycine max
  unsure (1)..(511): unsure at all n locations
cgaaacgacagcatgtggtggccgttcagcagaaaagagaaagagggttctggattttcatcttcttccactgccgaggaagttactgaaggaatcgatggcactgccctcactgctattgttacaggggcatctagtggtattggtgctgagactacccgtgttcttgctatgcgtggtgtccatgtaattatgggggtgaaaaatatgaatgctgcaaaaaatataaaagaaacaatacttaaagggattccctcagctaaagttgatgctatggagttagaccttagttcaatgacatctgctcgaaaatttgcatcagagttcatttcttctagtcttccactaaacattttgataaacaatgcaggaatttgtggaacccctttcatgctgtctgaagataacatcgaactacaatttgccacaaatcatataggtcattttcttttaacagatctgttattggatactatgaagaacnacacacatgaaagtaagaaacagggaa

SEQ ID NO: 206298 - DNA, 396 bp, Glycine max
atcttcttcttcttcttcactcagtcagatccaactcctcagataacacaagaccaaacccgctttttctgcatttctagactagacgttctaccggagaagcgaccttagaaattcattatggtggcaacagctgctacttcatcatttttgcctgttacttcaccctcgccggactctggtggagcaggcagcaaacttggtggtgggcctgcaaaccttggaggactaaaatccaaatctgcgtcttctggtggcttgaaggcaaaggcgcatgccccttcgaaaattaatggaaccacagttgttacatctaaagaaagcttcacgcatgatgatgatctacctctgcctccccccagaacttttatcaaccagttgcctgactggagcatg

SEQ ID NO: 206299 - DNA, 423 bp, Glycine max
ccaaacccttcttctctcttcccctgaaacatccctcctcttccaacaaaatcagtgaggatctgagaagaagcattggccagaggtggtcagctttttccttctacgcatgactgcaaggggcagcgaccccataaggggtcgtctttggccacaaatggccttggcattggccattgctttcatttcttccactgtggtttccgtcaatgctgatggatatccttactattctcctccaccaccttatgaatacaagtcaccaccttctcctccttacgtgtacaagtgtccaccacctccaccatatgagcacaaggatccaccatactattacaactcaccaccaccttcctattactataaatgtactacaccaccatacgcctctccttcttccccctactactaccactccccacc

SEQ ID NO: 206300 - DNA, 527 bp, Glycine max
ctgctcagagcctcattaagtttttctctctttcacttatttattgactctccataagcccttcaaacctctctctattcctctctactagtcaccttctcccttccattcactccacttcttaacacccccaaacagaacaacggcagagcaagcagccagaaaaatggtgttgctgtccaaagcaacaacagaacaatactcctacatcaagaactacatgccaactgcattctcctcaacaattcccatagtggacctctccaaacccgatgcaaagaccctcatagtgaaggcttgtgaggagtttggattcttcaaagtcatcaaccatgggtgtgcccattgaagctatatcccaattggaatccgaagccttcaagttcttctctatgccactcaatgagaaggaaaaagcagggcctcccaaaccatctgggtgtggtagcaagaaaattggacacactggggatgttggatgggttgagtaccttcttctcacaccaatcaagacacaacttctcttt

SEQ ID NO: 206301 - DNA, 477 bp, Glycine max
  unsure (1)..(477): unsure at all n locations
acaacctcttgtttctcttcttcttcctcttcttagcctccgccgccgccagcgtccccgcccacaacatcacccgcatgcttgccaaacaccccggcttctccacctataaccactatctctccctcacccacctngccgaagagatcaaccgccgacagaccatcaccgtcctggccctcgacaatgccgccatgtgctccctcctggacaagcacctctccctccccaccatcaaaaacgtcctctccctccacgtgctcgtcgactacttcggggccaaaaagctccaccagatcaacaacagcaccaccctggtgtgctccatgtaccaggccaccggctcagactccggcaccgccggctacgtcaacatcaccaacctcaaggccggccaggtcggcttcgacgacgaagacaacgacggctccctccactccttctacgtcaaatacgtccaggaaatgccctactaca

SEQ ID NO: 206302 - DNA, 494 bp, Glycine max
aatggcggaacaatacaacattttttttacacagcaaagctatggtcaaacaggaagtttggtatcttttgctttccacgagaatttgatatcaaatattttaatgaacggcgtgtaaccaaaacagagaaaacagagcactctttttaataaacaaacacagctttagttcaatgaaaaacttttccagactcttgatgatgatggatggatgttgcgggtgtcgtgctggtatactttcttttactaatcaacaagtttgctgcctttgacatccactacaaacctgtatctcacatcgttcttctccaacctttcaaaggctttgttaatgtaatccatgtttaccacttcaatcatcgaactcagacccttctctttccagaactccaacatctcctctgtctccttcatgctcccaataaagcttcccgtgattgacctcctccctagcatgaccatggggctaacaaattgaagaggggtgttgatga

SEQ ID NO: 206303 - DNA, 461 bp, Glycine max
cgaaacgacagcatgtggtggccgttcagcagaaaagagaaagagggttctggattttcatcttcttccactgccgaggaagttactgaaggaatcgatggcactgccctcactgctattgttacaggggcatctagtggtattggtgctgagactacccgtgttcttgctatgcgtggtgtccatgtaattatgggggtgaaaaatatgaatgctgcaaaaaatataaaagaaacaatacttaaagggattccctcagctaaagttgatgctatggagttagaccttagttcaatgacatctgttcgaaaatttgcatcagagttcatttcttctagtcttccactaaacattttgataaacaatgcaggaatttttggaacccctttcatgctgtctgaagataacatcgaactacaatttgccacaaatcatataggtcattttctttaacaaatctg

SEQ ID NO: 206304 - DNA, 483 bp, Glycine max
ctcacactcatcatggaccgttttccgattttctttctcgtgagcaccctcattagggtcgccggcggtgcccgtcacgatattctccggttacccttcgaagtttgcatggactgtaaagcacctgctaatgccgatcaaaacgatgagggcaccacgagggccgctttagttgccggttccaatggctactggaattacaggcaccagtgtgaaggccgtcatgcatatcaactactgaggaaaggtggtgagaaagaggaaaatattgatggcctatagcggaggacgttgctagcaatgaggaggacccacggcctgtagtctctattaacagtccacacggaaatgatgttcacaagggagttcctaaggattacgttggtgaagatgttactgctgacaactcttttgctgctatacttggaaataagtcagctcttactggaggcaaggggaaggttgtggatagtgtgccccaat

SEQ ID NO: 206305 - DNA, 499 bp, Glycine max
  unsure (1)..(499): unsure at all n locations
atcttcttcttcttcttcactcagtcagatccaactcctcagataacacaagaccaaacccgctttttctgcatttctagactagacgttctaccggagaagcgaccttagaaattcattatggtggcaacagctgctacttcatcatttttccctgttacttcaccctcgccggactctggtggagcaggcagcaaacttggtggtgggcctgcaaaccttggaggactaaaatccaaatctgcgtcttctggtggcttgaaggcaaaggcgcaagccccttcgaaaattaatggaaccacagttgttacatctaaagaaagcttcaagcatgatgatgatctaccttcgcctccccccagaacttttatcaaccagttgcctgattggagcatgcttcttgctgctatcacaacattnttcttggccgctgaaaagcagtggatgatgcttgattggaagccacggcgacctgacatgcttattgaccccttgggat

SEQ ID NO: 206306 - DNA, 458 bp, Glycine max
ctgctcagagcctcattaagtttttctctctttcacttatttattgactctccataagcccttcaaacctctctctattcctctctactagtcaccttctcccttccattcactccacttcttaacacccccaaacagaacaacggcagagcaagcagccagaaaaatggtgttgctgtccaaagcaacaacagaacaatactcctacatcaagaactacatgccaactgcattctcctcaacaattcccatagtggacctctccaaacccgatgcaaagaccctcatagtgaaggcttgtgaggagtttggattcttcaaagtcatcaaccatggtgttcccattgaagctatatcccaattggaatccgaagccttcaagttcttctctatgccactcaatgagaaggaaaaagcagggccctccaaaccatttgggtatggtagcaagaaaattg

SEQ ID NO: 206307 - DNA, 448 bp, Glycine max
ggtgacacacacctactacaattgataaagtcctttcttgtcatagcaaaaatgaagcttgccttggccaccctactgaaatggtctctacttctaagctcctctttcttggagccagtcatcccctatgaagactagctttattgcagcaacaagtgatcagacagatgctcatcggccggggctaaagatccgtatctgaggtactgtggaatatgctgtgctgagtgcaaatgtgctccttactgggacctatgggaacaagcaccactgagcttgctacagggacatgctcaacaagaagggcaagcccaaatgcccatgaagtcttgaactcaaagaccaagtcacacacagacttatgagaataacactagtgtgatgcgtttacaactacatcgtgaactcccacacataatgtgggatggatatacgctagatctgcacg

SEQ ID NO: 206308 - DNA, 559 bp, Glycine max
accacttccattctcaatcaccacactgatctggatcgaggttctcgtaattggctacatagagttccagaggaacgcagagctggacccagaaaagaggctgtacccaggtggcagttacttcgacccactgggcctggcctcagatccagagaagaaagccacccttcaattggcggagatcaagcacgcccgtctcgccatggtgggcttcttgggctttgcagtccaagctgccgccactggcaagggcccgctcaacaactgggccacccacttgagtgacccactccacacaaccatcattgacaccttctcatcctcctcttaagaagaagcaaaagaagaagaatagtctttcttgtgcctggcattctagttatattgaaaagtctttttcttcttcttcggctttgggttgtaattaaacattttctacatagctggattagtagtacttgtgaaaaacttgtaacgtgaaattggagaggctaagcagaaatgcttctgcttgatggtaagtgttctcctgtgaatgttaattatgcacgaaatcgag

SEQ ID NO: 206309 - DNA, 500 bp, Glycine max
atcttcttcttcttcttcactcagtcagatccaactcctcagataacacaagaccaaacccgctttttctgcatttctagactagacgttctaccggagaagcgaccttagaaattcattatggtggcaacagctgctacttcatcattgttccctgttacttcaccctcgccggactgtggtggagcaggcagcaaacttggtggtgggcctgcaaaccttggaggactaaaatccaaatctgcgtcttgtggtggcttgaaggcaaaggcgcaagccccttcgaaaattaatggaaccacagttgttacatctaaagaaagcttcaagcatgatgatgatctaccttcgcctccccccagaacttttatcaaccagatgcctgattggagcatgcttcttgctgctatcacaacaattttcttggccgctgaaaagcagtggatgatgcttgattggaagccacggcgacccgacatgcttattgacccctttgggat

SEQ ID NO: 206310 - DNA, 346 bp, Glycine max
cattagcgaagtatgttaaagttgtgtattttactccagtttcagttggtatgcgggtcaggaggctgtttgaaacagaggagtcaagtgtgcggagatacatgggtacaataacatggcattagtgacctggatcctgtccggtggcaaaactcacattggcgctgcgtcaagggtggctgggatgaatccactgctggagacaggcaacctacagtgtctctttgggaaattgagccattaactacatttcctatgtatgcatgtccattcccccttaggcttaaacgggcatggtctgcaggactgccttcattccatggcatgaacgatgacgattttgtcc

SEQ ID NO: 206311 - DNA, 379 bp, Glycine max
tccacagcctacgtatgctgggaatgcggatagagatcacggaccgctttccgatccattttctgagaaacaccctcatcaccctcggctccggcgcccgacacgatattcttcggttaccctacagaagactacatgctctgtacagcacctggtaatgcctactataacgatgagggctactatgtggtccgacgtaggagccggatactatggctactggaaatacaagcaccaaacggaggtcggccatgcatatgaactacagaagaaagggggagcgaaagaggaaaacgttgaagtctatatgtgtggcgacattgcggtcgatgaagaggacccacggtctggattcgttgttaacagttcacactgcaaa

SEQ ID NO: 206312 - DNA, 569 bp, Glycine max
gtagaaccttcactctgctatcccccatattcctgtgtttcctttgaaaaaaaaagaagaagaaaaaacatgtctaggttttttggattcttctttgtgggtcttacgttgatgttggtcggtgtggcaaatgctatggctaactcttccaacaaatttgatcaactcttccaaccaagttgggcttttgaccactttattcatgaaagggatcttctcaaactcaaacttgacaaattttccggggctggttttacttccaagagcaagtatatgtttgggaaagttaccatccagcttaagctcgtggaaggtgactctgctggaacagtcactgctttctatatgtcatcggacggtccaagccacaacgagtttgattttgagtttctaggcaacatcacaggggaaccttactcggtccaaaccaacgtgtatgtgaacggtgtgggcaacagggagcaaaggctcaacctctggttcgaccccaccaaggattttcactcatactctatcttctggaatcaacgtcaaagtgtgtaagcacccattccccttcttaattatgc

SEQ ID NO: 206313 - DNA, 502 bp, Glycine max
cgaaaggtagggttttgcagagcctcgtcctcctctcacggtttcttctttttatcttctcacctttcttcttccactgctctaatctaagatgggcaagtcaagcaagaaatcagctctcaaggtcgacgctgttccagctgtggttccgccatccaagtctgccaagaagggaggcaagagacaagctcaagatgaaattgagaagcaattgagtgccaaaaaacagaagataaatgaggttgctcagaaacaaaaggaggcaaaggtgcaaaagaaggaaagtagttcagatgattcttcttcagaatctgaagatgagaaacctgcacccaaatctgctgttctttcaaaaaagatacctgctaagaatggtgctgcccctccaaagaaaggcaagctcgcctccagttcttctgaagatgactcctctgatgaggatggtgtgcgtgcaaagaaccacagataatggttgctgagaaacacaagaatggagcaactg

SEQ ID NO: 206314 - DNA, 283 bp, Glycine max
gaaaaaaaaaaacccttagccaacacaaccatcatggccacctctgctattcagcagtcagcattcactggtcaaactgctctgaagcagctcaatgagttcgtccgcaagaccggtggcgccggcaaaggtcgcactaacatgcgccgcaccgtcaagagtgctcctcagagcatttggtatggccctgaccgacccaagtacttgggtccattctcggagcagattccatcatacctgaccggacaattccctggtgactacggatgggacactgctggat

SEQ ID NO: 206315 - DNA, 458 bp, Glycine max
atttgagggtggtgttgatgcaggagagcatgcctccattgagcttgcattgttgaacatgggtcttctacacagagctgtaaagagaaactgtaggcctatggtagaactactgttaagatttgttccagttaaaacctcagatggtgcagacagtgaaatgaagcaagttgccgaagcccctgacagattcttatttagacctgatactgtcgggccagctgggttgactcctcttcatgttgcagcaagtatgagtggctcagagaatgtgttggatgcattaaccaatgatccacgaatggtgggaattgaagcatggaaaagtgcccgggacagtacaggttttgacccctaacgaccatgcttgccttaggggctattactctttacattcactagtccagaacaagaaccacaagaaaggtgaagacaacatttgttgatatccctggaac

SEQ ID NO: 206316 - DNA, 558 bp, Glycine max
ttcacacccatcatggaccgttttccgatcctctttctcgtcgccaccctcatcaccctcgcctccggtgcccgccacgatattctccggttaccctccgaagcttccaggttcttcaaagcacctgctaatgccgatcaaaacgatgagggcaccaggtgggccgttttagttgccggttccaatggctactggaattacaggcaccagtctgatgtttgccatgcatatcaactactgaggaaaggtggtgtgaaagaggaaaatattgttgtatttatgtatgatgacattgctttcaatgaagagaacccacggcctggagtcattattaacagtccacacggaaatgatgtttacaagggagttcctaaggattacgttggtgaagatgttactgttgacaactttattgctgctatacttggaaataagtcagctcttactggtggcagtgggatggctgtggatagtggccccaatgatcatatatctatatactactctgatcatggcggggccggagtgctagggatgcctactaatccatacatgtat

SEQ ID NO: 206317 - DNA, 475 bp, Glycine max
atcctctgcttgtaccaaacccatcttcccctctgccttcaccgtctctaagtcaaagctctctcgtcatgttcatgtctccttcacctcccccaaacccatctactaccactacagaaagctctctcatgcctctcaacgttccttggtggtcaacagcgttttgaaaacagttgacccgacacaaacctctttgcggagatccaactccgaggatgttgggtctctgggagaaaagcccaccatcctggtctccgagaaacttggagaggcagggctgcacgtgttacgtggcgttgggcacgtggaatgcgcgtatgagctctcacaggaggagctatgcacgaagatctcgtgctgtgacgctctgatagtcaggagcgggacgaaggtgacgagggaatgtgtctgaagctgggaaagggaagttgcaggtcgcgggaagagccggcgtggggattgacaacgtggatct

SEQ ID NO: 206318 - DNA, 424 bp, Glycine max
atcctctgcttgtaccaaacccatcttcccctctgccttcaccgtctctaagtcaaagctctctcgtcatgttcatgtctccttcacctcccccaaacccatctactaccactacagaaagctctctcatgcctctcaacgttccttggtggtcaacagcgttttgaaaacagttgacccgacacaaacctctttgcggagatccaactccgaggatgttgggtctctgggagaaaagcccaccatcctggtctccgagaaacttggagaggcagggctgcacgtgttacgtggcgttgggcacgtggaatgcgcgtatgagctctcacaggaggagctatgcacgaagatctcgtgctgtgacgctctgatagtcaggagcgggacgaaggtgacgagggacagtgtttgaagctgggaaagg

SEQ ID NO: 206319 - DNA, 503 bp, Glycine max
aatgcaaagagatggtttaagggtggcctttgaagcttggaacttctgcaatgaagttggtcaagaagctcctcacatgggtagtccaagagctgctgattgttttgatctttcaggttctctgactcacaaggtcacagaagctgataacagacttggggtgggggactcatttcctggtataaatccagaaaatatcaacaacacagacctttatgcaattgaaaaggaattgtatttgggttctctatgtgaagttgcagacaccccaagcccctggcagttttggatggtaatgctgaaaaatggaaactatgacaccaggtctgggttatgtcctcaggacgggaaaaaggtacccccttttagcccgggaaggtttccttgttttggacaagggtgcatgaaccaacccatcttgtgtcatcaatggacgcagcttaaagatggcacaatgcaaggggggttcagtggtacttatgatttggattctggttgtggag

SEQ ID NO: 206320 - DNA, 353 bp, Glycine max
ctcattaattgcaagaatggctctccggggcttggagatgtccctttctgttctctgcactcttggtcgcgctagagaaagccatgccatggacgaaaattgtcgggtgctgttggggcatgcgctcccattcgaagttcattgcgagatcttctaaagacctggccctgcgagggtggaaatatgtgaccaccctatgcacatagaagaaacacagtacccgacaacgttcttttataaagaagaccttcatccaggcttaacaatgaaagtacaattgaggaagccttcctttcaaccaccatggggtgctggtccatggttcacggaaatgaaagacactactaaagaag

SEQ ID NO: 206321 - DNA, 496 bp, Glycine max
gaaaaaaaaaaacccttagccaacacaaccatcatggccacctctgctattcagcaatcagcattcactggtcaaactgctctgaagcagctcaatgagttcgtccgcaagaccggtggcgccggcaaaggtcgcactaacatgcgccgcaccgtcaagagtgctcctcagagcatttggtatggccctgaccgtcccaagtacttgggtccattctcggagcagattccatcatacctgaccggagaattccctggtgactacggatgggacactgctggattatcagctgacccggaaaccttcgccaggaaccgggagctggaggtgattcacagcagatgggcaatgcttggtgcccttggctgcaccttcccagagatccttgagaagaatggtgtgaaattcggcgaggaccgtgtggttcaaggccggtgcacagatcttctcagagggagggcttgactacttgggcaacccaaacctgatccatgct

SEQ ID NO: 206322 - DNA, 264 bp, Glycine max
agacggcggaggttgcggcggttgtgctaacacggcgtgacggcgatctcttgagataaatgttggttgaaagaggaagaagaagaagagttgtattgtagaatgagccaaccaacggtgatacttgccactggaagctatgatcacactattcgtttttgggaggacaagagtggtcgttgtttccgcaccatccaatatcctgagtcgcaaggtaaccggctggagatcaccccgtgtaaacgcttcctggctgcagctggc

SEQ ID NO: 206323 - DNA, 504 bp, Glycine max
gtactttgcaaaaaccctaaaccctctctttctctctccgcgactctgtactcatcaatggcgacgcaatcgttagacgaagaaacaactaagaaagtcatacgacaggtcgagttttatttcggcgacagcaaccttctcaccgatggtttcatgaggaagagtatcactgaaagcgaagatggcatgattagtttggcgctgatttgctcgtttaatcgaatgcgaaaacaccttaatttgggtgatgttaagcccgatgaagtggcccaagaaaccgtgaatactgttgctcaaactttgagaaattcggcttcactcaaggtctccgaagatgggaaaaaagttggcaggaaaactgaacttccaaagctagaagatgttgagcaggtggagataagaacacttgctgtatcaccatttgaatatgatctgaagcttgaagatgtggagaaattttttggtcaatatgcaaaggttaatagtgtccggcttccccatcat

SEQ ID NO: 206324 - DNA, 446 bp, Glycine max
gaaaaaaaaaatggatgtagagaaagccttccacatgactggaggagttggcaaaactagctatgccaagaattcctcactacagaagaaggaatctgataaagtgaagcacataatcatacaaacagttgaggagctctaccttgcaaccactccaaagagcataggcattgctgatttgggctgctcctctggaccaaacaccctatcaatcatcaaagatatctttcaggccatccaaggcataagccacaggatcatgcaccactccacagagttcagggtgtacttcaatgatcttccaacaaatgacttcaattcaatcttcaaggccatcccagagttccaaaatttgcttaggcatgacaggaaaaatgggttcccttccattttcatgggaggctaccctggctcatattatggaagactgttcccaaacagttact

SEQ ID NO: 206325 - DNA, 314 bp, Glycine max
acgatctagcgcaagattggctgtccgttgtttggggaggtgcattgaatggtctctgggactcttggtcttgcgagagagacccattcgataaacttaacacactcgggtgccggtcgtgctagctcatccagcccaaggttagtgagagaacttacatgggccgtccctgcaagtgtaggaatcggtgatgaccctacgcatatcgctaaatcccggttcccgaaaaccttattgtataaagaagaccttggtgcaggccaaacaatgcatgttccattcatcctgcctacctttcaacaaccatggggcgt

SEQ ID NO: 206326 - DNA, 452 bp, Glycine max
attagaagtaacaaaagaccctccctctcaaaagaataaacaagtataaaaaagaaggcacttccctcaaacagaaactaccctctatctctctcttttcaagccttaaatgagtaaaaaagagtgaagaaaggaaagaaaggagcaccatttttggtttgagaaacataattagcaagagagttcaaaatggggaagagagagtttaatggggtggtgctgatgatgctgtgtctgtgggtactgtggtgtcacagcctctgtgacttatgaccacaaagccattgtggttgatggcaagagaagaattctgatctctggctccattcattatcctagaagcacacctcaaatgtggccagaccttattcaaaaggccaaagatggaggccttgatgtcattcacacctatgtgttgtggaatggccatgaaccttctcctgacaatacta

SEQ ID NO: 206327 - DNA, 379 bp, Glycine max
ctcattaattgcaagaatggcacttcgttgcttggtgatgtccctttctgttctcttcactcttggtcttgcgagagaaagccatgccagagacgaagatttttggcatgctgtttggccaaacactcccattccaagttcattgcgagatcttctaaagcctggccctgcaagtgttgaaatcgatgatcaccctatgcaaattgaagaaacacagtacccgaaaaccttcttctataaagaagaccttcatccaggcaaaacaatgaaagtacaattcagcaagcctccctttcaacaaccatggggtgttggtacatggctcaaggaaattaaagacactactaaagaaggatatagttttgaagagctatgcatc

SEQ ID NO: 206328 - DNA, 391 bp, Glycine max
  unsure (1)..(391): unsure at all n locations
gaaacagctgtgcagtatcttctgcgtctccatccagatcaggagggacttagcaagcaggaggctgtccgtgcaaaacttggtcagtttgggctaccaagacataaccatcttactcctattgccaaactatcaggagggcagaaagctcgggtggtcttcacatctatcttcatgtcaaatccacacattttattgttagatgaacccaccaatcatctggacatgcacagtattgatgcattggccgatgcactggatgaattcaccggnggagttgctcttgttagtcatgattcaagattgaaatcacgtgtatgtgaggatgaagaagggagtcaatctggggttgtcgaagagggcactgtcaaaaatttcccatgaacatttg

SEQ ID NO: 206329 - DNA, 406 bp, Glycine max
gtcaaactgttgagaacttcatttgagataagaggataagggcgcctatactgtctattctggggatgagccaagagcctggaactaaattgtatacaatagaccaccacctaatgcctacgtggttcaactgagcttgatactctctgggagggaaagattggtaaaactcttgagagaatctatgttccaggagacacgactcctgaagcagatcgaagagtccgcaccagccgagaatgtgagcctgtcaattaaccacccttcttatcgtgcgggggatcatacatactatgctattgcatcttctttgggagggagagcatcagctgtgtctgctgatgtggaatacatgactgaggatgagctccccatggaccatgactaaagtgcatcgtcctactga

SEQ ID NO: 206330 - DNA, 491 bp, Glycine max
gatttacagagacacctctcactacaactgctgtactacactatgcaactctttttcctctgcattgggacccgtgcctgctccccctgttgataaatatgactttgactggtccatgaagcaagctaaaaacctacagatggaatctgacagcaaatgctgctaggcctaacccacaagggtcattccattatgggaagattactcctacaaaagtaattaagttggccaattcagcacctttgatcaatggaaagctccgttatgctgttaacagtgtctcctatgttaaccctgacacccctctcaagcttgctgattactttaacattcccggaatcttgagtgtgaatttactccaaaactctgcctcaaatggtccaggatacataggcacctcagtgttgcaaacttctctccatgattgtattgaggttattttccagaacaacgaaaacaccatgcaatcttggcatcttgatggttatgat

SEQ ID NO: 206331 - DNA, 450 bp, Glycine max
  unsure (1)..(450): unsure at all n locations
atcacatcttatccagacaaaacaactgttatggataggtatcagagggtagagaagcccaaggcagagagccctataaacgagaacgagatacgcgttacttctcaaggaaggacgaggaattacatcacctacgccaccactctccttcaggagaaaggatctagtgaaattgttctcaaagcaatgggacgtgcaataaataagactgtaatgattgctgaactgatcaagagaaggattgttggtctgcatcaaaacacccaaattggatcaactgatataactgacacatgggaaccactagaagaaggccttctttctttggagactactcgccatgtntcaatgatcacaattaccttgtcaaagaaagaattggatacgtcatccacaggataccaaccttctctttcagttgatcaagtagaaccttaatgaatatgatga

SEQ ID NO: 206332 - DNA, 448 bp, Glycine max
caataaagaatagtttgtaacttcggaaaaagagaatctagtttattttcttacatagaatcctcatatatgtgtgaataacacatacattttttctatagatacattcgaaatctttgattagtgctcgagccggatgatgaaaaattatcatatccggttctttcggaggatggatctataagaattcacctatcccaataacaaaaaaacctgacttgaatgatcctgtattaagagctaaattggctaagggaatgggtcataattattatggagaacctgcatggcccaacgatcttttatatatttttccagtagtaattctaggtactattgcctgtaacgtaggcttagcggttctagaaccatccatgattggggaacccgcggatccatttgcaactcctttggaaatattacccgaatggtatttctttcccgtatt

SEQ ID NO: 206333 - DNA, 577 bp, Glycine max
cggctcgagagatgatgagatgcatccgcagtgcttcttaacatatattatttgaattttgattatgttttcttgagtttaaatcttgtctatcaataattgaaatcatcttaagtattaattttcaaatgattattacaaaataaaaattcttattaacaatcaccatataattcttccattacgcactctaagtctctaattaaattctattaaagagttatacagtcacgaaacttgtgctgttttttttgacaaacaacttatttgttagttgctgcccaaaatcttcagtagcagtagtactgggtgaattctactttataaccctgaaaaaatgaaggagctaagtacatcatcatgatgttaaagttagttgatggtgttgtgtaattggagaaataacgaggcagtgtcccatttaatttcaggaaaaaattccagtagaggaagtgtttgagtcgctgaaatgttcaagagcacgtttaacatcagacgaaggagccagtcggcttcaagtttttggaccatacaaattggaagagaaaaaggagagccaacttttgagtttctgggt

SEQ ID NO: 206334 - DNA, 599 bp, Glycine max
gagccttaaagtgacctagatatcattaacattctcaaaacaagacgaaaagtaaatcctatcaaccacgttatttggtatggaatagaagagtaaaccattcagattttgactgacaaaaggaccttcatcctaatctaaagacggattaacttaggtcttcattacatttgttgttcttgttcttggataagcaccaaagtgtgttctgcttgaaggttgtccaaattccttaaactgtataatgctgttggattgtatcaatgtcaagtcccttcagcttcactactgattcaacatgtcctttcagagtatgaagctccctgagccttgcaacctcggcacgtctcttagcttgctcagcaatctctgaaagctccctgtaactgttcttgtcattgaaaaggttggttgtttcaggtggctgaagaccatgaagagtcctctgagcagttgcccactgtgcttctctctcttctttgccatagtctttctttgtagtgaaggcagtcttgttctccaaaagattatcccaagccttcccacttcagacgtatcggattgcaaattgagatatcaagagggattatgtgactaac

SEQ ID NO: 206335 - DNA, 575 bp, Glycine max
  unsure (1)..(575): unsure at all n locations
tttctctctcgatacaaaaatacatagaaatggcctcttctcttgcatcctcatcaactgttctctggatcctttttctaaccattgcaactcttcatttgagttcagccaggaagttgtccgggtcagacccgcagttgcagtttcaataccacagaggccctctcctcaaaggcaaaatctcagtaaacctcatttggtacggtaaattcaaaccttctcaaaaagccatcgttgctgatttcatcacctcgctctcctctcccaaacccgtcaccgcccaaccatccgttgccacgtggtggaaagccaccgataaatactacaaaaactcgtcccccaaactcgctctttccctcggcaccacccaaatcctggacgagaattactccttaggcaaatcgcttacgaataaccaaatcttaaaacttgcatccaagggtccacagagaaacgctatcaacattgttctcacttctgctgacgtggcagtggaggggttctgttcagtaggtgcggaacacacggatcctncgtggnggcgcgcgtgaacggaaagagatacaagttggcgt

SEQ ID NO: 206336 - DNA, 501 bp, Glycine max
ccaataaagagcttttattacgaatattattggtgtaaccaacgtcgttacaacattacttctaacactataattttgttttcaagctataacaaaaagaatgaagaaatgaaagaatctctggtattgcctaacaagtaacaactaagcatggatgaaaactagtttgagtggtagttttacacgagtgtggagcaagctgaggtttcagggtcaacaagagctggcaacagatacttccttccgttgactccattagcgttgtagctggcaccagtggtggggtcaagcaagaggttccctgcatagccagggtacgcgcccttaccatacaccccagtgcaagccgaacctgcttccaacggagcctctttgggtccttgaaagtaaccatttccaaaagggttagtgacagtgccagcaaggagactagccacattgatcagcatgccgtcaagtcccacatcgttgttgggtgcaaccaaaggtggattctgggga

SEQ ID NO: 206337 - DNA, 545 bp, Glycine max
atccaatcccactggaaaggttaccttgtacgtaaagagtcaaaagaacagttattggatttgcgtttgaggatgcagaagtctgctagaaatgtggatgacagcaagcgtctcataaacagactcttggcagcgctttcagagctacttaatatgaagagtcttagtaacatccttcatacttgttcaacattggatatggctacaggacattctaagaaatgttgtgaagaacttgtggctgcaggggctatcaacaccttgttgcagctaattcaaacagtcagccggagtatacctgaccaggaggttctaaagcatgctttgtcaactctccgaaatctcgctcgctatcctcatctactacaagtgttgatccagagtcgtagttctgttcagataattgtcttggagttattgaggaataaaaatgaaggctatttcgttgcttctgaacttttgaagaagatatgttcaactcgggtaggccttgagacaatattcaagtcccctgccctgctaaaacgattgcacagtcttgttga

SEQ ID NO: 206338 - DNA, 578 bp, Glycine max
cgatcaaacacaaaatggaaaagaatgtggggattctcgccattgacatctacttccctcccgcttgcgttcagcaggaagcattggagactcatgatggtgccagtaaagggaagtataccattggacttggccaagactgcatgtcattctgtaccgaagtagaagatgtcatctcaatgagtttgacagtggttacttctcttcttgagaagtatgggattgatcctaaacaaatcggtcgtctggaagttggaagcgagaccgtgatagacaaaagcaaatccatcaagacattcctgatgcagatcttcgagaaatatggaaatactgacattgagggtgttgattcaactaatgcatgctatggaggaactgctgctctgtttaattgtgtcaattgggtggagagcaattcatgggatggacgctatggacttgttgtctgcactgacagtgcagtctatgctgaaggacctgcccgacctactggaggagctgctgctattgccatgctaattggtcctgatgctcccatttcttttgaaagcaaattgagaggaagtcatatgtctcat

SEQ ID NO: 206339 - DNA, 467 bp, Glycine max
ttgtggtctgttcttttttttttttttttttttttttttttttttttttttttttttttgggactcatgtggtacatttttctatctacctcttaaaaattagaaaaaaaaacaagcgcaaccgaaagcaacaagggaagccccgaaaaaaaaccaacggaaaaaagggccaaaaaaacaaccagggagacgaaaaaagggcacacaagggggcaacaacccggggaaaaaagaaacaagaaagcaaggagcaaaaacaaaaaggcgcccgggagcggagaaggcggggggggccaggggggagcacaagcgccaggggcgggcgaaaaacaaaaaaccggacgggacgggcaccaacgggggccccggcccccccaaaacggaggacgcccatacggagggaaaaacccccgcccccgggggcaagggggggaacaccccggcgaagggcccccccccgggggggg

SEQ ID NO: 206340 - DNA, 578 bp, Glycine max
  unsure (1)..(578): unsure at all n locations
ctatccccttcttctctctcaatcagaatgggaagtgctggaagaactgattatggggcatacacctatgagaatcttgagagagagccttactggccatcagagaagcttaagatttccatcaccggtgctgggggttttatcgcatcacacatagctcggcgcctcaagacagaggggcattacgttattgcttcggattggaagaaaaatgagcacatgactgagaacatgttctgtgatgaattccatcttgttgatctcagggtcatggataactgcctcaaggttacaaagggggttgatcatgttttcaatcttgctgcagacatgggtgggatgggttttattcagtctaaccactctgtcattatgtacaacaacacaatgattagcttcaacatgattgaggctgccaggattaacggcattaagaggtttttttatgcctctagtgcttgtatctaccctgaatttaaacagttggaaactaatgtgagcttgaaggagttcgatgcatggccagctgagcctcaagatgcatatgggctatagaaactngcaacagaggaattatg

SEQ ID NO: 206341 - DNA, 451 bp, Glycine max
gtcagtggactcatcaggatcctcatcagcaatcctacggatcatatcaagggctttcctaataagtttcttcttgattgtctttagactactatgttgctgaagcatttctcgcgatacattaagtggcaatgtgtcagaatcaacaagacccagcaaaaagtttaggtacttaggcaacagttcattaaattcatctgaaatgaacacacgtctaacatacaacttcaggttggatttgtttgcgttataatagctctcgtataaatcttgaggtgccttaggtggtacaaacaggactgccttgaactcgacatcgccctcagcagtgaaatgactccatgctaaaggtttctcatcactgaaatccttggcaagagagtggtagaacttggtgtattcttcttctgtaaccttctttggattcctcagccatatagctttcacatca

SEQ ID NO: 206342 - DNA, 623 bp, Glycine max
gcggcgaacaggttctcccttcggccaccaccgtcgccgccgccggctatcccaacgtctctcctcctccgctcgctgatcctgtcggtgcttccgatctcgctgctgctgcctcggacgacgttgttgcggaacctgaaattcacgcgctgatttcagacgaagagcacgatcacgatcacgatcacgagcatgagcatgagcatgaccatgacctcgagcacgatcacgagcatgagcatgaccaccacgaggaccgcgatgatcacgccgccgtggcagctgtctccttggaagatctcaaactcaagatcattaagcaggtggagtattatttcagcgatgaaaatctgcccactgacaagtatctgttgggttttgtcaagaggaacaaggaagggtttgttcctgtatcagtaattgcttcttttagaaaaataaagaagctcacgcgagaccatgcatttattggtgctgcattgaaggagtcttcactgcttggtgttagtggtgacgggaaaaggttcaagccgctcaacccacttcgttcaatgaattagagatcataagtatatactgctttgtagagatttgccagagatcattcatggagacattcacaa

SEQ ID NO: 206343 - DNA, 569 bp, Glycine max
gcacagccaaactcaaagaagaaagaagaaaatccagcgaaagtaaaaccagcatccgaaaaagatgagcagcatcggaacaggttacgatctctccgtcaccactttctcccccgatggccgtgttttccagatcgagtatgctgccaaagccgtcgataacagcgggactgttattgggatcaagtgcaaagatggggttgtgttgggcgttgagaagcttattccgtcgaaaatgatgcttccgggttccaatagaagaatacactccgttcatcgtcactctgggatggctgtagcaggattagcagctgatggcaggcaaattgttgctagggccaagtctgaagcaactaactatgacagtgtatatggcgaaccaattcctgttaaggaacttgctgaccgtgtggctagttatgtgcacctctgtacgctatattggtggctcagaccttttggatgtggtgtcatactaggaggttatgacagggatgaaccacagttgtacatggtcgaaccttttggtggttcctatagatatatcggtgctgcaattggcagggcag

SEQ ID NO: 206344 - DNA, 597 bp, Glycine max
caataaaggtcagcttctatagaacttcaaaacaattgtccaagaaacaggaaatcaataagggcattaaatcatcaagaagaatacaatatccaactatcgaagccttgtgtttcctatagatgtttcaaatgctcaattacaaagttatgaaatacaactttgaaataaacatttctagtccattaatctgcatccatttcttcaagagctgctttggccgctgcctttgctaattcaagaagctcatctggtaccttctcatgttggcggtttgattcatcacacacccagctcatttctaattcgaaatctttgtccttggcctcgtcatgaactccatatataattttagccacttcaataagcccttgtcgacatgtcatatcagcaagctttaacttttcaatctctgttttagcagcctgcctgcccttgccaattgcagcaccgaaatatctataagaaacaccagaaggttcgaccatgtacaactgtggttcatccctgtcataacctcctagtatgacaccacatccaaaaggtctgagccaccaatatagcgtacagaggtgcacataactagccacacggtca

SEQ ID NO: 206345 - DNA, 512 bp, Glycine max
cgtgtagcggagtactaggccgccgttacacgctactgctgtccgtcgtcaccgtttgaattacccaccgctactttgtcgtcattcttcttcttcttcccttttcattgaccttttccttccttcgtcctccaatggcgactgttccgcacccattatccctcgcaagtgtaggttttgctaaccgaacctcctccatctccagatccactctcaaatgctgcgctcaatctccttctccttcactagttgacaacgcccagaagtttctcgaagcttccaagaaggggaacgtcattcctctcttccgctgcatattttccgatcacctcactccggtgcttgcgtaccggtgcctggttaaggaggacgagagagatgctccgagttttctctttgaatcggtcgagccaggccaaatttctagcatcggacggtacagtgtggttggagcacagccgtgtatggaaattgtggcgaaagagaacgtggttactattatggaccacgtg

SEQ ID NO: 206346 - DNA, 490 bp, Glycine max
atcattaaataccttattatgttcatcacttctgtcataacattatcaaagtttcagattctccgtaattcatatcccctatcatctgcccacaccacaaacttcctctctaccatttaaaaaggatgcacacctcagttatcaaggagcatcactgatgatggatcaatccaaattatttatcaacaaatgaagattctgcaagatcaatggcacgagcaagagctgcagctttgttctcgcactctctttgttcatcagcaggatcactgtcagccacaattcccgctccagcctggagatgggcaacccattctctgcgtttgttcttatccttgtaggagtacattgtgtcataacgagcatttgtagggaaaactatggtcctcagagcaagggctatgtccatatcgccattgaatgatatacctccaaatcccccactatagggcccccttcttgcgacttccaactcatcaatcaactgcat

SEQ ID NO: 206347 - DNA, 567 bp, Glycine max
cctcgcagttccttgatctctcctctcaagatgcagatattcgtgaaaactttgaccggcaagaccatcacccttgaggtggaatcctccgacaccattgacaacgtaaaagctaagattcaagacaaggaagggatcccacctgaccagcagagacttatctttgcgggtaaacaacttgaggatggtcgcacccttgccgattacaacatccaaaaggaatcaaccctccatctcgtgcttcgcctcaggggtggcatgcaaatctttgtcaagactttgaccgggaagaccatcacccttgaggtggaatcctcggacaccattgataatgttaaggccaagatccaggacaaagagggcatccctccagatcagcagaggctgattttcgctggtaaacaacttgaggatggaagaacccttgctgattacaacattcagaaggaatccacccttcacttggtgcttcgtttgagaggtggcatgcagattttcgtcagactttgacaggaaagaccatcaccttgtagggtgaaagttctgatacatttgataatgtgaaag

SEQ ID NO: 206348 - DNA, 474 bp, Glycine max
gtgagatgataatggttttttattcttttgcacgagaccgtgcatagcaagctatgtcacagacatagccttaaaactaaaaacattaaagcagcacctaaataacagctgcaaccaacgagttcaacatacactggacataacaacagagaattcaactaatattggacataacagacagactcagaaaccaccacgaaggcggaggacaagatgcagggtggattccttctgaatattgtaatccgccaaggtacgaccatcttccaattgcttcccagcaaaaataagcctctgctgatctggtggaataccctccttgtcctgaatctttgctttcacattatcaatggtatcagagctttccacctccaaggttacggtcttccctgtcagagtcttcacaaatatttgcataccaccacgaagcctcaacaccaaatgcagagtggattccttctggatattataatc

SEQ ID NO: 206349 - DNA, 593 bp, Glycine max
gaaaaacgttgtcgttaccatctcttcggacaaaggtctttgtggtggaatcaattccacgtctgtcaagataagcagggttttgaacaaattgaattctgggcctgataaagagacaaaatatgtcatattgggagagaaggctaaggctcaattgttgcgtgactcaaagaaacaaattgcgctcagccttactgaattgcagaaaaatcccctgaactacactcaggtgtctgtcttggcagatgacattctaaagaatgtggagtatgacgcattaaggattgttttcaacaaatttcattctgttgtacaatttttgccaacagttgcaactgtactgtctcctgaggttattgagagagaggctgaatcaggaggaaagcttggggaattggattcatatgagattgaaggtggcgagacaaaagctgaaattcttcagaatctggctgagttccagttttcttgtgtcatgtacaatgctgtgttggagaatgcttgtagtgagcaaagagcaagaatgtctgcaatggacagctttagcaggaatgctggggatatgcttgatcgtctaccctcacctataacag

SEQ ID NO: 206350 - DNA, 515 bp, Glycine max
  unsure (1)..(515): unsure at all n locations
attaaaattagaaaaatcttattatgagtcatttcaaaaaaagacagactccatcttcaactgcaaaaacacaattccagaaatatctagtctcaaccaagaaatccccacaatgggtttgaccttggaacacttattacagaagtcaagtaagattaaaaaaatgacaccaacaaatttcaaaagaatccaacgatattatcttaatatcgcgccactgttgaatatattacacagattgctctcctgtaattaaccttccagtgctgaagctccagagataatctctatcaattcagtggtgattgatgcttgacgagttctgttataggtgagggtgagacgatcaagcatatccccagcattcctgctagagctgtccattgcagacattcttgctccctgctcactacaagcattctccaacacagcattgtacatgacacangaaaactggaactcagccagattctgaagaattcagcttttgtctgccaccttcaatctatatgaat

SEQ ID NO: 206351 - DNA, 491 bp, Glycine max
catctagctagctagctagctagcaaatagcaatgttaaaaaaccaaccacaaccagattggcctgagcccattgtccgggttcagtccttatccgaaaactgcgaagattcaatccctgaaaggtacatcaagccttctactgatagaccatccataaaaagttgtaattttgatgatgccaatattccaatcatcgaccttgggggactatttggtgctgaccaacatgtctcagcctcaattcttaagcaaatctcagatgcttgcaaagaatggggcttcttccaagtcactaatcatggtgtcaaccctgatttgatggacaaggtcagggaaacttggcgtgaattctatcacatgcccatggaggtgaagcagcaatatgcaaactcgccaaaaacctatgaaggctactggagcagacttggaattgagaaaggtgctattcttgatcggagtgattactactttcttcactatcttcccttt

SEQ ID NO: 206352 - DNA, 511 bp, Glycine max
  unsure (1)..(511): unsure at all n locations
aagtatccaatcaccattacatatccttactctgtggctcaatgcgcaaacaaatcccgatttagttacaggatttacaattaattatacatcaataaggtatagcgtgcttgtaaactcttgagaagtaagaaaatacaattcagacataaaaatcatatataactattaatttcttaaaattacatccaaacatgttgtataaatgtgaaaccaatcacgataatagtgacttactatttgatggacataaaatgtaagcaataaaagcctatgagagaatggatcatctgggagactttaaagattcaatttgagatttgcctcgaggtcctctcattctaatgaagagtctgtattcatcgaaggtcattgctgggtagagtgagggccttttcggtgttacaagctcttttattggttctatgggtatgtcacttttggggttgtagaaaaacgcaagagagactctctctttatctgaatntactatcactctgtgctccacact

SEQ ID NO: 206353 - DNA, 535 bp, Glycine max
caagtttgtgttgtgttgtgtgtgcatgaaaggttgaaccccattttccattgacaattgaactgatggcgagcgccatgttaggggatgctaccacgagctttgaagatggtaagttggcgtctatgaccaccgatgacgtcgtcagagcctctcgtattctcgaaaacgatattcgcattctcaaggaagaggtgcagagatcgaatcgggaatgggaatcgtacaaggagaagatacaagataatgaggagaaagttaaacttaataagcaattgccctacctcgttggtaacattgttgagatattggaaataaatccagaagatgaagcagaagaagatggttccaacattgatcttgactcccaaaggaaaggaaaatgtgttgtgctaaagacatctactcgacagacaatctttcttcctgttgttgggcttgttgaccctgccaagttaaaacctggtgatctggttggtgttaacaaagatagttacttaatcttggatgccctgccttctgagtatgattcacg

SEQ ID NO: 206354 - DNA, 559 bp, Glycine max
ccctggcatcatattccgctctgacaatgagccctacaagtttcacatgaaagccttcgtgtctaagattatacagatgatgaaggatgagaagctctttgctccccaaggaggtcccatcatcttggctcaaattgagaacgagtacaatcatatccaacttgcatacgaagagaagggagacagttacgtccaatgggctgccaatatggccgtggccaccgatattggtgttccatggctcatgtgcaagcagagggatgcccctgatcccgtcatcaacgcatgcaatggtagacactgtggtgataccttcgcagggccaaacaaaccatacaaaccagccatatggaccgagaattggactgctcagtacagagtacatggagatccaccatcccagagatccgcagaagacatcgcattctcagttgcccgtttcttctccaagaatggaaatttggtcaactactatatgtaccatggtggaacaaactttggcagaacaagctctgtgtttagcacaacccgtattacgatgaggcacctcttgatgaat

SEQ ID NO: 206355 - DNA, 533 bp, Glycine max
aaataaacgctgtaattttgatatattgatttaaaaggatgtaggcattgaattgaagtatgatggtacaaaaatccaatgacatgttgagctcctggactcttctacttggccaagttaaaccacgaaacaagacctaagcacacctcacttggactgcaagttgcttcaccaaatctgggcaagcatccacgccattgttgttgaacaccgcacggtccaatgcaagcgtgcaagcttcttgccctaagcattctcgctccacgatttgcttgctggcagcagcattgcagcttcccattgcaaagtctccgcaataaccactggggtttccaaagcttgcgaactccactgccactatccttttcccagttgcacacgccatcgaagctgctgctccaactgatttcactacaggatggaaattgcccctcctagacacccatgaattcacgttcgcagggtccctctctccaactacgctgcagattgtgtctctgttcacatttaggatctcaacctgtgctggaact

SEQ ID NO: 206356 - DNA, 607 bp, Glycine max
tttggttggtaacatatagctacctttctcacgaacaaattttgactcactgaggtttgttatttttatttcttctttccatctccatggggaattgcttgttcagctcgtacgaaacgacgacgacgacggtgaaggttgtagttcacgacgggaggatggaggagttctcatacccggtgaaggtgtcgtatctgctgcagctctatccggcgtgtttcatatgcgactccgacgagatgggattcgacgacgtcgtaacggcggttcacgaggacgaggagttgaggcccggtcaactctacttcgcgctcccgttgagccgcctcaagcgtcacctcccgccgcaggagatggccgctctcgccgtcgtcgacacctccgcgctcgccaaatgcggctcccgccggaagcagattgtgtttctctcctgctgcgatgtaaatacgaagcctggccggaaagttgcgccggaaggtacggtctgtaataatgacgtggcgaggaaaggaaggagtaaaattggaggtaggggtatgggcaagttcactgctacgttgagttccatacccggaacaagggtagttttggcaagagatacaaatat

SEQ ID NO: 206357 - DNA, 555 bp, Glycine max
  unsure (1)..(555): unsure at all n locations
aatcaaacgcgtatacttcaattcaattgttgttctaaacttttaatgaaacagatctacaatgttcaaaaattaatatatatttttcctcttttttattttttaatatatacaaccatacaaaaaattaccagcgaacacatatttttatctctttccaaaactacccttgttccggtatggaactcaacgtagccgtgaacttgcccatacccctacctccaattttactccttcctttcctcgccacgtcattattaccgaccgtaccttccggcgcaactttccggccaggcttcgtatttacatcgcaggaggagagaaacacaatctgcttccggcgggagccgcatttggcgagcgcggaggtggcgacgacggcgagagcggccatctcctgcggcggtaggtgacgcttgaggcggctcaacgggagcgcgaagtatagttgaccgggcctcaactcctcgtcctcgtgaaccgtcgttacgacgtcgtcgaatcccatctcgatcgagtcgcatatganaacacgccgatagagctgcagcagat

SEQ ID NO: 206358 - DNA, 576 bp, Glycine max
  unsure (1)..(576): unsure at all n locations
gagaagaacagagagagatccatccatcaattccaatggccgatcagctcaccgacgaacagatctccgagttcaaggaagccttcagcctcttcgacaaggacggggatggttgtattaccaccaaggaacttgggaccgtgatgcggtcacttggccagaacccaactgaggcagagctgcaggacatgataaatgaggttgatgctgatgggaatggtaccattgatttcccagaattcctgaatctcatggctcgcaagatgaaagacactgattcagaggaggagctgaaggaggctttccgcgtgtttgacaaggatcagaatggcttcatctctgcagcggagctccgccatgtgatgaccaatctcggtgagaagctgaccgacgaggaagtcgatgagatgattcgcgaggctgacgttgatggtgatggtcagatcaactatgaggagtttgtcaaagtcatgatggccaagtgaggaccaatcaaccataacaaataaaaattgaaaaacacctgaacagaaaaaagacagggcagataagctttgatgagaattatatnttcat

SEQ ID NO: 206359 - DNA, 589 bp, Glycine max
  unsure (1)..(589): unsure at all n locations
aaaagcacaaattgcaaccaattgttccaggttcatagtagtaacccaaaaaagatgaaaagtgaagtacaaatgcatggtgagacacatctaatccaagctactaaaacaaggacagagcaaacaagtagaaaatactaatgagcaataccaataaataaaagcaaacaaagccgaccaacaaaaactaatgaccccaaatgaagattgtcctaatgaaaatataattctcatcaaaacttatctgccctgtcttttttctgttcaggtgtttttcaatttttttttgttatggttgattggtcctcacttggccatcatgactttgacaaactcctcatagttgatctgaccatcaccatcaacgtcagcctcgcgaatcatctcatcgacttcctcgtcggtcagcttctcaccgagattggtcatcacatggcggagctccgctgcagagatgaagccattctgatccttgtcaaacacgcggaaagcctncttcagctcctnctctgaatcagtgtctntcatcttgcgagccatgagattcaggaattctgggaaatcaatggtaccattccatcagcatcaa

SEQ ID NO: 206360 - DNA, 568 bp, Glycine max
ctctagagtaattgcggaatcagctagaattttctaataatggccaaagacgttgagcaggttacagagcaaggtgaatactccgcgaaggattaccatgacccacctccggcgccgttgatcgacccagatgagctcactaagtggtccttgtacagagccgccatagctgagttcatagcaacactccttttcctttacatcaccgtgttgaccattattggctacaagagacagagtgacaccaaaatccccggtaacaccgagtgcgacggcgttggcattttgggcatcgcttgggccttcggtggcatgatcttcatccttgtttactgcaccgtcggcatctctgggggacacatcaaccctgcggtgacattcgggttgttcctgggacgcaaggtgtctttggtgagggcgttgttgtacatgatagcacagtgcgccggtgcaatctgcggtgctgggttggccaaagggttccagaaatcgtactacaacaggtacggaggtggagttaacactgttagcgatggctacaacaaaggtacccgttttgggagctgag

SEQ ID NO: 206361 - DNA, 434 bp, Glycine max
ggctaatgatccaccacattatataaaaagtgaacacatgatgataaatactggaagaaagaaagaaattaaataaaaaaaaaaaacaaaacaaaagggatacaaatacacccttgacataaaagcattcttatctacaaattcaagagccccaaacccacggtatttggcttttgccccaaacccacgggtaagcagaaaagccaaaaaggaaggaactccaagaattgaactgaaacactgttattgttttgggtgacacaggacaaatgatcataatttaggtagtggagattattaattaagggttgctcctgaatgatccaagagctttgattgcagcagctctaagaatgtattgatggtagaatgcagccaccgtagctccaacaaacggtccaacccagtaaatccattggtcgtcccaggctttg

SEQ ID NO: 206362 - DNA, 521 bp, Glycine max
acaaattacactctttgcctcgcaccttcaacttaaccttttctactcataatcttaacaacttgctagaagaagataaagaaagagaaaaagtgtgtgtgtgtgagagagagcaatggctggctcgtgggcacgccgttctctgattgttctggctatcatttccttcggatgtttatttgcaatttccattgctaaggaggaagccacaaaattggggacggtcatcgggattgatcttggaacgacctattcatgtgttggtgtttacaagaacggccatgttgaaatcatagccaatgatcaaggtaaccgtatcaccccatcgtgggttgctttcaccgacagtgagagactaattggagaggctgccaagaatctggcagctgtcaacccagaaaggaccatctttgatgtcaagagacttattggaagaaagttcgaagataaggaagttcaaagagatatgaagcttgttccttataagatcgtcaacaaggatggaaaaccttacatacaag

SEQ ID NO: 206363 - DNA, 452 bp, Glycine max
acagctgaagaagtttcgtcgtaaaactaagcaaaaaagtaaagtacaagtaatttcacaaagtatcttatcatcgccaccaaaaaagcaagcgcaggggacttcttaattcccagctatcataaaaatttaacagactccgactaatctagagctcatcgtgagaatcgtcctcgtcttcttcgcctgatgcaccaccaccgcctggggctcctccagatctctgatacacagcactaatgattgggttgcaaacggcttcaacctccttcagcttctcttcataatcttctttctccatactctggttgtcatccagccattccagtgcttctttcacagcagtctcaattttctccttttcatcagactccaacttgtcagcgagcttgtccttgtcactgatctggttcttcatgttgtatacataggtttcaagactgttgcgagca

SEQ ID NO: 206364 - DNA, 573 bp, Glycine max
attgattcgttgtctgacacgtaattagtgtttagatatactactgatcatgtggttgctgatattgccttacaggcctatgtgcagcagttagaatcaagtcgtttgaagttgatgcagttggagcaagaacttgaacgtgcaagacagcagggaatgtatataggtggtgggttggattctaatcatctgggttttgctggatcagtaaattcaggaattacaacctttgagatggagtatggacactgggtgaatgagcaaaatagacaaatcacagaactgagaaatgctttaaatgctcatattggtgacgtagagctcaggattttagtagatggtatgatgagccactatgccgaaatgtttcgcatgaaatctgctgctgcaaaagcagatgttttctatgttatgtccggtatgtggaaaacaacagctgaaagatctttcctgtggattggaggctttcacccctcggagcttctaaaggttcttggtcccctgattgaacccctgacggagcaacagccgttgaatatctataacctttgacaatcatgtcagcaagcagaa

SEQ ID NO: 206365 - DNA, 399 bp, Glycine max
ggaacctaaatttactttcgttgcagtttattataattactacattattacataatcccctctgccaataataacactccatgttctaacagcgccatgctgacgtggcaacaatggccctatcatgccagaaaagcaccagttcgttctggcgttttgccacgtgaaatcctctgatttgagacttcgctaacaggcactctgcttgaaaaaccggaaactggcttaactggaccgggcttattccggcgccgtaaaacgccttccttcacgggggaacccggcggcacgcactcttcaccggcggcaaaatcttcggccgcagctgcatcatctcgattctcctcacccactcccctccggcttccaccgtcgacgcgtccagcgactccagcatca

SEQ ID NO: 206366 - DNA, 352 bp, Glycine max
cttttctcttatcatggcttctcacaacatcaaaatccacgaccacttaagggtttcccctccctcagcaacagaaatatccctctctctcactttcttcgacctgttctggctcaggttccaccccgtggaacgcatcttcttctacaccctccctacaccccattcaaatccatccattttctattccaaacttgttccaaagctcaaaacatctctctctcgcactctccaacacttcccccctctcgccggcaacgtcgtttggcctgataacaccccaaacccaaccgtccaatacacccaaggggactccgtttcacttgtggttgctgaatccgaagctgatttc

SEQ ID NO: 206367 - DNA, 515 bp, Glycine max
  unsure (1)..(515): unsure at all n locations
cgtcaatatgcatgttccgaatttatgatcaatcatctaacattccttgacgaaacaaagtacaaaagagatccatgacatgtttcttcagcacgagcccaacttgaacaccatcattcccatccttgctctctgcaaacccaatggttaaggctctatccaccgatgctatctccaccttagcaggctttccccaaccaaaatcagttccataaactccaaaccggttagaccctgcaattcccatgatttcaactccgtcttttcccaaagactcatatctagaaaacgcactttccatcccatgaaaaatcccctcatctaatatcatctttattttactatgaatactctttgcaacaatagcaaaagcttcttcctttatgaagtccaatggttcagcatccaccacatgcccccacacacaattgccaaaataattatcatggattggaggctccaacctngccctgcaatccactgtgaacgcaaaagcaaatttctctttctctttt

SEQ ID NO: 206368 - DNA, 536 bp, Glycine max
  unsure (1)..(536): unsure at all n locations
atttattttatcctggatgggcatggtctttggccacttggattcttggtgtaccttattcccttgttgaagctgttatatggtcttgtgttgtatactacactgttggatttgcccctgctcctggaagatttttccgctacatgcttttgctatttatgcttcaccaaatggcattaggtctcttccggtttatggctgctcttgcacgcgatatggtcattgctaatacatttggaacagctgcattgatgattatcttcttgctgggaggatttattatcccaaaaggtatgattaagccatggtggatttggggttactggttgtcacctcttacctatggtcaaagagcaatttcagtcaatgaatttactgccacaagatggatgcagcattcggcttttgggagcaacacagttggccttaatattctcaagggattcgatataccagctgaggattactggtattgggttggtttgggagntttaacactctacgctcttattttcaactgcttggtcactttgggc

SEQ ID NO: 206369 - DNA, 513 bp, Glycine max
gacagcaacactgatgacattccattaattttagtgtcatattcaagagtagcagctatgaattctttcacattgcctttaaatccaggtcccacgagcatttcttccacatcaccaagttgagatgtgataataccacgtagtgtccaagaaactgggcagagataatggaaccacatccaccatacaggtatatgagattttggaataagaaatccggatacaagattccatagagagtaaaatgcagaagaaataacagctgcaaagtgttgtgtaggtgtaatgccaacagccatcatgccgtaaaaggtgaagtacataaatgtgaggaacatgaacacaagatagaggaaaaactttccaacatccctttcaaaattgaccatgaaatatgtgattacaccaaatactattgtctgaagagcaacatatgggatctccaccagcccctgagctattgcgtatgagattggagagtacattccagcagccttctctctataaaacact

SEQ ID NO: 206370 - DNA, 571 bp, Glycine max
gtctgattttgttatcacttgcttctgcttccttcgccgccaacccaagaacaccaattgatgtgccatttggcagaaactatgtgcctacttgggcctttgatcacatcaaatacctcaatggtggttctgagattcagcttcatcttgataagtacactggtactggcttccaatccaaaggatcctacctgtttggtcacttcagcatgtacataaaattggttcctggtgattcagctggcacagtcactgctttctatttatcatccacaaactcagaacatgatgaaatagactttgagttcttgggaaacagaaccgggcaaccttacattttgcaaactaatgtgttcactggtggcaagggtgacagagaacaaagaatctacctttggtttgaccctacaagagaataccacagatactcagtgctatggaacatgtaccagattggtttctatgtggatgactacccaataagggtattcaagaacagcaatgacttgggagtgaagttccatttaaccaaccaatgaagatatacaacagtttgtggaatgctgatgac

SEQ ID NO: 206371 - DNA, 521 bp, Glycine max
aatatggccaccaccactacccagcctccctctaatatctgttttttccttctgttgttgcttctagcacactttcatttgggcataagccaacttgagctgaattactactctaaaagctgcccaaaagctgaagagatcatcaaggaacaagttacacaactatataacaagcatggaaacactgccgtttcgtgggtcagaaatctcttccacgattgcgtggttaagtcatgcgatgcatcattactgttagcgacggtgagcgatgtagtgtcggagcagacatcggatagaagttttgggatgagaaacttcaagtacgtaaacactatcaaagcagcggctgagaaagaatgccccttcacagggtcatgcgctgacattgatgctctttctgccagagatgccattgctttgttgggaggaccaagcattgaaatgaagacagggagaaaggacagcaaagaaagctatgcaatggacgtggatgacttgattcccaaccacaatgatccatg

SEQ ID NO: 206372 - DNA, 496 bp, Glycine max
caaaaaagaaaatgatgctcggagagcaccatcgcgcgaatccaacggttcacgtgccaccgtggccaacccacgacgatccaacggccgagatgtactccgcgtttttaacaaacgacgtcaatgctggtgagtactctccgtactatcttcaagaagcactaacggctctgcagcgttttctgccgtctaacgaaacggacgctgactcggacacggaggctcaacccgacgcggcggtggacgcgtactcgtgcgaccatttccgcatgtacgagttcaaggtccgtcgatgcgcacgtggcaggtcacacgactggacggagtgtccgtacgcgcatcccggcgagaaggctcgacgccgggacccgagaaagttccactactccggcgcggcgtgcccggagtttcgcaagggaaactgcaagaaaggcgacacgtgcgagttcgcgcacggcgttttcgagtgctggctccacccggcgcgctatcggac

SEQ ID NO: 206373 - DNA, 561 bp, Glycine max
  unsure (1)..(561): unsure at all n locations
ctttcaatctctttcccttcctttccttgtctttttatttttttacatcaaaattaaaataataacacccatcaaacaaaccacacttctccccctccctttgaaaacacctcaatcaatctcgatgatcatggcagcactcaattcaagcacttgtgccaaacctcaattccctcaccctctctcctcctctttctcttcttcttcatcattaacaagagatttgggcttccccacaaggtttcagaagaagcccattagaaaggtggtggattgtgctctacactcccccccagtgatccatttcccaaaccagccctacaacaaacctgaaattaccaaagaacccaccacctccaccgcggaaaggcctcagtggaacccattccaaaaagccgcagcaaaggccctcgacatgttcgagagcgcgttgctctcacgcgagctcaaccaaccctttcccaaaaccactgacccacgcgtncaaattgccggtaacttcgcccccgtccggaacaccccgtcgacaatctctccccgttattggcacaatccccgacg

SEQ ID NO: 206374 - DNA, 446 bp, Glycine max
gacaagagagtcaggaaggcaagattgaaaattgaagaaccaaaagccaaacagaaagcgaattcttttttaaaacaaaagaaaggaagcaagaaacagaaagcagctgagcttcatccacaaactacaagctgattcgcgaaagcatagataaatatttattattgagaagggtagaaaaggcaacaaaatgtttgttgtctgaaatgtgttttaccgtttaagcgaccaaataaaatagtccaggtggacttcaatgagcctccacaaacgtgccatggaagccatagggcactcttgaaggcagcatgacagtggcctccaacttcaaatcaagtgcattcagaatctgcaactcggactgccacgtcatctcgtcatgcacaaaagccatcacgtacccttcatcctcattcccattccctccacgtgttggcaagaagaat

SEQ ID NO: 206375 - DNA, 414 bp, Glycine max
tttatttttttttttttttttttttttttttttttttttttttttttttttttttttttttttttttttttttttttttttttatttaatatatattaaaaaaaaaaaaaaaagaaaaaaaaaaaaaaaaagaaaaaaaaaaaaaaagaaagaaaaaaaaagaaagaagaaaaaaaaaaaaaaaaaaaaaaaaaaaaaaaaaaaaaaaaaaaaaaaaaaaaaaaaaaaaaaaaaaaaaaaaaaaaagaagaaaaaaaaaaaaaaaaggggaaaaaaaaaaagaaaaagaaaaaggaaaagaaaaaaaaaaagcacaaaaaagagaaagaggaaaagaaaaaaaaaaagaaacaaggaggaaaaaaaaaaaaaaaaaaaaaatgcgaagacagaaaaaaaagagagcaagaaaaa

SEQ ID NO: 206376 - DNA, 520 bp, Glycine max
cttgcttttggtcaatctaaagccaagtttcaaatggagcccaatactggagtgacatttgatgatgttgctggagtggatgaagccaagcaggattttatggaggtggtggaatttcttaagaagcctgagaggttcactgctgttggggctcgcataccaaaaggtgttcttcttgttggtcctcctggaactgggaagacacttttagcaaaggctattgcaggtgaagcaggtgtcccatttttctcaatctcaggttctgagtttgtagagatgtttgttggtgttggagcttctcgagtccgcgatttattcaggaaggccaaagagaatgccccatgcattgtttttgttgatgaaattgatgctgttggaaggcaaagaggtactggaattggtggagggaatgatgaaagagaacagaccctcaatcacttttgacagaaatggatgggattgatgggtataccggattcattgtcattgcagctcctaacagggttgacattcttgaatc

SEQ ID NO: 206377 - DNA, 420 bp, Glycine max
aaagaagcaagctaggatcttttgtcattactaaaattaagagtcaagggtatattacaaatattttacaattttagaaaaattcagtatgtggagagctacactacattgcagtggcatataggctattcaaacaacaactggtgagggagttgaaggagggacccgattttcagcaggaatttcaacaaactcggacaggagagctcggaattcatctccagacattgtctccttctccaatagaactttcacaattttgtcaattgcctcacggttgctccttatttggctcaatgctatttcatatgcttcatctgagagtctcttgacagcagcatcaatgtcttcagcaagcttttctgacattgagtttcttgccatcattctcatgataacatcactttgagctgatgagtc

SEQ ID NO: 206378 - DNA, 329 bp, Glycine max
caaattcattttaatcctaattctgcacttcttgatcattcgatttttctcctcaagatgcagatattcgtaaaaactttgaccggcaagaccatcacccttgaggtggaatcctccgacaccattgacaacgtaaaagctaagattcaagacaaggaagggatcccacctgaccagcagagacttatctttgcgggtaaacaacttgaggatggtcgcacccttgccgattacaacatccaaaaggaatcaaccctccatcttgtgcttcgcctcaggggtggcatgcaaatctttgtcaagactttgaccgggaagaccattaccct

SEQ ID NO: 206379 - DNA, 421 bp, Glycine max
aataaaaaactatatatttgaagtaataatacgaaatatgaatttaactatgatacgatattgatatttaattcttttggcgaaacgagctcaatacatcatattaaaacataaaaagcagcacctaaaccagaacagcaaacaagttcaagggagaaattgaacataacagacatgacatacaagaacacttgaaaaaagacacgcttaaaacaagaacacttgaaaaaaaacacgcttaaaaaccaccgcgaaggcgaaggacgagatgcaaggtggattccttctgaatattgtaatctgccaaggtacgaccatcttccagttgcttcccagcaaaaataagcctctgctgatcaggtggaatgccctccttgtcctgaatctttgccttcacattatcaatggtatcagaactttc

SEQ ID NO: 206380 - DNA, 593 bp, Glycine max
gaggaactttgcaacaagcatggagacagcctcagactatggagcattcacagagaaattcactttaccaccaaattctgcaccagctcttcctctcaaatcactcacctttgcagtgaaagagatgtatgtacttcacttttctttttgtaccacaatattctgattgtcaaaaactctcctttgctgacatcaaagtcgtcaactagtctttgaatccatgcttctgcatcttgaacttgttttggaagtgtttgtgtcaaacagtttcgacacggaaggatacgtgaccggcttcgggaatcctgactgggcaaggactcatccggtggctacctctactgctccaacagctctggctctcctcagagcaggtgccacttgtgttggtaaaactgtcatggatgaaatggcttacagtataaatggagagaatatacattatggcacacctagaaatccttgtgcaccagaccgggttcctggaggatcttctagtggctctgctgttgcagatggtgcacagcttgtggatttctcattaggaactgatactggaggaaagtgtagagtacctgcatcatactgtggga

SEQ ID NO: 206381 - DNA, 654 bp, Glycine max
gacagtgtggaacaagaggttggaagtagcactgtgtggaaaatcgaggaatcaaaattagggttcaaaatctcattgaggagaaagaagaagaaggatgtggcacgaggcgagaaggtcggagaagaaggtccacgacatgatggacgcggctcggaagagagcgcaacgacgcgccgtttacctcgccaagagacgcggcgatcctcagcaatccattcagctcgtcggctttcctagccgaacctatcgcgacgacgctctctaccaagcctcacaggatcagcagggcctgataccttggaatgggaaacaggatgtattgatagaccgatttgatgggcgtgctctccttgatttcgttcgcgattctagtcacaggcgcgctccggagaagtctgaagaagaagaagagttagaagagtttgttaattttgagcgttatcgggatttaataaagcatcgccgtagaggattcactgatgaggaggctttggagcatgtaaatcaagagatggaggccaaggctgctgctccatttacatcagacagatctaatttgttgcagcctgctgcaagcaaggatcttactcgcaggtcaggttttctatgatgggaatggaaaagagaactcatattcagatgatgagatat

SEQ ID NO: 206382 - DNA, 480 bp, Glycine max
  unsure (1)..(480): unsure at all n locations
ttttctgctttcagctgctacatacatcacctaccccttctctgttcattgctcaattgtttccctcacaactcataacctctttcccatttaacctttgaaaaaattccatactgtaacaacagatcaccatggctctatcacgtttgtcccaccgcagcatcggatccactctcacaaaacccttctccgccgacgccgcctcctcccgttcgatctccacctcggacacccccttaacaatcgagacctctgtccccttcaccgcgcacaactgcgaccccccgtcacgcgcggtcgcgacctcctcctcggagctcctcaccttcttccgcgacatggccctgatgcggcgcatggagatcgccgctgactccctctacaaggccaagctcatccgcggcttttgccacctctacgacggncaggaggccgtcgccgtcggcatggatgccgtcatcactaaaaaggacttcatca

SEQ ID NO: 206383 - DNA, 478 bp, Glycine max
cgaagtgtgaagacagacacagtgagaatgatgaagcgtcggttccttttggttctcttggttctctatgtcacagtggagttctacgtagaagcagatggtagtggtgggtttgtgagaacaagaggagtgcagcttatgctgaatgggagcccctactatgctaatggctttaatgcctattggctaatgtatcttgcctctgatccttctcagagaaacaaagtctcatcagtgtttcaacaggcttcaaatcatggcctcaacattgccagaacttgggctttcagtgatggtggatatcaaccactacaatactctcctggatcttacaattaccaaatgtttcagggattggattttgcaatagccgaagcatgaaaatatgggatcaagatggtgttgagtttggtgaataactatgagaacatgggtgggaagaagcaatatgtggaatgggcaaagagtcaggggcagt

SEQ ID NO: 206384 - DNA, 542 bp, Glycine max
  unsure (1)..(542): unsure at all n locations
aggggcaggaaaaatcaaagccaaaaatcaagccatggattttattcatgaaatgggttggcttcttcacagaagccagttgaaattaaggatggtttctagtgtggatctctttccattgaaacggttcaagtggcttattgagttttccatggatcatgattggtgtgcagcagtgagaaaactgttgaacctactgtttgatggaactgtaaatacaggagatcatccttccttgtatcttgcgctttcagagatgggtctccttcacaaagctgtaaggagaaatagcaagcatttagtggagttgcttttgagatatgttcctgagaatatttctgataaactaggacctgaagagaaggcactggttgatggagagaatcagaccttcttgtttagacctgatgttgatggtactgctggtttgacaccactccatatagcagccgggaaagatggttctgaggatgtacttgatgctttgactaatgatccttgcatggntggaattgaagcgtggaaaaatgctcgtgacagca

SEQ ID NO: 206385 - DNA, 538 bp, Glycine max
aacaagaatactcataataatatagtggctagcatagagctagtaataatattaatattgttaagctagctctaagccatggctaatgaacgtgatctgttctcggcggagattgtgaaccgtggaattgaatcgtcaggaccaaacgctgggtcgttgacgttttcggtgagggtgagaaggcgcttaccggattttcttcaatcggtgaaccttaagtacgtgaaattgggttaccattatctgataaaccatggcatatacttgttcaccataccggttcttctcgtggtgtttagtgctgaggttggaagcctcagcaaagaggacctatggaagaagctttgggaagacgcgcgttacgaccttgctacggatcttgcttcctttggggtcttcgttttcaccttgtctgtctacttcatgtcgaggccacgttccatttacctcattgattctgcatgttataaacccgatgatgaactcaaggtgtcaagggagcagttgatggatgtagcatgaaaatcaggcaagttcg

SEQ ID NO: 206386 - DNA, 437 bp, Glycine max
agccatccatgaactttgatatcaatcatcctatgaagaaacagagaaattaaacaaggaggcatccatatgcctaatgaggaattaaaagtatagaatttcaagccaggaataattaaatgagaaagaaacagaaaacagatgtaacatttttgaagaccaaattagtactacccttattgatcctaaccataccctcactgataataagattcataacactagtgccgtcaaattctgcttcagttgttgagaggtgcaggatatctgttgatgcaatcaagccaagggttcctagaaggcttggtgactcggcgcatggcgcgccaaaccacactgttgcacttgaagccagagccaaatgcgagttgccaaacacggtctcctcttctaacactctcttttgcttccatgtaagccaactcataccaaatgct

SEQ ID NO: 206387 - DNA, 483 bp, Glycine max
aaaatccacggtaacaaaatttatatgattgaaatatgacagaatatttatcaacgcactggcaaactgtcaaaaaagtaaccaccttagctggaggcaccaaatgccgacgaaaattcagaatgagtatttgtgctcaaaacgacaatcatagtactcaaatatctctagcaagagtagaaattaatacataacgaagtaacaaactatcatgggtgtctactgttgcttaacttcaactttcttcttctgccacaagcggtctagagcactgtcagcatcaccctgagcacggatgaatccgcagagggcaaaagtggagaaatggccattgtagacgccattctcatccacatgcccaatgttgatctgaaccgaagcatggtccttagcggtaatcaatctgtttgtggcggagcacttcctaggaatgtaaagctcagtgatctgtcctttcttcgtctgcatctttggttgaacgct

SEQ ID NO: 206388 - DNA, 483 bp, Glycine max
  unsure (1)..(483): unsure at all n locations
cttcccttcctccccaagcataacatagcttcctcgattcttcgttctagggtttgaaaagatgaacatttgtggttgttgggtttcatcaatgaaattgcccttcctcgggtggcgcttttcaaggccttttacctctctctgttcttcttctttttcgccacgcattatgaccattcaaagttgttcttctccttcttcttcagcctccttatcaacgtcagagtcgaaagagatgaagaaggaagcttcaccttggttaattgttggcctcggcaatccaggcaaaaagtacgctgccacccgccacaatgtgggctttgagatggttgataccatagctgaagctgaagggatatctatgaccactgtttccttcaaatccttatttggaaaaggttttataggtgatgtaccagtcatacttgcaaaaccacagacttatatgaattcaagtggtgaatctatcttngacgacttgga

SEQ ID NO: 206389 - DNA, 517 bp, Glycine max
agagaacgagaaaatgacatcgagaaagcaatgctggaggctgagagggaaagggaaagagaaaaggataggatggctgttgatagagcaactttagaggctcgtgatagggcatatgctgaatcttgtgaaagggctgcatttgaaagagcaactgtggaagcacggtacaaggcactggctgaggccagggaaagacttgagaaggcatgtgctgaggccagggataagtcaaacattgatgaagaaactatagaggcaagactgaaagcagaacgcgctgctgtagaaagagcaactgcagaggctcaagaccgagctatggaaaaattaaagaatgaaaggactgcatttgagtccagagaatggttagcgagatctgtatctgacaatttttgcggaagaccagactcttcatcctacgatatgctggatcctgagtttcagaacttaagctctaccacaggttccagacattcatattcactttatggtgctgcctctttttctgagagat

SEQ ID NO: 206390 - DNA, 504 bp, Glycine max
caaagctgctccatttttatacgaagatcagattcaggtctctatcaccaagatccaacaacttctcaaccacaacgagttgctattcccttcgattcacgaacccagaaaattaaaacattaaaaaagatatcaagtatcaaaatctaaacggcatcagcaaacatgtctcaacaccatggtgatgaaatggagtatgcggcagatgataatgaaatggcagaggtagaagaggatatgtatttccgtggcagggcatttggtgaatcagattcggatgatgacgacgactacgaatatgaccctttggaaaaccgaatatcagataccactgctgctgaagctaggagggggaaggatatccaaggtataccttgggataggttgagcattagtcgtgagaaatatagacaaactagactagagcagtacaaaaattttgaaaacataccacaatcaggggaaatgtcggaggatgaatgcaaagcaacagataaagggggg

SEQ ID NO: 206391 - DNA, 409 bp, Glycine max
gtacaaacttccttcattttattaccatcggaaagattaaaacagacattgacagtcaatgttatttagcatgaaggtgtacatcaaacaactgtagcatcctcaagccatgctctacaatgtatgatgagacaatctaccggtttttctggttttgctatgatgtaccaccatactcgaatacctaaacaatagacaacacaacatgagctgtaggtacttacaaggtgtaaggttacaaatttacaagcagtcaaggtacatgtaatttctgcgtcgattgaactgtagaaggcttccataggtgcgatcccaaacaccaataaagagtgattctgtgtcagggctgaaggatacaccagagatctccccaaaaaaatcgatctcttgctccttctcaaacccatgc

SEQ ID NO: 206392 - DNA, 469 bp, Glycine max
ggtggccgcccttttttttttttttttttttttttttgccagaaaaacacccctattacataacagattgtccacaaatataattctttttccactatgcccaagtcaatcaacagatagaaaataaacagaagactaaattaagacgaaaaactcaaacttaaaatccaactatatttttcagtatttcccaccttgcttctacccctgttgaaagtaacaaagtaaagctgctctgcaacaaagtagatctaaatttacaagacaggaaacgaccaacaaagtgaaataaaagaaagaaaaaagaaaaaaggcaaagagaaggataaacccgaacaaaaaccaaaagatataagcatcttaggcagaaaccctaaaacccaaaaaaccctatgagtaaagcctgttaggagctaaccactggtaacaaaacccaatgagaagggattggtgctagcattctatgaag

SEQ ID NO: 206393 - DNA, 555 bp, Glycine max
atcgaggctcacgtcatccaaccgtgcctcaccgcacggatacttgctgaaccgcgtcgccgagtacgccaccgccgcggctgctgctaccactcctccctctcctcctcctccggggaagaaggagctcggcggcggcgggaagatcaccgatgaattcaccgggaagggcgcgatcgggcaggtctgccaggtcattggtgccgtcgtcgatgtcagattcgacgagggtttgcctccgatcatgaccgcgctggaggttctggatcactcgtcgaggcttgtgttggaggtggcgcagcatttgggtgaaggcgttgtccgaaccattgctatggatgccaccgaaggtgtcgttagaggctggcgcgttctcaacactggctcccctattaccgttccagttggtagggctacccttggccgtatcataaatgtcattggagagcctattgatgccaaaggagaaatcaatactgagcatcatttgcccattcatagagaagctcctgctttggttgagcaagaaactgcacagcagaatcttgtactgga

SEQ ID NO: 206394 - DNA, 573 bp, Glycine max
cttctttgactgttctcccacaccacacccatgacactcctcctgctccttattctcctctttcacgcggcggaagccaagggacagtggcagctcctccacaaaaacatcggcattgtcgccatgcacatgcagcttctccacaacgaccgcgtcatcatcttcgaccgcaccgacttcggactctccaacctaaccctccccgacggaagatgccgcaacaacccaaacgagttggtcgtcaaacgcgactgcaccgcgcactccatcgaatacgacgtcgcagccaacacattccgcgctctctttgtccaaaccaatgtctggtgctcctccggttcggtctctcccgacggaacattagtccaaaccggtggcttcaacgacggctaccgtgcggtcagaaccttcaccccgtgccgctcgtgcgactgggcagaagttcagcatggactcgcggcgcagagatggtacgccaccaatcacatcttgccagatggacgtcaaataattatcggaagaagaagacaattcaactacgaagtttaccccaagacacaagccaagaatact

SEQ ID NO: 206395 - DNA, 452 bp, Glycine max
gcaaagaaatatccatgaactataattacaaacttcctagggtattatttacacgccccataggccataaatggctttatttgaattttatcttcccatatcttacagtttaaatactcactcaagaatctgttcactcccagacattcacaacaataaataacttgaataaaaagaacatatacgaacgaagttgtcgagcaggcagagacgagaattcacaatttcacaccatctggacccaaataccgtggcttggaacttcttgatggaccacaaacagcagatagaaacccggtggcgcaagaacagcggaagccggcgcggtaacttaacctcgtgcgttgattctccaaccccactcaaatggtgcggcttcagcaccaacagcctctgattcatggagaacgagtgcgtgttaaatggcggcgccagcatggtaacagacaccg

SEQ ID NO: 206396 - DNA, 419 bp, Glycine max
ctcttctctcggtttcatcgccatggatgaagaagtgcgcaagatcttcagcaagttcgacaagaacggcgacggcaagatctcgtgcgccgagctgaaggagatgatggtggcgctgggatccaaaacgacgtcggaggaggtgaagcgcatgatggcggagcttgatcggaacggcgacggctacattgacctgaaggagttcggcgagttccattgcggcggcggcgacgggagggagctccgggaggcgttcgagctgtacgatctggacaagaacgggctgatctcggcgaaggagctgcactccgtgatgcggaggttgggggagaagtgctccctcagcgactgccggaagatgatcggaaacgtggatgcccacagagactgcaacgttaattttgaaaagtttacgaaga

SEQ ID NO: 206397 - DNA, 233 bp, Glycine max
ctcgagccgctcgagccgtggagatagaagagctatagtcacaaaggattggaatacatcttgggttggcaatttgtacttatcagttgtaatgtcctcccctgaataaccgacataaggttatggttcttgctcaaagcgcattccttcatttttgcccagttatgtttatcagaatttttgttgtaattttatcatatcatgtgaaatgatgcttacaagagaatctgttc

SEQ ID NO: 206398 - DNA, 233 bp, Glycine max
gaacaaattcttttgtaagcatcatttcacatgatatgataaaattcccccaaaaattctgataaacataactgggcaaaaatgaaggaatgccctttgagcaaaaaccataaccttatgtcggttattcaggggaggacattccaactgataagtccaaattgccaacccaagatgttttccaatcctttgggactatagctcttttatttccacggttcgagcggttcgag

SEQ ID NO: 206399 - DNA, 541 bp, Glycine max
gaatgatgcttgctaccatcaaatcattagccattggctaaacactcatgcggttgtggagccattcgtcatagcgacaaacaggcatctgagcgtggttcaccctatttacaaacttctgtttcctcactatcgtgacaccatgaacattaattcacttgcccgcaaatccttggtcaatgccgacggtattatagagaaaacattcttgtggggtaggtactctttggaaatgtctgctgttatttacaaggattgggttttcaccgatcaagcattgcctaatgatcttgtcaagagaggagttgctgttaaggatccatctgctccccatggagttcgacttttgatcgaggactatccttatgcttctgatgggctagagatatgggatgctatcaagtcttgggtggaagaatatgtctcattctactacaagtcagatgaagaactttaaaaagaccccgagctccaagcttggtggaaagaacttgcagaggtgggtcatggggattcgaatgataagccatggtggcaaaga

SEQ ID NO: 206400 - DNA, 469 bp, Glycine max
aaaaagttcaaacctgcatgattgcatttattattttggtttccattacacaaacatggtttattaatgacaaatacaagtacattcagccactccaaatacataacttaaacatacacaactgatgaaggaatcagattccttctatttcacatttatttaaagccagggacagtacttcagcaaccatagagcccttagatagagatactgttgggaattcctctgaaagtcaatccctcctcactagaaggatagagcaaagtgtaaggcattttagccggcccatagcggtttctcaatgtctcattattggtcttctctataagcttcttttcaatctcttcaagattctttccaaacctcttaaaggcctctaatggcccggcatcagaagtccagtagtcaccgccatctctctgcccaggtagaactcatcagatgcgtgccttgataaaatttctataat

SEQ ID NO: 206401 - DNA, 581 bp, Glycine max
cttcctcttcctcttcctccaattacgatgtgttcctcagcttcagaggtgaagacacacgtcatgcttttactggccatctctacaaagctcttcatgacaagggaatccacactttcattgatgatgagaagcttcaaagaggggagcaaataacacgagcacttatggaggcaattcaagattccagagttgccatcactgtgctttctcaaaactatgcttcttcctcgttttgtttagatgaacttgcaaccatccttcactgtcaccagaggaaacggttgttggttataccggtcttttataaggtggatccttctgatgtgagacaccagaaaggtagttatgcagaagcattggaaaagcttgagacgaggttccagcatgacccggagaagttgcaaaaatggaagatggctctgaagcaagtagctgacttgtctggctatcatttcatagagggagatggatatgaattctaagttattgagaagatcgttgaccggtatttagggagattaatcctcgactttacatgttgccgattaccaggttgactagagtcacgagtgctagat

SEQ ID NO: 206402 - DNA, 543 bp, Glycine max
gttggggtgaagtttctcccaacatggccttttattggccgtttgcgtgtatgctttgttgaacctccatattttcaaatgactgtcaaacctatgtttactcatgggcttgatgtgactgaacttccaggcattgctgggtggctagataagctgctgtctattgcttttgaacagacccttgttgagcccaacatgctggttgttgatgttgagaaatttgtttcaccacaacaagagtcttggttcaaagtgaatgagaaggagcctgttgcttatgcaaaagtggaagttattgaagcatctgagatgaagccatctgatctaaatggattagcggatccttatgtgaaaggtcaaatgggtgtatacagattcaggacaaagatacaaaggaaaacacttactccaaaatggcacgaggaatttaaagttcccatcataacatgggagtctgataacgtgctggttattgcagttcgtgacaaggaccatttctatgatgatatccttggggactgtaccgttgacatcaatgaattt

SEQ ID NO: 206403 - DNA, 589 bp, Glycine max
cttagcagcagtagcagaaatggctaccacttctgcttcattcgctcgcttctccgtgatatcgcgaccttcttcgtcaaatccccaattcatcctcttcaacgccgctccccgaaccggaacccctcattcccgaaccggttcggcccggttcaggtgcttggccggccagaccgggttcttcacgaaactagggcggttgataaaggagaaggcgaagagcgacgtggagaagctcttctcgggattctccaagacccgcagcaacctcgccgtcatcgacgagcttctcctctattggaacctcgccgacaccgaccgcgtgctcgacgaactcgaagaggctcttttagagtccgattttggaccaagaatcactattaaaatagtggagaatttgcgtgaggatatattttcagggaagcttaaatcagggaatgagataaaggaagcactgaagaggaaccgtttggaattattaacttccaaggggagttaaactgaactttaacttggatacaggaagccagctgtaataatgatagttggtgttaatggcggagggaagactacatctttgggaaaagct

SEQ ID NO: 206404 - DNA, 525 bp, Glycine max
caaagaaataaaaatttgtcattaatcagaagttgacagacaatggagcaatgtgtttactgtttacattttcctttctaagtatcatctacacgcacaccacaataaaacccttctgttcataaacaggagtgattataaaccccatttctcatttgcatcgcgtcagaatcttccagctacagcatgcaaaatactcagcgttcctcaagcaacagctctgcacctcaaaatcatgtacacttattcgcaatgcttgccccccacccccaaataacggtttccataatcaagtgccatctttcctgtgacctggtgttgctctgaatattccatgtcaagctgtttctgctaataaatgattcaaacccacaatattggtttacataaaaatggcattgacaaaggcttccgcatcaaaaggttgaaggtcttcaacaccttcaccaacacccacatattttacagggattccaagctcatcaaccacgcttaccacacagccacctctagcagaaccatcca

SEQ ID NO: 206405 - DNA, 349 bp, Glycine max
ctccccactcattttcatctttttcctcttcctccctcctagactgttcattttttctcacttttccccttccttctccccctcacaagacctcccttctcccccttccctcccggcaccggtggccttccccctcccttccgacaccagcaaccttccttcccccttccagcacccgcaacccttcgcctccccctccatctccccctagcgtgacctttcatctccccctcccccctcacgttaccttcttcttcatccggcaccaccagtccacaacctttcccctgccccttgcacaaccttgctccgataaagcaacctctaaaaccaaccatggcagcccagt

SEQ ID NO: 206406 - DNA, 496 bp, Glycine max
atctcgtgtgtttagtatcataaaaatattggagacctaggcgaattctagcatgcgaaagtgaaacttcttttgcacgtacgaaaataaatattaaccgtttgatactctttaattttcatcgcatgactcaaattttttaacatttttgcttttcttttttctctttttatgcctatttttccttaattacccatttcttctactttccccttctttgttctttccctccagcaccccagatccgtcatcatcctcatcaaggtcgactccccagtcgaccataccatcgtcgccctcttcgaccacctcgaccccgacgactacatcatcgacaacgacaacgagtggtacaagaacatcgagcgccgcatgaaccaacgagggctccctccctctcacgagccaatacacttcttgcgacttcgttctctccctccagcggcccaaatccgtcatcatctcgtcaagaccggctccccagttgaccacacca

SEQ ID NO: 206407 - DNA, 539 bp, Glycine max
gcaatttggccactatgaacacagggcttgctgcaggtgcagccttgcttgcactcttggctatcaccttctccttgttgagccctcaaaccctgttttctccgcctgagattccgggctcgaaggaccaccttcacgctgctcggttactccatgtcaccggagccgtcgggccggagagtcttgtcttcgacgctgacggcggagggccctacaccggcgtcgccgatggccggattctcaagtgggaaggggaagagcgaggttggactgaatttgctgtcaccagttccaataggtcggactgtgtacgcccatttgcaccagagttggagcacatttgtgggaggccattaggactaagatttgataagaaaagtggagatctgtacattgctgatgcctacctaggcctaaaagtagtggggtctacagggggtttggccaccgaagtggtaacagaagttgaaggtcagcccttgcaattcaccaatgacatggacatcagtgaagatgcagacgtgatatacttcactgat

SEQ ID NO: 206408 - DNA, 574 bp, Glycine max
caaagcgcacccattttctcattcaaaaactcttattatttttcactccttcctacacaaattcccatggcggccctcggtagatcctccgctgccgccaccacctccctctcctcctcctccgcccgattccgccgctccctccacctaccgccttcccaactctccttcccgcgcgcgcgcttttccgtcaacgccacgtgccccttcttctccgataacaatggcaataagatttcccttccccaagacgtcgtcgcttccaaaccctcccctctcgagttgctcaaaacttccgccgccgacagatatacgaaggaaaagagtagcattatttgcatagggctgaacattcacactgctcccgttgagatgcgtgagaagctttccattccagaatcgcattgggctcaggtcatcaaggacctttgcgctttgaatcacatcgaagaagccgcggttctcagcacgtgcaatcgcatggaaatctatgttgtggctctctctcagcaccgtggtgttaaggaggttactgattggatgtctaaggtgagtgggatttcaatacctgagc

SEQ ID NO: 206409 - DNA, 514 bp, Glycine max
  unsure (1)..(514): unsure at all n locations
gactcacttatactccactctaacattgatgttattaaaaatacaagaatcatctgttgtcaagaggatcatgaatttacaactgctctatatcaagctcattgagaaaaatataacatgttgaattcaattacttataatgttaaaaataattgaaaaaaattagccttcaaagggcctcaatcaactactgtagtgtacaaaatggcgaggattgcagcccccacagtaatcaaataaaactaaaccaattgaagaagaatctacttctgaacccgttccatcttgactctgatcttttcttcgatcaaggaagtttctgtctcaagatcatacattctgttaagggcgcgcatattctcaagtacttcactcagactactatcatttttcccatcacaccttacgtgctgcatgggaccatgaagtagcttattcacaatacccatactaagggcataaattgcatctttgtgttgctttgagacatcanggcccatctttcgacaacact

SEQ ID NO: 206410 - DNA, 533 bp, Glycine max
gtcttacagttgagaatgtacacatggttgaggtggttggttctggatctcgtgtgccagctataaacaaaattttgacagagttctttaaaaaggagcctaggcggacaatgaatgctagtgagtgtgttgccaggggctgtgcattgcagtgtgcaattctcagcccaacttttaaagtacgggagtttcaggtcaatgaaagctttcctttctcaatttctctctcgtggaaaggtccaagttctgatgcacaggaaagtggaccaaataatacgcagagaacccttgttttccccaagggaaatcccataccaagtgtcaaggcactaaccatctacaggtcaggaaccttttctattgatgttcaatatgatgatgtgagtgaattgcaaacacctgcaaagatcagcacatatactattggacctttccaatctacaataactgaaaaagcataagttaagtgaaagttcgtttgatcttcatggaattgtatctgtcgaatctgcaactttgctggaagaggaaga

SEQ ID NO: 206411 - DNA, 423 bp, Glycine max
gattgctagaatggaatttcgatgctcagtcatctcttttaccattctcttctctcttgctcttgcaggagagagccatgtccatgcatcgctacctgaggaagattattgggaagctgtttggccaaacactcccattcccactgcactgcgagagcttctaaagcctctccctgcaggtgttgaaatcgatgaactccctaagcaaattgatgatacacagtacccaaaagcattcttctataaagaagaccttcatccaggcaaaacaatgaaagtacaattcaccaagcgtacctatgcacaaccttatggcgtatatacatggttaacggatattaaagacacctctaaagaaggatatagatgtgaagagatatgcatcaagaaagaagcgtctgatggagaagagaagttttgtgc

SEQ ID NO: 206412 - DNA, 418 bp, Glycine max
aaaaaagcccactgcatattcatcaaagcatcatcaaagcacactgcatcctaacagcacacgtacgtagaaaggggaagttccaggtcttgcgcaacatacacaacacaccataatttattttatatccaatcttatggcgcccaaaatgcacatgcatggactaattaaacaacaacgttagtctgataggcagtgtccatagataaattgggttcccataaaatggccttgcttccaaggaaatggcacacagggttagttccaggatcaactcccatgagttcatgaagcctgtgatgattcattccagaagtatctgagtggcaaacagcatgtgcctgagacctgggtccatatccagccaccaatggaaccatgaaagctgttgtttcacggactttatggcacgaaaata

SEQ ID NO: 206413 - DNA, 549 bp, Glycine max
aattcagttaacacaccaaccccacatccaaagcttcagttcaatatggcaaccttgtcaagttttgctcctttggccattctaagtttagttctagtaattagtgccattgtctttgaggctgaagctaggccaaggacattctttgtatttggagattcacttgttgataatggaaacaacaattacttggctaccacggcacgtgccgatgctcccccttatgggattgattaccctccaagtcatagaccaactggtcgtttctccaatggctacaacattcctgatcttatcagtcaacgacttggtgctgaggctacattgccatacttgagtccagaattaagaggaaataagctccttgctggtgcaaattttgcttcagctggaattggaatacttaatgacactggaattcactttataaacgtaatcagaatgtataggcagctacaatattttaaagaagtcccaaaccgagtgagagctataattggagctttacagactaagagcttaatgaatcaagcactagtcctcatcact

SEQ ID NO: 206414 - DNA, 530 bp, Glycine max
gaaaaacacacacacaaacaccctttgagttcattaacctcttcagaaaaaaacaacaacaacaacaaaaaaaaacatcatcatcaaaaaaacttccgagagtttaatggcaacacgcgtgatccctccaagaatcctcaagaagctccgttacaacacaacaaccaagccactcaacgctgcccacccctcaatctctccagtcatcgccccaccgtcactcttcgagaggtcgccgtcccctgtcgcggatgctgtttcaacaacatccacgactatggagacggcgaatctcaacctcgacgacgcggagcggcttttcgcgtcagtatcgacggaaaagctgctccggtcgtccgcggttttgcatgcgacggcggtggggcccatggtagacctgggaatgtggttgatgaagtctccggtgttccagaccgggctgccgaaggatctcatcatggccgccacgaaggagacgttcttctcgcacttctgcgccggcgaggacgccgacggcgccggacggagca

SEQ ID NO: 206415 - DNA, 502 bp, Glycine max
gctcaacacaaaagatccgttgcatttccaacaaaacctacataacaaagcagaatttcatttgattgaatgcacaatttcttcacattacaaaactctctaatttgtacaaaaagtcaatgaatcctgatttctgacaaatttagaacattgcagcttttaatcttcttcccaactcctttctcatcaattgcctatcaaaacctgatgcagccaaaagccctctattttcttcagcccttctcagaaggtaaggcataaccatatctaccggcccaaatggcatatacttgctaacttgaaaccctgcattgctcaaaccaaaggaaagtgcctctgacattccatacagttgtgcaaattctagcttgtggtttacctttccaacccccaattcatatgcttttgctgcagccaatttccctgattcaatattgtgagttgcaagaacaactgacatcgaaccgggtccattagcaatcttctcaagaagaaatgatga

SEQ ID NO: 206416 - DNA, 582 bp, Glycine max
agaacatgtttcagagttagaattgcaagctactgaatctaaagctgaatatgaaaaaagaatagagggacttaagcttcatcttgcagatgcaagaatgcaagtgaaggaactagaggcattttccgaatccagatttttgaaatggaagaataaagaggatacctatcaaactatcgtaaatttccaagttggagctttccaggaactgagagctgccatgaagtctgtcaaagatgatgtgataaaaacaaaaagaaactacttagaggaattcaagtactttggaatcaagttgaaaggtctagctgaggctgctgaaaattatcatgtagttatagctgaaaataggaaattgtataatgaagttcaagatttgaaaggtaatataagggtatattgtcgaattaagccatttcttccagggcaaagtcaaagccatacaacaattgagtttgttggtgatgatggagaactgattgttggcaatcctcttaaacaaggaaaagaaaatcgcatgctttttaaattaataagggtttcggtcaagcaacaagtcatgaagaaatattcaaggacact

SEQ ID NO: 206417 - DNA, 528 bp, Glycine max
gagaaagaacagcaagcaatcgttacccattacctatttcactttccacaccactctcatcctatatctctttcttccttattcctctgtcaagccactcgataatatgcagagtctttcaccacctacttccaacgcgctcaatttgaagcatgtttttcgcccgcgacttggcgcgtcaagccgaatctctgtcaaatgcgcttttgggtttgagccggtgagctacggagtcggctccagccgagccgattggcagagctcctgcgccatcttagccagcaaggtcgtttctcaggaacaaccctccgctgaccagaacagcggcaccaccgaccacatcgccgccgtcaacggtcacaaagccgccgtcagcgacttccaactcgttccaattggaaacctagcagaggccaacaacaagccgctcccgccgaagccgctcacgatctccgacctctcgccggccccgatgcacggctccaagctccgcgtcgcgtaccaaggcgttcccggcgcgtactctga

SEQ ID NO: 206418 - DNA, 555 bp, Glycine max
gactcgatcttcgtcaaactgatgttgcgaaacgcgaacgcggaaagcactttgaaaagcaccgaagttcctttgtcgtgtgcgaaaacaatgctcgtcttgaaaggacggtccgtgcgcgggatgataggctctctcgcgagcatcacaaaccgcgtgacgttgctcggatcgtcttggattccgtccgccatcacgttcaggccgtagagctccgccgcgcgtgcgctcgcgatggcggcggtgtcgcggagattgttgctggcgacgaactcggcagcgccggcggtgtcgtccacggcctcgcgcgccacgttcaggccgagtttggtgagagtgtgctcgcactgcgcgagtgcctgcggatgcgaaatcacgcgcgtgaggaactcctttcggacgccggggagagcgaggaggcagtgatggaccgggagctggacctcgccaactatgtgaaggcggtggcggatgatgagatcgtagttccggtggatcgaaccgtcgagtgagttttcaaccggtaaaaccgccgatcggcgatccagagcttca

SEQ ID NO: 206419 - DNA, 502 bp, Glycine max
gtgaagccttaactcttctgcttcttccgtgttcagatctcgttgttgttgcttccgattctttgattcttcgcttttttcttctcacttcacattccgattcgtcgcagattctttcagtttctaaacttgatgatcgccactgcctccacctgtaatcgttagttgaagtcacgtgaggtggtccagagaaatcaaaatctccttcaacttcgtcttccctttaggtgtaaaagtcagctaacgataaagaaatgaaatcgctaactgttaatactgaagattctttttccagtttgctggaacttgcttctaacaatgatattgaaggcttcaaggtgcttttagagaaagattcttcttcgatcaatgaggttgggctctggtatggccggcaaaacggatcgaagcaatttgttcttgagcacagaacccctttgatggttgctgcaacttatggtagcattgatgttatgaagattatactgttgtgccccgaggc

SEQ ID NO: 206420 - DNA, 531 bp, Glycine max
ggaaggggcatctctattaattcacatcacactatttccaaaggaaaaatgtcagcagatttggagaggtcgacttctaggattcctcaacttgatggaccaattccatatgatgatgatgatgtgctctctactccaaatatatacaactatggagaagtgttcagtgaagactacaacatttctaatacaccagctcctcctgaagtaccagcaagcacccctgctctcttggttcagaatgaagtgggtaatgattttgatgatgatgatgatgatgaacctccattaaatgaagaggatgatgatgatttagatgacatggaacaaggagaggatcaaaatacacatcatcttgttttggcccagtttgataaggtgacacgtaccaagagcaggtggaaatgcacattaaaggatggcatcatgcacataaataataaggacattctcttcataaggcgacaggagagtttgaattctgattttggtggggctggcgctttcgtgaaatatgaattcgaggtgtca

SEQ ID NO: 206421 - DNA, 367 bp, Glycine max
ttcgccctttttttttttttttttttttttttttttttttttttttttttttttttttttttttttttttttttttttttttttttttttttttttttttttttttttttttttttggggcccccaatttttttctccccctcgcccaaaaaagccccctggaaaaaaaaaaaggggccccaaaacaccggttttggaacccctttggggaaaaacccccaaaacggaaaacctcgggggggggcataaatcccaggggccacaaggaatcccccaggggtcttaaaaaaaccccggggcccaaacacatccccaaaaatttttttaaaagggggtcttttttgtccccaattttcaacattttttt

SEQ ID NO: 206422 - DNA, 540 bp, Glycine max
ttctcatctttctctcttctctctccacccaaaccctaactcccgaccctgttcccctctcgtatccgtcatgaaaggaggaaagtccaagaccgaatctaagagagccgatcccaaacttgctgtgaataagaagggagccgccaccaaggctaggaaacccgccggcaaggggaaggcagcgaaagaccctaacaagccaaagaggcctccaagtgctttcttcgttttcatggaggagttcatgaaggtattcaacagagaacatcctgaaaacaaagcagtgtctgctgtgggcaaagctgctggagcaaatggaagaccatgtctgatgctgaaaaagcaccttatgtggcaaagtctgagaaaaggaaagtggagtacgagaagaacatgagagcctataacaagaaacaggcggaaggtcctactggtggggatgaagaagaatctgagaagtctgtatctgaggtgaatgatgaagatgatgatgaggaaggcagtggccatgaagaggatgacgattagagaatggactga

SEQ ID NO: 206423 - DNA, 316 bp, Glycine max
ggggccaaacaaaaaaaaaaaccccttttaaccgctaaaagggaatgataaaccaatttttttgatcccaaattaacccgattttaacaagaaaaccttaaatcaaaccaaaaggcctacaagagaaaaaccccccttaactaaacagtggggtcttgaagtcccaaaaaaaaacccccttttttaaaaaattcaccttttggaaaaacaacccatttacggggggggccgggaaaaattttttggaaaccaaaaaattgtgtttcaggaaaagcccagaccccctacaaccgggggccaaaactattggaacccc

SEQ ID NO: 206424 - DNA, 521 bp, Glycine max
gtggatcttcaagacctcttgcttcggctcacttttgacaacatatgcggcttggctttcggccaagacccgcaaaccctagccgtggggctcccagataacgctttcgctctctccttcgatcgagccaccgaggccactctacaacgctttattttacccgagatcttgtggaagctgaagcgatggctcaggctcggaatggaagtgagcctgagccggagcctgaaacacatcgacaattacctctcccacatcatcaagaaccgcaagctggagcttctgaatggcactgggtcccaccacgacgacctcttatcccgcttcatgaggaagaaagaatcctactctgaagagtttctccaacacgtggcactcaacttcatcctggcagggcgcgacacgtcatcggtcgctctaagttggttcttctggctctgcattaagaacccgcatgtggaggaaaagatccttcacgagcttctgcagtgttctcaagtttacacgtggagatgatatct

SEQ ID NO: 206425 - DNA, 521 bp, Glycine max
ggtctatgagaatcattgtgctaggaatgaccgtgaggcagatcttccaataacctatttcaaggagcaattgaaccaagctatatcaggccaaatatcaccagaagctgttgtggatctccgtctgcaagcctataatgaaataacaaaaaatcttgttaatgacaacatcttttcacagtatatgtacaaaactctacctagtggcaaccatagttgggctttcaagaagcaattcgccatccagttagccctttcaagtttcatgtccttcatgctacaaattggtgggaggtccccgaataagattttgtttgccaagaacactggaaaaatatttcaaactgattttcaccctgcgtatgatgcaaatggattgattgagtttaatgagcctgtcccatttaggctgacaaggaatatgcaagccttcttctcccatggagtggaaggccttaatcgatcttcaatgtgtgcagctgcacatgctgttgcttcacctaaacaaagccaggacctat

SEQ ID NO: 206426 - DNA, 469 bp, Glycine max
gcagtttcttcgattctctctttctctttcttcagaaaaattaaacccattcaaagaaagaaagaaagagcgatcatttccaatcacaatggcagatcaactcaccgatgaacagatctcggagttcaaggaagccttcagtttgttcgataaggatggcgatggttgcatcacaacaaaggagcttgggactgttatgcgttcgttgggtcagaatccaacagaggctgagctccaagacatgatcaatgaagtagatgctgatgggaatggcaccattgacttccctgagttcttgaacctcatggctagaaagatgaaggacactgattctgaggaggagctgaaagaagcgttccgagtgtttgacaaggaccagaatgggttcatttctgctgctgagctccgtcatgtgatgaccaaccttggggagaagctcactgatgaagaggttgatgaaatgattcag

SEQ ID NO: 206427 - DNA, 372 bp, Glycine max
aataataaaataaaaaaatatatattgggaaaaaaattgacaaaaaaaacataaaaaaaaccaatgaaccaaaaaaaaaaaaaaaaaaaaaagtttcaaaaaaaagggaaaaaaaaggaaataaaaaaaaaaaaaaaaaaaaataaaaaaaaaaaaaaaaagaaaatgtgaaagggaaaaatgaagttaaaacaaaattaaacctgtgaaaattttcccaactagaaaaaaaattggggaaaagggggacccccaaaaatggggccaaagaaccttaaaaaaacccgggaaatttattgggggggcccaaaaaaaaaaagccctataaaaaaactaaacacccttttaaaaaggggggtccccccaaggggg

SEQ ID NO: 206428 - DNA, 452 bp, Glycine max
cgcttttcttcgtttccaaacccgaaaggcccaaccacagagtctccattgcccctcgctctctctattggttcacgcgcggcaattggagattcacgcgccaccatggcctcaccaccgacactccctatctcctcccaatccagcgcctccggcggctccgcctcgcagtcccagcctccgatcgcaacgccggcgttccgcgccttcatctcccgcatctcctcgtccctccgtcacgcctttgcgcagcgccgcccgtgggcggagctcatcgaccggagctccatgtcccgacctgacaccctcgccgaagcatactctcggatccgcaagaacttcggctacttccgcgtcaattatctaaccctaatcgcgctcgcgctggcggtctcgctcatcacgcatccgttctcgctctttgttctctttggcctcctcgcgtcgtggtc

SEQ ID NO: 206429 - DNA, 471 bp, Glycine max
cagctgcactagtcggcggccgcccttttttttttttttttttttttttttttttttttttttttttttttttttttttttttttttttttttaaacaattaaatcggccctttacgacaagggaaaaaaaaaaggcccatacaaatttcccgaaaatgccgaacattttcagaggcaaaatcaaggactaaaaggccttcctgggggttaaatagcccaataatttttgggggaaaaacaaaaggttgtaagcagtaccagaactaaaccctaagcaattcgcctgggatctcaaagggcaaaaaatttcgcaccaattttcaatttaccattttccaccaaaaagggccgacccaccctgaaaagaatcccccggacacagggttcgtccaaatcccgccgtttacacccgcgcaacggccggcccggcggttgaagcgggggccccaccggggaacgaggggaatccg

SEQ ID NO: 206430 - DNA, 596 bp, Glycine max
gtgagcaggctcccggtcctgtccgacaagctctgcggcaagaccaccgccgccagaatccagctcctgggttgctacatgctgtacgaggttgtagggttcacgcaaatctcggggatgcagattttgtacaagacctgtgggggaaccaacgctgctgggagagggtttgaggagaggagggacactgctttctctgtgatggagaatggggtggtcactggccatggattctatgccaccagctaccagtctttgtatgtgatggggcaatgtgagggagatgttggtgattctgattgtggggagtgtgtcaaaagtgctgtccagagggctcatgttgaatgtggaagctccatttcaggccacgtctatttgcacaagtgttgcattagctatagttattaccctaatggggtttcaggaagacactgttcttagcttcatcatcgtgcaattcctattcttcttcttcttcttcttctggtaaatactaatacctagacaccgaatgagataggaatgaatgacattaaatttagtgttgttgaaaagtgttcttgcacaactgagtctctgaacttgatagagaaaga

SEQ ID NO: 206431 - DNA, 549 bp, Glycine max
cggaaccgaaacccttcgccgcaaaaaatgcctcccaaatctgccaaatccaaggaagctccagctgagcgacccatcctcggtcgattctcttctcacctcaaaattggcattgttggcttgccaaatgttggaaaatctactctctttaatactctcaccaagttggcaatacctgctgagaacttccccttttgcaccattgagcctaatgaggcgcgggtcaatgtacccgatgaacggtttgagtggctttgccaattattcaagccaaaaagtgaggtctcggctttcttagaaatccatgacatagctggattggtccgaggtgctcatcaggggcaaggattggggaatagttttttatctcacatccgtgctgtggatggcattttccatgttctacgtgcatttgaggatccggacattattcatgttgatgatactgttgatccagtcagggatttagaggtcattactgaagaaatgcggcttgaggatattgaactcatggaaagaaagatagaagatattgagaaaagcatgaag

SEQ ID NO: 206432 - DNA, 449 bp, Glycine max
gagagggcaaaatccactagagattttaagcctaaataagtaaataatattgaaaatgggcccaaaattacattttcaaacttgtacaaattgtgcaacatggtaggcgcctataataagacacaaaccccatgcaaaaccagctttgctttttgagatgaatctctggttttactttttgcccccaccaaaaacgttgaacttaaagaatataatggctccattttggaccacatatgttttcccttcctggttatactttccagcagccttaacagctgactcactaccaagttcctttagatcctcaaacttaatcaccttagcccaaataaatcctttttcaaaatccgtgtggatagcccctggaacttgaggagcctttgattggacgttaatttgccaacatttaacctcatgaggacctgctgtgaaaaagtaaatgagat

SEQ ID NO: 206433 - DNA, 462 bp, Glycine max
cttcatccatagacatggccaccgtcacttctgcagccgttgctattccctcattcactggcctcaaggcaagcgcaggcaaagtgagtgccgcagttaaagtctcagctccccaagccacaaggttgggcatcaaggcttcgctgaaagacgttggagtcgctgttgtggccactgccgcgagtgcagtgctggctagcaacgccatggccattgaagtgttgctgggtggtgatgacgggtctctggctttcgttcccaacaatttctccgaggcctctggggagaagatcgtgttcaagaacaacgcatgtttcccccacaacgttgtgttcgacgaggacgagattcctagcggcgtggatgcagggaaaatctccatgagcgatgaagaccttctcaatgcgcctggtgagacttacagcgttactttggatgctaagggaacctacagtttcttct

SEQ ID NO: 206434 - DNA, 455 bp, Glycine max
ttcgttctttttttttttttttttttttttttttttttttttttttttttttttttttttttttttttttcttttttttgtctcaaaaaacaaaatgaattccagaaaccgattaatacgcttgttttccccctcggccaaacccggaaaattcacgccatttactttagaaaaaacaaaatttgtaaaagaaggacccatgggaaaacttaaccgtagggaacaaccccttggaacagacatcaattcccagggacttgtccccccataccacctccttggggagggaaacgaaaaaaacggggggggcccttaccctccaaggacaccctggaagtcccaccgggcgccttgaaaagggcccaaccgacaagggggagtttccccgagtcccccccgggtgggacatcggccttttccaacccaccctggggggggaaccccgctcagttttt

SEQ ID NO: 206435 - DNA, 471 bp, Glycine max
aagtgcaactacatacaattttctaacattgattcaaaaaatttctgaagcaactaaatcaacattccaacaaagaagatacttatacatgactttccttttttttctttttacagatgaatacgagcattacatagctattgacactaatgacactgtcatttttaacatgtaaactacaccttttaaacaaggagctatagtggaaaaccaagatgcttgtcacctagggccagaaagctccatggcttcaactatgagtgaagattcctctattaaatctgaatatctttgaggctcacaagaccgaaaccttggtgtttcaatcctctgtgaggcctcccatctctcagctaagccgtccccttgcaacatctttaatacttctgacatcttggggcggcgtgaaggattgaattgtgtacctagagtgcaacctgaaccatttcttctaattgaatcagatcaaag

SEQ ID NO: 206436 - DNA, 599 bp, Glycine max
  unsure (1)..(599): unsure at all n locations
ctttgcaagtactagcacaaacagctagctactatttttgaacttgtcataattagtctctaattctaattagccatacattgaacacaccagcacaccttaaacgtaagtggtatttgttccacacaggtacactatgccttcactctcagaagcctaccgagcccaccccgtgcacgttcaacacaagcaccctgacttaaactccctacaagaactccccgagtcttacacttggacacaccatagccatgatgatcatactcctgcagcttccaacgagagtgtccccgttattgatctcaacgacccaaatgcttcaaagttgatacaccatgcatgcataacttggggagcgtaccaagtggtgaaccatgccatacccatgagcctnctccaagacattcaatgggttggggagacactcttctctctcccttgtcaccaaaaacaaaaagcagctcgttcccctgacggtgctgatggctatggacttgctcgcatctcttacttcttcccaaactcatgtggtctgagggattcacatttgtggatcccctcttgagcatttttcgcactttggcccaagattccacaat

SEQ ID NO: 206437 - DNA, 410 bp, Glycine max
ggaaagaaaatgttttttggcgagtcctgtggtcgaattgaataatcagcttcgacaatttagtgatgtccctttccagacaaagacaaagacaaatgaaacacggatgagactatcttatccccagtattctctctccagtttagagccaaacaaatatatctacatacatatacaccctcttgaacttatttattgttggcatcgatccccaccaagtttccattcatattaagcaaaaaaaagaaaaagaagaggtgtttcattcatgtttggtagaaaatagaccatgcaagagggaaggatcgaagcaattgtgtgaggctggtttacatcaaacgaaccggtaatagctagctaggtgcacaaagccgaacggttgagagtgccttggtgaaatgctttgcttt

SEQ ID NO: 206438 - DNA, 518 bp, Glycine max
tctcattttctttctgtcgagaaaatttagtgaacccaaaaggagagaactttctttggtttgtgtttcattttgttgtggttttctgtaagattaaatggctgaggttttgaccaaggcgagtttggtttcctcttcttcttcctcatggcatggggttggtcaacggcatcatcgaagggtttcaacggtttccaacacttgtagcttcggttctggcgtgggaaagttctcttctttgaagatgaagtctcaggttctcagatcttggtcctcttcttctgagtttcagggtataaagcttgtctttcatgtaaatagaggattacccaatagggtcaattcgcgcttgagagcttcaactggggctcagatgagctttagactagggaaagttcagaaatggtgggaaaaggggcttcaacccaacatgaaggatgtgacttcggcacaagactttgtggattcactgttaagcgcaggggacaagttggtggtggatgatttcttctctcccg

SEQ ID NO: 206439 - DNA, 474 bp, Glycine max
  unsure (1)..(474): unsure at all n locations
ttcattcctgacaaggagctcggccaaatgatcgagaggattgacgtcaacggcgatggctgcgtcgacatcgacgagttcggggagctctaccagaccatcatggacgagcgcgacgaggaggaggacatgagggaggccttcaacgtcttcgaccagaacgccgacggcttcatcaccgtcgacgagttgaggaccgtcctgtcctccctcggcttgaagcagggcagaaccgtccaagactgcaagaacatgatatccaaggttgatgttgatggagacggcatggtcgatttcaaggagttcaagcaaatgatgaaagggggtggcttcagtgctctcacttaaattcatttctttcacattcattcaatctatctattcccatacatctttgctttggtntgttcttgtatataagtttcaggagaaataattacatgattcgaacaacaaggtaattgcgttttctct

SEQ ID NO: 206440 - DNA, 373 bp, Glycine max
agagaaaacacaattaccttgttgatcgaatcatgtaattatttctcctgaaacttatatacaagaacaaaacaaagcaaagatgtatgggaatagatagattgaatggatgtgaaagaaatgaatttaagtgagagcactgaagccaccccctttcatcatttgcttgaactccttgaaatcgaccatgccgtctccatcaacatcaaccttggatatcatgttcttgcagtcttggacggttctgccctgcttcaagccgagggaggacaggacggtcctcaactcgtcgacggtgatgaagccgtcggcgttctggtcgaagacgttgaaggcctccctcatgtcctccttctcgtcgcgctcgtccatg

SEQ ID NO: 206441 - DNA, 563 bp, Glycine max
  unsure (1)..(563): unsure at all n locations
ctctgaatgggggcttctcttctttgttcgattttgacatgaactatgataatgaagcagatggtggctatgatgcttctgctgcttctgagcagtggaacttttctgaaggtgtcaagtcgtcatccttcttgcaagatgatctgcaggaggagcatccagttgagtctcaggatgtgaggagcaaacagagggctcaaatgctagaagacttggaaacagaagccttgatgcgtgaatggggtttgaatgagaaggcttttcatcattctccaccaaaagattttgccggttttggaagtccaattcatttaccacctgaagagcctcccacattgcctccacttgatgatgggttgggcccttttcttcagacaaaagacgggggttttctacgctctatgaatccctcaattttcaagaattctaaaagtggtgggagcttaatcatgcaggtatccaaccctgttgtggtacctgcagaaatgggttcttggataatggacgttttgcagtgtttggcttcagtgggtattgaaaagctctcaatgcangcaaaggag

SEQ ID NO: 206442 - DNA, 562 bp, Glycine max
ggctaagtagagaggtagctttccctgtaagactgttacttaagattaccaagaattctagctagctggttagttcttttgtcatttcaaagagaaactgagagagccatagctagggagaataccatggacaaattgtatgggttgagtcatctcttcatgacagtgtttcttcataacttctccatgttcatggtggtaccagccatcaccgatgtcacaatggctgctctttgtcccggacaagatgaatgctcacttgccatctacatcactggttttcaacaagcgatgatagggctgggcacgcttgtgatgatgccactattgggaaatctttcggataagtatgggaggaaggccatcctcacactccctatgatcctcacaatcattcccgtaggcatattagcttacagcaggacgaaaaaattcttctacgtctactatgtgtttaagatactcattttaatggtttgcgaaggaagcgttccttgccttcgcctaacttacgtggcagataacgttccagaaagtggacgaagcactgtatttggaattc

SEQ ID NO: 206443 - DNA, 473 bp, Glycine max
gtcaaatgtctactaggaatgaacttatacaatatattgtttcctaatcaaaagcacgttaaaggtagagcttgtacatatgaggatcggctaaagcacaataaaagcaccgttgaaggctctaactaatttatattcgcctaattcaaaatgggaggagccactctaagcatcaaactttgaacaaaagatatcatcgaagcaaatccaatgcacattatactgaatccaggaaaatcaaaaggtgccttttcagaaaggaatagagctgttaatggagagaaaaccaagggagaaacaatatgtgcaattgaacatatgcctgaaatgcaaccttgagcctttccctgctcatggggaccagcttctttagatacaatacttcgtatacaagggtgtgagaaaacatataaaattgagaacatggcggaagcataaggaaccaaggaggaccatgccatgctgtaaaggaa

SEQ ID NO: 206444 - DNA, 591 bp, Glycine max
  unsure (1)..(591): unsure at all n locations
tgccatggcactgcatttcaaaacgtgcattttttctttcaaacctcatcaaattatgacaacaaaggctcagctttctcaaagcttcaatcctgctaaacttgattctcttcacattgccaacaaatggaacattgttcaagaagaaagatctagcgcattattcacaaaaactggagatctcatcagcattaatcactcagacaaactggaggtggtcaagaatgaatttatgaacactgtgggtgaaaattcattaagaggtttgtacatgattgatgccatgcagcgcctaaatattgattaccacttccaagaggaaattgaagaattcctaaggaggcaatatgtgaattctactactattgcgggtggttattatggtgatgatattcatgagattgcacttcgcttcaggctattgagacaacaaggtttctttgtgcccgaagaggtgtttcacaagttcacaaacaaggagggaaagttcaaccaanaacttggtgaaaatataaagggaatggtagagttatatgaagcctcaccgttaggcatagcaggggaagacacacttgcttgaagctgtgaatt

SEQ ID NO: 206445 - DNA, 339 bp, Glycine max
aaaagatagagcaaggaactcataaaagtgggaggaatgtggggttgaaagcttatgttgtgtgccaagtgcttgagattgttgtcaaaaaggaaataaaacaagctgaaataaaatctacacaagtcaaaatcaggatgttcttccgaccagaagatttatcaaatgagaaggcatattgctctgatatacgagaggtgtattacagtgatgaaacatatataatctctgtagaatccatagaagggaaatgtcaagtcagaaaaaagaatgatattcccgaatgcagtgctcttggtggaatcttccaaaatgtttttttctgcgagctcttggatg

SEQ ID NO: 206446 - DNA, 527 bp, Glycine max
gcaacaacaaatattcataacaggttaaaaaaaattggtctcaattttcaactacacattgggaggtaatcaattcccaaccatttctttcataaacagccaaaataccatctaatcaagaaaatcctagttgatagaaaatgagcatcatccattcaattccttggttgaggaaagttaaacaaggaattagcctcaacaaatgaccaatggatatcactatatacaagggtttctagtttttggaacccggaatgatgatttgcaatatcttggtgactgttatgaatacaataagcatgacctaatgtagaaggcccatcttctaagtggagctcttactgtccactgcttccttgagctttctccccaatgctgatgctagaggaggaggcacagcattaccaatctgccggtgcttgtgtatgatattgccagcaaattcatagctatctgggaaagcctgagaccgagcacattcacgaacagtaagaatcctatcttggtcacggtggaagcacattcca

SEQ ID NO: 206447 - DNA, 535 bp, Glycine max
  unsure (1)..(535): unsure at all n locations
caacttaagagatcaatatggccaccattaccaagcctccttctaatatatgtttcctccttctgttgcttctagcacacttccatttgggccaaagccaagttgagttgaattactactctaaaagctgcccaaaagctgaagagataatcaaggaacaagtcacacaactatacaacaagcatggaaacactgccgtttcgtgggtcagaaatctcttccacgattgcgtggttaagtcatgcgatgcatcactactgttagcgacggtgagcgatgtagtgtcggagcaggcgtcggatagaagttttgggatgagaaacttcaagtacgtaaacaccatcaaagcagcggttgagaaagaatgccccttgacggtttcatgcgctgacattgttgctctttctgctagagatggcattgccttgttgggaggaccaagcattgaaatgaagacagggcgaaaggatagcanagaaagctatgcaacggaggtggaagccttgattccaaaccacaatgattccatgtcctc

SEQ ID NO: 206448 - DNA, 455 bp, Glycine max
ccataaacctttaagatgttgggctttgttagctgtagtagtaacatatgacatgtctatgaacaaagcaaacagaagggaattacttcccgcaaatagggagcgtgcaggaagtaaaagcccaaacataagcgtatacataaggctaggcccaatggcgtattgcactgaatatggtaacctaggcccagtacgtcccacccgtttattttggcgcactcgtgcattataatctatgctaattatacatattatcatgcacaaagggcaaccttatgctatatatttaattggcattgaggtagcgacaatcctttctgatttcaccttcatctcctgttaaaggattggtctctgacaacaaaagaatggcccttgagaattgttggttgaaataatcattgtcgttggccatcttttggacataaggtgcagttattgggtcagtggcaagc

SEQ ID NO: 206449 - DNA, 597 bp, Glycine max
  unsure (1)..(597): unsure at all n locations
ggacaccaataagggagttcaagaatttggagacaaaaggggttcctttcccaaagaaccaacccatgagaatatactctagcctttggaacgctgaggattgggccacaaggggtgggcttgtgaaaacggattggagcaaggccccattcacagcctcatacagaaacttcaatgccctaacctcttcctccactggccaatcactggacgccacggggctggccaagatccattgggtgcaaaagaattacatgatttacaactattgcactgatattagacgtttcccacaaggccttcctccagaatgttccattgcttgagaatgttcattattcaattcaatgttgcatattattatatatataaaaaaaatggtccccatatacgtgacacgtgtatgcctattacgttgatttactttcttggataaactaatgttactaaaactatgattatggttggttggtttgtgctttaatttgttgagcactacttcattgtttgtgatcacanaagatgattatagcctgcaaaattatattcatgcccgtgtatatgtgctgaaattggaaagtatcttcattaaataaa

SEQ ID NO: 206450 - DNA, 464 bp, Glycine max
aactccaacaattttattaatgaagatactttacaatttcagcacatatacacgggcatgaatataattttgcaggctataatcatcttttgtgatcacaaacaatggagtagtgctcaacaaattaaagcacaaaccaaccaacaataatcatagttttagttacattagtttatacaagaaagtaaatcaacgtaataggcatacacgtgtcacgtatatggggaccattttttttatatatataataatatgcaacattgaattgaataatgaacattctcaagcaatggaacattctggagggaggccttgtgggaaacgtctaatatcagtgcaatagttgtaaatcatgtaattcttttgcacccaatggatcttggccagccccgtggcgtccagtgattggccagtggaggaagaagttagggcattgaagtttctgtatgaggctgtgaatgggg

SEQ ID NO: 206451 - DNA, 580 bp, Glycine max
tataaataaaacggtttctctctttgagactactatcagggtcctcggaggattactttcagctcatcttattgccactgattatgctacgggcatgagagttccgttgtatgataatcagttactaaacttagctgaagatcttgccaggaggttgttacctgcatttgatacccctacaggaattccatttggatctgtaaacttgttacatggagttgataaacatgaaagcaagataacttcaacagctggtggtgggaccttgactcttgaatttggagttctaagccgattgacaaatgatcctatttttgaacaagttaccaagaatgcagtgcgtggactttgggcacggcgttcaaagcttaacctggtcggtgctcatattaatgtttttacaggtgaatggacacaaaaggatgctgggataggaactagtattgactctttttatgagtatctattggaggcttatttattatttggagatgatgagtacttggatatattccaagaaagctatgctgctgccatgcattatccttaccatgacccttggtatgtggaagtgaatatg

SEQ ID NO: 206452 - DNA, 564 bp, Glycine max
gtaacagcagagcagaacaccgataaatcgctatgactgctcagacccaagaggagcttcttgcggccgaccttgagcaacaaaagatccatgatgatgagcctgtagttgaggatgatgatgaggatgacgaagatgacgacgatgaggatgacgacaatgttgaaggtgatgcatctggtaggtccaagcagaccagaagcgaaaagaagagtcgcaaggcaatgctcaaacttggaatgaaacctgtcacaggtgtcagtcgtgtgactgttaagaagagcaaaaatatcctgtttgttatatcaaaaccagatgttttcaagagcccgacttctgacacatacattatattcggcgaagccaagattgaagacttgagctcacagctacaaactcaagcagcagagcaattcaaggctcctaatgtgagcaatgatggatcgaagcctgaaacctctgctgctgctgctcaagacgacgaggatgtcgacgagactggtgtagatcccaaggatatagagctggtgatgactcaagcttgtgtgttgagatcagagctgt

SEQ ID NO: 206453 - DNA, 555 bp, Glycine max
ctgggagaaatttgcaaggtactttgaggtggagctgaaagaggtgaagctgcgtgatggatactatgtaatggaccctgaaaaagcagtggaaatggtggatgagaacaccatttgtgttgctgctatccttggttccactctgaatggagagtttgaagatgtcaaactcttaaatgatctcctggtggaaaagaataaggaaactggatgggacactccaattcatgtggatgctgccagtgggggattcattgcaccttttctttatccagagcttgaatgggactttcggttgccactagtgaagagcatcaatgttagtggacacaaatatggtttagtctatgctggaattggttgggtcatttggagaagcaaggaagaccttcctgaggaactcattttccacattaactatctaggagctgatcaacccaccttcaccctcaacttctccaaggttctagccaagttattgctcagtactaccaactaattcgactgggttatgagggatataaaatggtgatggaaaactgcaatgacaacatg

SEQ ID NO: 206454 - DNA, 547 bp, Glycine max
ccggaatctgtctaaccaccctaaagatccggcggcgagccccaaaaccaaacccttcttaaaggagaatccaaaattcaattccaacacataaaatttcaagtccgaggttgcctataaaaaccactttggacccccttcgctcattgcagcctcaagaatccacacaaactcagggtagggcagagagagagagagagagagagagagagagagagaatgggagggtgggctatcgcggtgcatggtggcgctggtgtcgaccctaatctcccactcgagcgccaagaagaagcgaaacaacttctcacgcgctgtctcaatcttggaatctctgctctaaattctaatcttcccgccatagatgtcgtcgaacttgtggtgagggaattggaaacggatccgctgttcaattcgggccgaggatctgccctgacagaaaaaggaacggtggagatggaggctagcatcatggatggtccaaaaacgacgatgcggcgcccgtttcggtcttaccaccgttaagaacccgatctcgcttgttcgt

SEQ ID NO: 206455 - DNA, 567 bp, Glycine max
gtgaaggcaaagatccaagacaaggagggtattcctccagaccagcaaaggttgatttttgcgggaaagcagcttgaagatggacgtacgctggcagactacaacattcaaaaggagtctacccttcaccttgtccttcgtctgaggggaggtatgcagatctttgtgaagactttgacagggaaaactatcaccttggaggttgaaagttcagacacaattgataatgtcaaggcaaaaatacaggacaaggaaggtatccccccagaccaacagaggttgatctttgctgggaagcaactggaggatggaaggactcttgctgactacaacattcagaaagagtctactcttcaccttgtcttgcgtcttcgtggtgggttttgagtttgagaatggtctgcaggtcccttgtttggtgtgaactgaagtatgtgaaagtctataatctggtcttttctttttatatgttcctgaactttgtgtatgtgtgcattccgggtccattagcggaccttgaaaagctatgatgtgtccatttgcaatctgtttaatgaattagtcttt

SEQ ID NO: 206456 - DNA, 475 bp, Glycine max
attgaaagtactaaattcattaaaacatgattgcaaattgtacacattcatagcttttcaaggtccgctaatggacccgggatgcacacatacacaaagttcaggaacatataaaaagaaaagaccagattatagactttcacatacttcagttcacaccaaacaagggacctgcagaccattctcaaactcaaaacccaccacgaagacgcaagacaaggtgaagagtagactctttctgaatgttgtagtcagcaagagtccttccatcctccagttgcttcccagcaaagatcaacctctgttggtctggggggataccttccttgtcctgtatttttgccttgacattatcaattgtgtctgaactttcaacctccaaggtgatagttttccctgtcaaagtcttcacaaagatctgcatacctcccctcagacgaaggacaaggtgaaaggtagactccttttgaaatgt

SEQ ID NO: 206457 - DNA, 293 bp, Glycine max
gcaacatgtcaatgagtgagcggaagactattgacctagaacagggatgggatttcatgctgaagggcatcaccaagctcaagaacattctcgaaggcttgcccgagcctcaattcagctccgaggactacatgatgctttacacgaccatctacaacatgtgcactcaaaagcctcctcatgactattcccaacaactttacgacaagtataaggagtcttttgaagagtacatcgtatcaacggtattaccttctttgagagagaaacacgatgaatttatgttgagagaa

SEQ ID NO: 206458 - DNA, 490 bp, Glycine max
aatccaaaccgcaaatgcatatgtaatagatacaacatgttatgctaatccatactacaggcattcagatacgaattaaagtgaaaccggaagtcccaagaacataaacttccttagaactctgactaaaacaaaacatctaagacacctgtaaataaactggggggaagcgtacggaatgggaataactggaaagcagattccagtcaaaagactagaggaatctaagacccaagattgtcattgagagagagtgaagctagatgatcagctgggttagactgctgctgagcaacatttcttaacacattcatggcttcagcaactttagccttcagagcatctggtgactcaatcagatgtaaaacttcaggctggtccatctccagaagcatgccagaaacctttgctgcagcatggagttccagctgatccacaagcgggtataaagctctaccgagcatagtactctgctgttcagggggagcat

SEQ ID NO: 206459 - DNA, 583 bp, Glycine max
ggaagatgtctagtttggttttgttgtccgtgttatttctccttctccaacgtcctctctcatccttctcagccaactccgaaggtgtgttttttaatgttccacttattgattattttgcttgtggtcctgtcctagctaatttctttcttgttttgtaggaaacgctcttcatgctttgagaagcaggctttctgaccccagcaacgtgcttcagagctgggacccaaatctcgttaatgcttgtacttggtttcatgttacctgcgactccaacaatcacgtcattcgcttagacttgggcaattctaagctctccggaactttgggaccagaacttgcccagctaccccaccttcaatacctgtttgtatctgtctcttttgttgctcccaacccaacaatccatcatggtctcacttattctttgttgagagtgcatggagctctacaggaataacataagtggcaacattcctcgggaactttctaaattgaagaaccttattagtatggatttgtatgacaaaccatttcattgcataatccccaagttttttgcacttgactcactttaattcta

SEQ ID NO: 206460 - DNA, 392 bp, Glycine max
  unsure (1)..(392): unsure at all n locations
accaaggagagaacaagcacagcctcttagaaaagcttcaccgatctgacagcagctctagctcttcaagtgaggaggaaggagaagatggagagaaaaggaagaagaagaagaaggaaaagaaagggctgaaagagaagatcgaggagaaaatagagggtgatcatcatcatcacaaggatgaggacacaagtgtccctgttgagaaagttggagttgttggaacagcacatgctgaggaaaagaaagggttcctcgacaagattaaagagaagctaccaaggcacaagaagacagaagaggccacagctactacttctnctccaccaccacctgttgcatcattggagcatggtgaaggtgctcattatgaaagagaggcccaaggagag

SEQ ID NO: 206461 - DNA, 495 bp, Glycine max
aaaacacaaataaaacacactattattccattttcagtacatatttaatttctttttacttcaaagaaggaaacctacacaaacttttttttttgtaaatggaagagataaatacacaataataaagtaaattaagtatgcatcaagaaacaccaaagaaacccacaaggctgtcatatgatgaaatgaaaacaaagcacaccacaatcatgcatctccaaccaacaaaaaagccttgtctcaatcttaaatatcaatgagcaccactctccttttccttttccttttcctcctctgtcttggagtgataaccaggaagcttctcttttatcttttctaatatacctttcttctccttggcctctccttcatgatgagcaccttcaccatgctccaatgatgcaacaggtggtggtggaagaagagtagtagctgtggcctactctgtcttcttgtgccctggtagcttctacttaatcttgtcgaggaacccct

SEQ ID NO: 206462 - DNA, 563 bp, Glycine max
ggcgcaagtgaggaacaagcaagtgcttctaaaggactatgttaccggttttcccaaagaatccgacatgaatattgtcgaaagtaccataacattgaagcttccacaaggttccaatgatgtcttgctcaaaaatttgtacttgtcttgtgatccgtatatgaggaatctcatgaacaagcccgaaggccctcccaatagtcgtgcttacactcctggctctccattaataggatatggtgtgtctaaagtcctggaatctgggcacccagattataaggaaggtgatttagtgtggggctttaccaaatgggaagagtatagcttgttaccctcagctcaaatactcttcaaaattgagcacactgatgttccacttacctactacactggaattcttggtatgccaggagtgactgcatatgcaggtctatttgaagtaggatctcttcagaaaggagaaaatgtttttgtttcggctgccttttgcgcagttggtcaacttgttgggcaatttgctaaactgaatggatgttatgtagttggaagtgctggatctaaag

SEQ ID NO: 206463 - DNA, 513 bp, Glycine max
atagaaaaagcaaatgcttttattcaagagaaacaactgtgcattacatttgatactgctctcaggactatcaagaacaaagagcatcatcatacagttgacgaaggtgactgcaaaggtgatgtcaagacagccaatttttcagcaaaaaaaccagaaataaaactgataacttcccattgaacacaagaaacaaatgctttttactcatgagaaacaacgagcacttgttttccaacattgcgaccgctaaaaaggccaaccaatgctgaaggtccattctcaagcccctcagctatgtcttccacatacacaaccttcccctctctgatatttggcaggagaaactccaagaacttgggatataggtgaacgaaatccatgaagttaaagccttgcaaacgaatccgcttatatatgatctgtgccaaatttgttacaccttcatgttgagtaagattatactgtgagatcattccacagacgggtatgcgaccacggactctcatgttc

SEQ ID NO: 206464 - DNA, 531 bp, Glycine max
cggaattaggagtgaggaagagagggttctctgagactgaaactgatgaaacagccaccgttgatttgatgcttaacctctcacccaaggaagctgctgctgctgatggtgcagatccacgtgagaagccaaagacttcgccgaaggagaagacccttctgcttcccgatcccgccaagcctcctgccaaggcgcaagtggtgggatggccacccgtgaggtctttccggaagaacatgttcgcagcccaaaagagcagcggcggagaggaaagcgaaaagagcagccctaatgcaagctttgtcaaagttagcatggatggagcaccttaccttcgcaaagttgacttgaagatgtacaagagttacccagagctctctgatgccttgggcaaaatgtttagctccttcaccattggaaattgtgaatcccaaggcttcaaggatttcatgaatgagagcaagttgatggatcttttgaacagctccgactatgtcccgacctatgaagacagggatggcgactggatgc

SEQ ID NO: 206465 - DNA, 506 bp, Glycine max
agcaaattaataaacttattattatgcaagcacacaagtaaagaaataagaaagtcttgcaacataatttagagtcattatcgtttgtgttcataatttatacttacgacatctcacaactttgtttgaaatatatattatataacaaaccataatgatacacagatttacttaactatattttttaacaccctgctctctccctctgtgtctgctgcagcttaaccttgcttcagttactaagtcaactaggcaccgctaatgatgatggagcagattttggactggtaactactagtctagctcctgttcttgcatttctccacggctcttggtgccagtccaatagcttcctttcctttcatgatacgtaaacgcttgcatgattcaacaaacatctcccatggcacatcaccgacaagcatccagtcgccatccctgtcttcataggtcgggacatagtcggagctgttcaaaagatccatcaacttgctctcattcatgaa

SEQ ID NO: 206466 - DNA, 532 bp, Glycine max
ctagcactcaatattgctgagaaaggctttcccatttctgtttataaccgaaccacttccaaggttgatgagactgtagaacgagcaaaacaagaaggaaatcttccagtttatggctaccatgaccccgaagcttttgttcattccattcaaaagcctagggtgataataatgcttgttaaggctggggcacctgttgaccagaccattaagaccctatctgcatacatggaaaaaggtgactgcataattgatggtggtaacgaatggtacgagaacaccgaaagacgagagaaatcggtggctgaattgggtctgctctaccttgggatgggagtttctggtggtgaggaaggtgctcgtaatggtccctctttgatgcctggtggttcgtttgaggctttcaaatacatagaagatattcttctcaaggtggcagctcaagtccctgacagtggtccttgcgtgacttatattggtaaaggtggctctggtaattttgtgaagatgatccacattggcatcgaatatt

SEQ ID NO: 206467 - DNA, 517 bp, Glycine max
aataaacaaagatatttatggagataacctaatactgatatttatactaatacttaggtcgagcactagtactagtagtacaagcccaagcccaccaataacaagaccaaaacctaaataactcaagaaagatattcttaatattctccaacaatatcaaacttattcactgttgacagtagatcaacattaaactcaacaagttaacaataaatgtaaaaatttcaactcctggtgtaacataacatgtatccatgacgctgaaggaaatcttatcaaaatgtgaaaattaaaaaggcaccatgagctgggacaattttgtatcaagcacaaagcatgatcagcaaagatacaacatagttggaaaacaaactatcaagcaattcagttggaaataatataaataaaacttcaccacgttgtggctatgtaaactcaactcagcatacagtctgagcagaaaacattacatttattaggaaaatcctgattgttcaaatacagtaatctaaattct

SEQ ID NO: 206468 - DNA, 466 bp, Glycine max
gtcatcacaaggatgaaggactgggaagatgattctacacaccacaacatggatgtagctggcaatctgcttgaaacatatggacgttctctgtatcagtatacaaaaactactgtacgtatggttaacatggtgcagatactgatgcgagggaaacatgtctaagacttgactccgagacataacactatgatggagaatgcatactacctttacacgccaccagatggatctgcacgagtacctgaaggtgatgcttcattgcatcaccatcataggaagatacttgcctctgatcttgaggaggataccatggctcatgctctgtagcaccttcagaaggaacctagtaatgaacgtgaaccatatcttttgaaatgcttcatgaatggctacagaggaaaatgtgcgtagatccacctgactgatctctggctgctggataagtcgctatcatgatgagtat

SEQ ID NO: 206469 - DNA, 372 bp, Glycine max
attgaaagttctatatttattaaaacatgattgcaaattgtacacattcataaatttttaaggacctttactgggcccgacatgcgcacatacacaaagtttatgaacatataaacagaaaggaccaaaatataggctcttacatacttcagttcacaccaaacaagggacctgcagaccattgtcaaactcaaaacctaccacgaagacgcacgacatggcgcagaggttactctggctgaatgatgtagtcacaaagagtccttacattcttcaggcgctttccagcatagatcaatcttttgcgagctggggggataccttgctctgcctgaacaaatgcctggacattatcaacagtgtctgaacttt

SEQ ID NO: 206470 - DNA, 542 bp, Glycine max
ggcactctcggtggctataatctttctgtggtgagttgtcaagatgtacacatcaaggaagaaaatccacaaggataaggatgctgagccaactgaatttgaggaatcagtcggacaggcattgtttgatctggaaaataccaacaatgagctgaaaagtgatctgaaagatttatacataaactcagctgtccaaattgatgtttctgggaaccgcaaggctgtggttatccatgtcccctacagattaaggaaaggattccggaagattcatgtcaggcttgtgagagaacttgagaaaaagtttagtggaaaggatgtaatcctgattgccacccggaggatattgaggccaccaaagaaaggttctgctgttcagcgtccccgcacccgaacactcactgctgtacacgaggcaatgctggaagatattgtattgcctgctgagattgttggaaagcgtgttaggtataaaattgatggttccaagattatgaacgtctttttggacccaaggagcgaaacacaccgagtcaaattga

SEQ ID NO: 206471 - DNA, 522 bp, Glycine max
ccaaaacaaaacactgacataaatagtagaaatacgggcatcatttgttataagaaaatatatcaaattctacattgataaaccaggagacagtattttctataagtaccacccctaaagaaaatccagaattaaagccaacttaacaaaaccagcatccaccatatataattcagaaacaaatgcaaagctaacaaatagaacctaagcctcggtggtaggatactcaaacacaatatctttgcccgaaagtttcctgtatactgcagcaaaagtctccaatttgtactcggtgttgtttcgctccttggggtccaaaaagaccttcataatcttggaaccatcaattttatacctaacacgctttccaacaatctcagcaggcaatacaatatcttccagcattgcctcgtgtacagcagtgagtgttcgggtgcggggacgctgaacagcagaacctttctttggtggcctcaatatccctccggtgggcatccaggatacattcctttcactaaactt

SEQ ID NO: 206472 - DNA, 352 bp, Glycine max
ggcctaaaaggcctcggtctaatgcagttccttcatccccagattcttctgttcttactcgagaagcatcatctaaagtgagcatagacccttcaccggcaaatggctttccaagggtcttgcaaggtcaagaattctcgaccttgagaggcaattttgctgaaagtaatgagtctgatactgctgagaagtctgttgtttggccacctgctgcagtagatgatgaaaagatggatgtttctacttcaaggaggtatggttcagagagctggatgtcaatggggaggaatgagcctacatattcggatcttccttcaagcttttggggccatggggatccttctcattatcc

SEQ ID NO: 206473 - DNA, 547 bp, Glycine max
ggtagtggctgtagaggaaacactcctgttttgtgcgcatattgatattggaatagtctttctctgaaccccatttttgcaaaaaggaagaaagagaaagagagagagagagagagagaagagatatacactgccaagaagaagaacatgaaaattcagtgcgatgtgtgtgagaaagccccggcaaccgtgatttgctgcgcagatgaggcagctttgtgtgccaaatgtgacgttgaagttcatgctgcaaacaagcttgcaagcaagcaccagaggcttctccttcaatctttatctaacaagcttcccagatgtgacatatgtcaagataagccagctttcatattttgtgttgaggacagagcactcttctgtaaagactgtgatgaacctattcatttagccagtagcctttctgcaaaccaccagcgcttacttgctactggtatccgggtggctttgggttctaattgcaccaaaggcaatgaaaaaggtcacgtggaaccatctaaaccaaaagcacaagaagttcctgcgaaaattc

SEQ ID NO: 206474 - DNA, 575 bp, Glycine max
ctagatcacagagaggttaagtccttcataagcagcatcccttgtgtttcaagcaagcttagaaaatcaaatgaggaagcttattcaccaaagtttgtcagcattggacccttatacagaggaacaagtagccaccttctggccatggaagagcacaaatggcgttacatgctggctctccttcatagaactcaaaatccagtttcaaccttggatgaatgtggcactgtcattctaggcttggacgatgcagttcgtgcaagctatggaggtaacatcaaatatgaagctcatgagctagccaaaataatgttacttgatggctccttcttgctagaacttcttcttagatgcgcaccaccaaacatggttcctcaaattccaaaagaagataaccataataatggttcttcttcagatccaatactaggacacaaagaggtgtttttatctattctcaccgatttcactctactagagaaccaaatgcccttttttgttctcaagacattggctaggatgctttttcccaatgtcttcacaagtgaagctgatcaccttggtgctgatctcac

SEQ ID NO: 206475 - DNA, 559 bp, Glycine max
cgtcaagctaccaaagacgctggtgtcattgctggtctaaatgtgatgcgaattatcaatgagcctactgcagctgccattgcatatggtcttgataagaaggccacgagtgttggtgagaagaatgtgttgatttttgaccttggtggtgggacatttgatgtgtctttactcaccattgaggagggtatctttgaggtgaaagccactgctggttgacaccccatcttggaaggtgaaagatttttgataccaggatggtgaaccactttgttcaagagttcaagagaaagaacaagaaggacattagtggataccccagagcacttagaaggttgaggactgcttgtgagagggccaagagaacactttcatcgactgctcagaccaccattgaaattgattctctatacgagggaattgatttctactgcactgatactcgtgccagatttgaggagcttaacatggatctcttcaggaaatgtatggagcccgtggagaaatgtttgatggatgctaagatggacacaagacgtgttgatgatgttgtccttgt

SEQ ID NO: 206476 - DNA, 451 bp, Glycine max
atcagaagggaaaaatagtttgaatcccatccaacaaaaatcatgcgattaaaatccaattaaaaaagcataaagtaaaataagtttttaaaacaggtatctggaggaaagcaactacatttagtccacttcctcaatcttggggccagcaccacttccaccagaaggaggagcagcatactcatcctctgctgcaccagcaccacccacgtctggaccagcaccaccttggtacatcttggcaatgattggattgcagatgctttccaattccttcattttgtcctcaaactcatctgcttctgcaagctggttgctgtctaaccactggattgcttgctcaattgcatcctcaatcttcttcttgtcagccgggtcaagtttctcaccaatcttgtcatccttcacggtgttcctcatgttgtatgcataagttttccaaagcgttttt

SEQ ID NO: 206477 - DNA, 513 bp, Glycine max
gatgaatgaagcggctattcttgcagccaggcgtgacctcaaggaaataagtaaagatgagatatctgatgcgcttgaaaggatcatagctggacctgagaagaaaaatgctgttgtctcagatgagaagaagaaattagtagcctatcatgaggctggccatgctctagtgggtgctttaatgccagaatatgaccctgtagccaagatatcaattattcctcgtggccaagctggtggtctcacattttttgctcccagcgaagagaggctcgagtctggattgtacagtagaagttaccttgaaaatcagatggctgttgccctgggtggaagggttgccgaagaggttatttttggccaggaaaatgtcaccaccggagcatcaaacgacttcatgcaagtttcacgagtggcaaggcagatggttgagagatttggattcagcaaaaaaattggacaagttgccattggtggacctggtggaaatccattcttggtcaacagatgtca

SEQ ID NO: 206478 - DNA, 394 bp, Glycine max
gtgctaattgttttttctccttgaatttgataaaataattattgattcttacagtgtacaagtcagagcgtattttatagtacaaacataattctgtgacttgcgtgtatgattatgcaacatataattcggcttttccatcaatgaatagactcatgaactcttcaccatccacagtttctttttctatgagaagttgagcaagcttgtgaaggatatcaatgtgagttgagataatatgtgttgccctagaatatgctctctctaccagttccctcactttcgcattcactacatccgcagttgccatggagtaatccttttgcgatgacatctgttgacccaagaatggatttccaccaggtccaccaatggcaacttgtccaattttttt

SEQ ID NO: 206479 - DNA, 507 bp, Glycine max
tgcatcatagagtatggccagccacgatcttcgattcttcgagttgaacacaggcgctaagataccttccgttggtttgggaacgtggctcgctgaacctggcgttgttgctcgcgccttggccactgcaataaacgttggatatcggcatatagattgtgcgcaaatttatggcaatgaaaaggagattggtgctgccttgaagaagttatttgctgatggtgtagttaagcgtgaagatatgtttatcacctccaagctatggtgtaatgatcacttgccggaaaatgtcccagaggcatttgataaaactttacaagatttgcaactggactatttggatctctaccttatccattggccagtcagtgcgaaaaacgggaagcttaccaaacctgacatacctagcacatggagagcaatggaagcactctacaattctggcaaggctcaagctataggggtcagcaatttctctgtaaagaagcttcaggatttgatggatgt

SEQ ID NO: 206480 - DNA, 545 bp, Glycine max
aataactaacattttccgatctaaacgatattagacttctaacaatagttttgtcaaacacacaataaggtcaagactcaaacaactgaattccaaaatgacacgttattaatgtaaactcgaaatctcccttgacacatctcaagtccaaaattataaacacatcgtagattattacaataatcataaagataggctcatttttgcattaagcaagagggggggatgtggccaatatggaaactgtccattactcatcccagagttcttcaattgttttgtacccgggagatgtcttgctaaaaaaaccatctccagtaactattctctcctgcttaatgtcagagaagttggcaagcaaatctgcaggtatggaccaatcaaagagatcaaagttttccttgagccttgcatcatttgtgctcttgggaagcacactgtggcccatttgtagtccccatctaagagctatttgtgctgcagtcttccctaacttctctgcagttgtgtgcagaaatggatttttaagaatattactttcactg

SEQ ID NO: 206481 - DNA, 499 bp, Glycine max
ggacttcaagaactatgagctcaaggaggggctgcttcgtgctgtcgctggcaccggcatgtgggagtgtgtggacttcttccctgtgtccaaggagaatgagaatggattggatacttctattaatggggctgaggtgaagcatgtgatgaaggtgagcctggatgatgatagacatgattactattcaattgggacttatgatgagaagaatgttctgttcacaccagatgatgctaagaatgatgttggcgttggattgaggtatgactatgggatattctatgcatccaagacgttttatgatcagaataaggagaggagagttttgtggggttggattggggagtctgacagtgaatatgctgatgtggccaaaggttgggcttcagttcagagtattcctagaactgtggagcttgataggaagactggcagccacttacttcagtggcctgttgctgagatcgagagtttgagattgagaagtgatgaaatt

SEQ ID NO: 206482 - DNA, 506 bp, Glycine max
ccatatgtaaatatttttagcatagaattggataacattaacatcatatttctttgaacagattctcttgtaagcatcatttcacatgatatgataaaattacaacaaaaattctgataaacataactgggcaaaaatgaaggaatgcgctttgagcaagaaccataaccttatgtcggttattcaggggaggacattacaactgataagtacaaattgccaacccaagatgtattccaatcctttgtgactatagctcttctatctccaattcaaatttttaactcttctgatcagggtggaatgggcgtataaatgcagaattcatttgccaaacttttagtgaggctgtcacagtggcctcggtagcattgttgaacaagaacaacctagcagctccatagattgcctttgttggataaacccgagatgtcacaaccgtccttccaccttgagcaaagctttcaacaatagaatggtccaccagtattccgcaggaaaacttt

SEQ ID NO: 206483 - DNA, 489 bp, Glycine max
agataatggagtcgtgtccgagaactgatatagagaaccttgaagacttgctcgaggaggagaatctctatttgaatatagaggaaggagagcaaggacggttgcctttgttgattttgaagttgaaggaaagcgataagcagagaaaaaggcctgcagttgtttttcttcacagtacgaacaaatacaaagaagtcctacgtccattgcttaaggcgtatgcttcgcgaggatatatagcaatttctgatgattctcgttaccatggagaacgtgctaccagcgcaaccacctatcgcgatgcacttatttctgcatggaaaactggtgagacgatgccattcatatttgacacggtctgggacttgattagattggcagattatctaacacagagagaggatatagacccttctaggataggaatcactggaatatcacttggaggaatgcatgcatggtttgctgcagttgctgatacttgctatg

SEQ ID NO: 206484 - DNA, 84 bp, Glycine max
acgacctttttttttttttttttttttttttttttttttttttttttttttttttttttttttttttttttatttttataatat

SEQ ID NO: 206485 - DNA, 584 bp, Glycine max
  unsure (1)..(584): unsure at all n locations
tttaccttctattgctgaaaatggtgaatctcggcatcccagactagacattccagcacctgattacatgcaatccaatcacaaggatggtggggtttctgtaagttcaactacatcaaaacttgccaatcccaatactcgattaccaggaacaagttcagcaaattccagtgcttcttcagctgcacttggtcaaaagaaattgtatgcagaatcccagacaggaaagtccacttttcaaaagcttttggagccaatgcttcctcaacttcctggaattgctccttatagaattgtcctggggaatgttaaggataagcttgagaaaagtcgtagacggttagaaattcttcttgaggatgttgcatgtgactatgatcctttggattactatgaaacatctgatcagcttttggaacctctgctcctctgttatgaatctctgcaatcgtgtggatctggggtgctagctgatggtcgacttgctgatctgattcgtagagttgctacctttggaatgngtgtaatgaagcttgacttgcgtcaggaatcttggagacatgcagaagcacttgatgcaataa

SEQ ID NO: 206486 - DNA, 606 bp, Glycine max
  unsure (1)..(606): unsure at all n locations
ctcggctacttggacttgagtgacaatgccttgagtggtgaaatcccaagtgagctatgttacttgcccaaactcgaggaactccatctcaactccaacgacctcgtggggtccattccagttgcaattgggaacctcacgaagttgcagaagcttatcctctacgacaatcaactcggcggcaaaattcccggcaccatcgggaaccttaagagccttcaagtgataagagcaggtggaaacaagaacctggaaggccttttaccacaagaaattggcaattgttccagtttggtcatgttgggtcttgctgaaactagcctttcaggttctctacctncaactcttggccttttgaagaaccttgaaaccattgccatttacacttccctactctcaggtgaaataccacctgaacttgggtactgcacagggctccaaaacatatatctttacgagaactccctcactggatccataccaagcaagttgggaaaccttaagaacctcgaaaaccttctcctgtggcagaacaacctagttggcaccatcccttcagagattggatactgcgagatgttgtcagtgattgacgtgtcaatgaac

SEQ ID NO: 206487 - DNA, 584 bp, Glycine max
  unsure (1)..(584): unsure at all n locations
aacactcactcattgaggctcacacataatggaagaagcctggttcataatcctagtctctctctgtgtctgcgttctcataagagtcatattattattcttccttcacaaaaaaaccctagccaccccaccaggccctcctcacatcccaatcatcacaagctttctatggctcaaaaaatccttcatagaactcgagccattcctccgaaccctcgccgccaaacacggtcctatcttcactctccgcataggatcacgccccgtcatattcatcgccaacagagccctggcccaccaagccctaatccaaaacggttccattttctccgatcgccccaaggccctccccgccgccaaaatcgtcagcagcaaccaacacaacatcaactccgtcccctacggcgccacctggcgcgccctacgccgcaacctcgccttcgagatgctccacccctcacgcgtcatgtccttctccggtacccgcaagtgggtcctacacaccctcctcacgcgcctcanatcagattcacaatccaacgattcaatataagtcattaaccacttccaatactccatgttct

SEQ ID NO: 206488 - DNA, 557 bp, Glycine max
  unsure (1)..(557): unsure at all n locations
ctctgttctcttcaccattctctttcttctttgtttcaagtttcaacaacccagattcactctctctctcgtaattttctctcttattgaggctagaaaaagagagcaaaaaaactaaaaaatgcctgcggtcggaggtataaacaccggagggggcaaggagtaccctggaagcctcactctatttgtgacggtaacatgtatagttgcagccatgggtggtttaatcttcggttacgatatcggaatttcaggtggagtgacgtccatggatccgtttctgctcaagttntttccgtcagtgttccggaagaaaaactccgacaaaacggtgaaccagtactgccaatacgacagccagacactgacgatgttcacgtcgtccttgtacctcgccgctttgctgtcgtcgttggttgccgccaccgtcacgcgtaaattcggccggaaactctccatgcttttcggaggcttgcttttcctcgtcggtgccctcataaacggtttcgcccaacacgtttggatgntaatcgtgggtcggatctttgctcggttcg

SEQ ID NO: 206489 - DNA, 545 bp, Glycine max
  unsure (1)..(545): unsure at all n locations
cttcaaccaaagccaaagtctcaatttgtttaagcactactgctaccaaaccaaaagggtttcgttccttagggcggttttccgatttctcggaaaccgctctatataccctgcactgcaaccacattcgttatagtgttcctaatttgaaagaaagagagaaagaaaaaattaatgtccttggatttgtagaaattaataaataattttggacgccctctcccctcactcgcgactatgggtgcaaaacggcaacaacccagtgaatgggtgaaaggtaaacttgtagggtgtggatcttttggcaatgtccatttggcaatgaacaaaaccaccggtgggctttttgttgtgaaatcaccacattccagggctgaacgccatgctttggataaagaggtgaaaatcctaaacactttaaattcatcaccatacattgtccaatgtttggggaccgaggaggaggaagaagaccaaggcaagctcaatgtttttatggagtacatggccggnggtaatttggcagacatggtgcacaagtttgg

SEQ ID NO: 206490 - DNA, 567 bp, Glycine max
ttggaatggagatcccagtagaaaagattttcctggcacagaagatgatgatatacaagtgtaatcttgttgggaagccagtggtgactgctacccaaatgcttgaatcaatgataaagtctcccaggccaacccgagctgaagcaactgatgtagctaatgcagttcttgatggaacagattgtgtgatgcttagtggtgaaagtgctgctggggcatacccagaacttgctgtgaaaatcatggctcgcatttgcattgaagcagaatcatcccttgactatggtgccatcttcaaagagatgataaggtctaccccattgcctatgagtccattggagagccttgcatcatctgctgtccgcacagcaaacaaggccaaagcaaaactcattgttgtgctgacacgtggcgggtctacagccaagttagttgccaagtataggccagcggttccaatattgtcggtggtggtttcagtgttgagcacggactcatttgattggacctgcagtgatgagacgccagcaaggcacagcctgatatacaggggcttgattcctatac

SEQ ID NO: 206491 - DNA, 526 bp, Glycine max
caataatgaagatactcctgtcaaggatgaatttatacgtcttccagctgaaataaaaaatattgaaaaggattcttttgtctttcattttgctagtggaaatgtagattatggtatcaaagaagataaaattcccaacatcaaagtagcagccctagcagcacaaggaatctccgagcttatgcctcctgatgttgctaatgcattttggagttctgacaaagtctcttctaaggtctccaaaagcatgcgtgatattgtcagagttgctatgagtcaagcacagaaaagaacaagattatctggggatacaaattttagccggattatctgttcaagaggggattctgatccttttgatggactctatgttggtgcatttggtccttatggcatggaaatagtgcatttgaggcgaaaatttggacattggaatgaagtgaacaatgaaaacaacacttcagatgttggattctttgaatatgtagaggctgtgaagttaactggggatcttaatgttccagct

SEQ ID NO: 206492 - DNA, 544 bp, Glycine max
ctcgagccgaatcggctcgaggccaaggagaaaagaaaaaaaaaaagaactggactccttcaattagtgcattgtttcttttcttcaaatggtagcaagaagacattgttaatttgagagatggcgagttacgaggctattaagaactttgatgatgatgatgatgatgatgatgatgtggagatggcactcccccatagccagatctctgaatcaagatctgccactgtttcttcccccattggccaaactaccccgcttcacattcacaacattattgaggaacaacgcattatctccaggcaccaacctcaacccaaatctccgcgtctggtttctcttgatgtttttcgtggtctcaccgtcgcgctgatgatacttgttgatgatgctggcggactcattcctgcgctcaaccattccccatggaatggtttaacactagctgattatgtcatgccatttttcctatttattggtggtgtttcgcttgcactctcatacaagaaactgtccttgtggagttgatgcatctagaaaagca

SEQ ID NO: 206493 - DNA, 547 bp, Glycine max
  unsure (1)..(547): unsure at all n locations
cttttccagaacagtaaaattcaagtaaaccaaaagccataaatagtagtattaatttataatttattactatttattattattgtcattttctgttctatatttttttaaataccctgaaaccgcgaaaccctagctgaaccctgtttcccttctccggccaccgtaatggatttcactccgccgccgatcgaggacggtttcaccgccgagaaactcttcacgcagggcttctcctacacatacgatgacgtcatctttctcccccactacatcgacttcgctgccgacgtcgtggacctctccacgcgcctcacgcgccgncttccccttgccgtgccgtttgttgcctctccgatggacaccgtgtcggagtccgccatggcctncgccatggcctccctcggcggcatcgccgtcgtccacttcaacgtcctcgccgtcgtccaggcggccatccttcgcaaagcgaagtcccgccgcgtccccatcctctccgaccccgncttcggcgcaccttccgncgtcgtggagcacgatgacgcct

SEQ ID NO: 206494 - DNA, 626 bp, Glycine max
  unsure (1)..(626): unsure at all n locations
atcaaaactcaaaacttctcttttctttcattctctctcttttattcttatcatcacaatgccttcaattcccgaagagcccctcctggctccgaacccggatcgcttctgcatgttcccaatccaatacccgcaaatctgggaaatgtacaagaaagccgaagcctcgttctggacggcggaggaggtggacctctcccaggacctccgccactgggactccctcaccgacggcgagcgccacttcgtcacccacgtcctcgccttcttcgccgcctccgatggcatcgtcctcgagaacctcgccgggcgcttcacaaaggagatccagctccccgaggcccgggccttctacggcttccagatcgccatcgagaacatccactccgagatgtacagcctnctcctcgaaacctacatcaaggactccgaccagaagaaccacctcttccgtgccatcgacaccatcccctgcgtcgctaagaaagcccagtgggcccttcgctggatcgattcctncgacttcttcgncgagcgtctcgttgccttcgcatgtgttgaaggtattttcttctctgtaagcttctgcgctatcttctggctcaaaaacgaggactcatgccggg

SEQ ID NO: 206495 - DNA, 526 bp, Glycine max
ctctgaccatgatgctacattgatgcattcaatctctgagatatctgggggtacgttttctttcattgaagctgaggatgtcattcaggatgcatttgcacagtgtattgggggactcttgagtgtggtggtgcaagaattacaagtagaagttaggtgtgttcaccctcaattgcaacttagttcagtaaaagcaggaagttaccaaacaagcttgatggcgaatgcaagactggctactatcagtgtaggagatttgtatgctgaagaggaaagagattttttggtgacagttaatgttccagttgataagtcaagtgataagacatcgttgttgatcgtgaaaggtctttaccgagatcccataacaaaagaaatggtggctttggaagaaaacagtgaagttagaattctgagatctgatgtcggtggaagagaactggttgtgtcaatacaggtagatagacagcgaaacaagctgacagcagctgatgcaatggctgatgctagagttgcagccgaacgc

SEQ ID NO: 206496 - DNA, 568 bp, Glycine max
ctcgagccgcttttctctgtttctccctttctctctgtctctctctcgctcttcttctcatccagcaccgagtcacagactcaccgatcttccgattccctttcgtcttggtttatgagctcgaaggagagacccactcttggtggcacgcggattaagacccgcaaacggaatattgctgcgccgctggaccctgcagcattctcggatgcagtggtccagatttatttggataatgctggtgatctggaacttattgctaagagcattgaatcttcagaccttaacttttcaagatacggcgataccttttttgaggttgttttcactgggggtcgtacacaacctggaactaccaagcctgatgagggggaccgtcatccatactctataatagagtgtgagcctaagcgggaagtcattttaccatctgtaatctacatacaaaagattttgcggcgaaggccatttcttatcaagaatcttgaaaatgtcatgcggaaattccttcagtccttggagcctttcgaggaaaatgagaggaaaaagttggcaatcttcacagcac

SEQ ID NO: 206497 - DNA, 529 bp, Glycine max
  unsure (1)..(529): unsure at all n locations
tttcagtgagtgatcggtgttcacttgatccttcataagtcgtcatcatcatcatcatcatcaccgttgattgaagaagatgccgatcagaaacatcgccatcggaaggcctgaagaggctactcaccccgacacgttgaaggcggggttggctgagttcatctccaccttgatcttcgtgttcgccggttcaggttccggcatcgcctacaacaagctcaccgacaacggcgccgccactcccgccggcctcatctccgcttccatcgcccatgctttcgccctcttcgtcgccgtctccgtcggcgccaacatctccggcggccacgtcaaccccgccgtcaccttcggcgccttcgtgggcggcaacatcaccttactccgcggcatcgtctacgtcatcgcccagctcctcggctccatcgtggcctncctcctnctcgccttcgtcactgcctcccctgttccagcattcgggctttacgctggagtcggagttggcaacgctttggtgttggagatcgtgatg

SEQ ID NO: 206498 - DNA, 442 bp, Glycine max
aagaagtactagtgaaatggtacaaccaaccagacccgaataatgatacatacattcaattcaattgtggaccaggtgagagcgagagcatgcacaaaatgataattaaattaacttaaaagaaaacttcaggatcatcaaccatccaaccaaagatcaacggccaccgattcaacaggaaagaaaacacaaaggaaggaaaaccatacacagaagaagattccggagaaattcaataatacacattttttttttttattatttcatttttcccctctagtagtcagtgctgggaagctgctcgtgggtgtggctgatgaagacaacctcgtagataagcccagcaattccaccttcgatgagagggccggcccagtagatccagtggttggtccaggtccagctcacgacagcaggcccaaatgtcacagcagggttcatg

SEQ ID NO: 206499 - DNA, 418 bp, Glycine max
aaccaaaagatgaaaagatagaaaataatgtcaatggaaatgatggcaaccgaacgtgtttgttatgtcactgaattttcgccacactattgggagtgttccatacagcaatttgctaaccatagtgacggctagatgtggacattgtgccaatcttgctatcagttaacatgggagcgtcacttcaagcattttccccctcaagaccctcagtcacagaaacagcttctaagctttgaagaaccaagcagctgcaaggaactgggatcatcatcttcaaaatgtaacaaaatagcgccatttcacgaggcagtagagcatgaataacctaggattccctccattcgtcctacagagaagagacatcgggttccttctgcttataatcgcttcattaaagaggaaattcaaaggatta

SEQ ID NO: 206500 - DNA, 529 bp, Glycine max
gattcacacaattcatacttaaaaaatcatgccatggagcacttattagtttataccccttctggtcatttaatccaatataaactactaccaccattggcggcagagtcaagtgaaactgtttcaagaacagccctagttccttcagcacagatacaagaagaagatttgcgtgtgaaggttgaacctgttcaatggtgggatgtctgtaggagatatgattggccagaaaaagaagtgtgcatattggggaatactgttggtggactggaagctgcagaaatgatcttggatagttcagattatgaagataataatagcgtcaggaacaataattctataaaacttaataagcaatgtcacttctcaaatacagaggtacatataagctctgggcggataccaatttggcaagaatctgaggtgtctttctttgtgattagtccttagggaagctggagagctgaatttatgtgaacttaattccagtggagaaattgaaatgggaatattcccggtatgagattga

SEQ ID NO: 206501 - DNA, 645 bp, Glycine max
aagcattccatagcctcccataaaaatgaagaatactatcttctctgctctctttctactttgtgccttcaccacctcatacctaccttcaaccaccgcggtggtcgataccgacggtgatattcttcagaatcctggcacatactttatcttgtccgtttttcgacccggcggcggagtagaattcgccgccactggaaacgaaacttgccctctcactgtcgtgcagactctcttcgggaggggctttccagcaatattatcgtcccggttacgaatccctttcatcggcgaaggacaactcttcagcatcctgttccgtattgtgccatggtgcgccaccactccttctaagtggaccattgtggagggtttaccagaatcacccgcggttaaactcactgggtacgacaacacagtgcctggtgagtttaaaattgagaaagctaaccctttccataacgactatacccttttggtctgtccagctggcgaagaaagcatatgtgggcatattgggaatcatttcgatgatgatggaaacaggcgtttggtggtgtctgaggagaatatattaagggttcagtttcaggaaattcgatcatcagcaccggatgaggcatcactggcccttaaaaacatcat

SEQ ID NO: 206502 - DNA, 506 bp, Glycine max
ctcttcaagagcgtattacaacaaccaagaagggctcaattacctctgtccaagctatctatgtgcctgctgatgacttgacagatcctgctcctgctaccacttttgctcacttggatgccacaacagtgttatcacgacagatctccgagcttggtatctatcctgctgttgaccccttggattctacatctcgtatgctttccccccttattttgggtgcggatcactatgaaactgctcgtggtgtacagaaagtacttcagaactacaagaatcttcaagatatcattgctattttgggaatggatgagctcagtgaagatgataaattgactgttgcccgtgcccgtaagattcagcgattcttaagccagcctttccatgttgcagaagtcttcactggtgccccaggaaaatatgttgagttgaaggagaacatcaccagtttccagggtgtgttggatggcaaatacgatgaccttccagagcagtcgttttacatg

SEQ ID NO: 206503 - DNA, 602 bp, Glycine max
ctttgtttgcttctcaagtctctcgaagcctctttctctctcttctagaagctatctgtgtttggtgttactaagtctccaacaagcaaagtacatggttgatttggaaatccaggtccccaccccattcgacccgtttgccgaggcgagagaatcggatgcccccggagcaaaggagtatgtgcatattcgaattcagcagaggaatgggaagaagagtctgaccacagtgcaagggctgaagaaggagttcagctacgagaagatcctcaaggacctcaagaaggagttctgctgcaacggaaccgtggtgcaggacaaggagcttggcaagatcatccaactccaaggcgaccagcgtaagaacgtctcccacttcctcgttcaggctggccttgtcaggaaggaccagatcaagattcatggtttttgaccaattggtcttgtttttggtagtagtaatttcaagttgttcttgagtttgtgagttttgaaagtttggattgtttttctgtttgatgagtggtgttggaataagtttggtttggtttggtttggtttggtttccaattttaatgattggatttcatggatgttgttag

SEQ ID NO: 206504 - DNA, 525 bp, Glycine max
ctcgagccgctcgagccgattcggctcgaggttggaaagttctattcaaacccctggttccagtactttaaccgaaacccctagttctattcacgcgattccgcagaaccagagcgtcttctccagagaattgaacttttctgagtatggtttcgacccaaagactgggaacaatcagaatcaccattctctgaagccggaatccggcgagattctcagcttcggcgagagcaagagaacctcctacggcggcgtcaatgggaattccaattccaattcccattttttctccggtcagtcgccgtttgttgctgctgcggatgagaacaccaacaaaaataacatcaacaacaatgggaagacaaagtcaccgaattcgcgcggtagcaacgacgacggaatgctttccttcaccttcggcgtgattcttccggcctcgaatttgaagtccggtggcggcggcgattccgaccactcggatctggaggcttcggtggtgaaggacccggtggtggagccggagaa

SEQ ID NO: 206505 - DNA, 527 bp, Glycine max
cttctatcaccaccacgaagattaacaatgtctcacaccagaaagcactctccttttctgttcccaaatgttgattccactgttgtccctgacccctccaatttcttctccccaaaccttctctcaaatccactccccacaaactccttcttccaaaactttgtcctaaaaaacggtgaccaacctgaatacattcacccttacctcatcaaatcctcaaacttttctctctccctctcatacccatctcgcttcttcaactcctccttcatctaccaagtcttcaaccctgatctcaccatctcttcctctcaaaaatcccacctttcccatttgaaccacaccatctcttcccacaatgatctcagtgttacattggatatcccttcttccaatttgagggttttccttgttaggggaagcccctttttgaccctctctgtgactcaaccaacccctctttccatcaccacaatccatgcaattctctctttttccttcagcgagtcactcaccaaacacacttt

SEQ ID NO: 206506 - DNA, 609 bp, Glycine max
cactctcatcttcttattcttctgctttcactctctgactcaatcgttctaatccacaaaaaatgaccttaaattacaacattgccctcgccttctctgcggtgctcacgctgctcctctttcccctactgaccgtaggggagctcgtggaggagcagccactagtcctcaagtaccacaacggccagctcctgaagggccgcatcaccgtcaatctcatctggtacggcaccttcaccccgatccaacggtccataatcgtggacttcataaactcgttaagcagcgcgccaaacgcgcctctcccctcgaccgccacgtggtggaaaaccacggagaagtacaaggtgggaggaggatcccctgcgctcgtcgtagggatgcagttcctacacccggcttacacgctagggaaaaatctcaaaggaagagatctcctcgcactcgcgtcaaagttcaacgagattaactcgataacggtggttgtaacggcgaaggacgttgccgttgagggcttctgcatgagccgctgtggcacccacggctctacccggaacgttaaaaagtatgcccgaaccgcatatatctgggttggaaacttcgaaacac

SEQ ID NO: 206507 - DNA, 524 bp, Glycine max
ggaggtatgttagttcgggctaaagcttgcagactgcctttgttaaagaatttcgagttgttgtcgtgcaatatgattggcaaatcaattataaactaatctgttattacgttattctgatacttttccctagaaatgaattattttgatgtatcaattaccaaaatggtttttttgtgcccccgtttctgtatttttctctgatgtgttagataaatgtgagtgcccctgactggagtttctgtgaacaggtgcccctgccatgacttctaggggtttggttgaaaaagactttgagcagattggtgagttccttcaccgtgctgtgactctcacactggagatccagaaggagcatggcaaacttctcaaggatttcaacaagggtctcgtcaacaacaaggctattgaagatctcacagctgatgttgagaagttctctgccttgattgacatgcctggcttacttgtatctgaaatgaagacaaggattatgttcaaccataccactttctactaaattg

SEQ ID NO: 206508 - DNA, 535 bp, Glycine max
agcaagaatagtggttctgctacctgcaagcgtgggtttgttcagttctgttatgagcccatcaagcagattattaacacttgtatgaatgatcagaaggataagctgtggcctatgctgcaaaagcttggggtcaccatgaaatctgaggagaaggacctcatgggtaaagcattgatgaagcgtgtcatgcaaacctggcttccagcaagtagtgctctattggaaatgatgatatttcatctaccctctccatcaacagcccagaagtatcgtgtggagaacttgtatgagggtcctcttgatgatcaatatgcttctgctatcagaaattgtgatcctgaaggtcctctgatgctctatgtctccaagatgattccagcatctgataaggggagattttttgcctttggccgtgtattctctggcagggtttcaactggtttgaaggtgaagattatgggacctaattatgtccctggggagaaaaaggatttgtatggtttaaagtgtgcaacgaactgtcatttggatg

SEQ ID NO: 206509 - DNA, 447 bp, Glycine max
cgcaaaataataatttgaaccaacaccgatgcaaaatcctattagagcaaaaatacatcgatgcaaggaccaaataacagcattacaacattcacgggcaaaaccacaaacaaaactaacagaaattaaatctaaggtagcattgttcacaagagaaaataaattcgactaagttcaaagtaaaataattcatgaaacaaatttaaagcttgtcttcaaactcggagagaggagtcatctgttccttcaagcccttcctcttgcgaatgtcagtgacaagctgtgcagcttgtgatccagcctccaatgggtcagaagacatcatgtcccagtgatcaaacacacattgtgggaaggcctggcctgatgttgcagccctcaatgtgctcgagaaaccaaaggactcgatgacagggaggtatgccttgatgttgtatagtggggtac

SEQ ID NO: 206510 - DNA, 522 bp, Glycine max
gtaggtttctgaacactggcctcctccttgtggccacaatccttgtggtcaagctcatctcagccttcatagtgcccaaatccagaaagagggtacccccaattgtgaaggggtggcccttaattggaggactcatccgtttcctcaaaggtccaatctttatgctccgtgacgagtaccctaagcttggaagtgtcttcactctcaaactcttccacaagaacatcaccttcctcattggccctgaggtttctgcacacttcttcaaggcctcagagactgatctcagccagcaagaggtgtatcagttcaatgtgccaacttttggacctggggtggtctttgatgttgattactctgtgaggcaagaacagttcaggttcttcactgaggctcttaaggccaacaagctcaagggttatgtcaatcagatggttgcagaagctgatgactatttctcatagtggggaccaagtggtgaggttgatttgaagtatgagcttgagcatctgatcatcttga

SEQ ID NO: 206511 - DNA, 655 bp, Glycine max
tttgctcaaagccaaaccaaattttctctctttcacttatttattgactccccaaaagcttttcaaatatctctgttcctctctcacgtaccttctccctatctttcactccacttcttaacaccacaaaacagaacaacggccgagcaaacaacaagaaaaatggtgttgttgtccaaagcaacaacagaacaatactcctacattaagaactgcatgccaaccaaattttcctcaacaattcccatagtgaacctctccaaacctgatgcaaagacccttatagtgaaggcttgtgaggagtttggattcttcaaagtcatcaatcatggtgtctccatggaagctatatccgaattggaatatgaagccttcaaattcttctctatgtcactcaatgaaaaggaaaaagtaggacctcccaatccatttgggtatggtagcaagaaaattggacacaatgtggacgttggttggattgagtaccttcttctcaacaccaatcaagaacacaacttctctgtttatggcaaaaactctgagaaattaagtgtctgttgacagtacatgtcttctgtaggaagatgcatgtgagatcttgagttgatgcagatgggttgagattcacacaggatgtgttagcagcttctatgat

SEQ ID NO: 206512 - DNA, 616 bp, Glycine max
  unsure (1)..(616): unsure at all n locations
aaaccactccagaaaaaatggcggtgcctcttctctcgaagaagatcgtgaagaagaggctgaagaagttcaagaggcctcaaagtgacaggaagatttctgtgaagacaaactggcgcagaccaaagggtatcgattcccgtgttaggagaaagttcaagggatgcactttgatgccgaacattggttatgcttcagacaagaagacccgccactatctcccgaatggtttcaagaaatttgttgttcacaatgtgaaggatttggaactgctcatgatgcacaacaggacttactgtgctgagattgcccacaatatatccacaagaaagagaaaagatatagtcgagagagccgcgcagcttgaatgttgtgtgacatataaaacggccagattacgtagccaggaggatgaatagtctaaatgactganaattacttatttgtagtgaacctggtgacactagttgtgacaattgattttgatcatcttttattctcgataaattgtaggactgaaatttacttgtttgtagtgaacctggtgacactagtgtgacattgtatttgatcatcttttatcctcgattaatcgataaaaaaattgcttttgatc

SEQ ID NO: 206513 - DNA, 623 bp, Glycine max
  unsure (1)..(623): unsure at all n locations
ttcgtgattattattatttggatcatgctcttcgcttcaattttccttttcaaatccccctgaattttttttctttctgaatcacatcagattcaattgaattataccccctcaatgcaatggtggtctgcaaatgtcgcaaggctactaagttatattgcttcgtgcacaaagttcctgtctgtggggaatgtatctgcttcccggagcaccaaatctgcgtggtccggacttattccgaatgggttatagatggggagtatgattggcctccgaaatgctgccaatgccagtctgttttagaagagggggatggatctccaacaactcgactgggttgtttgcatgttatccacacaaagtgcttggtctcgcatatcaagagttttcctccacatactgccccagcaggatatgtgtgtccttcatgttctactacgatatggcctcctaaaagtgtgaaagattcaagatcacgtcttcattccaagntgaaggaagctatcatgcaatctggtatggagaagaatgtttttggaatcatcctgattagtgacagaattacgaagtccttcacctgcttttgcttagacccattgatattagggaaaatcatgaaactc

SEQ ID NO: 206514 - DNA, 542 bp, Glycine max
  unsure (1)..(542): unsure at all n locations
cagaattctctaaaagagatctttttctgctctttgaagaaagaagggtctttgcttgattgtggagatgtctctgctctcagatctcatcaaccttaacctctccgataccaccgagaaggtgatcgcagagtacatatggatcggtggatcaggaatggacctgaggagcaaagcaaggactctcccaggaccagttagcgacccttcagagcttcccaagtggaactatgatggttccagcacaggtcaagctcctggtgaagacagtgaagtgattctatacccacaagccattgtcagggatccattcagaaggggtaacaatatcttggttatctgtgatgcctacactcctgctggagaacctattcccactaacaagaggcacgctgctgccaaggttatcagccatcctgatgttgttgctgaagtgccatggtacggtattgaacaagaatacaccttgttgcagaaagatatccaatggcctcttgggtggcctgttggtggtttccctggacctcanggtccatactact

SEQ ID NO: 206515 - DNA, 571 bp, Glycine max
cacaattccctctaatactcctcttacttcttctacattctaacatgcctacatcgtgtctgctactgaatggaaactaagttgtgaaatcatgggcatattcagatgtgggaccttgtttttccatgtgctccttttgtttagaacctgtctggccaaagatcaacatgttagtcagatatatcctggcttcagtgcatctcagccagattggagcgaccataatggttttttcttgctatccaacagctcagctttcgcttttggattcttcactactcttgatgtttcatcgtttgttttagttgtcatgcacttaagcagctacaaagtggtttggactgccaacagaggcttactcgttgggacttctgataaatttgtgcttgaccatgatgggaatgcatatttggaaggtgggaatggtgtagtttgggcaacaaatacaagaggacaaaaaataagatccatggaattgcttaactcagggatattggtgttgcttgtggaaaatgggacaactattttgcaaagttttagccatcccactgatactcttttgcccgacaag

SEQ ID NO: 206516 - DNA, 506 bp, Glycine max
cttctgcttcgccctcctctgcttcgcgtcatgtcctttcgcttcatcacctccttttccttccactcgcgcctttcttcattcccttcttctactctctccaaaaccaggacgagttttcctctgagaaaattttgggctccctgttcggttccaaatgcggtcactccaagggcgtttatgtcttctatctcgaccaccgaagcttttcacaatagtgaaagtcccacagcttatagttctgatcaaattcaggtgcttgaaggcttggaccctgtgaggaaaaggcccgggatgtatattggaagcaccggcccacgagggttgcaccatttggtgtatgaaattttggataatgctgctgatgaagctcaagctgggtttgcttgcaagattgatgtatgtttacttgcggatgattctgtgagcatcacagacaatggtcgcgggattcctactgactagcatccagttacaaataaatctgccttggagacagtgttgac

SEQ ID NO: 206517 - DNA, 557 bp, Glycine max
ggcaacagaaacaaaagtggcagtattaggtggcatcaccgaagtgcagggagctgccaacagcgtcgagatcaacaatctcgctcgctttgctgtagaggaacaaaacaaaagagagaattcagttctggagtttgtgagggtgattagtgcaaagcagcaagtggttgctggagtgaattactacataacattggaagcaaaagatggtgagattaaaaatgagtataaagcgaaggtttgggagagggaatcccaagagttgctagaattcaagccaacattaggtgcaggaggcatcatcgatgtgcctggagctgccaacagcatcgagatcgaccatctcgctcgctttgctgtagaggaacaaaacaaaagagagaattcggttctggagttggtgagggtgattagtgcaaagaaacaagtggttgctggaatgaattactacataacattggaagcaaagatggtgtgattaaaaggagtatgaagcgaagatttgggtgaggtgatggttgaactccaaagagtgctagaattcagccagtcaatgt

SEQ ID NO: 206518 - DNA, 594 bp, Glycine max
ccggtgtgctgctagagaatctggtgaaggatgtcaattgttccaatcaaccaaggtcactcccaggactcttgggatcaattcatcgattttcctctccctccttccatctccagcttcttccccggcttcgaattcggattcggctcatcggtggttaacacacgtgtggactggagggagactcccagagcccacgtgtggaaggtcgagcttcctggcttcacaaacgaggacgtgctggttgagctacaagaccagagggtgctccaggtcagcgtggagagtggtaacttcctgacgaggtttaagatccccgacaacggtaacctcgaacaactcaaaaccaacatgcgtcacgggattctccttgtcactgttcccagtttcatcaacccacttctaataggaatgtcagggtcgttgagattgaaggcaccgactgaacccagttagcatactctgtctcttccaagttgttcactctaaaccaaacaaaagacgctgtcgtgtctatgtatgtgtccgatggaactgtgttctagtattatattatggtatgtgtgccatggaactgtggtctagcattatata

SEQ ID NO: 206519 - DNA, 550 bp, Glycine max
attcgccgagcagttcctttggcacttggtctactctgtatatcaaatccaaaggtcaatgttatggataccttaagcagacttagccatgatactgattcagaagtagctatggcagctgttatctccttgggtctgataggtgctggaacgaacaatgctcgaattgctggcatgcttcgcaatctttcaagttattactacaaggataccagccttctattctgagtgcggattgcccaaggtcttgtacatttgggaaagggcttattaacacttaatccatatcattctgatcgcttcttactgtcaccgacagcacttgctggattaattaccatgttgcacgcatgcctagacatgatagctattgtgttgggaaaatatcactatgttctctacttcctcgttttggcaatgcagccaaagatgttgttgactgtggatgagaacttgaagcctctatcagtgcctgttcgtgtaggacaagccgtagatgttgttggacaagcaggtcggtcgaaaacaatcactggctttcagacccact

SEQ ID NO: 206520 - DNA, 543 bp, Glycine max
  unsure (1)..(543): unsure at all n locations
ttcgtgattattattatttggatcatgctcttcgcttcaattttccttttcaaatccccctgaattttttttctttctgaatcacatcagattcaattgaattataccccctcaatgcaatggtggtctgcaaatgtcgcaaggctactaagttatattgcttcgtgcacaaagttcctgtctgtggggaatgtatctgctttccggagcaccaaatctgcgtggtccggacttattccgaatgggttatagatggggagtatgattggcctccgaaatgctgccaatgccagtctgttttagaagagggggatggatctcaaacaactcgactgggttgattgcatgttatccacacaaattgcttggactcgcatatcaagagttntcctccacatactgccccagcaggatatgtgtgtccttcatgttctactacgatatggcctcctaaaagtgtgaaagattcaggatcacgtattcattccaagttgaaggaagctatcatgcaatcttttatggagaagaatgtttctggaatca

SEQ ID NO: 206521 - DNA, 604 bp, Glycine max
  unsure (1)..(604): unsure at all n locations
gtagtgtgtggttgaaagttaagaagtagcaaagatgtttccattcgggcacaagggtcaaaagataaaggggactatggtggttatgcagaagaatgtgttggatatcaacagcatcaccagtgttgacgggatcgtcggcaccggcttagacttcttaggcagtgcactcgatacagttacttttttagcctcctccatctccatccaacttattagtgctaccaaggctgatggtgggaaaggaaaagttggaaaggctacaaatttgagaggaaagataacattaccaaccataggagctaaggaagaagcatacgatgctcaatttgattgggacagtgacttcggaattcccggtgcattttatattaagaacttcatgcaaaacgagttctacctcaagtctttaattctcgaagacattccaaaccatggaaccattcacttcatatgtaactcctgggtttacaattcanaacactacaagactgatcgcattttctttgccaacaatacatatctttcaagcgagacaccggctccacttgtcaagtacagagaagaagaattgaagaatgtaagaggggatggaactggtgag

SEQ ID NO: 206522 - DNA, 591 bp, Glycine max
gataattagccatacaaagatgaatctcaatagcacagaagcacttcttgtgctttttgcatttgtcttcttggcatggggcaatgcacaaaatacccttgtgccagcaatcataacatttggtgactcggctgtggatgttgggaacaatgattatctgcctacccttttcaaggctaactaccctccttatggaagggactttatcaaccatcaacccactgggaggttctgcaatgggaaactagctactgatattactgctgaaacactgggttttaagagttatgcacctgcgtaccttagccctcaggcatcagggaagaatcttcttattggagcaaactttgcttcagctgcctctggttatgatgaaaaggctgctattctgaatcatgcgattccattgtcccaacagttaaaatattacaaggaataccgaggcaagctggccaaggtagttggcagtaaaaaagcagcattgattattaagaatgcactctacatattgagtgctggcagcagtgactttgtgctaaactattacgttcatcctttgatcaacaaagcctttactcctgatcagtactc

SEQ ID NO: 206523 - DNA, 535 bp, Glycine max
cactggttgtcaatgcagggttcccgattataaaagggaaatttcaactatccccagaaatgccaattatggacacagctgacattccatggtgcagcttaggtgacccaaccatgcacaaggttatatataatcatgcgtcaaagattatacgatattcacatttaacagattggtggcttggaaacaccacaagtgaccttgaacctggtgctatatctttgtctccaaagatcctaccaattggtccactcatagggagtggtaatgacattagatcattggggcaattctgggaagaagacgtctcttgcttgacctggcttgatcaacaaccaccttgttctgtcatatacgttgcctttggtagctctactatttttgaccctcatcaactcaaggaactagctcttggacttgacctcacaaacaggccttttctgtgggttgttcgtgaggatgccagtggaagcaccaaaatcacatacccagatgaattccaaggcacttgtggtaaaattggtaaatgggcacc

SEQ ID NO: 206524 - DNA, 508 bp, Glycine max
  unsure (1)..(508): unsure at all n locations
aacatgaattctaatttattgcctatatcaggtagctaaatttaaatgttcaatatttttcaggaacatcataaacattgttcacaacatcagagcatcaacaaatacatttttattccttgagccactccacaaacttgttaaaattctcataggattgtcccccttctgcaatgttacttagaaccatttccttcagtttttgagaccttccccttatgttctcatctccaaggatttggtctactttcttctttatctcccaacgtgatatcagccctttgtcatccaaatcgaatcccaaacccaccttccacatatcacaaatgtaagccttgtcaactaattggtcagtataatatggccaacacaagaaaggtaccccattggacacaccttccaaggtagaattccaaccacagtgactaataaaacaaggtattgcagggtggcttaacaccttttgttgaggtgcccatttaacaattntaccacatgtgccttggaa

SEQ ID NO: 206525 - DNA, 509 bp, Glycine max
acttgggaggttaaagagacggcaacgttgtgctgtccgccttgaccgagccagagcttcgtcttggccctcgattttgccctgtaaaactaatcccagtcacaacagaaataatcaatggcaccgaaacagaccaaggctgagaagaagatcgcttacgatgcgaagctgtgcgacctaatggaggagtacggccaaatcctcgttgtaaactccgacaacgtgggatcgaaccagctccagaacattcgcaagggtctccgcggcgactctgttgtcctcatggggaagaacaccatgatgaagcgctctgtcaggatgcacgctgagaaaaccggaaacaatgcctatctcaaccttatccccctccttgtcggcaatgtgggattgattttcaccaagggtgacctgaaggaggtcagtgaggatgttgctaagtacaaggttggagctcctgctcgtgttggtttggatgctccaagtgatgtcgttgctcctcctggcacaca

SEQ ID NO: 206526 - DNA, 524 bp, Glycine max
  unsure (1)..(524): unsure at all n locations
aattaactatgggatttaaaaactagttgcaatgtaacatgaattgaaaagacagcaaactaaaatagcacctaaaatgaaagacaaacaacttcatcaattctaacaaagcaaactcaacaaaagtattacttaatttagtcaaacagactgaaacccatgtcatcgtcagactcttcagctggttcttccttcttttcctcctccttggctgcagccgctggagcaccagatgcagcagcaggagcagcaacggcggcaacggcaaatttacttgggtccttcagatactccttgaccttgtctgcctccgggaaagaataatctgtctcaaccgcaacagcaagaacattcttgtaggcattgacaaacatgtgtggtgctgcagcaagtgttggatatgaaatagccaatgaaagtgaagtaaccattgagacaccagcagcaaacttccaatgaggtcatcctcagntagatcaagaacctcagggctgaacactgaaccattatcataaacagagaga

SEQ ID NO: 206527 - DNA, 574 bp, Glycine max
  unsure (1)..(574): unsure at all n locations
aaaaattggttgagtggctggttgcagcattattgttcattgccttgttgagtggtagtgcacatgctgttgcaatatgtaacattgactcaagtcaactgaacttgtgtcgtgctgcagttactggtcaaaaccctccaccacctgatgagaaatgctgtgcagttattcgccaggccaatttgcgttgcctctgcagttacaagtctatcctaccttcatttggaattaaccccaaaaatgctttggccttgcctgctaaatgtggtctacaattgcctcctaattgttgagtgctgtgaagcagttaacgaaggtcaagttcattacaagcaccttaattagtagtcttcaattgctttcaggtgttttactaacactgaagataaattttaagacaggatttgatgcccctcaaataacggtgcagttggttttaatcagtgtcttgtgtccaaaagtttgtgagtagatgtgtagagtattagtgtttgatgtacaggaatacttntgatctgaactttntttccttcatgtctatgtctacattataatatgtttaataaagtttctg

SEQ ID NO: 206528 - DNA, 571 bp, Glycine max
caccaaatgaaaaatattgggttgttttttcttgtggtggtggctacttttgtggtggcagccacagctggtagcttttaccaagactttgaaataacgtggggtggtgagcgtgccaaaatctatgagaatggaaaccttctcacactctcccttgacagagcctctggctctggctttcgttccaaaaaagagtacttgttcggaaaaattgacatgcagctcaagcttgtgcctggtaactctgctggaacagtaactgcctattatttatcttctctggggcctactcatgacgaaatagactttgagtttttgggtaacttgagtggtgatccttacactctccacacgaacgtattcagccaagggaaagggaacagagaacaacagttccatctatggttcgaccccaccaaggacttccacacatactccgtccaatggaatcctgcaagcatcatattctctgtggacgggaccccaatagggagttcaagaatttggagacaaaaggggttccattcccaaagagccaacccatgagaatatactctagtctttggaacgc

SEQ ID NO: 206529 - DNA, 608 bp, Glycine max
ggaggatgggtttagaggagagtttaatgcctttgttgggaacatacctcaccaagtgttgctgctttcgagtctgagggttttgtgggcgccaagggccaaccttggtggacggttgcctagtggctggtcggatttgtgctctctgagggtgctcaatttggcgcagaattatgttgccggtgttgttccagagagtttggggatgtgtaggaatttaagtttcttggacttgagttctaacattttggtggggtatctgccttcattgcagcttcgggttccttgtatgatgtacttcaatatcagcaggaataatatatctggcactcttcaagggtttaggaatgaaagctgtggtgcaagtgcactggatgcttcattcctagagttgaatggttttaatgtctggaggtttcaaaagaatgctctcattggatctggttttgaagagaccaacactgttgttgttagccatgatttcagttggaacagtttcagtggatccttacctttgttttctcttggagataatctgcctggtgcatatcgtaatgtctcctacactctgtctctcaataataacaagttcaatggaactctactga

SEQ ID NO: 206530 - DNA, 568 bp, Glycine max
gcgaagagaatggctcccaagggtttaatctttttggctgtgttatgcttctcagcactgtcactgagtcgttgtcttgcggaggataatggacttgttatgaacttctacaaggaatcatgccctcaggctgaagacatcatcaaagaacaagtcaagcttctctacaagcgccacaagaacactgctttctcctggctcagaaacatcttccatgactgtgctgttcagagttgtgatgcttcactgttgctggactccacaagaaggagcttgtctgagaaggaaacagatagaagctatgggttgagaaatttcaggtacattgagaccatcaaagaagctttggaaagggaatgcccaggagttgtttcctgtgctgatatcctcgttctctctgccagagatggcattgtttcgctaggaggtccccatatccctcttaaaacaggaagaagggatggtagaaggagcagagccgatgtggtagagcagttcctcccagaccacaatgaatccatttctgcagttcttgacaagtttggtgccctggaattgacacccccgg

SEQ ID NO: 206531 - DNA, 624 bp, Glycine max
aacgaccctgcaaaaccacctgcaaaggcacaagtggtgggttggccaccagttaggtcatttagaaagaacatagttcaaaggaacaagaatgaagaggaagcagctttcgtgaaggtgagcatggatggtgcaccgtatctacgaaaggtggacataaagttgtacaagagctaccaggagctgtcagatgcgctggctaagatgttcagttccttcacgattgaaaaatgtgggtcccaagggatgaaggactttatgaatgagaccaaattgatagaccttttgaacggctctgattatgtacccacttatcaagacaaggacggagactggatgctcgtcggtgacgtgccctgggaaatgttcgttgaatcatgccagcgccttcgcataatgaaaggttctgaggctatcggccttgcaccaagagccgtggaaaagtgcaagaacagaagctgaagtgattttagggttcggccacaacaatcggcttggttgttcatctgtgtcacaaggaagcaaatgtactcgagcaagatcgagtctcttttaggaataagagtttaattttaataataatattatgcgtctttgaaatttcttatatgtgattatacgaat

SEQ ID NO: 206532 - DNA, 577 bp, Glycine max
  unsure (1)..(577): unsure at all n locations
acagtcagactgcatatatcgatatagccaccaccactacccagcctccctctaatatctgttttttccttctgttgttgcttctagcacactttcatttgggcataagccaacttgagctgaattactactctaaaagctgcccaaaagctgaagagatcatcaaggaacaagtcacacaactatataacaagcatggaaacactgccgtttcgtgggtcagaaatctcttacacgattgcgtggttaaggtgccagatttcttgtttcaaattcatatataaaccaagatatatgcatcataattagttaacaacaatgcatgaaacagttaaaataattgatttgatgattctcatgcagtcatgcgatgcatcattactgttagcgacggtgagcgatgtagtgtcggagcagacatcggatagaagttttgggatgagaaacttcaagtacgtaaacactatncaagcagcggttgagaaagaatgccccttcacagtgtcatgcgctgacattgttgctctttctgccagagatgccattgctttggtgggaggaccaagcattgaaatga

SEQ ID NO: 206533 - DNA, 593 bp, Glycine max
agttaatgaggaatattgcaagcacctaagaggagtggtagacaaattgttcaaaagtatgtcggtagggttggggcttgaagagaatgagctaaaggagggtgcaaatgaagatgacatgcattatcttttaaaaatcaattattacccaccttgtccatgtcctgatctggtcttgggtgtgccaccacacacagacatgtcctacctcacaattctggtgcctaacgaggtgcagggccttcaagcatgtagggatggccattggtacgatgttaagtatgtccccaatgccctcgttattcacattggcgaccaaatggaggtacatatcttgcttagatgctatagttatatttggataaatttaaattgataaaagtatgaattaaaatcagctctcacattaagagagtttctataatttaacttatgtataaattaatttaaatttatgggagaaatctatttttggaaaaaacatatttttttagtttttggttatcaaatgtaattaacgtctctgtatttctatgttgatgaacttgatttataaacttttggcccttttctcttagattcatgatgtattt

SEQ ID NO: 206534 - DNA, 506 bp, Glycine max
tcgttttattatcataattattgttcttgttgtttttgaatcattcccatttcccagtctttctttatggaagaagttcccgacacggcggcgaaccggtccgatccggggttcagggcggagatcgacacttcggcgccgttcgaatcggtgagggaagccgtcacgcgattcggcggcgttgggtattggaaacccattctgaacggtcttagtaacaagcattttgctgctcctgagccgcatcacgcagaagagcttgaccctgaaaaactggaggagcaagctgctgtattggagaaagacctgatcctgaaagaaagggaaacacttgatgtcttaaaagagttggaaagtaccaaaaggcttgtggagaatttgaaatcaaaggtacaaaaagaagaatctgaagcatatttgaattttcagacgagtgtgtgcgaaaatatatcgtctgttaaggaggatgagagagaagataaggaaaaccgagtgagtaatgttgt

SEQ ID NO: 206535 - DNA, 475 bp, Glycine max
  unsure (1)..(475): unsure at all n locations
tattgaatgattttcctatagatctagagcagtatgatagaagagaacagctgaaaaagagtggtctgggaaaggtcattatgtttttatcaaagtctgatgaagaaatcagtgcaaataggaaactagccaaggagctggttgataagtggagccggcctatatttaataagagtacccggtttgaagacatgagaaatgtggaggatgatagggttccttatcggaggccatcagttaaaaagccggcaaataaatctgcaggaatggaatctagggacagtgatcttgatttggaactttcacagcctaggtctggacagtcctcttctaggcagcatgcatcaaggccggaagcaacacctttggatnttgtggtccgtcctcagtctaaaattgatccagaagaaattagagcacgagcaaaacaagctgcacaagatcagcagcgtatgaagatgaataagaaattgca

SEQ ID NO: 206536 - DNA, 576 bp, Glycine max
  unsure (1)..(576): unsure at all n locations
gcaaacagctgttagacttgaaagaggatcaccaaaacataaaggaagaaagttgcaaaacctttgaagagaaaaattccttgatgaaaagattttgggacctgggtgaagagaaaagtaaattggaagaagaaatctgcattatgattcacgataccatagcacaatccaatctttctctgctttaccagaacattgtccttgaaaaactccaggcacttaaagagctaagcaaagatcttgatagactttgttcagtaaatactgaccttgaggagaaactaaaaataatgatgggcaaattggaagatgtacaaatggaaaactcagatcttaaagagtccttgatagtgtcaagcaatgaactaaaattagttcaatccgttaatgatcaattaaattgtcagattaggaatggaaaggaattgttgtctcaaaaggaaaatgagattttggaagcagcanagatgtttagcactttacatgatgagaaaacagaattgcaaagattggtggaagatctgaagagcaagtatgatggagccagggtgatactttgagaccaagctagtcaaa

SEQ ID NO: 206537 - DNA, 476 bp, Glycine max
aagaaacaaaattaagaagtcattaaatgagtaaagcacgtaaattttttaaggccatacattggatgcaagaattgctatcaagtggctgaactataatataaaaagaaaaaccctaccttacaatcatgagactactcctacaaacgcaaaagctgctaccgcaggcaacaacatacatagagtaactgaactaaaccataaaccagttaagaaaaagagcaaaaatctatcttaacttgggccgctttgtcatgctactacttagaccggctcctcttgacttaccaaagctttttgcctttcttcttttcctatcttcttcactgtcagactcattccctttctcccgatctgcattgcttgcttccctctccagttcttcccatgtctttcccttctcttcctctgaatcctcctcggaatctttctcgccatcatcctctgactcaacaagtgattcactatcagaagct

SEQ ID NO: 206538 - DNA, 500 bp, Glycine max
  unsure (1)..(500): unsure at all n locations
caaacactccacttccccaaaaagtaccaaccaacctccacaaccacaaccacaacaacaacaaccactccagcaagagaaaccaaaccagtaatcgcttctccctccgaaacaaaacacccattacctcaaagttggaactttctccagaaagcagcggcttcagccttagacatggtcgaaactgccttagtctcccacgaacgcaaacacccactccccaaaaccgccgacccacgtgtccaaatcgctggcaacttcgcccccgtgccggagcacccggcgcagcactcccttccggtggccggaaaaatccccaaatgcattgagggcgtctacgtccgcaacggcgcgaacccgctctacgagcccgtcgctgggcaccacttcttcgacggagacggcatggtccacgccgtcaaattccactccggcgccgncagctacgcctgccgcttcaccgaaacccagcgcttagcccaagaaaaaaccctcgggcg

SEQ ID NO: 206539 - DNA, 516 bp, Glycine max
acatgcacatcaagcgaaagaaaaacagagaccagctgagcttcattgctaactacaccccaaaagctacaagctggtccccaaaacctctcactcccaaagtgaaaaaaatgaagaaaagtaaaaatctgcaacagaaactgaagaggagtagattccgggggcgtatctgcaagcatcccacagttaaacctctcctcagaaagtgaaaaactcacttatttaccgtcaccaattcaagcttgtttcctcaaatcatttgaatgaataaaagtgccgtgaaacccataaggaactctagaaggaagcttaacggaagcctcaagcttcaaagttttggcattcacaatctgcagctccgatttccattccttctcatcatgcacgaatgcgagaatatagccatcatcttcatcaccgtcaacaccatttggaagaaacagaggctccccaccgaacctctcttccccatacatgtacttgttcacttccccactgaacaaatcaactttagcg

SEQ ID NO: 206540 - DNA, 513 bp, Glycine max
ctttcttcttagttttcccctcggtgttgagctacttttcacagccatgttgccaagaagtagaacccttcctagcagaatccaccaaggaattatagaagagaggcataatgtcaggcactacttacaagttgaagtgcgacccaataatacccaaacggagaccgaagcgatgaatatccagtctaactattccaagtgcttcgatgatgatggtcgcttgaagagaacaggaacattttggatggcaactgctcatatcatcactgctgtgataggctcaggagtcctttcactagcatgggcggttgctcagcttggttgggttgctggacctattgtcatgtttctctttgccgtcgtcaatctctacactttcaacctattaacacagtgttacaggaccggtgactccgttactggacacagaaattacacctacatggaggcagtcaactccatcttgggaggaaaaaaggtcaagttatgtggcctcatccaatatatcaatct

SEQ ID NO: 206541 - DNA, 470 bp, Glycine max
gactaaagaaataacacgttcaaagacttttattccttgtaaaataacacacatatcacagactgtatacgtccaaatctgaggtatattatgtccaattgtcacttttttcctcagatcaagttgctctaacagcagcaggcatggaacgtatatactttaatttcacaaactaacttatcattaggtttgtataaaaatatcatatgtgcaaacacttctagctatttcttacggccttgatttaataactaggtttaaatggcttgtaagtcttgaggtccaaaaccacccctgccatggaaccaactgcagttaacaatgaaatgatgaggcaactggcactaagtaactgaagtccaagccagcgactggtccatcgtccaatcttcttttgcgaaatatacatgtcaatagggaaataaactgtcaagggccagaacccaaaagcgccaagtattccaaccaca

SEQ ID NO: 206542 - DNA, 613 bp, Glycine max
caagtactacaagggaagaagaacttagctacaagctaaggaaggatcaaagagaatggctcaagcaatggcatcaatgactagcttacgtggttcctctcaggctgtgttggaaggtagccttggctccacacgcttgaatgtggggagtggaagcagggtggcctcagtcacacgtgcagggttcacagttagagcacagcaacaacaagtgaatggtggtgaggtacaaagtagccgtagggcagtgctttcacttgttgctgctggtttgaccactggctcttttgttcaagctgtgcttgctgatgccaaacctatcaaagttggaccacctcccccaccttctggcggattacctggaacattgaactcagatgaaccaagagaccttaagctgccattgaaagataggttcttccttcaaccattgtctccaactgatgctgcacaaagggcaaaggaatcagccaaggaaattgttggcgttaagaagttgattgacaagaatgctcggccatatgttcagaatgatctgcgtctcaaggccgagtatctgcgctatgatctcacactgtcattgctgcaaagcctaggatgagaagaatcactc

SEQ ID NO: 206543 - DNA, 505 bp, Glycine max
ctcgagccgaatcggctcgagtctcaatcgcaaattttctcccccaaatcgtagatctacggttaaattggtgtagtgtggtaagatgggaggaggatttagagcgcttcacttagttaggccatttctctcgtttcttcctgaagttcaaactgctgacaggaaagtgccatttagagagaaggtcatatacactgtgatctctcttttcattttcctggtttgtagtcagctccctctatatgggatacactcaacaacaggtgctgatccattctattggatgcgtgttattctcgcttcaaaccgtggaactgtcatggaacttggaatcactccgattgtgacttctgggctagtaatgcaacttctggctgggtcaaagatcattgaagtggacaacaatgtacgagaggatcgagccctgttaaacggagcacagaagctacttggtattttgatagctgctggtgaggcagttgcctatgttccttcggggatgtat

SEQ ID NO: 206544 - DNA, 551 bp, Glycine max
agattcaatccaatgataaactcaagtatattttgaggaaacccaaaaatgttaacgatgtactacatacttcctcagttgaaaggggaaaaagaagtaaaaaaaatgacaacaaactagactatgtcctcccttacgatgttaaacgacctacaagtataacgatccctcaaacaaggggtgtgggagagctcattggcagaacttagaaaccaaagaagccaagctcgctagctctctccttctcaaatgtctcaaagtactgatagatgatggttactgcaagcaatattcctgttcctgaaccgatggcccccatgaaatctgccaacactgtcagggcaccaatacagatgcctccaaatgctgcggcagtgggaatgtatcgattcagctctttctgcaagtttgactcacggtgtccgggcattaccatttgttgatccttcagctgcttggcaacatctctagcagatgaaccagagacttcaatccatgtctttgagaacaaggcacatgctgaaagcatatacacaagatagaacagtgca

SEQ ID NO: 206545 - DNA, 393 bp, Glycine max
tagcaatcactaagatcagtggccgaggaggcttgaaatggatcataactggtttgtccataacaacacttcctaacactttgattcttggaatccctctcgtgaaggctatgtataagagtgaagcagttgttctcctggcacagattattttcttgcagagcatgatttggtacaatttgttgttgctcctttatgaacttgatgctgtcaagaccaggcctactgcagctgcatcatcatcacaaggatcaggagaaacagacacaggtcgtgaagtacaatcaaaaggagaagaagacgcagaacctagaataaaaaggaagaggaaggtcttgctcattcttgtcacagcgagaaagacgctaattataaaatcctatacatatgcaa

SEQ ID NO: 206546 - DNA, 560 bp, Glycine max
  unsure (1)..(560): unsure at all n locations
atagacaaattaattaagtagtattaattagttgagtgatcacatgttttctaattacaatgaatcaataatgcagtaaatttacaactatttataaattgttattttacggcaatgtaatgctgttattctcgatgtccctagctagcatatatttaacatttgctcttcaaattgctaataggaagtagaaggccaattccaccggcaaggcaatgagcattcctaacaagatcgcagtgcttaaaacggctggatggacattatactctttggcaaaaacaaaaggaacaattccttggggtagagctgcctgaacaattgccactttaaacaatgtgtctcttaatccaatcacaaaggaagccacagccatcagggtaggtccaagcacaactttcagtcctattgccaccattgccatccttggcccacatgctatgatgcttgactgtgatgccataaacagacctaagctgaacatggccatgcctagacctncattggacaatatttcgattgactgactaacaacttcaggcatatgtaatccccaccta

SEQ ID NO: 206547 - DNA, 487 bp, Glycine max
ccgaccccgtgagcgtgcgtgactgtggcagtttctaatccgttctctctctctctctgctacctcttacctagctcgctacctcacgtaatcgttcaccgttcacctttttcttctccaatcgcaaccaaacttctctctctccctctctccctctctctctctcatgttcttgtagcggaaccgttcttgcttctcggagaacatggcctccatctcctccgccgaactcaattacctcgtttatcgctaccttcaagaatcaggtttcacgcatgctgcttttacttttggttatgaagctggtattaacaaatgctccattgatggaaatttggtgccgtcaggtgctcttgctacatttattcagaagggtctacagtactttgagatggaagccaacttgagtaattgtgatgcagacctggaagatgatttttcattcttacaacctttggatcttatcacgaaagatgtgcatgaactt

SEQ ID NO: 206548 - DNA, 501 bp, Glycine max
attaagaatgcactcctacaaactactttttactaatgttatagcaaattacaacgggatccacgaacaatgagttatacctacaactatggttaaaatgggtaacctaccacccacccaaaatacacttccaccgatctcatctcaaggggtgaaaagaaagaatttaatgtactagtgtggagaaattggtgctacacagatattacattctaaaatccaaaacgcaaactgtattattagcaaaacatgcagcaatcttgtcaccctccttattccagcagacctcaaaaatgcccccattgcctgtgtatgttttgacaatcttgccgtccctcaatgaccatatgtgcatggatctgtcaagagacccactaactagataatcgccgttgggactgaaagcaacagaatatacgggatgcctgtgtccatccaagctgtacatgagtttcccaagttccacatcccatagctttacagttgagtcaaatgaagcac

SEQ ID NO: 206549 - DNA, 514 bp, Glycine max
cttgctgtaaatgataatgacatccacaacattgttctgtcatatcttatacataattgctacaaagaatcggtagaatcattcattgcttgcacgggagcaaagcagccgacagattatttggaggacatggataaaaggaaaagaatttttcactttgcactagagggaaatgcactcaaggctattgagcttactgaacagctggcaaaggatattctagagaacaataaggatttgcagtttgatctactaagccttcattttgttgagcttgtctgctcaaggaaatgcacagaagctttggagtttgctcagaccaaattgggccctttcggaaaggagcccaaatatatggaaaagcttgaagactttatggcccttcttgcttataaggagccagagaaatccccaatgtttcatcttcttagcttagagtatcggcaacagggtgcagattgtttgaatcgagccattcttgacacttgaatcttccaagttcacagcaatggag

SEQ ID NO: 206550 - DNA, 444 bp, Glycine max
gagtctgaaaatgaaaatctagagtttgtgaggaaggaagatgagtttgagggcatcagagatagcgaagaagttgaatctgcaacctcacccagagggtgggttttacgtggagacattccgagaccattccgtccagctttcgacctctcagcttccccccgaatacaaagtggatcgccctgtatcgaccttcatctattttctcgatccttctgggagtgtgtctcgcctgcatcgcataccctgcgccgaaacctggcatcattacatcggcgaccctctcaccgtagtggaattgcatgagaaagatgggagcgtatttcacttgccttggatcagatctgactcagaatcacgtgccgcagtgcactgtgcctcccaacgtctggtttggctcttttgctaccaaggactttacctactctgcggtcggcgtattcg

SEQ ID NO: 206551 - DNA, 332 bp, Glycine max
ggcaaggtcagtggtggggtccttacccctttttttctcgcccatacaataacaatgtactattcacacccctccacttgtccttctccgcccgccacgtcacctcctccgccgtaaccatgccctccttcgaagtcctcggcggcgcacgtgaccgttttctccctgttctcccccacttgtctcgcccctatcatgcttttcctcttctcgccgccaaccgccacatcgaaaccatcttcgcctgctttcttcgctcagtccccgacgtcaggctccggcgcgagtgcctcaggacccaggacggcggcaccgtcgccctcgactgggtc

SEQ ID NO: 206552 - DNA, 519 bp, Glycine max
aaaattaaaaaataaattatgaataatatgaaagttaaaacaattacagtacttgtccaatttgatagttgtttatttttgctttctacaagacatatcaaagataattttgaacattattgacattggccaccgagctacggcatccaccttgtcctgctggacttcttgcacaaacaatagtgtagttgcttccacacattagcatttccagggattatgaattggctaaagaatgttgcaggatatatagatatctttttttggccagcttccaggatgcatttgatgtatgaaaaatatcaagcagattgccacattatacttcaagatggtacaaggtctctttactaccaggattactattagtttctggagtcttaactgcttcactctccaaatattgaataaagtccattaccaaaggatcagtccaaggagctcccagtggagcttcatcaccagcaacccaccctagatggccacctttgggtgtcactattaacaagcagtttggat

SEQ ID NO: 206553 - DNA, 590 bp, Glycine max
  unsure (1)..(590): unsure at all n locations
cccaaaggggaccttagagagcaatcttctaccttctctctcctctctctctctctctctcttttgcttttattattctctttcaatggcttcatcctcttccagaacaaagtctagtggacccgttctacgctccctctcaccctccaccagattctgctcatacaccacttccaaaactcctttctcttctccttcatcggccttcgcttcctccacaagctctggcttttcgtcttcatccttcttcaaccagccacgtcagcatcacgctcacagccatcaccgtgcggcatcgcccacccgtgtcaatctatgcagccccgcccctctctcctctgccgtccggttctcaatcgatccacggtccatatctccgaaccggtccatctcgaaccagatcatcacgacgaagaacaaccgtccgatctctggccagaagaagacgtgtatgtgctcccctacgacgcaccctgtgtcctttcgatgcagcctccacangaacataggaagcagcaaccacaacgccgattcgtanccttcgaccggctaacatgcgtagatccgctatgaagaaactcgctgtgaga

SEQ ID NO: 206554 - DNA, 598 bp, Glycine max
attctctttccctaaacctctcagactcatgtctcagcctttgaccaccaactctgctgatggtgattcctccgtcgccgcacctcccatcctcttcgattatcatcttatcgaccaaaaacttctccaaaacatagtctacgatgctcttgtctggagcaccctcaactgcctccttgttggtgacaaatcagttcagagatcaggaacagttcctggtgttggcctggtgcatctcccgctttctttattacctgggccatttcctgaaaatcattggaagcaagcgtgcgaattagctcctatatttaatgaacttgttgatcgggtgagtttggatgggaaatttctccaggaatctctctccagaactaagaatgcggacgaatttacctcaagacttttagatattcattctaagatgctacagattaacaaaaaagaggacatacgcatgggaatagttcgttcagattatatgattgatgagaagactaaatcacttttgcaaatagagatgaacacgatttccactttatctggcttgattgctgccttatgactggacttcataagagcttactttctcaatatggga

SEQ ID NO: 206555 - DNA, 524 bp, Glycine max
agaagaacagttcatcaatttttattggttagaatcaaacaggtcgttgagtacagacaccatcccataggagcaattaaaagaaacaacaatgcctcttttcttctttcactgttttcggagatatacaaacaaaatcaggagtcaggagacttgagtggtaatatataaaccatacataatgttttgaattgctttgataacttgggggttggctccatcaagttaggtatacagtatctaccactccaaaaccaggcaaaactccaccttcataagatgatgatatttttgtacgcaccatatagccactttcgttattaatgataaccttatccttattccttaaataagtaccaaatactccagcttctgaaatgacatgacccttatcccaattaccatcacgcaccaaaattgctggagaagtggctggaaatatcctctgcataaggatgtatgctgcatcttcttcagaacctgcttcctgtaatttaaagagggttccctcaactcatcaccat

SEQ ID NO: 206556 - DNA, 372 bp, Glycine max
gcaactgcgattttggatcggaacctcttctgcggcgtagcaatgggacactccaacgtttggaattctcacccaaaaaactacggtcctggttctcgcacttgccgagtgtgtgggaatccacatggattgatcaggaagtatggccttatgtgctgcaggcagtgcttccgtagcaatgccaaggaaattggcttcatcaagtatcgctaaaagagctgttgtcacctacggaccaatattatgttctggcactaggatgttttgaagatgttatgtttgaagaaacttgagacttgtttttttcatctattttattatcagacataatgtgtggaacgaagaatacttttatataaattgttttgcact

SEQ ID NO: 206557 - DNA, 372 bp, Glycine max
agtgcaaaacaatttatataaaagtattcttcgttccacacattatgtctgataataaaatagatgaaaaaaacaagtctcaagtttcttcaaacataacatcttcaaaacatcctagtgccagaacataatattggtccgtaggtgacaacagctcttttagcgatacttgatgaagccaatttccttggcattgctacggaagcactgcctgcagcacataaggccatacttcctgatcaatccatgtggattcccacacactcggcaagtgcgagaaccaggaccgtagttttttgggtgagaattccaaacgttggagtgtcccattgctacgccgcagaagaggttccgatccaaaatcgcagttgc

SEQ ID NO: 206558 - DNA, 533 bp, Glycine max
aaaaagggtaaaaagattccaagttcaatatactcaggaatttaattacatcaaactgcagacgccagctttacaaaagcaaattttccaaataaactgtgtcttgactctatatctgaggcacccatttatttctatccaattcaatatatacattctatgcttgcacatgcaaaaccatgacacagccacattgcaccctatcgcattgtgactccatcatgtggccaagggaacaaacaaaaccttttgtaccttcatgctttttggaccctgcaatgccaaaaaattaaggattgcttcaactgcgcacaattgcctagccagaagaagacgccgttctgggagaaacaagaactggttcattgcttgcagctttcatggctgcaatctcttctaagcgcttccatgtagcctctcgcttcaacttcaaagctttctcttgtgcttcatcttccttgaacttgcgcaggcactcctccaagagttcaggatcggtatcagcaaagatcttgcgtacatttattgtcaaa

SEQ ID NO: 206559 - DNA, 411 bp, Glycine max
cgccctggccgccctttttttttttttttttttttttttttttttttttttttttttttttttttttttttttttttttttttttttttgttgtttatttttgttttttattttattttttattgttgggaaaccccctaaaagaaaccgcccattgtgctacggggggggggggggactgccggacttctccaggggcccccaaaaaaattggtggaccaaaaaaaagggggagaagcaaaaaagggcccctagaaaaatgggcccaacatttaaaacctttttaggcgggggaaaaagacgcaaagggggaaagaaaaaaaacccgggggcgccacattaaacctgatgatggaaaaaagtctcttgactaccaaaaaaacggggagcaaatcgggacaaaaaagaaat

SEQ ID NO: 206560 - DNA, 578 bp, Glycine max
  unsure (1)..(578): unsure at all n locations
gcgtttcttggtgcttggtataaagcgcaagcgtttttgggttcgggaaaagaaggaatgaagagaagggtctagaacaacacaacactacggattgaatattgaattaaacgacgctcatggctacggtgccggagaagaaagcgaaggaagcattcttcgacgacgaattcgctctggccgttgatctctactctgaagccatacgattggatcccaacgacgcaaatctcttcgcggacagagcccaagcccatatcaaactcaacgctttcactgaagccgtttccgatgccaacaaagccatccaattaaacccttccttgtccaaggcctatcttcgtaaaggcaccgcttgtatcaaactcgaagaatatcacaccgtcaaggtagcgcttcaaaacggtgctgcttttgcccaagatgattcacgattcgccaacttgattcaacaatgtgatcgcttcattgaagcagaggaatcaagtggccttactagcancctatcatcanatggggtccatacatctgtaccgtctggtaatggttcccatttcagcaatagaaatgatgggatg

SEQ ID NO: 206561 - DNA, 491 bp, Glycine max
  unsure (1)..(491): unsure at all n locations
aagctgatcttcatacttaatatttccaatatgtgattcacaaaaaataaaaacccgattttcctcatgtttagcattatcaacatacaccaacaaaataaaatccacttccacagcaaaagcaaattaggtcattctcccagctaattactttctccaacacaaaataataacgagtttacagaatttctttttctttttgcatttatttgttggcaggagttgggaggagacgaacttgaactctcacaagcataagcttaaatgcatatttaagtaccgaatcaatactcccattttttcaactccataccttctggagcactgccttccaccttctttgatcccacttctttccaatcagttgatagcactgttccatttgactccaagaaagacttgctcattgctctcctcatgtcctcatctgcattttggtaaatatcacggaacaatttactcaaagcagcatcaccatcaagctnttcttc

SEQ ID NO: 206562 - DNA, 489 bp, Glycine max
gagagatgcttgctggtgttaatccatgcctaattgagtgccttcaagtgttccctccaaagagcaagctagatcccacagtgtatggtgatcaaactagtacaataaccaaagaacacttagagatcaaccttggtggactctctgtggaacaggcactgagtggtaacagattgttcatattagatcaccatgatgcattcatcgcatatctgaggaagatcaatgacctttccactgcaaagtcttatgccacaaggaccatccttttcttgaaagatgatggcaccttaaagccattggccatcgaattaagtttgccacatcctatgggagatgagtttggtgccgttagtagagtcgtcttgcccgcagaccaaggtgctgaaagtacaatttggctaattgccaaggcatatgttgttgtcaatgactcctgctatcatcaactcatgagccactggttaaatactcatgctgtgattgaac

SEQ ID NO: 206563 - DNA, 425 bp, Glycine max
gacatagagaaatttgatttgacattcatagatcagaatatcagacttacatacgggtgaacatgatacgggtgaacatgataggagcacaatactatacataaaaactgacacaacaccctattagatatgaaaaactagatagcatccaattacaaaacttaagcatacataagaaaattatgcacacataagtttgcacgtttatttgtcaatgagaggtacgttggaaggaaagaaaaccacacaccacacaccacacactctcattagatagagatgctgttgggaattcctctgaaagtaaggccttccccactggtaggaagaagcacagtgtagggcatctgcgccggtccattacggttcctaaggcttgaattcttgttcctccctgagattttgtcctcaatttccttcagctt

SEQ ID NO: 206564 - DNA, 444 bp, Glycine max
aaaaaagacaacccagagagcgcgtcttaataaacgctcttctctgaaaacccccatttcttttcttctttcttcttctctttcgcttcttcgatcttcgatcttcgtcgctgaaaatgagagagtgcatttcaatccacatcggccaggccgggattcaggttggaaacgcctgctgggagctttactgcctcgaacacggcattcagcctgatgggcagatgccaagtgacaagaccgttggtggaggtgatgatgctttcaacaccttcttcagtgaaactggggcaggaaagcacgtgccccgtgcgatttttgtagatcttgagcccactgtgattgatgaggttaggactgggacataccggcaactattccatcctgagcagctcattagtggaaaggaggatgcagcaaacaaccttgcccgtggccactatacca

SEQ ID NO: 206565 - DNA, 402 bp, Glycine max
gttcccaaagtttaattcttttaaaactttaaattaaaccaagcaattttaaaaaaatgtttttaccccacttaacataaagttccaaaagtcccggaacttggcaagttccccggaaagtccaacgatacggaaagctccaaaagaaaaacaacacaaaaaggaacctaatagggcaaacttctaatcataatcctttccttgatcaccattttaagttgcctctgcaccaacttcctcataatccttttccagggcaccaagatcttcaagggccttaaaaaactcccccttttttatacccttaccaacataccaatgaacgaacgcccttttggcatacatgagggcaaaattgcggtctttgcaaaaaaagacctaaacaacactggtggaattgga

SEQ ID NO: 206566 - DNA, 430 bp, Glycine max
ggctcgagtatagcccaagccctatacaaccaaaccctaacacacacccatttgattcagtttccatggctagcctcaaggttgcatttttggctgcagtgctctgcatggttgtggtgagtgcacccatggcacatgcagctatcacgtgcgggcaggtgacgaatagcctgatcaattgcatcggttaccttcagaacggaggaacgccgccgtcgggatgctgcaacggagtgaagagcctcaatgccgacgtcaagaccaccgtcgaccgacagacggcgtgcaactgcctcaagtcggccgtcagccaaatctgctgtttcaaagtcaacaacagcgtctcgctccccggcaaatgcggagtctccatcccctacatgatcagcaccctcaccaactgcgctaccatcaaggtttgaagagaaag

SEQ ID NO: 206567 - DNA, 469 bp, Glycine max
agggagaacccaatattaaagtagatataactatgtgtaactcatacagagaaataacaacgcaacacaatttaaagctatccaatacaaatctctcatacaagaggagaggggcatataagtggagccctcatcaccctcgatcttattcttaatattaataatgctactcatatactagtgagtagtttccggtttcctgcgtccatgactttctcttcaaaccttgatggtagcgcagttggtggaggtgctgatcttgtaggggatggagactccgcatttgccggggagcgaggcggcgttgttggctttgaagccggagatttggctggcggccgacttgaggcagttgcacgccgtctggcggtcggcggtggtcttggcggcggcattgaggctcttcactccgatgcagcatcccgacggcggcgttcctccgttctggaggtaaccgatgcaaatgatc

SEQ ID NO: 206568 - DNA, 536 bp, Glycine max
gaagaagaagggtgagctaaagtcaattttccttcctttcctttccactagtcacataatcccgctagtggacatggccagactcttcgccttgcacgacgtcgacgtcaccatcatcaccaccgcacataacgccaccgttttccaaaagtccatcgatttagatgcgagtcgcggtcgccccatcagaacgcacgttgtcaacttccccgccgcacaagtgggtctccccgttgggatcgaagccttcaacgtcgatacgcctcgggaaatgacccccagaatctacatgggcctatcccttctccaacaagtcttcgaaaaactcttccatgacttgcaaccggatttcatcgtcaccgacatgttccacccttggagtgtcgatgctgctgctaaactcggcattccgaggatcatgttccacggcgcaagttatctcgctcgctccgctgcgcactccgttgaacagtacgcaccccacttggcagcaaaattcgacaccgacaagttcgtgttacctgggttacccgata

SEQ ID NO: 206569 - DNA, 466 bp, Glycine max
attcatttcattttctctttggaataacctgcagggttgcttccatttcaacatgtagagcgcgctctttgttgttttcatttctgacaagttctttttttttgttgcgttgcaaaatccttctcctcgaggcggcggcatggaaagcattgccgcgcagctgaagcgcggcatctcgcggcagttctcgtcggggtcgctgcggaggaacctctcgtggcagttcacgcgccaggcctcgctggatcctcgccggaacaaccagcgcttcagcttcggccgccagtcctcgctcgatccgattcgccgcagcccctgctccggcaacgccgagctcaccgtgccggagaacctggactccaccatgcagctcctcttcatggcctgccgcggcgacgtcaagggagttgaggatttgctcaacgaaggcatcgacgtcaacagcatcgacctcgacggccgcacc

SEQ ID NO: 206570 - DNA, 546 bp, Glycine max
ataagaaaatttctgagatgttatatctcctttatggtacattgtacagagaggagctgttccagccctctagtagacaggaacataggacgaaccatgcaaattcattttcacgctcaaattaatccaagctcaagttaatattattcgaattccaaaattattaattgcaagggctattaacagtacaccaccatgaagctgacaaattggttttgaggatgcaaccctgaacttgatgtcttccttgccacgtagtatgtactttgttatttatttccaagggagtttaaaagtatctttccaccatccttgttttgagcaatttgcaacgattttgtccaaccgtgcaatgacctgagaaaatgttggcctcacaacaggtgttggatcccaacattcctcgatcaactctttcaactctggaggataatgttttggtttgatcttgaatgctggtcttttcccttccaagcacatcagtctaactgcctcctccgaggacttgggatggaagggatgtgtaccctctatcatctcatatat

SEQ ID NO: 206571 - DNA, 572 bp, Glycine max
ttctttcttccttcttcactcttagtctcactcactcaccattcaccattgtcctttgcatcgctctaagcaacacgtccttttcttcacatattccagtgtgctgttctgagattcggagagatgggtttggaagaagcttccagaaactgtatataagtcatcatgctgttgtgacagttaaaggtagcgtggtgtggggaaggagcctagtgattagttgtttgagaccactaaggaagtgaacaagaggatgtcaaacagtaggaacactcattggtgttatagttgcaggaggccagtttggctgggacggcgagatgcggtttgtcctagctgtaacgagggatttgttcatgaacttaatgatatggtgcatgttaatccttttgacttatttgaaatggacaacaatgaagaacgagatcaaaggcttggactcatggaaacattctctgcctttatgacgcatcaaatggcagataggggcagaagccttgacatcagggcgcacatcagatcaaatcctgaaccagtgcagggtttgctccttgtgatctttgtggccaata

SEQ ID NO: 206572 - DNA, 473 bp, Glycine max
agaaaaaagaggcgcaagatgagtggtagggtttctgggaaggtgaagtggttcaacgatcagaaggggtttggattcataacccctgacgatggcagcgaggaactcttcgttcaccaatctcagatcaaatctgacggtttccgaagcctagctgaaggagagtccgttgagttcgctattgaatctgaatctgacggacgcgccaaggctgttgatgtcactggccccgacggcgccagcgtccagggaaccagacgcggcggtgatggtggccgaagctatggcgggggacgaggaggtggtggaggtggatatggcggtggcggcggctacggtggtggcggtggatatggtggaggcggtggctactgtggtggcgggcgatgcggtggtggcggtgcttgctacaactgctgtgaatcgggacatctggctagggactgcagccaatgaggctgtggaaacaggta

SEQ ID NO: 206573 - DNA, 535 bp, Glycine max
  unsure (1)..(535): unsure at all n locations
accacagaaaccgataacaatcatccaattcattatagcaaaatgtaggtccaaacagattttgtttgcagattgtaacgataacacagaaactttcatttaaataaccaaaaaaaagaaaaatctcacgcatctacttataagaagccacagctttgacagaaaccattaaaatccctacaacatgttaaagtaaaaacttaaaacaatccgcataacataaaccaccataacagtaatttcaacgagcacttgatgggcaatctctggcgaaatgcccagactctccacagctgtagcagcttcctccgccgccaccaccttctccaccaccaccgtacctcccgccaccgccgcctccatacctgccaccaccaccaccgccttcgccgtacctgtctccaccgcctccttggctgcagtccctagccagatgtcccgattcaccgcagttgtagcaagccccgccaccaccgtctcgcccaccaccaccgtagccaccggctccaccatatccaccgncaccaccgtagcc

SEQ ID NO: 206574 - DNA, 518 bp, Glycine max
gcattgtgaatgcagtgcgtgatggtttgaatttggttccatacaggtacactgtgtgtaggcagggaagttctaaactagacgaagctttagaaattgcttctgacttcccgcgtgtaagtgcacttgtcgtttctgagtttataggttgctcaccatctcttagtggggcaataagggtaaacccatgggatattgatgcagtagctgaagcacttaatttggcaatcacaatgcctgatggagagaagcagcttcgacatgaaaagcactatcgatatgttagttctcatgatgtggcatactgggctcgaagctttgagcaagatctagtgttctcgtgcaaggatcactatagtaaccgatgctggggcattggctttggcctgaatttcagaattttgtccctctctcctagtttcaggaggctatccatagaccacattgtccctgcatatgagaggtgcagttgcagggcaatatttttggattatgatggtacagttgtacctgaagct

SEQ ID NO: 206575 - DNA, 564 bp, Glycine max
cccttcctcaatgggcaactgttgctctcaaggcaacgttgccgacggcccggctgacgactctgccgccgccaatgacaagggagaagctaaccaacaaggtagtaataaccatgcaaacgacaacaatgataattccacaaaccctaccactgccccaacgacgacatcaaagccaccacccacggtcaccccacccacttcaaaaccctcgaaaccggctgcaatgggcccggtcctcggccggccgatggaggacgtgagagccacgtatacaataggtaaagagctagggagaggccaatttggtgtcacacatttgtgcacaaacaaagccacggggcaacaatttgcatgcaaaacaattgcaaagaggaagcttgtgaacaaggaggacatagaggacgtgagaagagaggttcaaatcatgcaccatctctcgggtcaacctaacattgtggaacttaagggtgcatatgaggacaaacaatcggtgcatttggtcatggaaacttgtgcgggtggtgagctttttgatcgtataattgctaagggacattacac

SEQ ID NO: 206576 - DNA, 505 bp, Glycine max
cagtgagtgatcggtgttcacttgatccttcataagtcgtcatcatcatcatcatcatcaccgttgattgaagaagatgccgatcagaaacatcgccatcggaaggcctgaagaggctactcaccccgacacgttgaaggcggggttggctgagttcatctccaccttgatcttcgtgttcgccggttcaggttccggcatcgcctacaacaagctcaccgacaacggcgccgccactcccgccggcctcatctccgcttccatcgcccatgctttcgccctcttcgtcgccgtctccgtcggcgccaacatctccggcggccacgtcaaccccgccgtcaccttcggcgccttcgtgggcggcaacatcaccttactccgcggcatcgtctacgtcatcgcccagctcctcggctccatcgtggcctccctcctcctcgccttcgtcactgccttccctgttccagcattcgggctttccgctggagtcggagttggcaacgct

SEQ ID NO: 206577 - DNA, 524 bp, Glycine max
gttaccggaaaaagtaagaagtactagtgaaatggtacaaccaaccagacccgaataatgatacatacattcaattcaattgtggaccaggtgagagcgagagcatgcacaaaatgataattaaattaacttaaaagaaaacttcaggatcatcaaccatccaaccaaagatcaacggccaccgattcaacaggaaagaaaacacaaaggaaggaaaaccatacacagaagaagattccggagaaattcaataatacacattttttttttttattatttcatttttcccctctagtagtcagtgctgggaagctgctcgtgggtgtggctgatgaagacaacctcgtagataagcccagcaattccacctccgatgagagggccggcccagtagatccagtggttggtccaggtccagctcacgacagcaggcccaaatgtcacagcagggttcatggctgctccggagaaggccccacccaacaaatgttagcgccaacaatgaaaccaatggcgatgggagc

SEQ ID NO: 206578 - DNA, 439 bp, Glycine max
  unsure (1)..(439): unsure at all n locations
cctctcttcactttcactctctctctctctctcagccatcatcatgggagcagtgattctcccagatctcggcaccgagattttgattccggtctgcgccatcattggaatagggttcgccctcttccagtgggtcctcgtctccaaggttaagctctccgctgccagagacgcttcccctaacgccgccggcaaaaatggctacaacgattacctcatcgaagaagaggaaggcctcaacgatcacaacgttgtcctcaaatgcgccgaaatccaaaacgccatttncgaaggagcaacctctttccttttcactgaatacaagtatgtgggaatcttcatggtggctnttgccattttgatattcctattccttggctctgtggaaggattcagcacgagctaccagccttgcacctatgatcatactaaaatgtgt

SEQ ID NO: 206579 - DNA, 470 bp, Glycine max
gcgagcctcaccgccgcgagaaattgacaaagaaatcgtcgtccttctacggtcactcatcgccgccttccatgtccggcgaaccgatccggcggccgaagacggtgccggatcttttgtcggagaggcaccgcgcggctttagcgacgccggcgacggatgttgtgccaaaacagccgccaaagttgttgttgaaggttactcccatgggaagcttgggaccggtgcaggttgtgatgacgccggaatcgacggtcggagatttagtggcggtgacggtgaggcaatacgtgaaggaaggtcgccggccaattttaccgtcgaacgacccttcgcacttcgacctccattattctcagttcagcctacaaagttcggatagggaggagaagctgatggatattggatcgagacacttttttctgtgtccgaggaagtgtggtggtaatggggacgcaggtagtggaacg

SEQ ID NO: 206580 - DNA, 452 bp, Glycine max
  unsure (1)..(452): unsure at all n locations
gtttgttcagacaagacctccatgattcaattgctgctggtaactatcctgagtggaaactgtttgttcagacaatagatcctgagcacgaagacaaatttgactttgaccctcttgatgttactaagacttggcctgaggacattatacccttgcagcctgttggtcgcttggtcctgaataagaacatagataatttctttgctgagaatgaacaacttgcattttgccctgccattgtggttcctggtgtatactactcagatgataagatgcttcaaaccaggatattctcttatgctgattcacaaaggcacagacttggaccaaactatctgcaacttcctgctaatgctcccaagtgtgctcaccacaacaatcatcatgaaggtttcatgaatttcattcacagggatgaggaggttaattactntccttcaggtatgatcctg

SEQ ID NO: 206581 - DNA, 550 bp, Glycine max
  unsure (1)..(550): unsure at all n locations
aaatataaatactaacacatacaaacggcatttattgagatagctcaacgagttgcatgcatggagttatgggtacacaactaaaattgcaagaaatggataagttctttcaaattgatcgaaaatcacatccttatcgtactctttgcacgtctgcaactctaacaatcattctggggttggcaacaacattaaatatttggcctcatgctcagacgagatgctatcttttggcctagagaacggtcagcctgagaccagtaagatatccagacactgcggatttcatgggtgacccgtgggtcagataaagcatcaacccatcggcgattaaatctatcttgcctgtcaggtgcccaagatcggtatctctctccgggctgcttaaagttgttctccttctcaattccacacttttcacgccttccactgcagatagcaggaggtatggggaacgtttctgcatgacgaacaggatcataccttgaagggaagtaattaacctnctcatccctgtgaatgaaattcatgaaaccttcatgatgattgt

SEQ ID NO: 206582 - DNA, 510 bp, Glycine max
tgcagtatttgtttgaatcaagaaacgatgtcactgttatgccatgtggacatacgatccataagagctgcctgaatgaaatgagagaacatttccagtatgcatgccctctctgctcaaagtcagtctgtgacatgtcaaaggtttgggagaaatttgaccttgagattgctgctacacgaatgcctgagcaatatcaaaataaaatggtttggatcctgtgcaatgactgtggtaaaacttctcacgttcagttccattttgtggctcaaaagtgtccgaactgcaaatcctacaacacacgacaaacatgaagcggagcacgtggccacgattattcattggcttcatcaaaagccttcactcgagagctctcttgatgttgcgtgactcgtgaaggcagtgaaaatagatgtgcatccattgggtacgtggatgtgcacgtgtgggaatttggagtgcatgatgagccacattcagagggataaaaataatggttcctacatgtga

SEQ ID NO: 206583 - DNA, 560 bp, Glycine max
caaccaagcttctctgttagaacaaaaaaaataagaaaaattggcgtcataagggccaaaggtgggaaagttgaagttttttgttgaggtgaaagtgaaatggttggcaaggatagtctgagggctgaggacttgaacttgtgctttgagaaacttatgatggtggctgggagtgggaacggtgagaaaggggtgaactcgaaggttggggtgatcaccgagtggaaggacattcctgtggagcttttgatgcagattctgtcccttgtggatgatcagacggtgatcacagcttctggagtttgtcgtggatggagagatgctatttactttggacttgctcgtttatcactctcatggtgtagcaagagcatgaataacttggtcctatctcttgttccgaaattcgtaaaactgcaaactctaatccttcgtcaagacaagcctcaactagaggataatgctgtccagactattgcaaaatgctgtcatgaactgcagattctggatctcagcaaaagtttacgcctactgatcattactctatgaacctgccttgt

SEQ ID NO: 206584 - DNA, 602 bp, Glycine max
  unsure (1)..(602): unsure at all n locations
ctcggaattcggctcgagcaaacactttgccatctctgcaaaaataccagaattcacaaacaagaacagaacattggtccttcagtattctgtaaaatttgagcaagagattgaatgtggtggagggtacatcaagcttctctctggatttgttaatcaaaagaagtttggtggggatacaccatatattttaatgtttggaccagatttatgtggcacggatacaaagaagctccatgtgatactctcctaccacggtcaaaattaccccataaagaaggacctgcaatgtgaaactgacaggttaactcatttctacacattcattctcaggccagatgccacatacagtgtcctggttgataatagagagagagattctggaagcatgtatacagattgggatattcttcctccacgaaaaatcaaagatgtcaaggccaaaaagcctgcagactgggaggaaagagaatacattgaagaccctgatgatgtcaaacctgagggatatgattcaatcccaagagaaattcctgacccanatgctaaagagcctgaaaactgngatgaagaggaagatgggaaatggaaaccaccaaaga

SEQ ID NO: 206585 - DNA, 363 bp, Glycine max
ccatggccctttgtatgctggatttggtatcttggggggtttccatttcccatcttccttttcatcccagttttaaggctttttaccatttgggtaaggaatttatttggggattgaatcatatccctcaggtttgacatcatcagggtcttaaatgtattctctttcctcccagactgcaggctttttggccttgacatttttgatttttcggggaggaaaaatttcccaatctggatacatgcttccaaaatctttatccatattatcaaccaggacactgtttgtggcatctggcctgaaaatgaatgtgtcaaaatgagttaacctgtcagtttcacattgcaggtccttctttatggg

SEQ ID NO: 206586 - DNA, 561 bp, Glycine max
gtttccttcccttccctaacgatctgaggaagacaccaagcttctctccacgcccttcttgggtaatctgaagtgcagcgatggcggatggattgcactcgcggcatccatcagtagttcagaagttatctggacagtcttatttgttgtctaggcttgcccctactcactcaagaaactattccacaactggtagttacttcaatggaggcttgcagtcttcgggtttggttccagtcatggcacatgcaccggctgagaaaggagtgtctggatttttgttggatttcatgatgggaggagtgtcggctgctgtgtccaagacggctgcggctccaatcgagcgagttaagttgctcatccaaaaccaggatgaaatgatcaagagtggtcggttgtctgaaccatacaagggaatcggcgattgtttcagtcgaaccatgaaggatgaaggggtgattgctctctggagaggaaacactgctaatggtatcagatactttcctactcaggctcttaactctgctttttaggattatttcaagaggcttttcaatttca

SEQ ID NO: 206587 - DNA, 382 bp, Glycine max
ggggggggggacaaaaaattaaaaaaaaaagggaaaaaaaaaaccaaaaaaaaaaaaaaaaaaaaaaaaaaaaagataaaaaaacaaaaaaaaaggggaaaaaaaaaacacaaaaaaaaaaaaaaaaaaaagaaaaaccaaaaaaaaaaaaaaggttgaaaaaaaaaggggagaaaaaaaaaaacccccaaaaggggggaaaaccaaaaaaccccttttttaaaccaaaattaaaaaaaaaaagggggaaaaaaaatatgggccaaaaaaaggggggcaaaaaaaaatggggaaaaaaaccccccccgcaaaaaccctttttttttcaaaaaaaaaaagggggagcttaaaaaaaaccgggaggcccctaaaccccggaaaa

SEQ ID NO: 206588 - DNA, 467 bp, Glycine max
gagttgatgacatcacatactggcattagtagaggttttgagaattctctagtaggaggttggagagagtcaattgcatctaatagataaggtccaccataccagttttttaaacgggcatcagaaggggatgccaccaaattttgattttccatagcaccttttctgttcaaagtgtggaggagatcatgaaaattgtgggagaggcaagggaccctcctccagtatctaggcttgtcaaaggttttggctgggagggcaaagaagatgaaggggaagaagacgtggaggaagaggaggatgaagaagacgagtatgacaagagggtcaaagaggttcatgcaagtggagaatttcaaatcagttaagcagtataataattcttgtgtacttggttaaagtattattattctttatgctagaagtcatctatttatgtgtactataatttataataactactataa

SEQ ID NO: 206589 - DNA, 399 bp, Glycine max
catctactatattactattaaaaagcattttaagctttaactatgcgggttacaacaggcatgagtaattttgaagtaatcagataactactgttctcatacacggcttccatggtgatacaggtaatactaatacattacatggaaagtgccataagttagactgcctcgatggtttatagtagttattataaattatagtacacataaatagatgacttctagcataaaaaataataatactttaaccaagtacacaagaattattatactgcttaactgatttgaaattctccacttgcatgaacctctttgaccttttgtcatactcgtcttcttatcctctttttctccacgtttttttcccttcatctctttgccttccagccaaaacttttg

SEQ ID NO: 206590 - DNA, 505 bp, Glycine max
ttgatgtttcggtggcgatgcttgctcgccctggtgcaaacatcttgcttccaaggccaggcttcccaatctatgaactttgtgctgcatttagaggggttgaagtgaggcattatgatctgcttccagagaaaggttgggaggttgatctagatgctgttgaagctcttgctgatcagaacacagtggcgttggcgatcataaaccctgggaatccttgtgggaatgtgtacagttaccaccatttggagaagattgctgaaactgcaaaacgggttggaacaattgtgatctctgatgaagtttatggtcaccttgcatttgggagcaagccttttgtaccgatgggagtttttggctctactgttcctgctctcactcttggctcactttctaagagatggatagttcctgggtggaggcttggttggtttgtgacacatgatccatctggcacttttagagaaccaaaggtagtcgagcgtatcaaaaagtattctgatct

SEQ ID NO: 206591 - DNA, 542 bp, Glycine max
cttgtgtagtatactagtagtaaagggccatttatttagtaattttacttataagtgaattcactatagctttacaattttcttgcatgcctttgatagaaagattttatccttctcataccctctccaagagcagatggatcagcagcgaaagtaatacgaagccaatcttttaggcctactgcagttcctggaagaatgatcacagattcctcctttgcaagtttgaaacagaagtcaatatcatcactaatatcttccagaagtgaaaggtttaatttcaccatcatagccatggatccttctggtttgtaagggcaaaaaatgcagggaatatcctctatctctttacaacatatatctgctgtatgcctcaaattatcaatggttttctcgaagaaaatttcttcggtatttgcaattatctgaggtacagcagcctgcaagaaggttgctggacctcctagaagatcaaaatactttttgatacgctcgactacctttggttctctaaaagtgccagatggatccattgtcacaaa

SEQ ID NO: 206592 - DNA, 585 bp, Glycine max
  unsure (1)..(585): unsure at all n locations
gagaaaaggaggagcaggaggcatcaccgttaccaaacatggtgaaagggcgccaaggagagcgtgttagactttacgtcaggggttcaatacttggatacaagaggtccaagtcaaatcaatacccaaacacctcattaatccagattgagaatgtaaacactaaggaagaagttgcgtggtactgtgggaagcgtatggcttacatttacaaagccaaggtaaagaaggacggaagccactatcgctgcatttggggtaaggtcaccaggcctcatggtaacagtggtatagttcgtgctaagttcaagtccaatctgccgcccagatcaatgggagcaagggttagagtcttcatgtatccaagcaatatatgaggttctcaggactcgtgagtcgtggagcttgttttgtcagggtatttgataggaatttatattatggtcttcttttctggtagctctcgagcagggtagtatccttgtttaggatgaagagaatgtaccgcatgttttttctttattctcactgccatggttattanggagggatatgagtctcaattcattaacggatttttttcct

SEQ ID NO: 206593 - DNA, 463 bp, Glycine max
aaggaaaaaaaatccgttaatgaaattgaaactcataatcctccctaataaccatggcagggagaataaagaaaaaacatgcgggacattcttttcatcctaaacaagggtactaccctggttgagagctaccaaaaaagaaaaacataatttaaattcctattaaataccctgacaaaacaagctccacgacttacgagtcctgaaaacctcatattttgcctggattcatgaagactttaacccttgctcccattgatctgggcggcagattggacttgaacttagcacgaactataccactggtaccatgaggcctggggaccttaccccaaatgcagcgataggggcttccgtccttttttaccttggctttggaaatggaagccatacgctttccacagtaccacgcaacttgttccttaggggttacattctcaatctggattaatgaggcgtttgg

SEQ ID NO: 206594 - DNA, 480 bp, Glycine max
  unsure (1)..(480): unsure at all n locations
cccctctcctctttctctctctttctaaaaaccagaaacaacaaacacaaaccgaaaaggcgaaaggggttttccgagtgagatctagggtttccatcgattcggagagaggatattgatagaacgacctcaacgagcaaggtcaggaggtggagtactagaacatggattcggtgccttcgaattcgcatggaaacctcgatgagcagatttctcagctcatgcagtgcaaacccttgtccgagcaagaggtaagggtcttgtgtgataaggcaaaagaaattttgatggaagagagcaatgtccagcctgtgaaaagtcctgttacaatttgcggtgatattcatgggcaattccatgatcttgcagagctttttccattggagggaagtgtccagatacaaattactcgtttatgggagactatgttgatcgtggctattattctgctgaaactgttancgctttggttgcccttaa

SEQ ID NO: 206595 - DNA, 487 bp, Glycine max
  unsure (1)..(487): unsure at all n locations
gaagccagcgagtgagtgagcgagccaggtagggttttcggtgttcccctctttgtgttcgttcgcgacgatggggtccatccccgatccaggcgagttgagcgagttgactcagccgagcttcgacgagttccagcgccaaacctctctcatgaccagctgcaccctcctctggaaggagctctccgaccacttctcctgcctcgagcaagacctcaaccacaaatccgaagccctcaagcgcaagattcacaccctcgacaactccacctcggactccctccgcctcctcgaccaccgcgaaacctctctcgacgccactctccagatcgccctccgcacgctcgacacgcgccgcaccgctgctctctccgccctcctccacgacgctgacgacacctnccccgacggcgaggtcgatgacaccgacggcctcgtcctcaagctcaagtccttctgcctacgcatggacgcgttcggcttcttc

SEQ ID NO: 206596 - DNA, 494 bp, Glycine max
attaattgcaagaatggcacttcgttgcttggtgatgtccctttctgttctcttcactcttggtcttgcgagagaaagccatgccagagacgaagatttttggcatgctgtttggccaaacactcccattccaagttcattgcgagatcttctaaagcctggccctgcaagtgttgaaatcgatgatcaccctatgcaaattgaagaaacacagtacccgaaaaccttcttctataaagaagaccttcatccaggcaaaacaatgaaagtacaattcagcaagcctccctttcaacaaccatggggtgttggtacatggttaaaggaaattaaagacactactaaagaaggatatagttttgaagagctatgcatcaagaaagaagccattgagggagacgagaagttttgtgcaaaatccttgggaacagtaattggttttgccatttcaaagctgggaaagaacattcaagtactttcaagttccttggtca

SEQ ID NO: 206597 - DNA, 517 bp, Glycine max
cacgagataaccactttttaccatatatatatagagagagagaatacgaagcacactgatcacaggatgatgctctctttaagtagggaagcagatcttatcagtacacataggtaggttgaaattctagctctagcaatctagctagagaaggtagtacttgcacaacacacagcacatgataatttattttatacacaatctcattctcatggtgctcaagatgcatggactaattaagcaacaatgttggtctgataggcagtgtccacagataaattgggtacccataaaatggccttgcttccaaggaaatggcaaacagggttagttccaggatcaactcccataagttgatgaagcatttgatgattcattccagaagtatttgagtggcaaatagcaagtgcctgagttttggttccatcaccagccaccaatggaaccatgaaagctgttgtttcacggacttcatggcagtaaaatactgcagttctgaaaattagcctatgacaca

SEQ ID NO: 206598 - DNA, 510 bp, Glycine max
  unsure (1)..(510): unsure at all n locations
ttgagcttttctttctttctctgctctcttttcttttaggtttccactctcacacactctccctcttctctttctctgcaataatctctcttctcttcttcactctctcaactcctgccaaacccccatttccgcagttcttaaatttggagtctgatgtctccgccattgctggttaccgaagatgaagggcagtgccatgcctcgatggtagcatctgcatcttcaccatccctgaactgtttctccctaaatgaggccggatttaaagaatgcaattacctgggattgtcagattgctcttcggtggacagttctactgtcccgaatttgtctgatgagaaaaaggagaatctgaatttgaaggctactgagttgaggcttggccttccgggatcccagtcacctgaaagggagacagaactnttctcgttgagctcaacanaacttgatgagaaaccactgttccctttgcttcctacaaaggatggaatctgctcatnggctcaa

SEQ ID NO: 206599 - DNA, 521 bp, Glycine max
gattgcaacatacattcaacttatccaaacaaacatgttcctataaagattacaagctccacaattactaatattcaaggtagcttcataaggtattatagtagaaacaaatgtaacacaaacaaaagaccaagacactattatgatacttgtaaccatagacaacatcttgaatagcagttaaccatcaaaacccggcattcagtcatttatatcataagttctctttccacactcttcatgttccaataccaactagcacctgctcctggatttttccatggccctgggagctaagccaatggcatcagaacccttcatgattttcagtcttttgcatgtgtcaatgaacatatcccatggtacatctccgacaagcatccagtcaccatctttatcttcataagtgagtacatattctgaaccatgcaggaggtccttcagcttgctctcactcaacatttctcttcctggagctccatgggaaccacattgacctagagtgaaacagctgaacattt

SEQ ID NO: 206600 - DNA, 465 bp, Glycine max
  unsure (1)..(465): unsure at all n locations
ttcttttttctctttagcgtttggtaagggtgcctatatttattctgcattcgtcctcgatccttaggcggagatttcaaacacaacttcgcttattaaatctcttcttccaattccttctttcattcattcccaggctgagatggcagcggcaccagcagctaccttcactattggaaccaccggttccctaggccaaagaggaaactcgcttcctcaattaaagtcttctgggttgaaattcaactcccagaatcatttgaagagcttctgcggcctcaaggccatgtcatccgtgagatgtgagtcagattcgtctttcttggttacataactggtgctgctctgcgggcgtctnttgcatccaaggctcanaaggacaacgaccaaaacttcaactacaactcgcagcctcaggcttcgtacaaagttgcaagtcttggtgcttgctgagggataggtcag

SEQ ID NO: 206601 - DNA, 449 bp, Glycine max
caaaaacaacttttacgttttccaattctacattataatggtgacatctttgaagattttcgaccaaaacctaagctctgtatagagaacagaaatggaagctccgtcccgttctactaacaaaactggaagtagaattgatagttgatcctatagaaagtttgaatcctaagttctggaagcagtaaagatgctacaacaaatccgcaacctaagttctctaagtagtatttgggctaaaaataaatccataacccaagaaaccacccgttgaaaaaaaattaagcagcaacagcttgcttctgagcaaaagcaatccccttctctatgctggccatgagttctggcttaagtgattccaaagccttctgctcatagtcagtcaacccttggaggtcagatggaattaatgcctaaactcctttcctaccaagcttcacccttgaagc

SEQ ID NO: 206602 - DNA, 419 bp, Glycine max
tggctttcccctccaaggcgatgactagcaggttctggtgcagcgtaaatcgaatgcgagagttttgacactaaacaggactaaacagttgaatgccctctctttttatatggtttctcggctacttgaaattttttctgaagatgagaaagattctgatattaaattggttgtcgtgaagggaaatggaagggctttttgtgctggtggtgatgttgcagctgttgctcgtgatggaagtaaaggtgactggaggtttggtgcaaatttttttcaaagtgaatttaaattgaattacttgatggcaacatatagtaagccccaggtttcaattcttaatggaattgtcatgggaggtggtgctggtgtttctgtacatggaagatttcgtgttgttactgagaatacggtctttgcat

SEQ ID NO: 206603 - DNA, 516 bp, Glycine max
acctggaaactacatttattagagtatcatactctgattctcaacggtagacttcactagttttaaaatcttatcaattgtaacggtagcaattcataaactgccatacattgaaacatccaagaatcaattgaatggagcaatacgtgtcttccatactttgggcttgaaaatatgagaatgatgatgctttacagctttgaaatagcatatgtaggcagattattaaaccttttaggaagctccaaatctttccatcctttatcatcaagtttagagaagtaacgattaacatcgctatcactaagaagctccaatttggaaggttcccactttgggtttctgtctttatctatcagtatagccctacaaccctcgaagaaatccttgctgtagtgtccttttagaatatgacaaacaactctataatcagaaacaaggcattgtccaacaccttggagccttccttgtctaatcgatctaagaaagattttaaggcttgttggagatgctttc

SEQ ID NO: 206604 - DNA, 476 bp, Glycine max
cgtggtggtatcagcaaggcttcccgtgttatcaacattagtgaagatatctattcaggattcaattcaaccttacgtcaaggaaatattacacatcatgaatatattcaggttggtaagggaagagatgttgggctcaatcagattgcactatttgaaggaaaagtttctggtggtaacggtgaacaagttctcagccgtgatgtatacagacttggacagctttttgatttcttccggatgctgtctttctattttacaacagttggatactacttttgtaccatgctaacagtgttaactgtatatgcctttctttatgggaaagcgtatttggcactatctggtgttggtgaaaccattgaagaaagggctaggataactaagaacactgcactgagtgctgctttgaatacacaatttctctttcaaattggtatcctcactgctgtgccatgatcctgggctcattcttg

SEQ ID NO: 206605 - DNA, 534 bp, Glycine max
aaattcaaaactgatagtgcattgcattaaacccaatactacatgacgatttaaatgacatacactagaaaattgatgatacaactattcacaatgctgacgatttttacagaaatctaggcttcctacaagaagatttaccgactcacccccgcaaaatttaaaagacaccatagattgtatctcgtttaggaacaaggcctgagccaaatacaactatatcccagtattgggattgttcccagctagaataagagaaatttctaaccctcggctaaaagcctggttaaacattaggcgagtttggaatgttgatacaaatgggaaccacgaaaagaaggcaatgggtacaaagatgagcattcccataccagcatcatagaggcgagcaattgatcgaacggatttccatagtccgagcctcttcatcaccggcttccaggcagcagcaattgacagaattccccaaccagtaggaatgaaagccaacatagaagccaatatgtcccgtaaagacagttggtcaaatatact

SEQ ID NO: 206606 - DNA, 554 bp, Glycine max
cgcttgaggctaggctacctctgggacatttgtgctgctagttcatatatttgcggctgacaccgagaaggaaagcaggaaaacaacaaaaaggagcagatgggtagctcaggtttctcatggaaattggcggatcatccaaagcttccaaagggtaagactgtggctgttgaggtattggatggttggggagaggccacacccaatgagtacaactgcatccacaaggctgaaacaccctgcatggattcacttaaaaagggctgctcctgaacggtggagattggtcagggctcatggtactgctgtaggacttccaacagaagatgacatgggcaatagtgaagttggtcacaatgcccctggagctggtcgcatatttgctcagggtgctaagcttgtcgaccctgctctagcctctggaaaaatctttgatggagaatgtttcaagtacatacaggaatgttttgaaaatggcacattgcatctcattgggctactgactgatggtggagtccactccgacttgatcagtgcagttgttgcttaaggag

SEQ ID NO: 206607 - DNA, 563 bp, Glycine max
  unsure (1)..(563): unsure at all n locations
gttcctgaaaacattttatccgctagacgtcgtagagaattgagaattctaatttgtttaaatccaaataatataaatagtatgcatagaaacacaatattttataatccaaataaagtccaaaatggttttccacttttgactaaaaaaagaaaatattttgagaaagataaaaaaaaaactaatgaatttcaaaatttttctttggccaaaatatcgattagaagatttagcttgtataaatcgatattggtttaatacccataatggaagccgtttcagtatagtaaggatacatatgtatccgcgaatgaaaattcgttaatccaaatttgtcttctatttaccatatttatatggtaaatagaagacaaattaatatctatatctatctatatagatagatatagatacataacataaataaagacacgcattatggtatggcattgatactaattcactgatatataccttagataaaaaaagaatccacaaaattatgttttttttaagtataccattttttatggtgaatctattaaaaaaagctnctttatatc

SEQ ID NO: 206608 - DNA, 591 bp, Glycine max
  unsure (1)..(591): unsure at all n locations
ctgtgtaaataacccaatataggttcacaatcaataacatcctcaccgtctagagtaacaataagtctaagaacaccatgcattgatgggtggtgaggccccatattgactatcatgaagtcctttcttgtagttgagatattcataggtttttcctcgatttatttttttatgaatcgcttaaaaaaaaaagttcatcaaaattcaagatctaataaatcgaataattgagaattactcttcaatttaacgaatttgtgactctcgaatatcaaactgatttattaattttttataccgtattctatctttctttgacaaataagacagcaatctttgtcgttttcccaaaattttacgtaaacctctttgagataaatagtcttttcggtgcaattcaaaatgtgaagtaagtcttcgtattctatcggtaaatttgaatatttgaaattcaaccgatcctgggtttttttcttttttttcttgtgaaataacaggtataattgaattttttaccataaaaaaattaaagtntttcccttctcttcgcttttacttttgatagatattttgattgatcagaatagtaat

SEQ ID NO: 206609 - DNA, 542 bp, Glycine max
atcccttctcaagccaccgaagcctcactttttgaaattacttgcatagatagataatcatggctatgatgaaacgtgctgcttcctctgcgcttcgctctcttattgcctcatcctccaccttcaccagaaaccttcatgcctcaggtgaaaagaagaagattgtgggggtgttctacaaagggaatgaatatgctaaattgaatccaaattttgttggatgtgttgaaggtgcattgggaatacgtgagtggctggaatcacagggtcatcagtacattgtcactgatgacaaagaaggacctgattctgaacttgagaaacacattccagatgcacatgtcatcatatctactccattccaccccgcctatgtcaccgcagaaagaattaagaaagccaaaaatttggagctgcttttgactgctggcattggttctgatcatgttgatctcaaagctgcagctgctgcctgtttaactgtggcagaggtcacaggaagcaacgttgtgtccgttgcggaggacgaactcatgagaatc

SEQ ID NO: 206610 - DNA, 512 bp, Glycine max
  unsure (1)..(512): unsure at all n locations
ggagtgttccttaaacttttatttctgagatcaattaaacgagttcaaattcaacaaagcaagtgcattacataattagagtgccttctagatctttatttgctcatattcattggccttaaaattggaagattcaaaggccacattgacacacaccacttcatcggtattggctagcaagttgaccctccttcacaatgtagttttgttctggaaagtcttcacccttgaagtgcctatcaagcatgtctttgacaccagcagcataacgtaactgtgcatcaatggtggtaccagaaatatgaggagtcatggcatggtttggcatgtagcgccatggatgatcctttggagctggttgtgggaaccaaacatcaccactataacctgcaacgtggccactggagcaagcatcagcaattgcttgagtgtccgcaattgcccctcgagcattgntaacaatcaagacacctttcttgcacttagcaattctatttttgtcaaacaatccc

SEQ ID NO: 206611 - DNA, 364 bp, Glycine max
ttttggacttatccaaagacctacagtccatgacccattttgtcaagtaatgcttcgtgttggtgatttagagcgctcaattaagttttatgaaaaggctttgggcatgaaggtggtgaggaaggttgataagcctgagtacaagtacactatagctatgctcgggtatggagaggagcacgagacaactgtgttggagttgacatataactatggtgcgactgaatactctaaaggaaatgcttatgcacagattgccattggtactgatgatgtatatcagagtgctgaggtaagtaaccaagtcatacaggaggtggagggaagattactcggcaaccacggccaattcctgtcctaatac

SEQ ID NO: 206612 - DNA, 506 bp, Glycine max
gataaactagtagattaatcataggtagcatgcagaatgaggtttcaattgcggttttaagtcaacaaaagaacccataaaagcaagaaaacaagttgatgactggtactgatacaaaacgcacaatgataaaatgcgagacaacttattcatacaaaagcagcaggactacttatttcatataaagcttgctcttcacttcagttcttccaaaaaatcaacgttgtcaaccaagacagttttccatccatctggatctaaaaacgaagtggtttttgtattaaggccaggaattggccctggttgccgagtaatcttccctccaacctcttttatgacttggttaactacctcagcactcttatatacatcatcagtaccaatggcaatctgtgcataagcatttcccttagagtattcagtcacaccatagttatatgtcaactccaacacagttgtctcgtgctcctctccatacccgagcatagctatagtgtacttgtact

SEQ ID NO: 206613 - DNA, 474 bp, Glycine max
gagagtgtgggagattgcgatgcccatcgttttcaacatatggtgtcagttcggtgtcaactccgtcaccagcatgttcgttggacacctcggcgacattcagctctctgctatctctctcattaactccgtcattggcacttttgcctttggtttcatgcttgggatggggagtgcaactgagacactctgtggacaagctttcggagctgggcaggttaatatgcttggtgtttatatgcaacgctcatgggtgatattatcggtgaccagtatcttgctcttgcctatatacatttttgccgctccaattttgaagcttcttggtcaacaggaagatatagctgatcttgcagggagtttctccattttagtaattccacaatttctttcacttcccttcaattttccaacgcaaaagttccttcaagctcagagcaaggttaaggttattgcatggattgggttggtggc

SEQ ID NO: 206614 - DNA, 457 bp, Glycine max
gaaaaaaagactttgagaacttgactcgagtggaggtggaagatatacaagattatgcagaagccactatcttatcaactccaatgtcttgtccactccatatccgcatgcgttcagctgtttgttccacctctttcttccaattggttttgtaaagtatcaacaagagcagcaaggtctggagaacaattccacatatcataccaccccaaagtccctcaacccccaaatttgctgtataaccaagaacgaaccccagtggaagcccaaataagtaataacaacctatgttgatgtaggccaccagggcttgccacccaccttcaatagcaacacctgaaaccactggttgaacactgtttagaaccattgtcacagaaaggaggtatcctagtttcgcaacggccttatgcaaaacctcactggttggaaaaataatggcataataatctctagt

SEQ ID NO: 206615 - DNA, 547 bp, Glycine max
ttccatttatagttgcagagcaagaagtttgttcggagatctgcaagctggaaaatgtgattgaggaagctgaaaccactgatgatatccagataaaaaaccaacatatggaagaaaagactcaagctttggatttcttgcaagaaatgggttggcttcttcatagaagtcatgtgaaatttaagctaggttccatggctcctttccatgatctcttccaattcaatcggttcgcttggcttgttgacttctccatggaccatggttggtgtgctgtgatgaagaaactcttggacattatatttgagggtggtgttgatgcaggagagcatgcctccattgagcttgcattgttgaacatgggtcttctacacagagctgtaaagagaaactgtaggcctatggtagaactactgttaagatttgttccagttaaaacctcagatggtgcagacagtgaaatgaagcacgttgccgaagcccctgacagattcttatttagacctgatactgtcgggccagctgggttgactactcttcatgttgc

SEQ ID NO: 206616 - DNA, 499 bp, Glycine max
ctaaaataatatattaagaaaaggtggaagcttacagcagaaaacacctgatatacaacattacattgccccatactctaatgattcccagttgaagggctggaagacataataaactctaggtgagcttttgaagagcaaagctacacagacacacacaactgctatggtcaccatggagagcatgactggcctataaaccattgctgttttcatgccaccataagccaccttctgctggcatgccctacattgacggggcattgctgtggtttcaatcttctcagtctttaagcttggaactctacatgtcctatttccatctgattgcttctgcgttgtgttactatctacaacagttccagggatatcaaccaaatgttgtctttcaccttttttgatggtcttgttctggactagttgaatgtaagagtaatagcccctaaggcaagcatggtcgttaggggtcaaacctgtactgtcccgggcacttttccat

SEQ ID NO: 206617 - DNA, 451 bp, Glycine max
agcattatcaacatacaccaacaaaataaaatgcacttgcacagcaaaagcatattaggtcattctcccagctaattactttgtgcaacacaaaataatagcgagtttacagaaaaactttgtctttttgcatttatttgttggcaggagtcgggaggagacgaactggagctctaaaagcataagcctaaatgcatatttaagtaccgaaacaatactcccattgtgggaactcggtaccttctggagcactgccttacaccttggttgatcccacttctttccaatcagttgatagcactgttccatttgactccaagaaagacttgctcattgctctcctcatgtcctcatctgcattctggtacatatcacggaacgatttaactcgaggagcatcaccatggagctgttcattttgtccgcttttttcacttgagctaccaactta

SEQ ID NO: 206618 - DNA, 494 bp, Glycine max
  unsure (1)..(494): unsure at all n locations
atcatcacacacacatactaagaagcaacaattcttctacaatggatctcctccttctggaaaagaccctcataggtctcttcctcgctgcggtggtcgccatcgccgtctccaccctccgcggccggaaattcaagctcccaccgggcccactccccgtcccaatcttcggcaactggctccaagtcggcgacgacctcaaccaccgcaacctcaccgatttggccaaaaaattcggtgacatcttcctcctccgcatggggcagcgcaacctcgtcgtggtttcttcccctgagctcgccaaagaggctctccacacgcagggcgtggagttcggctcccgcacccgcaacgtcgtcttcgacatcttcaccggaaagggccaagacatggtcttcaccgtctacggcgagcactggcgcataatgcgccgcatcatgaccgtnccctcttcacccacagggtgtgcaacaataccgccatggatgggaatc

SEQ ID NO: 206619 - DNA, 447 bp, Glycine max
cttcacttgcttgaagcaatggcctaagccttggcatcagtgctgctgtttctcctcgtagctgtgagtaatgtgtttgctgtagagcttgaacttgaaactcttccaccctcttaccctcaccctcaccctgttcactcccccacaccagcacctcttcacccaccagcaaatgctcctcacccacaccaccaccaccaccaccaccaccctccagcaccagcaccagcaccagcacctgttccttcaccttctcaccacaattaccctcctacccctgcccctgctaagcctcctactcaccaccatcaccatcaccctcctgctcctgttaatccacctcctgttccggttcatcctccagttaaacctcctgttccggttcaccctccagttaaacctcctgttccggttcaccctccagttaaacctcctgttccggctcac

SEQ ID NO: 206620 - DNA, 376 bp, Glycine max
  unsure (1)..(376): unsure at all n locations
catactagaactatccatttcatacgtactgtcactcattattgtgtatgatcaattcaagcccagagcctacaaacgcaaaaccacaaataaaaatgaagacaaacaaaacaaggccagaaagaaggcaaattagagacaacacagctctatcatataacttaaaataacttgaaatatgatatatccataatttcttgcatttaatggcaattgggctcaaatgcaagaggcccaacagtgtagagcacaaaaggaagcctcttagacaagaaaggcttctcgggcctgagaagagcaccagtgacaccaccatggagatttgaggccttaagcccataaggtgcactaaccaaacncacgttacacttgtggg

SEQ ID NO: 206621 - DNA, 468 bp, Glycine max
aatggcttctatacaatggccatatgagcatcttaaaacagctttctctgtttctacttttcatcaataccttttcctctttcttcttgttattgttgtgttaaagctaacaagaagacccaaaatcaaacccagtttcaatctgcctccctccccaagaaagctaccaatcattggcaatcttcatcaactaagcaaattgccataccattctcttagaaccctctcacaaaagcatggttctctgatgttgttgcagttggggcagactcgagccttggtggtttcatctccagacgcggtcagggaaatcatgaaaactcacgacataactttctcaaaccgacccaaaaccacagcagcaaaaaccttgctgtatggatgtaatgacattggttttgcatcctatggagaaagctggaaacacaaaagaaaaatatgtgtccttgaagctctgagccccaaagg

SEQ ID NO: 206622 - DNA, 362 bp, Glycine max
agtctataatttcttttatattttagccacactgatatttattgtttggatccggccctccttataacatagatcactttaaagtaaattaaaccatggatttaaaggaaaaaggggattggcttaagatgaagtgcctctttcttgtaggtaactaggccatatgtttcactcatgtctatgtcttgtccagatgtgtgagttgcaggcagcttccaattgaaccaataaagaaggttggccagaatatactcaacagaagcaagcccaaacgtcattccggggcatgcccttctccaaaaccaaatgtaataaattgcaagtcttggccattaaaatgaacccggctgttatcatgtctc

SEQ ID NO: 206623 - DNA, 195 bp, Glycine max
agcagaagttgctgtgccagctcctaaacagttgggatttcttctggagcagttgctgtaggacctaattcatctcccttaaatatgtttgcacaggagacgatttctagcactggggctggacttggatcgctagacttccttagaaataacccccagtttcaagctcaagctgccaaccacaggacatctagc

SEQ ID NO: 206624 - DNA, 490 bp, Glycine max
  unsure (1)..(490): unsure at all n locations
ttcatattcatttcaatggcaacttaaggttttgtcattacctgcaaagctgcggtggcctgggaacccaacaagcccttaaccgtccaagacgttcaggttgctccgcctcaggccggcgaggtccgtgtccaaatcctcttcaccgctctctgccacaccgatgcttacacttggggcggcaaggatcccgaaggtctcttcccctgtattctcggccacgaagctgcagggattgtggagagtgttggagaaggtgttactaatgttcagcctggggatcatgtcattccctgttaccaggctgagtgtggggagtgcaagacttgcaaatcggggaagacaaacctctgtggcaaggttcgctccgccactggagttggggtcatgctcaatgatggaaagagcccgttctccattaatgggaagcccatttatcatttcatgggaacatccacttttagtcaatacactggtgntcatgacgtta

SEQ ID NO: 206625 - DNA, 378 bp, Glycine max
aacccaaaagggatgcttttaagtattcattctttctgatcacaagtttgccaaaagattcgaaagataacatccatattatagaccaaaatgatcttacttacaaactataaccactcgagatttatttcaagttcaaactacaaccactaaaagaggggaaaagcaacccaacacatccattcctcacgaaagtagccaggctagcatagataacctcattcttgtgttgaaagcacacaacgaagacatcccccttcatgcaaaagatcaaaagccttgtgtgatctccgaaagggtcaaagtatgggtaatatactcatcaaccttgatttccttcttcaagtacttgtctacaagccaaggcacctgtgacct

SEQ ID NO: 206626 - DNA, 474 bp, Glycine max
acatcaaaactttgtgattgctatccgccaaagttgaattacatcgatgtttctagcatcacaacccttgttccaatcaataaaactgccaagccacaacagtaataggacgcttatatcaaaccaaaatccccgaaaaaattattcaagtagtaactgcagcttttacacataagcacctttaacttatccaagacaaatgtgcatagctaaatctttttcaaaggaagccgttatataattctaaggatgattatttctgccacgagactcctcatcacacaacaaccgtgaatttatctgctgtctgggaatttatcctcgtatgactgaggcaccatgaagcttgcagtgatcatcttcccagcaaaccatcttccgtgcaaggactgctgtgcacttattgcagattgggtatcttcaaatcgtaaatagacaaaaccagcactcttcttatcaacatatatgtgtttt

SEQ ID NO: 206627 - DNA, 220 bp, Glycine max
tgcatatttttactaatcataatttgtgtataaaaacagactgatgaaatgatcagaaaaataaattttatgtgaatatgtgattccagttactcaaaaaaaaaaaaaaaaaaaaaaaaaaaaaaaaaaaaaaaaaaaaaaaaaaaaaaaaaaaaaaaaaaaaaaaaaaaaaaaaaaaaaagggcggcccccaactaagagagctttcaacccgggaata

SEQ ID NO: 206628 - DNA, 350 bp, Glycine max
cgggaaaccggaaaccccattccccaaaaaatttaattttccgaacatttaaacagcctggtttttaccccaaattttgattagaaaaaaaatccccccgcccccaattcccaacttacccccccccaccttccaacgtataaccccttcacaggggcccccaaatgcaaaacccggggccgcttttaaaaacccccctaccgggaaaaccctggggttccccaattttaagcccttgaaaaaaaacccccttttgccccctgggggaattccaaaaagggccccccccactggcctttccaaaaaaggcccatcccaaaagggaaatggcaccccccctgtacgggggc

SEQ ID NO: 206629 - DNA, 481 bp, Glycine max
agacgatgagtctttattgcacttaaatcaaaacttaacaagaaaatcaccatcgtaaaactggagttgactgttttcagtatcagttgtaccaattaaaatcattctggactccctaagagaaccaaatcaaaaatataaatgactgaagttttgcagttccatatcatcttcaacctagaaacaactgagataaaaagtttaaatattgtaaaaacccaatcaactggtctttggatcaggcattggaaagaggccagcacttgcacctcttggtggtgcaaaacccaagaacttctgcaaatttgttctgatgctaatggaacacaagaagtacagaaatgccatggaacaatcagtggggtcattaccctgcaaccctcgatggctcatcttcataataagcccaaaaggtttgaagggcaatttggcaacaaccttgccttcgaagagtgaattcagcaacccaaagaccacaaag

SEQ ID NO: 206630 - DNA, 399 bp, Glycine max
ggtttatcaaatttcttgagccattttacatgctgcttataacaaaacgaagaaagatcggcacaatctgtgggcacactatatatgctatcacaaagagcgaaatggtcccaattcctcatgctactgtgcgatccaaaatggcttattctaaggatgagaacaggtctttagtcaatcttgcatgtaatcgtaatgcgtctatggtacatttaaagagacatgtagacagtagcattgagagctataccttgtccattgtacttagatgttatgaattacaattttttaatttgagttcattatattgtgcagcgaaaacattctgttagagcatagttgagttggaattatacattttagacttcttcttgtactatatttgttgattgtctctct

SEQ ID NO: 206631 - DNA, 209 bp, Glycine max
gtttatctcttttcttctttttaatatttaatttctttgtattttgtatgtaaagatgtaaaattatgattattaggtggcgcatgtgtcgcgtcatgggccaatgttatcctctgcttttaagttggaagaggcccaactcatgtgtgatgtacggctgtgattgtgtaatttaatttgcaaaatcaaaaataacaccagagtcatat

SEQ ID NO: 206632 - DNA, 209 bp, Glycine max
atatgactctggtgttatttttgattttgcaaattaaattacacaatcacagccgtacatcacacatgagttgggcctcttccaacttaaaagcagaggataacattggcccatgacgcgacacatgcaccacctaataatcataattttacatctttacatacaaaatacaaagactttaaattttaaaaagaagaaaagagataaac

SEQ ID NO: 206633 - DNA, 473 bp, Glycine max
  unsure (1)..(473): unsure at all n locations
caaggcagaaagcaagctcatcctagagttttaaaaatggcagcagcctcctccatggctctctcttccccatccttggctggcaaggccgtgaagctgggcccatcagcccccgaagtcgggagggtcagcatgaggaagaccgtcaccaagcaggcctcctccggaagcccatggtacggcccagaccgcgtcaagtacttgggcccattctctggcgagcccccgtcctacctcactggcgagttcccaggtgactacagctgggacactgctgggctttcggccgacccagaaaccttcgccagaaaccgtgagctcgaagtgatccactccaggtgggccatgctcggggccttgggctgcgtcttccccgaactgttgtcccgcacggggtcaagtttggagaagctgtgtggatcaggcccgggtccagatcttcagcgagggtgggctggactantctgggcacc

SEQ ID NO: 206634 - DNA, 438 bp, Glycine max
ggaaaaagcaagtaacattaagttggattgggatacacaagataattcacattatctgaagtacattgcaataacatatacttcaccaaacacaaatctaaaaactctcaaaagtccacaagtcatccttttctttcatgctcacttgccggggacgaagttggtggcgtaggcccaggcattgttgttgactgggtccgcaaggtgatcagcaaggttctccaatggacccttaccggtgacaatggcctgaacaaagaacccaaacatagagaacatggccaatctcccgttcttgagttccttcaccttaagctcagcaaaagcctctgggtcatcagcaaggcccaatgggtcaaagctgccccagggtagattgggtcagtgacctcaccgaggggcccaccagcaatacgataaccctcaaagcacccatta

SEQ ID NO: 206635 - DNA, 507 bp, Glycine max
gacagcaaagattattctaaatgttattaattgcatcaaagtcctgatagaacatagggacgtacactggataaacactccaaaaaccaactacagcaataaacactagatgggatgctgcaattacttgtgcaaagcacaaaggcaattcttttcacctacgtctgatgatatacagtagggttgatccttgccatcttgaaaccaggtagcacgcttctccagaagctcgttcagaaaatcatcaagcttctcaatagagatgtttggcatcaccaccacatgtgcgatattccccttgcatgctaactgccacttgcgtataaattcctcatcatgtggcctctcaaacacaaccgtgctgctcagttcattaagcattgcaccaatcccagcctcaacaaggcggcctttgaagtagtgtgcatttcgcaagcatttctgtacttctttctgaaaacctctatatcctttccgattcaggtataccagaggaatatgggagca

SEQ ID NO: 206636 - DNA, 470 bp, Glycine max
gtcgattagattactttcacaccttagtcgtttgagtacttcaccttctttctctctaagcgcaaaacctcgtactgtttttggcggttaaggatgtcggggaaaggagcgaaggggttgatcacaggcaaaacctccgccgtcaacaaagacaaggacaagaagaaacccatctcgcgttcttctcgtgccggccttcagttcccagttggtcgtatccaccggcttttgaagtcaaggacaaccgctaatggtagagttggggccacagctgctgtctactctgctgctatcttggagtatctcactgctgaagtattggagctggcagggaatgctagcaaggatctcaaagtcaaacgtattactccccggcatttacaactagcaatccgcggggatgaaaagttggataccctgataaaaggaacaattgctggaggaggagtgatttctcacattcacaagtc

SEQ ID NO: 206637 - DNA, 344 bp, Glycine max
aacaaagagaaatactaaatattatatccatgatcaacaacaggcaacaaagtcataaataaaaggccctactttgtttttcaagtgccatgcaaaaattacacaattagtagagagaaattttccatcaagcaagctattattcactagtaatctactccttggaagacttgttgataagagacttgtgaatgtgaggaatcactcctcctccagcaattgttccttttatcagggtatccaactcttcatccccgcggattgctagttgtaaatgccggggagtaatacgtttgaccttgagatccttgctagcattccctgccagctccaatacttcagca

SEQ ID NO: 206638 - DNA, 380 bp, Glycine max
attctcatccctgccattccagctttcatcattgccgagtgctatggctttggaagaccttggatttttatattgagcttacttggacttacaccacttgctgaacgtgtgagcttcatcacaaaacaagttgccttttacactggtcccacaggcggaggacttctgaatgctacatgtgggaatgttactgagctcataatagcaatatttgcccttagcagtaacaaaattgctgtggtcaagtattctctgttgggttctattctttcaaaccttcttctggttcttgggacctctctattatgtggtggcattgcaaaccttaaagtggaacaaatatatgacagaagacaagcagatgtgaactcacttatgct

SEQ ID NO: 206639 - DNA, 439 bp, Glycine max
aagaagaaactagcattaatagaatttttatttctcacacaataaatacaagagattctgcaaactgaaaaagggatttcttactaaagcaaactcaaacaagaacaacttccactcatttggcatctaccgtagtagaacaggatcaaaagcagctctctgatagaacacacgtatgtattatattgaacatcttgcacagtggttcatttctcacagctattgcaacttaaaatacttgcaaagcttctgcaaattccaaactttctttttctcccttctttatggatatgacaaagtgatcagatcatgaaacaataatcaatccattgaattgaatctgatttttggtttggatcgatgccaccattcttcatcttaggaagggacaacaaataggccaaagcctactaattaagcgcttaaaactgattagtgg

SEQ ID NO: 206640 - DNA, 505 bp, Glycine max
caaaggtcctttgggtatcttgctcaacaccttcgcatcaaacactgcatattgcttcttaatctcggcaattgccttcccaccaaaagagtctacatgatcttcatatttctcataaagcacaggcacagtgtgcagcaaaacaaaagctatgtagaacagggtcaagaagttggcccagctacccaaaatagagaaaacccataatccagcaatcactgataagaacttcttgagatcccttccagatgcaatatcccttaacaacgcaaaagcccggttgatctcaactctaagagcagaggcaaattctaaaacaggtttctctggaatgtgcacttgcgggatctttggtggactcttgttgatgaaagtggatgcattggaccacaagaacaacaccgcaagaccaaggatcagggaagtggcaaaccaaggtgaggagggtgggactcaagcaattcaaacagaacccatatagcggtcgcactccgagtgtcgatgc

SEQ ID NO: 206641 - DNA, 527 bp, Glycine max
  unsure (1)..(527): unsure at all n locations
aagtgcttctctcctctgtctttttctctctcttgctatccttttggctagtggcactgctgcaagtgcaactccaagaagcgcagtgccaagccaccatgtttcaacattcaacagaagcctttttccttccacttttctctttggaattggttcttctgcttaccaggcagaaggagcagcaagtgtagatgggagaggaccaagcatatgggacacctacactagacagcatactgaaaagatttgggatcatagcaccggtgacatgggagctgatttttatcatcgatacaagggtgacataaaaatagcgaaagaaattgggctggactctttcagattctctatctcatggtcaagaatattcccaaagggcaagggagcagctaacccccttggggttaaattctacaacaatgtcatcgatgagatcctagcaaatggattaaaaccttttgtcactctttntcattgggactctccacaagctcttgaagatgagtatggaggattccgtagtccta

SEQ ID NO: 206642 - DNA, 398 bp, Glycine max
acttcgacatgccatttggcattatttatttgataaaatgatctcttgattacatccaacacaagtgatatacgatgaaatctagggaaataaacaagaaaaacactagacatgtcaaaggaacactaaattcagatcacttgagaaggaacttttgcaaccaaaaagcagagaacttggggtatcttttcaagttgttcttgtaatccacatatatgagcccgaatcgaactgtgtaaccagcatcccattcaaaactgtccgaaaatgaccatgcataatagcccttcaaattaacaccttccttgatcgcttgaagaaggaatttaagatggccatcatgggatctaatccttatactatccctgcgggcttcattgactgggattgagtcattc

SEQ ID NO: 206643 - DNA, 512 bp, Glycine max
ctgccttgctcatttacacacctttccaacctttcactttcagctttatttgaatccctctctctcctttccaaatggccagcgttgaggttgcacatcaaacaccaacaacagttccagaaaatgaaacaaccgaggtaatcaagacccaggaaacaaccccggaaccagtaccagccactgaggctcctgcaacagaacaagcagcagctgaggttcctgctcaagaagaacaacaagcaactgaggttcctgccccagaatcaaccaccgaagcaccaaatgaagaaaccaccgaagcaccaacaacagaaacagtagaaacaacaactacagaagaagccaagccagaggagcctaaagaagttgcagttgagaccgaggaggtggtgacacaggagacagaggatgagaagccagcagcagaagagaaatcagaggagaaaactgaagaagtgaaagaagaagcagaagagcctaaagaaactactgaaacagaaacagaatcagca

SEQ ID NO: 206644 - DNA, 367 bp, Glycine max
aaaggaaatatcatttattcaaacctaaagaaacacaataacacatcatcacaaactcatgtaaccctgccaataaaataaacccttatccctaaactccagcaccagcagcagattgctcacttcaatacacaactcctagaatttctcatgtcaccacgtggtaagcacgctgatgtggagccaagtgttgtgctcacacgtaggtataccctccataatacaaccaaagacttaaccatcatataataataatatattaataataaaggccactgaagaaatgaataaaaaaaaaagcttttcaacatgacatgcaaaatggtagacctaatgatccccacaactaggaccattttaaaacttg

SEQ ID NO: 206645 - DNA, 479 bp, Glycine max
  unsure (1)..(479): unsure at all n locations
ggagactttgagaaagccgtgtaccgatggatactagaacctgcagatcgtgatgctgttttggccaatgttgccatcaagaatggcaaaaactacaatgtcattgtggaaatcgccactatcctctccccggaagagcttttggccgtgagacgtgcttatctcaaccgctacaagcactccttggaagaagatgttgcagctcatacctctggccatctacgccagcttttagtggggttggtgacctcatataggtatgttggtgatgagatcaatccaaaattggcacaaactgaggctgaaattcttcatgatgctgtgaaagagaagaagggtagctatgaagagaccattagggtcttgaccacaaggagcaagacccaacttgttgcaacttttaaccgctacagagagatccatggcacttncatctcttagaacttgtcgatgaacgatctgatgagtttcaaagggca

SEQ ID NO: 206646 - DNA, 457 bp, Glycine max
aaaagccacaaagcagctatcatattaatactctataagataaaactccaagttctcatgatcaaggaaaattgaaaacagactcaaggaaaaccaacacacatgaaaccatcacacacaagtatagcttactgtcctaaactcataatcacaaatgccctcgaagaaaagtttttagtcttcttttcccaacagtgtgagaaggaacttcttgtagtccccagaggtttccttggcaatagcatgctcaagaagaacactgtttctcttgtagtaaacctctgagattatcttcaagtccttctcagcccggctcacgaccacacgggtgagtgcatcctcatcagttccaacctttttgattgcattccgcaccaccttttcgtagtacttaataggatccttgatgccacgaatggcagtgtacaatgccctttgaaactcatcagatccttca

SEQ ID NO: 206647 - DNA, 316 bp, Glycine max
ggagactttgagaaagccatgtatttatggtttctagaacctgcagatcgtgatgctgttttggccaatgttgccatcatgaatggccaaaactacaatgtcattgtgagaatcgccactatcctctccccggtagagctcttggccgagagacgtgcttatctcaaccgatacaagcactccttgtaagaagatgctgcaacccatacctctggccatactacgccatcttttagtggggttggtgacctcatataggtatgctggtgatgagatcaatccaaaattggcacaaacgtgggctgaaattcttcat

SEQ ID NO: 206648 - DNA, 450 bp, Glycine max
gaacaaaaccttgtctcttgggctcgtccactgttcagtgaccgcaggaagtttccaaagttagcagatccacagctgcagggacggtatcccatgcggggtctttaccaagctctagctgtggcatcaatgtgcattcaagaacaggctgcagcacgtccactcattggggatgtggtgacagccctttcttttctggccaaccaggcatatgaccataggggagctggtgatgataaaaagaacagggatgataaaggtggaagaatattgaaaaatgatgtaggtggaggatctggacgcagatgggatctggaaggatctgagaaagatgactccccacgtgaaactgcaaggatgtctaacaacatggatcttgatagagaacgtgccgtggctgaagccaagatatggggagagaattggagagaaaaaagacgacctagtgcg

SEQ ID NO: 206649 - DNA, 536 bp, Glycine max
tcgaaaactgtttgactaaaacctttcgtcccgcaacctcgtatcctggaacatgatgatgactggttacgtcaaacaccatcaaattcaatatgcccagtacctgttcgatcaaatgcccttcaaagacacggtttcttggaatatcatgctctctggttttcacagaatcacaaactctgatgggttgtaccgctgtttcttgcaaatgggaagagctggtgtgccccccgatgactataccgtctccacattgctcagagcggttataagcaccgagttagatgttttgatcccccagcttcacgctcgagcgctgcatttagcacttaacttgagtgtgtttgttgggtcttcgttgatcagagcttatgccagtttaagagacgaggaggcttttaagcaagcgtttgatgatatattgaggaaagatgtcacgtctcggaatgcttcggtttctggctatatggaagtgggaagtatggatgatgctcatacacctttgatatgatgatgcctgagaaaacatatttcat

SEQ ID NO: 206650 - DNA, 380 bp, Glycine max
ctgggaagatggaaatccaggcttttgggcagccagtccacagtatcagcctggaagccctccttcacggccatatgaagccccaactcctggtgctggttgggctagcactcctggtggaaattatagtgaagctggaacaccgcgggacagttctgcctatgccaatgctccaagcccatatttaccatcaacacctggtggacagcctatgacaccgagttcagcatcttatcttcctggcacccctggaggacagcctatgactccaggcacaggtggtatggacatgatgtctccagttttaggtggggaaaacgaagggcccttgggttatcccagatatattggtcaacgtacacagggcttgagaggaatct

SEQ ID NO: 206651 - DNA, 491 bp, Glycine max
tgcgaggctgcgacttctagcgttcgaaagagagagagaatcgaaggcgacacacagcttgcatccgattccgagaagaagacgaggcttctctttcgaatacaatctttctgctacatgatgttgaacaaatgatacagaatttattctgtgcacagaaattctggcacatatgacaggacttatgcctggagagttgccacatcatggaacacctgatggcaactctggtaaaagttctcaagacaagcaagaggaatcattaggtcgctggtatatgtctagaaaagaaatagaggaacattccccatcaagaaaagatggaattgacttgaagaaagagacatatctgcgcaagtcatactgcacattcttgcaggatttaggcatgagactcaaagtgcctcatgtaactatagcaacggccataatctttgtcatcggttctttcttcgacattctcatgcatagaatgaccgaaggaccattgc

SEQ ID NO: 206652 - DNA, 563 bp, Glycine max
ctgttctagtttattggcatttggatcagtaactgcaattcccaatgcaaattttcatcgggcgccaaggagcactagtgtgcttctggttgttgtctgtgttttttgtggtaacaggattcaacaatgaagagcacaggacagtggaggtagttggcctaggagaatgcgcagactgcatgcagaacaatattaagaataaccacgctttctcagggttacgtgtgacggtagattgcaagtcacgacatggacacttcagaacgagaggggcaggtgcgcttgatgaatatggaaacttcaaagtatcacttccacaggacatggttgaagatggtgagctaaaagaagattgctatgcccagttgcatagtgcatctgctgaaccttgccctttccacggaaacttcaaaattgtgaccaggtcagtctctgaagacacacacacccttgcacctgctgctggaatactcagattctcatcagcattgtgcacttcagcccttttttggcatttctttaaacaccacccagaatttccttaaccttcctaagatgactac

SEQ ID NO: 206653 - DNA, 504 bp, Glycine max
cgaattctcacgtgatgttccgttttaaacagaacacaccagaagagaaggccaaggccggcacactttccactcttccatcacgcggatcgcaccgcaataaacgacacccagattgatcgcgattcgcccatctgatttacaaagtggaaccgcaatggaggcagctcagagaagattgggaggaggaatggtgccgttgtcgccgtcacagactccgcgctccagcgataagcccgtgcgagatctgcgatctgcggattccaattccaacagtcacagcaagtatgataaggacaaaggtgtcaatgtgcaggtcctcgtgaggtgcaggccgttgagtgaagatgaaacgaggctgcacacgccggttgtgatttcgtgtaacgaagggagaagagaggttttagctgttcagaatatcgccaacaaacagatcgatagaaccttcgcatttgacatggtgtttggtcctaactctcaacagaaagaactgtatgatca

SEQ ID NO: 206654 - DNA, 459 bp, Glycine max
gtaccccagaagatcgtacaaggttctccacgaagacaaacctctgttctcaactgtgtttctttacctctcacctactttcagaccataccagattgactaggctgagaagatgcagcagacaccgcctatgattcctatgatgccttcgttcccacctacgaacataaccaccgagcagattcaaaaataccttgatgagaacaagaagctgattctggcaatattggacaatcaaaatcttggaaaacttgcagaatgtgcccagtaccaagctcagcttcaaaagaatttgatgtatttagctgcaattgctgatgcccagccttaaacaccagccatgcctccacagatggcaccacaccctgccatgcaaccaggattctatatgcaacatcctcaggctgcagcagcagcaatggctcatcagcagcagcaaggaatgttcccccagaaaat

SEQ ID NO: 206655 - DNA, 381 bp, Glycine max
gtggacaggtgaagactttccacttggctcttaaattggttcctaagaagaacaagaagccttttgtgatttacatcaaggccggtatctacaatgagtatattatcatgaacaagcacttgacctatgtcaccatgatcggagatggccccaccaagaccagaatcaccggcagcaaaaactacgtcgatggcgtccaaacttacaacaccgcaaccttcggtgtgaacgctgctaacttcatggcgaagaacattgggttcgagaacacagctggagctgagaagcaccaacccgtggccctgagggttacagcagacaatgcaatgctctacaactgcaacatggaccggtttccaggacaccctctacacgcaatcc

SEQ ID NO: 206656 - DNA, 434 bp, Glycine max
gcccgtccgtgagcttatagctgatgatgcctggttgaatggggaattcattactactgttcaacaacgtggcgctgcaattatcaaagctagaaagctttcaagtgcactatcagctgctagtgctgcttgtgaccatattagagactgggttcttggaactcctcagggcacttgggtatcaatgggagtatattctgatggttcctacaatgttccagctggacttatatattcattccccgtcacttgtgccaatggggaatgggcaatagttcaaggactttccattgatgagttctcaaggaagaagttggacttgactgcagaagagctttctgaggagaaggcattggcttactcatgcctaaattagacaccattgctttatgtctactgtccttgttagtaggttcccatgtttcgcctataga

SEQ ID NO: 206657 - DNA, 521 bp, Glycine max
aaaattaggactaatccaaaattcaatatgcggcccatgggctcaaatatcctcctcctaaaaggattagatgttgaaatacaagtaattccaatgaaaaacagactcttctccagtgatagttcctttgtatcttagaaggagcattattcaaaattgaagctacacttctataggcaaaacatgggaacctactaacaaggacagtagacaaaaagcaatggtgtctaatttaggcatgagtaagccaatgccttctcctcagaaagctcttctgcagtcaagtccaacttcttccttgagaactcatcaatggaaagtccttgaactattgcccattccccattggcacaagtgacggggaatgaatatataagtccagctggaacattgtaggaaccatcagaatatactcccattgatacccaagtgccctgaggagttccaagaacccagtctctaatatggtcacaagcagcactagcagctgatagtgcacttgaaagctttctagctttgat

SEQ ID NO: 206658 - DNA, 476 bp, Glycine max
actgaattcgagaaatttcaccttttgaatatccttgtttctttttggtctccacatgtttttagcggttacgcttgtgttttttctcgtgttcaagggagttcaagggctaatccaggaatcagaatctaacaagaggaaagagaaaaacgtgttcaagtattttcttccccaagtggaggctgcatcttttatgagcataattcttgcatttatttggcaaggggcgattaggaaatggccaacttttatgcttcatttcatactttggtttacttttgtggtgtctctggctgctgggattctcctaatttgcttccaaaagcccgccactgatggtgttggagcgtgtttcattgcttttgcaattgggaatggcttatatgcttgctgggtaagtcatagaattaagtttcgttgtaaggtattgagtttgtctcttaacctgtctccaaattcctgatctgagcaaccca

SEQ ID NO: 206659 - DNA, 493 bp, Glycine max
attgttgcatcaccgcttgtccacttcatggctgccactgccgctgcaggcatagcttccttgttttcttcttctattaacagtgtcaaatgtcttcgttcctccaagaactgctccattatagacccccttataaccacagtgccctcaaaccgtggcatgtttgtgtcacacttggtggaacctttgtccattgggggtgccattaattcgcacaagttgtgggggcctagaatttctgctgctgttgcacaagaagaggctgttgttgtggctgatgatgaggtagatgacggtgctggttcagttgaagaagagaaagtggaggagaatgaaggagaagtagttgcagaacaagactctgattcctctgccaccaagctttattttgggaatttgccttatagtgttgatagtgccaaaactgcagggctaattcatgattttggtagcgcagaactaattgaggttctttacgacagggatacctgga

SEQ ID NO: 206660 - DNA, 339 bp, Glycine max
ctaaacctcatcttcctgatcatgaacaggcaccatattcataaattaaaggccctactttgttttccaagtgccatgcgcatacttcagaactggcagcgagaaattccccttgatgcaaggcatcatccactgctaagacactccatggtagactagtagatcatagacttgtgaatgccaagatattgtcctacaccagcaattgatccttttatcagggtctccaactcttccttcaggcagattgtttgttgttaacgccggggagtcttacgaatcgacttcatatccttgcttgcattccgtgccagctccaatacctcagcatgtgagacc

SEQ ID NO: 206661 - DNA, 348 bp, Glycine max
ttttgagttcaattactcatggtgttaatgaaatagcatcatcagttcgggcaagtattaggaaccagagcaaaaagtacaaacatggaaatgaaccatctgttgaatctgggaacagtgagagcattggtgaagtgtccaccgaaagcactggtgattctcatcaaatacataatggtcatcatgaagtgggtgaaaaaagtagctcgaataaggaggttcgacatcaagatagtgaattagataataagttggatagaaaacccactcttagacgcaattcatcaatcaatcagaaagatgaatcccactcattaggagtgaagcagaaatatgatttgattgatc

SEQ ID NO: 206662 - DNA, 395 bp, Glycine max
atggcatgcaatgctttgttatcttctccaactgctcagctaggcttgcctgaacttcagcttggaataattcctggatttggaggaacacagcgacttcctcgtcttgttggtttgacaaagggacttgagatgatactggcttcaaaaccagttaaagggaaggaagcttttagcttggggcttgttgatggtttggtgtcacctaatgatttggtgaacactgcacgccaatgggcactggatatgttgggccaccgacgaccatggattgctagtctttataagaccgaaaaattagaaccccttggggaaggcagagagattttgaaatttgcacgagctcaggctcgaaagagggctcctaacctccagcatcctttggtttgcattga

SEQ ID NO: 206663 - DNA, 334 bp, Glycine max
acattatacactttaaaatttcacaatattacattactttttcatattacacatggggaatcatgttatactttgtacatcgtgtgaagtgaaaaattgaaccccttaatatttctatgacatgacctttagtgccttttttgtttggcctagtacattgaacactgttgctgctatgtgagatggtgtaagaccggctaaagacaattggtcagcaggtgatccatgatcgatttaacgatccggaagaactattggccgccacttcaatttgccatctagaaggccatcaagggccatgaacttggcaacatgagaaccaaatcctccaatt

SEQ ID NO: 206664 - DNA, 385 bp, Glycine max
ctccgctctctcatcttaccgctttctcgggaagtcacttcctcttccctctcactctcaatggggtctccatttgctcggccacgctcaccggctccaccagatgaagaaaaggccatgtggggtatatgcatccctctccgagagtggagtgtattattcccaccgaccgccgactcccctactagacaccgccaactatcctattcatatgaagaatctctctgccaaggagctgaaacaactcgcggatgaactgcgttctgatgttattttcagggcttctagaactgggggccatttgggctcaagccttggtgtggcggaactcactggcgcacttcactatgtcttgaatgcccctcaagacacgatactgtgggac

SEQ ID NO: 206665 - DNA, 409 bp, Glycine max
acggaacagattctattgggtcttattggcgaaggaaccggcattgctgctaaggttctgaagtcaatgggaattaatcttaaagatgctcgggttgaagtggagaaaattattggaaggggtagtggatttgttgccgttgagattccgtttactccccgggcaaagcgtgttttggaattctcactggaggaagctcgccaacttggtcataattatattggatctgagcacttgcttcttggtctccttcgagagggtgagggtgtagcagcacgtgttcttgaaaatttgggtgctgatccaaacaatattcgtgctcatgttatccgcatggatggtgagggtgctgacagtgttggtgctactgttggccctggaagtagtaataacaataagatgccaactt

SEQ ID NO: 206666 - DNA, 301 bp, Glycine max
  unsure (1)..(301): unsure at all n locations
ctgacctgatacggatcagcggtcctngcacggcncaataccagttcgacgagactaccagtcggcggccgccctttttttttttttttttttatgaccttgggaggtctttaagaatatgcacccccaggggcacggggagagccgtacatcacacatgagttgggcctcttccaacttaaaagcagaggataacattggcccatgacgcgacacatgcaccacctaataatcataattttacatctttacatacaaaatacaaagacttttaattttaaaaagaagaaaagagattaac

SEQ ID NO: 206667 - DNA, 527 bp, Glycine max
  unsure (1)..(527): unsure at all n locations
gtcctttgttggggaaggtggttttggaagggtctacaaaggcaggcttgaaaccactgctcagattgttgctgtcaaacagttagacaaaaatggtcttcagggtaatcgggaattccttgtagaggttctcatgctcagtcttctacatcaccctaaccttgtcaatctcattggatactgtgcggatggggatcaacgcctcctcgtttatgaatttatgcctttgggatcattggaagatcaccttcatgatcttccccctgataaggaaccactagattggaacactagaatgaaaattgctgttggtgctgcaaaaggattagaataccttcacgataaggcaaatcctcctgtcatctacagagacttcaagtcatctaacatattacttgatgaaggataccacccaaaactttctgactttggtcttgcgaagcttggtcctgttggtgacaaatcacatgtttctacccgtgtcatgggaacttatggntactgtgcctctgagtatgctatgactg

SEQ ID NO: 206668 - DNA, 438 bp, Glycine max
ctgcactcttgatcattctccgtttctacacaggggaaaatgagggagatccttcacgtgcagggagggcaatgcgggaaccagatcggttccaagttctgggaagtggtgtgcgacgagcacggcatatatccgacggggaagtacgtctgaaactcagatctgcaactcgagcgcgtgaacgtctactacaatgaagcctcgtgcgggcgcttaatgccacgcgcggtgctgatggacctggagccctgtaccatggacagctgtgcggaccgggccgtacgggcagatcttacgccccgacaacttcgtgttctggcagtccggcgccagcaacaactgggctaaggggcactacaccgatggcgccgagctcatcgactccgtcctcgacgtcgtgcgtaaggaggccgagaactgcgactgccttcaggggtt

SEQ ID NO: 206669 - DNA, 493 bp, Glycine max
ccgaaaatgaagaaagcagcgattttgaagtctctccaaaccattatggttgtcttcctgctgatagtactctttagcagcaacaccaaagcagaaaaagaaacaatccacgaccatgcaaacaaaaagacctacataatccacatggacgagaccaccatgcccttaaccttcaccgaccacctcagctggttcgacgcctccctcaaatcagcgtccccctccgcggagattctctacacttacaaacacgtggcccatggcttctccgccagactcactcccaaggacgtagacacacttgcaaaacaacccggcatcctctccgtcatccccgaactcaaatacaaactccacaccacaagaactcccaatcttcttggacttgacaaagccaccaccttgttacccgcctcggagcaacagagccaggtggtcattggactcctcgacaccggcgtctggcccgagctcaaagcctcgacgacacggg

SEQ ID NO: 206670 - DNA, 519 bp, Glycine max
attacgacgagcaacttggcgtgctggaaccggagtcgtgaactcgttctgcgatcgtcatcaccgaccatcatcgctttttcttctttactttctcatcagagtctctcactgtgccaaaacacgatttttgtattgtacctttcttttgagttctgcgcttttcgatcttaagaagacataaaaaggagcaacaacatgttggagaagatcgggttgccgtcaaagccttcgctgcgagggaacaattgggtggtcgacgcctcacactgccagggatgttcctctcagttcaccttcatcaatcgcaagcatcactgtaggaggtgtgggggaatcttttgcggcagttgtactcgacaaagaatggttctacgcggacaaggtgattcacctgtgcgtatttgtgaaccttgtcagaagctagaagaggcagcacggtttgtattgcgacatggacgcatacctgggagaggaaagcttgaatcagcacctagagatgaagatgaagctttgaac

SEQ ID NO: 206671 - DNA, 491 bp, Glycine max
cttctttatcccattctttcctcagattcggaaaaaaaaagctttccggtgctggggagcctagggttagggtttctgagagatgtgggatgttccatgcattgatgagccttatcgcgcgctgttggaagccgttcgggcacggtgacgacgccgctaatgccgccgccgccgccggaagagaatgcaaggacggcctcctctggttccgcgacatcggaaagttcgccgtcggcgatttctccatggccgtcgtccaggccaaccaggtcctcgaggaccagagccagatcgagtccggcgccttcggctccttcgtcggcgtctacgacggccacggcggccccgattgctcccgctatgtctgcgacaacttgttccgcaatctccaagcgatattggctgagtcacagagtgttgtgacatctgaggccattcaacaggcgttccggcggactgaggaagggttcacggcgcttgtttcggagctg

SEQ ID NO: 206672 - DNA, 484 bp, Glycine max
agacaaaattacttttctgatttttttttctttttcattttcatggataaatttctaacaagtgttacaagttcgtgcgtcatcaataagttgtctcgttatcagtaaccatacgtggcagcactatgaatggtatattctagcaacgtgccaatggtgtattttctggaattggcacagttgccagaacacccgtataagagaagcatgtttacaaatcataagagtcagtgatcgagagcacttcgaattgtgagtggcgtatttagaactgcgcctctggatataaggtcgtggtttaagaataaaacaataacagttatatcgtcgtgaaaatggcgacgaaccttcttgtcaatcttgtaaaggtctgaatatcgcatttcacgctttcttgctgcttcgtgtaaggcagccttgacaagtctcttggcactacccgcgcgtggactgctgtgaacaatatccactggttgatcattac

SEQ ID NO: 206673 - DNA, 465 bp, Glycine max
  unsure (1)..(465): unsure at all n locations
gtagctagctagggtgcagaaatttaaaaataaaaattcatcagaaaaatgggactggggatgtttaaggcattgttttgctgcagcaagccccatgaaattgacattgcagactcctgggactcatctcctgatcatacccccaaacaacattctaaaccaaagccaaagccaaatgctgcacctactcattccaataataaacaaaccaccacatctacacaaataggagcaattctagggaaaccatacgtgaacatacaccaaatgtacgagatgaagaaggaactgggaagcgggcagtctggtgtaacatatctgtgtgtggagaagacgacgaagcgagagtatgcatgcaaatccatctctcggtcgaagctgctgagcacgcangagattgaagatgtgagaagagaggttatgattctgcagcatctttccgggcagcccaacatagtggaagtc

SEQ ID NO: 206674 - DNA, 516 bp, Glycine max
  unsure (1)..(516): unsure at all n locations
caaagagctaacaagatattcattaccggcatggctaatgaagaggaacagaaaaaccacctcttcggcatcaaagatctcggtcacaagactctccttcagagtgatgcactctatcagtatatacttgaaaccagtgtctatccaagagagcacgagtgcttgaaagagatacgcaagatgactgcaaaacacccactgaacatcatggcaacaccagcagacgaaggacaacttctgagcatgcttgttaagctcacgaattcaaagaacgccttggaaattggtgtattcactggttactctctgctctccactgccctggctcttccccctgatggaaagatcttggctttggatgtgaatcgcgaatactatgagttaggattgccaataattcaaaaagctggagtggctcacaagattgatttcagagaaggacctgctctntcgttcttgacgagatgcctaaagatgaaataaaaggggtcgttgatttcgtttcgtgatgctgat

SEQ ID NO: 206675 - DNA, 511 bp, Glycine max
  unsure (1)..(511): unsure at all n locations
tgctctttctctctcttaaatctttggactctcagattgcgccttttttttttcttttctcaaacctttggtctttgattccaattccagttggcttctaagaagagtgttagagaagtatttattgatcagggaatggctgggactgtgagtgaggaatctggggcgggaaagtctgtggagaggatttcaactgggcacgcgttgtctatccggggaagcattggcagagtggctgtcttctgcgcaggtggagaatggaatcgcgtccacttctcccccttactgggacactgatgacgaagatgatggaccaaaaccggcggcgttatatggaagatatacatggaagatagaaaagttctctcaaatcaccaaaagggaacttcgcagctgtgcatttgaggttggcggctacaaatgggatattttaatctatcctcaatgctgtgatgtaagcaatcatctctcactgtctctgngtgtagctaatcatgacaaacttctttca

SEQ ID NO: 206676 - DNA, 414 bp, Glycine max
accagaaaataaaagaacaatttagactagcaataaagtgttacatacaacacaacaaacaacaaagacagagaaagacaatctgcaaacaacttaccgaccaaaactattgatgaaaaaagggaccgaacaaatgatgacatgcatatttcttactcttcaagttcaatttccttcatgtacccaaaaccaccaccagaggttattttctctcaatcagagtaggggtttgatcttgaacctgtaaagaagcctcttttttttcaaggtaggattgtctatggtgagcaacaattttcccagttcaacaactttaaagctattggaaacaactgggtcatcggtgggggacatctttgtggccttctgtagataaccgtatatgcatcttaacatcaggcttgaattcagcat

SEQ ID NO: 206677 - DNA, 484 bp, Glycine max
ctttctcctaaaacatcttcagtgggttctttttcttgtattacaacaacctcgtccaagaccatgaccatggccatggccaccatcctgctcctggtcacggtcttcgcggtttcatcgggccgtagacttgtcgataatctagtacgacaacgcccacgccgccacgtcgggcaacgacgaggagctgatgtccatgtgcgagcagtggctagtaaagcacggccaggtgtacaacgcgctcggagagaaggagaataggttccagatcttcacggacagcctgcgattcatcgacgaccacaactcctaagaggaccgaacctacaagctctgactgaaccggttcgctgatctcaccaacgaggagtacagggccatgtacttgggaaccaagatcgatcccaaccggaggctcggtaagaccccgagcgaccgatacgcgcctcgtgtgggcgacatactacctgaatcggttgattgg

SEQ ID NO: 206678 - DNA, 452 bp, Glycine max
gaaaatatactgttgggtaggcctgatgcagaccaagttgagattgaagaagctgccagggttgctaatgctcattccttcatcattaaacttcctgatggctatgaaacacaggtaagaaaaaagagggctgcaactttctggagggcaaaaacagagaatagcaatagcaagggcaatgctgaaaaaccctgcaattcttctcctagacgaggcaacaagtgcattggactcagagtcagaaaagcttgtgcaagaagcccttgaccggttcatgattggccgaacaactcttgtaattgcccatcgtctctccacaattcgcacagctgaccttgtagctgtacttcagctaggaagtgtttctgaaattggaactcatgatgagctcttctcgaaaggtgaaagtggagtctatgccaagctttataagatgcaggagatggctcatg

SEQ ID NO: 206679 - DNA, 486 bp, Glycine max
aaattaataaggatgagcatctattcatccatttcaatctcgttcctgtattcgtctgtcattcccttggtaacattcataaagacaagattacattcttgaataggaagagaaagggggggtagggatgatacacaaactatactatggtcaaaacaaaaatgccaataattaatgggtatatatatggcttataatcctgtagctggtaatttcatttgaatggctagccttctctttcatcatcttttggtcttgttgaagagcttgaacctgaggccattccaatgacttggctggtgtgtgaacctttgtaactgaatcatgcgcgcataaatcccatccgggtgatttttcaacaactgtgaatgggagccttgctcggctactttcccatcatcaatcacagcaatcagattggcattcctgactgttgatagcctatgtgcaacgatgatagttgtttttcctgaggaggcgcggtct

SEQ ID NO: 206680 - DNA, 456 bp, Glycine max
tttcagtcctgtgcatgtcagcatctgctatagtggagattgtgcgcctgaaggttgcaaaagagcatggccttgttgatgaacctgttcctgtaccccttaatatattttggcaaatccctcagtaatttcttattgggggcagcagaagtattcacattcgtcgggcagcttgagttcttctatgaccaatctccagatgccatgcgtagtttatgtagtgctttgtcgctgttgactacttcacttgggaattacttgagctctttcattctcactgtagtgacttacttcactacacaaggtggaaatcctggatggattccggataacttgaacaagggtcatcttgattactttttctggcttttagccggacttagcttcttaaatacctttgtgtacatagttgctgccaaaaggtacaagcagaagaagtctgcttaagatttttca

SEQ ID NO: 206681 - DNA, 579 bp, Glycine max
  unsure (1)..(579): unsure at all n locations
cgttgatcaaacactacaatctgaaacgatggtgcacataaaaagagtatcaacattttctacatcaatagttacaaatggtagcaagcaatgtagagaaattgaacattaactgcccatgtttagcctaaatggtagcaggcaatctcatctcatcaatttcaggcttcatgagagagggcagagacagggctgttttgaaccatactttgtaaatgaaagaaacgtacataactgcagaacatctttattccacatgcagaacaatcacgacattgacagaaggaaatagcagaatgtcgtccttccagtccaaataaaatgcctgaaaaatcttaagcagacttcttctgcttgtaccttttggcagcaactatgtacacaaaggtatttaagaagctaagtccggctaaaagccagaaaaagtaatcaagatgacccttgttcaagttatccggaatccatccaggatttccaacttgtgtagtgaagtaagtcactacagtgagaatgaaagagctcaagtaattcccaagtgaagtagtcaacagcgacanagcactacataaactacgcatg

SEQ ID NO: 206682 - DNA, 516 bp, Glycine max
  unsure (1)..(516): unsure at all n locations
ctcttctgccctccacacaacttttttctcctctctctctctctacaaatcacttctttcttctcttcgctgctcactgtagcgtagccatggctttcagagttggaggagcgggaggaggaaaatgcctcttctggcatgggtgttgctgagcatagcgtacgcacgttcctggaattgcagaggaagaaagttcatcgctatgtgatttttaaaattgacgagaaaaagaaagaggttgttgttgaaaaaactggaggccctgctgagagctatgacgatttcactgcatccttgcctgaaaatgattgccgatatgctatctttgactntgattttgtgacatctgagaactgccaaaagagcaaaatcttttttattgcatggtctacttcggtagcccgcatttcgcctaagatgctatatgcaacatccaaagacaggttcagaagggagctgcagggctttcattatgagattgaggccacagacccaaccgagatggatcttgaagtc

SEQ ID NO: 206683 - DNA, 398 bp, Glycine max
gagtaagtaacaataacatgtaacaaagatagcacaataacacagatattcccatagtgattatttttctacagattctcatccacactaaacaaattatcttaatttagggaatcggctagtagaagaccaaccaaaacaaaagaatagaagaaaatccaaagagcggcaagctcttaaaaattctcaggactgtcatccaattgtttctcgtcttctatatcaacctctaaaatctcagggatcctctgtttgagataattagcgactctggcaggacagtggaacgcttgtgccaaaaccgaccactaaggctaattttcacaaaaggcccatccaagtcagctagttcaaccactcctgtcataccaacagaggtgtcaaagatttgacccagc

SEQ ID NO: 206684 - DNA, 496 bp, Glycine max
aaaaaaaacctgatcaaggaattatatctatataccaaatgtcatcatgtattaatatgataaattaagagaaacagctacccaacaacagactaagcatcagctatgagggaacatattagaaacaacacagccattcagtattgtccaaagtacaatgacgtttcttccaatccctgttctcctctttacagcttccacggaaagcctctaactagtcgatgggagatacacccttataagatctttcgcaacaaccttttttctacaggtagggcatttaccctgagcacttatagcagctttgatgcaatccttgcaaaaaatatgaccacatcttgtcgacatttcatgtaccatagggcccatacatattggacagttgaagacaagctccttggaggttcaggtggcttttaaaactttgctccatggaactgctaccgccttccaaatttatatacttatcacaattaataatcagatttggcaattc

SEQ ID NO: 206685 - DNA, 434 bp, Glycine max
atcagtgcacgagaatcgccctctatcttctttcttcttcaaatcattccgatggcgattgcgtggccctctctcgatctcactcaccactccgattgcggacccttagtctccgcagacggatacatgtctcatttgcgggtgcagttccctcctctccgagacaagtgccagaaccactttccccgacctcggcaactttcgaatcgaccgggtaactggtttccggcgtctcttcaactccgacggacgcatctttttcactcaccgtgttgccgatatcacaactcacgaaagtgcttgcctttctgttgaaccatgtgatggagaattccttggtgcagctgcttttgagatgaagaacacagagattgcagcatttattgaacgggagcgcgaatgtcgatttttagctgttgtccctgaaacactag

SEQ ID NO: 206686 - DNA, 496 bp, Glycine max
  unsure (1)..(496): unsure at all n locations
ctccacccacccagcatatctctctattcctatttattagcacccctcacattaccttgtgtcaccaactactttgactcctttaccataccattacaataattatcaaacctaaccagtaaaaaatggtgacccgggaaggaaatccgcaacgctcagcgttcccatggacccgccaccatcttggccttcggcaccgccacgccgtccaactgcgtctcccaagccgattaccctgactactacttccgcattaccaacagcgaacacatgactgatctcaaagaaaagttcaagcgcatgtgtgaaaagtccatgataaagaagcgatacatgcacctgacggaggagtttctgaaagagaacccgaacatgtgcgagtacatggcgccatcgctggacgtgagacaagacgtantggtgatggaggtgccgaagctgggaaaacaagccgcaacgaaagcgataaggagtggggtcaaccaaagtcaaagat

SEQ ID NO: 206687 - DNA, 319 bp, Glycine max
caataacaaacacacgatcttgttcatattaaattattcttgtacaacattatgctacgataaatccacaagtgaaactagtaataataacaaactttccctggtatttccgagggttccttattgatcactcttaaatcactagtcaccgcatcagcatgatttatccctccaagggaacactgtgaagaacaacggtctcaacggttagacccggcccgaatccgaatagcaccccccactctaacccttctccagtggtactcttcccttcctccttagacttcttcctcatttcatccagaatgaacaaaacaca

SEQ ID NO: 206688 - DNA, 551 bp, Glycine max
  unsure (1)..(551): unsure at all n locations
ctcgagccgctttctctctctaccattgccatggatccctacaagcaccggccatccagcgccttcaattctcccttctggactacaaattctggtgctcctatttggaacaacaacttctctttaccgttggagctagaggtccaattctgctggaggattatcatcttgtggagaagcttgcaaattttgatagggaacgtatcccagaacgtgttgtccatgccaggggcgctagtgcaaagggtttctttgaggtcacccatgacatttctcacctgacatgtgcagatttccttcgagcccctggagttcagacgcctgtaattgttcgtttctcaactgtcattcatgagcgtggtagccctgaaaccttgagggaccctcgaggttttgccgtgaagttttacaccaganagggtaactttgaccttgttggaaacaaccttcccgtcttcttgtacgtgatggcatgaagtttccagatatggttcatgctcttaaacccaatcccaagaaccacatccaggagaattggaggatccttgact

SEQ ID NO: 206689 - DNA, 562 bp, Glycine max
  unsure (1)..(562): unsure at all n locations
actaacaaatacaaacggcatttattgagataggtcaacgagttgcattcatggagttatgggtacacacaacataatattgcaagaaaaggattagttctttcaggtaatccaaaatcacatccttatcgtactctttgcacgtctgcaactctaacaatcattctggagttggcaacaacattaaatatttggcctcgtgctgagatgagaagctatcttttggcctagagaacggtcagcctgagaccagtatgatatccagacacttgcggatctcatgggtgacccgtgggtcagataaagcatcaacccatcggcgagcaaatctatcttgcctgtcaggtgcccaagaccggtatctctctccgggctgcgttgaagttgttctccttctcaattccacacttttcacgccttccactgcagatagcgngaggtatggggaacctttctgcatgacgacaggatcataccttgagggaagtaattgacctcctatccctgtgaatgaaattcatgaaaccttcatgatgattattgtggtgagcacactttggag

SEQ ID NO: 206690 - DNA, 539 bp, Glycine max
ctctcgctctagttttttcgttccgcgactcagcctttcgaatcctctcacccagaggtacgattcgtaccatgtagttgtgggatttcggctttgccacttcttgattccaataattttggtttctttttttcccctaatttgatttccccagttagggtttttaactctattcgatcggcgatttcgaatactcggaggctcgaatcgtgttgggggttttccgttttgattaaaaaagtttccgttttttgtgttgggtgatcaagggttgtttgatttttttcttgcgatcgagaatgggtgaagcttcgggagctggttccgctgattgtttcagccagatgatgtcgtcgatgcctggttttcgctttcatcccacggatgaggagttggtgatgtactatcttgaagcggagatttgtgggaagaagctgaagctcgaactgattcatgaaaccgatgtgtataaatgggatcccgaggattcgccttagcaatctatattgaaactggagattggcaatggttcttttctg

SEQ ID NO: 206691 - DNA, 380 bp, Glycine max
atagatactttgcctttcataaaaaaaataaaaatggaatgaagttgaagagtaggcagcgaggaaaattgacagtttcacaccatctggacccaaataccctggcttggaatttcttgatgaaccagaaacagcagatagaaacccggtggcgcaagaacagcggaaaccggcgcggtaacttcaacctcgtacgtcgattccccaaccttactcaaatcgtgtggctccagcaccagcatcctctgattcatggagaacgagtgcgtgttaaatggcggcgacagcatcgtaaccgacaccgaatccccaaccaaagtcgcgctcatcacctcaaaccgaagcctcaacgtttgaccgtacttgagttttgtttggga

SEQ ID NO: 206692 - DNA, 570 bp, Glycine max
  unsure (1)..(570): unsure at all n locations
attcctctcttctcatcacattatattatatatttcttaattaacacctaggacatatatatgtctacaccaaacatatagctacaataatttctcacagaaaagacattaatccttgatgagctcccattattggttggctggcgtgtcttagcatcccctccaactctgtagcaaacctctccatggctttggctggcaagctaattggtaccactatcacatgctctcctttgtggttcttacatgacacgtacacgcttgtcatttgaggaaaacttgtcattccacccgtggcaggcccaccataaatgggcttgccccacccaaaatcaacctcatcaagccccaatacgtgtagtattcgaaacaaggtagggacctcgtagttgcttgatggggtcttcctttcaccacaattaaatctgaggtagagcgcacatactcctatccacgttggattntgcattttttaccaattccaaagcatacccaaatggattctcgcataaccttcgtgatgtggttaccgctgccgagagcacaaatccattaccgtaataacccttt

SEQ ID NO: 206693 - DNA, 532 bp, Glycine max
  unsure (1)..(532): unsure at all n locations
gttactgcacctatatcttcaccttctcctgttccagccccaactcctgctcctatatcttcaggaactgctgtggaagggtctgatatctatgggcaggctgcatccaatctggttgctggaaagcaacttggaagggaacaattcaccaaattcttgatatgggtggagggagctgggacagggataccgttgtccgtgctcttcgagctgcctacaacaaccctgagagagctgttgaatatttgtatacaggtatccccgagcaagctgaagctccacttgtagcccaagtgcctgcaagtgctcaacctacaaatcctcctgctgatgctccacaaacagcacaacctgctccagttacctcagctggacctaatgctaatccattagacctttttccccagggtctccctaacgtgggttctggtgctgctggtgctggttcattagactttttacgcaataatcaacaattccaagccttgcgagctatggtgcangctaatccacaaatattgcagcctatgct

SEQ ID NO: 206694 - DNA, 518 bp, Glycine max
cacactttgcctactctagtgtcttattcataggcccaagagcaaagaaactaagaagattttgagcacaatggcatccacacaatgcttcttgcaccaccatgccctcaccactccaaccagagcttcatcacagcgcttagttgtgagcaccaaaccaaaccacattgtttgcaaggcacaaaagcaggttgtccaagagggtgaggacactactaacattgtctctcgcaggttggccctcactgttctcattggtgctgctgctgttggctctaaggttgcacctgctgatgctgcctatggagaagctgccaatgtgtttggaaagccaaagacaaacactgacttccttccatacaatggggatggattcaaactctcaattccctcaaagtggaacccaagcaaagaggttgagtacccacgtcaggttcttagatatgaggacaaatttgactcaacagcaatgttgctgtcatggtcactgcaactgacaagaagtccatcactgacta

SEQ ID NO: 206695 - DNA, 361 bp, Glycine max
agcaacttaaaatgcttaattaaagaaaaaaaagggggggcaaaaaaggagggtaagtccttaaaagacatgaaaaatttagaatcaaagtgcttactccaaccaacagcctcaaaaactgaaacttgtggacaaaaagtggccacataattcaacacatacacaccccttcaagatgattcacatgccgaatagccctccactgataagttcttaggcaacactgaaagaacttgctgtgctctccacaaatttttttgctcccttaaaccattttttgtctccagcttgagccttgcaaatgtatagtttgccatcttttacagttgctgcaatcaagtggtgcttgccaccttcattt

SEQ ID NO: 206696 - DNA, 462 bp, Glycine max
gaattttcttcatccttctctgttctcctagaacttgattacttgaacattccctatgacagatgaggtggttcttctggatttctggccaagtccatttgggatgagggtcaggattgcacttgctgaaaaggggtttcgatatgagtacaaagaagaggacttgaggaacaagagtcctcttctcttacaaatgaacccggttcacaagaagattccggttctcatccacaatggcaaacccatttccgaatccctcattgctgttcagtacattgaggaggtttggaatgacagaaatcccttgttgccttcagacccttaccagagagctcaggctagattctgggctgattatgttgacattaagatacatgatcttggaaagaagatttggacatcaaagggagaagaaaaagaagctgccaagaaggagttcatagaggcccttaaattgttgga

SEQ ID NO: 206697 - DNA, 572 bp, Glycine max
gataatacggaaaatactctattgcaaaaccaacaaacacatgaaagatacatcagaaaaattttaaaacctacacaatccaacagaaagcatgaagtttggcacatccaaatgcctttttattacacaaatattatttagttgaaaggtcaagaacgaccaatacttcactatggctattaagatccaacatgaaacctactcgatgactaacttctttcttatctccacaacgaactcatagaccttgtgctgatcaggaagagactttgcaacactctctttctgtaggcacctcttggcccaagcaacaaacctggggcactcattctcaatgttgaggctgccaaaagtctcatagactttgaccaagtgtagaatggaacaagtgctatatccacaaaaccaatattgtctcctccaaataagtcttatctcccagctgttcctccaacaatttaagggcctctatgaactccttcttggcagcttctttttcttctccctttgatgtccaaatcttctttccaagatcatgtatcttaatgtcaacataatcagcccagaatcta

SEQ ID NO: 206698 - DNA, 576 bp, Glycine max
  unsure (1)..(576): unsure at all n locations
atctgagtggaaatatatcaggatcagacccattaaaggacaaccgcttacttttgaaagcagaagctttagatgattctcatgaagcaaggaacactgctgctgttgttaacgagctgtccaaaggaaataacanaaattttggtttctcatcctgtgaatgctaaacgtgctgcagaagggaagaacatagcaaatgtagaccttttaagaggctgtggcattcgaattgaggttacaccatttataaatagacatggtttgcggccatgcatggtagctccaacgaaaataattgctggcctgggcttatcacttggtattgatattctagatgctcctggagcaactggggactatcgaactttactaacatcaaaagcatcagcaatagctaaggcactctcagctcctttacagtcctgtcccagagtttttgttcctggagaggatgagcttaaagcaggccggtcagatggctatgactttggatttcttcatattaaggcaatagatgatgctggccatgacaaggcgagcatcctcaggtcanagcattagaagctgtagataaag

SEQ ID NO: 206699 - DNA, 323 bp, Glycine max
atagatactttgcctttcataaaaaaaataaaaatggaatgaagttgaagagtaggcagcgaggaaaattgacagtttcacaccatctggacccaaattccctggcttgggaatttcttgatgaaccagaaacagcagatagaaacccggtggcgcaagaacagcggaaaccggcgcggtaacttcaacctcgtacgtcgattccccaaccttactcaaatcgtgtggctccagcaccagcatcctctgattcatggagaacgagtgccgtgttaaatggcggcgacagcatcgtaaccgacaccgaatccccaaccaaagtc

SEQ ID NO: 206700 - DNA, 439 bp, Glycine max
atagatactttgcctttcataaaaaaaataaaaatggaatgatgttgaagagtaggcatcgaggaaaattgacagtttcacaccatctggacccaaataccctggcttggaatttcttgatgaaccagagacagcagatagaaacccggtggcgcaagaacagcggaaaccggcgcggctacttcaacctcgtacgtcgattccccaaccttactcaaatattgtgggtgcagtaccagcatcctctgattcatggagaacgagtgcgtgtttaatggcggagacagcatcgtaaccgactccgaatccccaaccaaagtcgcgctcatcacctcaaaccgaagcctcaacgtatgacacgacttgagttttgtttgtgacgcaggaaacactattgtgggacgcacgctagagaattcatgctcaagataccaaggag

SEQ ID NO: 206701 - DNA, 460 bp, Glycine max
  unsure (1)..(460): unsure at all n locations
gactaattaaatcaaaacggaaaggatcaactatagatattactaatactaactaccaatacccatgttcttcaagaatacaatttcacccgtaagcagtgttaaaagaaagaacagaaaggaacgggtagaaaacaaaaaatgtccacatgactgtcctctctcacttctgaccaccagcctcagttggttcaaccacctcagcttctacaatttctggggtatggggctggtttaccgtggactggaactgaccaggtgtagaccatttaccagtgagagccatacccatcatctcatatatcttccctccaagttgtgctggattatcaggcgtaaaaccactggaaaccaaagcagcatcatacaaaagatcgatagctctgagggcatcttcatcgtcagaatttggtttaaatgcagcatncaagttcctgatatagaatgggcagggttgatc

SEQ ID NO: 206702 - DNA, 530 bp, Glycine max
gaaatactcgatatagatgctcatagttatttgcacaaaactggtaaaattccagatcaataaggattgcggcgaagccgcaaagatacaacattcattagggaaaacaggagtggggaaaaataaggggggaggggttgaggaagaatcaattgctcacagagcatgctaagacacctaaatattccacacacagttattgaaacaacccaatatagagaaaatttttctttggtgtattataatataaagcagaaccaaatgacttggaagattctactttcttataccattcacttggcaagttcgttgcggatgagttttgctgcggcaaccatgtttgtgagggctggcttacctcagtgtacttacgggtcttgagcccacagtcagggttcacccacaagatgttcttctcgagcactgccagcatcttgttgattctgtcagcaatttcttcagttggtggtattcttgtggagtggatgtcatagacaccagggccaattccagcaccatacttcacacct

SEQ ID NO: 206703 - DNA, 569 bp, Glycine max
  unsure (1)..(569): unsure at all n locations
ctcgaccagacttcttctggcgatgttttccatatggaaaggatgtttatgataaatggggagatgtcatttgtcatggtgaccaaaaggtcataaaggaaggatacaagagtttcccaagtgggtcatacttcaagggtcattttctggtctgggttttttatcattgtacttatctggaaaaataaaagcatttgatcgcaaaggtcatgttgcaaaactttgcattgtttttctaccactacttgttgcatcacttgttggcatttctcgagttgatgactactggcaccactggcaagacgtgtttgcgggaggtcttttagggcttacagtggctacattttgctatttgcagttttttccttctccttatcattctgaaggctggggtccttatgcgtattttaggatgttggaagaatctcgtggtatgacccaagtnnctagtgttcaaaattctggtcaagcgcagttagcagaggctcangctgagagccaagaggaaacaggtctcacgggtgtatggggttaaacttatacgggatcatcatgcagcattgatgact

SEQ ID NO: 206704 - DNA, 481 bp, Glycine max
  unsure (1)..(481): unsure at all n locations
cagtgacagagtaaaggaggcataccgatgactatggcgatgacggcgtcgcagttgcggtgcggttgggggtggaggccaacgccgaatcagcagcagcaacgacgtcgtatggttccgggtggtgtgttccatcgctatagagaacgcgaagaacaaagagagagcgaaactgaagaagctcttcgatgaagcgtacgagaggtgccgcactgctcccaccgaaggcgtttccttcactctccaacaattcaccgacgctctcgacaagtacgacttcaacgccgaaatgggcaccaaggttaagggcactgtttttgccacggataacaatggagcttatgttgacattactgctaagtccacggcctacttgcctcttcatgaggcttgcatccacagaattaagaatgtggaagaagcatgcataattcntggcgtgagagaggaatttatgatcattgatgagaatcagcggatg

SEQ ID NO: 206705 - DNA, 511 bp, Glycine max
aaatctggttttgaactggtttcactattgtcaatctgactaaagataacagggacaacctctcacaataatttggacagaaaataaagagttatacaattgcctttactacaaaactgagttgctaaaaagaaccgctacattagttcatctttctacaacaatatttggagtaaggtgtaaaaagaaaaaatagataaaagaaagaaaaaaaagggggggaggggaggaaaagaggactcagttctcaattctctcaatcacgaatcttcagctgggggtacctcactcagatccactccctctggaggcaagtctgaagttagtggtcctaagattccttcaccgctgagagttaatccactctctggctggaatctaagcatatcagcacgagccatagcttctgcttgagcaattctctgtctgaatgtctgagccatctcctccgccttctcaaagacaagctttggattgcgaaatcatgtcacaggtgtgggttccaactttt

SEQ ID NO: 206706 - DNA, 593 bp, Glycine max
  unsure (1)..(593): unsure at all n locations
ccacattcaaatccaaatggccctttacattacactaataattggcctcctagtaaacaccctagtactctataaatagcatttgcatgcaccttagtcttcaccaaaatactcctcttggccatcttgtggtgggggccctttttttaagctatttccttctcttaacacaattggttgtgccaattgccatagtcaccaaccaattaacaaaggtatatatatcatcatatcatcaccaaatgaaaaatattgggttgttttttcttgtggtggtggctacttttgtggtggcagccacagctggtagcttttaccaagactttgaaataacgtgggggtggggagcgtgccaaaatctatgagaatggaaaccttctcacactctcccttgacagagcctctggctctggctttcgttccaaaaaagagtacttgttcggaaaaattgacatgcagctcaagcttgtgcctggtaactctgctggaacagtaactgcctattatttatcttctctggggcctactcatgacgaaatagactntgagtttttgggttacttgagtggtgatcctacactcttcacacgaac

SEQ ID NO: 206707 - DNA, 564 bp, Glycine max
gaatataattttgcacgctataattatctttcgccacaaacaatggagtagtgctcaacaaagcacaaaccaacaataataacagttttagttgcattaatttacacaagaaagtaaattaacgtaataggcaacacatgtgtgtcacgttcatgaggatcattttataatgatatgcaacattgaattaaatattctcatgcaatggagcattctggaggaaggccttgagggaaacgtctgatatcagtgcaataattgtaaatcatgtaattcttttgcacccaacggatctttgcctgccccgtggcgtccagtgattggccagtggaggaagaagtttgggaattgaagtttctgtatgaggctgtgaatggggccttgctccaatccgttttcacaagcccaccccttgtggcccaatccccagcgttccaaagactagagtatattctcatgggttggctctttgggaatggaaccccttttgtctccaaattcttgaactcccttattggggtcccgtccacagagaatatgatgcttgcaggattccattggacg

SEQ ID NO: 206708 - DNA, 538 bp, Glycine max
  unsure (1)..(538): unsure at all n locations
ccacattcaaatccaaatggccctttacatttcactaataattggcctcctagtaaacaccctagtactctataaatagcatttgcatgcaccttagtcttcaccaaaatactcctcttggcatcttggggtggggtcctttttttaagctatttccttctcttaacacaattggttgtgccaattgccatagtcaccaaccaattaacaaaggtatatatatcatcatatcatcaccaaatgaaaaatattgggttgttttttcttgtggtggtggctacttttgtggtggcagccacagctggtagcttttaccaagactttgaaataacgtggggtggtgagcgtgccaaaatctatgagaatgganaccttctcacactctccttgacagaggcttggctctggctttcgttccaaaaagagtacttgttcggaaaaattgacatgcagctcaagcttgtgcctggtaactctgctggaacagtaactgcctattatttatcttctctggggcctactcatgacgaaatagact

SEQ ID NO: 206709 - DNA, 545 bp, Glycine max
  unsure (1)..(545): unsure at all n locations
gaatataattttgcacgctataattatctttcgccacaaacaatggagtagtgctcaacaaagcacaaaccaacaataataacagttttagttgcattaatttacacaagaaagtaaattaacgtaataggcaacacatgtgtgtcacgttcatgaggatcattttataatgatatgcaacattgaattaaatattctcatgcaatggagcattctggaggaaggccttgagggaaacgtctgatatcagtgcaataattgtaaatcatgtaattcttttgcacccaacggatctttgcctgccccgtggcgtccagtgattggccagtggaagaaagaagtttgggaattgaagtttctgtatgaggctgtgaatggggccttgctccaatccgttttcacaagcccacnccttgtggcccaatcttnagcgttccaaagactagagtatattctcatgggttggctctttgggaatggaaccctttttgtctccaaattcttgaactcccttattggagtcccgtccacagagaatatgatgc

SEQ ID NO: 206710 - DNA, 574 bp, Glycine max
  unsure (1)..(574): unsure at all n locations
gtgatttcagtgagtgatcggtgttcacttgatctcatcataatcgtcagcgtcaattgaagaagatgccgatcagaaacatcgccgtcggaaggcctgaagaggcgactcaccccgacacggtgaaggcggctttggctgagttcatctcaaccttcatcttcgtgttcgccggctcaggctccggcatcgcctacaacaagctcaccgacaacggcgctgccacccctgccggcctcatctccgcctccatcgcccatgcattcgccctcttcgtcgccgtctccgtcggcgccaacatctccggcggccacgtcaaccccgccgtcaccttcggcgccttcgtcggcggcaacatcaccttcctccgcggcatcgtctacgtcatcgcccagctcctcggctccatcgtcgcctccctcctcctggncttcgtcaccgccttcactgttccagcattcggactctccgntggagttggagttggcaacgccttgtggtggggatcgtgatgaccttcgtctggtgtacacggtctacgcactgccattgaccccagaagggtatttgggaa

SEQ ID NO: 206711 - DNA, 548 bp, Glycine max
catgatcatcaaccatccaaggatttaagacgaaaggaacaagtacaaccctcgaaagtgaattaggaagaaaacacaaggaaggaaaaccatacacagaagaagattccagagaaattcaataatacacaattttttttttttttattttcatttccccccctctagtagtcagtggtgggaagctgctcgtgggtgtggctgataaagacaacctcgtaaacaaggccagcgattccaccaccgatgagaggcccggcccagtagatccaggtggttggtccaggtccagctcacgacagcaggcccaaatgtcacagcggggttcatggccgctccagagaaggccccacccaacaaaatgttagcgccgacaatgaaaccaatggcgatgggagcaataattcccaaattacccttcttggggtcatgggcagttgcgttagccgtgtacaccagaccgaaggtcatcacgatctccaacaccaaggcgttgccaactccaactccagcggagagtccgaatgctggacagtggaggcggtgac

SEQ ID NO: 206712 - DNA, 495 bp, Glycine max
gggagatgaattccctccaaagagcaagctagatcccacagtgtatggtgatcaaactagtacaataaccaaagaacacttagagatcaaccttggtggactctctgtggaacaggcactgagtggtaacagattgttcatattagatcaccatgatgcattcatcgcatatctgaggaagatcaatgaccttcccactgcaaagtcttatgccacaaggaccatccttttcttgaaagatgatggcaccttaaagccattggccatcgaattaagtttgccacatcctaggggagatgagtttggtgccgttagtagagtcgtcttgcccgcagaccaaggtgctgaaagtacaatttggctaattgccaaggcatatgttgttgtcaatgactcctgctatcatcaactcatgagccactggttaaatactcatgctgtggatgaaccatttgcatagcaacaacaagcattttagtgtgctcaccctattat

SEQ ID NO: 206713 - DNA, 374 bp, Glycine max
gataggagcacaatactatacataaaaactgacacaacaccctattagatatgaaaaactagatagcatccaattacaaaacttaagcatacataagaaaattatgcacacataagtttgcacgtttatttgtcaatgagaggtacgttggaaggaaagaaaaccacacaccacacaccacacactttcattagatagagatgctgttgggaattcctctgaaagtaaggccttccccactggtaggaagaagcacagtgtagggcatttgcgccggtccattacggttcctaaggcttgaattcttggtcctccctgagattttggcctcaatttccttcagcttggttccaaacttcttaaaggcttgaatt

SEQ ID NO: 206714 - DNA, 407 bp, Glycine max
gattggagcacatttctatacataaaaacttgacacaacatccctattagatatgaaaaactagatagcatccaattacaaaactttaggcatacataaaaaaattatgcacacataagtttgcacgtttatttgtcaatgagaggtacgttggaaggaaagaaaaccacacaccacacaccacacacttttattagatagagatgctggggggaattcctctgaaagtaaggccttccccactggtaggaaaaagcacagtgtagggcatttgcgccggcccattacgggtcctaaggcttgaattcttggtcctccctgagaatttggcctcaatttccttcagcttgtttccaaacttcttaaaggcttgaattgcctttgtgtcatcagcccaattgggatgg

SEQ ID NO: 206715 - DNA, 518 bp, Glycine max
  unsure (1)..(518): unsure at all n locations
aacacgttaaaatcatattttattatctacatgtaattcaacattaattattacaactttttaatactcaaataggagtatcagcggcacgagcctctccctagtttcattatgggaaatgcactcaaaggaacttcatatccatgcttgaacatttgtcccaatgtttttaaaaccatggaaatctggccacggctcatgtaagctttgtacattatccataatgttttctttgagcatttaagcttgacattttccatctcttcaaggacattatgcatttcgagtaaggtcatctgtgacccatacatgactagcttacaatgatataaggatcggcagatactccacccagagatttcngcacgtctcacaaaattttctagcttttctactgcattacatcgatnataagttgcaatnatgcgtctaaaataccctnggttgtatagaagtcccatgctcaaatgcctcattatagcattctccattttcgctaaccaggcttccttggcata

SEQ ID NO: 206716 - DNA, 378 bp, Glycine max
aagaaaaaacagaaacgaattattttttttcagcagttcccataagcgttttggtcgttcctttgtcagcaaattgaaaaaacaagaaagccctgttcaataaccaacccaaattaaataactggctttgggggaacaacctggggttctaggggggaaaacccccccccttccttaggggtttttacggggctttccacgaccttttcctttttctttataaaaccctggttaaatctatcataatgggggaggtcagtagccttgaacgggcggtcgcccaaaacttgaaacaaggcggcctggggaagtacttttttttcaagcagcaactctgcaattggaggaacctgctccttggggtcctcgataagctga

SEQ ID NO: 206717 - DNA, 576 bp, Glycine max
  unsure (1)..(576): unsure at all n locations
gcaaaaatagtgtgccacaaacaataacaaaatcaatatgaagttcactataatcacaatatttttttctttatttctagtcgactttggttttgcacaacaaggggatcttgacataataagatttggaggaaaaaccgaattcagatataagccaggctttcttaagtgcctggactcaagcatgtgcatcaacaactgctgtcaaaattgtgattccagctggcacatatcaaatgggtgcagttgatgtaaaaggtccttgcaaggctcctattgaggttcaagttgatggaacaattcaagcacctacaaacgtagttaaccttaagggggcagaccaatggttaaaggttcaacatgttaactctttcaccctgtcagggaaaggagtttttgatggtcaaggtccaactgcttggaaacaaaatgattgtacaacaaacaagaactgccagatgctttgcatgaatttcggttntaatttcctcaataattcaatggtccgtgaccttacttccaaggatagcaaaaactttcatgtgaatgttgtgggggtgcacaatatgacatttg

SEQ ID NO: 206718 - DNA, 567 bp, Glycine max
  unsure (1)..(567): unsure at all n locations
cttatatcattccatgacactttctaaaatttaaacttgggtatgcatatttgggacatattacaagctccttaataatataaataaagaagacgtcctttgttattgaatagttgcgttgaagtatttatttacaagggaatacaattactagctagacatctcctcttttaatggggatggcttgctaactcaagaaaggaaaaaaccataagaacattgttaaaaaaatgggcattattgtagttgctcattctaggctgcacaagtaggagcttttcctgttattacgggcttgacgttagcacatttagctgttgttgcagctccattgaatggtgagatcaacatcagtcatctctacaccctcacatggtgcaacactactacaaataaaaatcactccttctttagttcctgaagtgcccttaatgtttttgaaggaaaccttgcttatcttgatttttgacggattctttttggagcactggttccatggacaatactcttggtctatgatncacagggttcgaaacattntccatggntatatcttcaaaatgcata

SEQ ID NO: 206719 - DNA, 486 bp, Glycine max
  unsure (1)..(486): unsure at all n locations
ggaagaaccaccactaccttatccatttccactcctcaccaagccacaccatggcctcaaccaacgccctctcttcagcttccattctacgctctcccaaccgccagtctctgaccagaagagcgaaccacaacggaaagagtaaattaccgtcaaccgaatagccgtttctccgtcaaagcctccgccaaagagattgcctttgaccagcattcccgctctgctatgcaggccggcattgacaagctcgccgacgccgtcgggctcactcttgggcccagggggaggaatgttgtgttggatgagtttggaaagtctaaagtggataacgatggtgtcaccattgctcgcgccatcgagnctncagattctatggaaatgccggtgcagctcttattagagagggtgctagtaagactaacgactctgccggtgatgggacgaccacggcttcggttcttgctcgcgagataaataagctggggc

SEQ ID NO: 206720 - DNA, 424 bp, Glycine max
  unsure (1)..(424): unsure at all n locations
gaagaaaaatatcagatgactaccttatttcaatatcattaaacataccatgactagaatccaatattataacctcttttctctcatcaagccgaacagatctaaaactgtttacaaatacatttttttttattgaacagaattctaacacttacgctctttcaattttctgcacaaaactgttctttgccgtagccctaataacctaaaaattaaacggtaaggccttgtggggcaccagctacaggtgccttgggcttaggtttttccaccacaatggcctgtgtggtcaacaccattccagcaactgaagcagcattctgcaatgcacaccttgttaccttggcagggtcgataactccagcctccactaaattctcatacctgtctaccatagcatttgaaccgacctnccattcaccac

SEQ ID NO: 206721 - DNA, 596 bp, Glycine max
  unsure (1)..(596): unsure at all n locations
attaatatcaccacactttgtccatattctcattctcctcactcccatcatcttttccaatggcctccaacggcgacgccgttcatccccacccttccaaaaagatcaaactcttcagcaatttccattaactcaactaattcctcgtttatcacccatgccgagatcgaatcggaattctcccaccaccaccccacggtggcgcgcctcaacaacggcgccttcgggtgctgcccggcttccgtgatcgccgtgcagcgcgagtggcagatgaagaacctccggcaaccggaccacttctacttcaacgacctcaagaagggactccttcactcccgcaccatcatcaagaacctcgtcaacgccgaacacgtggacgagatctccctcgtcgacaacgccttcaccgncaccgncatcgtncttcagcaagccgcctgggccttccaggaagcaaaattccagaaaggcgacgtggtcctcgtgctccactaacgcctacgcgccgtcaagaaagccatcgaggctacgtggtgcgcgcccgagcacccgtatcgaagtnccccttccctttcccgtcaccttcaacgacgacg

SEQ ID NO: 206722 - DNA, 548 bp, Glycine max
  unsure (1)..(548): unsure at all n locations
ttgtgtttcagtattggttgtttttttttcttttatgtcagtttgaactttgaaggttccgtgacagatgttgttacttgttattgtttgataaggtattcaaaattgggtggttttcgattgaactgggatgtccaagccacctgttaggcatagcggaagaggaaggtcaaagcaatgtcactttgttggtttcttcctcagccaccatggaaagtgtgtgcctgaatagctcaaaactgaaagagcgcaactacatggggttatctgattgttcatctgtggacagctccgcgccgtccttctcagatgagactaagagcaatctgaacctcaaggctactgagctcagactggggcttccggggtcgcaatctcccgaacgagattcaaatctttgcttgagaagttcgattcagtttgatgaaaagccactgttttctttgcatcctgcaactgatgaacnaccattctcatcaaagcctgctgttttgggaaacaaangagggttctcagatgtcatgagtggattcgccgaggagaaattg

SEQ ID NO: 206723 - DNA, 586 bp, Glycine max
aacagtagaaggtgcattacatatataataacttcttgttttttatcacaccaagttgcaaacatagaagagatgatccaatttacaaactacaaatccttcaccacaacaggaacatgagagcacataaaaaatataagaacctcccacagacaggtttttggggttttataagttgtgacaatcatgaaaaaagcttactgaatataaacatcatgacaacagaacacaccgatagtaaataatatcatgatcaacaaggcagctttagtaccaaattctatccagtccaaacatgccttaagttgtgcttccaagccattatggcccttgtgttgctccctcacacagccaagaaaacattttaacccccaagcagttagatggatagaagggtgtgatgagatgcttaattctgcctagttcctgctcttacttttttcaacagctcttggtgctagaccaatggcttcagagctcttcataatccttagcctcttgcacgtctcagtaaacatctcccagggaacatcacccactagcatccagtctccatctttatcctcgtaagtagaacatattctga

SEQ ID NO: 206724 - DNA, 508 bp, Glycine max
agaaaacctagtgagagtaagcactcattgatcagcaacaatggcagcctactcaagccatgctttgaaaaccatccctttttcttcctttgtgaagcctgtcagtaccaaaccaacatcatttcttcacaccttcacctaccagacctttcttacccttcacctcaccaaaccactctctcaccaaaaatctcaagctgaactccactttgccacacttttgcttgtcttcagttcccaagaaatctttcacttgtagaagccaggctgagcctgttgactcagaaaaagtccaagaactgagtgtgtatgagatcaacgagcgtgaccgtggaagccccgtttatcttcgattgagctataaaagtgtcaattcgcttggtgatttagtcccctttagcaacaagttgtacactggagatttgcaaaagcgcattgggataacatctggtatctgtattttgatccaaaacatagctgaaaagaaggcgacaggtatgaagcaatc

SEQ ID NO: 206725 - DNA, 425 bp, Glycine max
ggcaaacataattatacttcctttccttattcattatatttgcttaaacaccactaactgaataatgtcaagcttttcgttaaatagaaactccaccactacaaaacccatcatagtccccacttgttattattattcagtaacttaaatcatactactacaaaggccaaagcaaatacaaaaaaagttgatgaattagtcggtgaagccagcaatggtagcattgggctcaagggccttagcagcaggggaaggttcaacagatggaattggctcaacagtcttgacaagaagctcctgaggcaaatccttgataccctttagaaaaatgtgtacaaaatcttgaaaggatacacaatctgacgcagcttcacttgacctttaacaccctcaaatatgccagacccaccagtcacagccaatat

SEQ ID NO: 206726 - DNA, 572 bp, Glycine max
gaagcacgctctaaattgttagataggtaaatgatcaacgcatatattcatacaaattcaaacataaggcagctttcaagagaagaaattaaaaggtaactggaaacctgcgaggaatattaattcccataggttcataaatcaattcctctagatttccaatataaaatggttacaattgttattttggagccatgagtttgaaccctatcatcagacgccactagcatataatcgggtccattccttcgctgtttcgacagcctcagcctcattagatttccaatgcttggcaatgttctcagaaagtggatcatctgggtttggtgcacttaatagagcttgaatgcttagtagaacaagtgcggatctgaagggcaggactccacttatctttcagaatatcaagacaaatcctgccaagcttatcaatgtttggatgatatatttttgttagaaacctaacctttggagcagccattggatattcttctggcaaaatagttctaactgaaaactcctccttcatagggcactgggttggccccaggatcatcacattgaaatatcgc

SEQ ID NO: 206727 - DNA, 491 bp, Glycine max
atgatcgttattatgtctgtgatacacacaattaaggccataatatacttatgtgatttacaacaacttctagcttattttatacatcatgccaacccaactaggagcaattttcatcatacaattacacttatctttaatcatcattcatcaatactggcatcagcaatacgctctaaactctgaagcatgacaaggtggtagtcaccagggaccatattgttatgcaatttatgccacaattggataagatgcacaagttgcaacaccacacatgttcttccccaattccatcttgaagtagccattttcaccccagctttctccccatgaattttttatgagccaatatgggacaccattttcaactccatatccaacagcaagaacggcatggttcacatcctgggaagtgctacacaagtgtcactagtgaaaactcctttctcgtagaaatgggaacccattcaccacctgaaggccacactaac

SEQ ID NO: 206728 - DNA, 501 bp, Glycine max
cttcttctttcgttcttcattgttcattcaatttcttctctcttcatctcaccgaacaaatcattcaattgcaatcatctatggcgtctttcgacccgagcgtagattctagtaattccgacccgttgcgagaatccaatcacaagaagcgcagaaaaatcggagaccacgccgccgccgatcaaaattcggctgccgcctccccgtggagatccgaagaggagcagcggatctactcccgccgcctcgtggaggctctccgccgcactgcgtcatcggcggccaagcctagagccgccggccaggtccgcgagaccgccgaccgcgtcctcgccgccaccgccagaggccgaacacggtggagccgcgcgattctcagccgctggaggaagctccgcacgcagcacaagaaggcgaagaagaaggaggcatcgtccattaactgtttgaagagaacgaggattggcaacggagagaggaggaaccggttaccggctgtgc

SEQ ID NO: 206729 - DNA, 406 bp, Glycine max
aggggaactcaaaaaaaggaggaataagcaaatggcatgtacagtgtacacgataaaatacatgaatctgaaaaccaataaaaacgatttaataattaaaaaataaaataagaaaaacacctggcgcaatataacctaggcgcgggggtcaactaaacgtgccgccggcgaaacttgccggcgcggcgacggcgaatatttcggcgagagccgtcatggctcgcacttgcatttccaagggggagatatagtccgtggctttttccaaaaggtttggaaacgaaacctttcggcaaccgggaaccaaccgggtgaggacgcgcgcttttttttgtacagccggtaaccggttcctcctcttttcgttgccaatcctcgttctcttcaaacagttaatggacgatgc

SEQ ID NO: 206730 - DNA, 480 bp, Glycine max
aacaaaataaagtaggaaactttacaccaatatatcaaaaacaacaaaattgagctaaccagagccacataagaaagtacctgcagttccagccattttgactatatatataacaaacagaacctgaaatatatacatgcaatgtactaagatatgtaaaacctattagataacatgtgtgcatgatatgaacatgtttgagttcatgtggaaacatgcagctttcaaggatgtgtatttgcaatgtcacgtgagagcggggaagcagaagcagtggcaattctaccatgggtaaaatgatcagcactttttctacgattttgtttcacatgggggacctggagctgctccaaatccgtggcaacctcgtccatggttggtctcaactttgattctattgcaaggcatcgcagaaggagggtagctaccttacatgcctcatctaattcatattggccttcaagacgattatccaacaca

SEQ ID NO: 206731 - DNA, 540 bp, Glycine max
cttgaagagtgtgtctatgtcttctaggaggggttgcatttaccaccacttaaggccaacggattatcgttgctccaaagagtcattcccaagttgatcaaggctgctaatgatactcagaatattttatcgcctttgatggccccagaaacatttaaaagggataagttcttttggttttcagatgtggaatttgctagggagactttggcaggtgtcaacccatatagcatccaattggttaaggaatggcctttaacaagtaaactagacccgcaaatctatggtccacaggaatcaacaataactagggaagtcattgagccacaaattatcacttatggaacaattgaagaggcccttaaagaaaagaagttgttcatgctggattaccatgatttattcttaccatatgtaagcaaagtgagaaaaattaagggcaccacattatatgggatcacgaacattattcttcctcactgatcaagggatattaaagccattagctattgagctcactagaccacctatggatggaaa

SEQ ID NO: 206732 - DNA, 442 bp, Glycine max
tttttttttttttttttttttttttttttttttttttttttttttttttttttttttttttttttttttttttttttttttttttttttttaaaccaaaaaacccgggctggggcccggggggaaaaacaatttttttcctaaaagaaaaaccagaagggggattttccggggccaaaaaaaaatcgggggccaaaaaagggaaaaaagggaaaaaccctggggcccttttttttttttttttgggccccttggggggccctaacaaaaaaaaaaaaggggtttaattggggcctaataaaaacccccaactttaaaaagaattggttttgggaaccccttttccagggacccccggccccgaaaaggggttcaaaaccccaaaggggatttttcccccccccgggggggtcttaaaaaaacaatttccattcccgggggtt

SEQ ID NO: 206733 - DNA, 476 bp, Glycine max
tcttgttgttgaggagttgcaacctgctgagtaccttcacttcaaggaagaacttgttgatggaagttctaatggcaactttgtgcttgagttggactttgaaccattcaatgcagcctttcctcggcccactcttaacaaggtcaattggaaatggtgtgcagttcctcaaccgccacctttctgccaaactcttccacgacaaggagagcttgcacccacttttggaattcctcaggctttacatcgtcaaaggaaagactttgatgttgaatgacagaattcaaaacccagatgcactccaacatgttctgaagaaagctgaagagtttttgggcacaaagcacttctgaaactccctactcagaatttgagcacaagttccaacatattggtttgcagagagggtgagggccacaactcccagcgtgttcttgagtcaattcaacttctcttggatcttcttgaggcccctg

SEQ ID NO: 206734 - DNA, 427 bp, Glycine max
gaaaaaggcacggcttaaaattgaattgaggggtaaaacaccccaattcgaagcttttccaatcaagattcaaatcatgcaaaagaaaaaaagtaaaaggcttttttttttttccttttttttctctctctgcctcttatcgaaagcttaatcacaaaattaaaatcatcagggacatattatttatagaactcaagtaagacaaactccaaatgaaaaacaaaaagccggttcctccatttttttatccaactcttcatcctcagtttactcaacagcaaggggcacagactcggccaatttgcggtacttgagagcatagaacatctcgagatagcggcggctctcacggcggtcaaggttagacacatgcttccagaagccatagacaccagtgagagtgagaagcctttgtgagtaaatttgc

SEQ ID NO: 206735 - DNA, 571 bp, Glycine max
ggaaaaatggaaagtcccaaatcattcagacacagcactccgtgactcatcactccctcctgatgattctcagcattcttataaaaagctgaagacaatatctgatgatgtagttactggcaaatagtgattctagcaagaacataaattttggtgcatgtgatgaaagtatacatacaattactagtggacttttggacaaatctgttaaagataattcaaataaattaatagattcttctagcacttgctgtagtgatgagcaggacaaaagtattggggatggaccaaaagatcctacaaataagacagaatttaagaagttgtccaattcaatggaagggaaagttgatgggatgctaaggggtttcagattggaaacctctggaaaaagaattatacttaaggggagtagaaatgtttggcagaaacagttgcctcatagcaaggaacttactttctggcctgaagacttgtatggaaatatctagttacatgcattctggaggagtgtcatgccccatggatctaatgtgctcctagttcatcatgaagacagggaaaattgatg

SEQ ID NO: 206736 - DNA, 471 bp, Glycine max
acaaaataattaatatagtgttgagcgttgaataatggatacaagtatattatagtaaactctattgataaagatctgggttggataaccgtggggtggggatagcaaccaaaggtattttctttttgagaacaattccaaatttctctgatacctctaacttttctccttggggtactgtccaatcaaataagtgtacgagtgtggcaagaaaatgcaaaaccgtcttctcagccattgctattcctgcacaaattcttcttccagatccaaaggggaaatagttgaagtcattgccactgaaatccaattttgcatctaagaatcttgtaggatcaaattcgagtgatttcttccaaattgaagggtctctatgaatagcccacacattcacaaacacccgagacccctttgggattgtgtaacctcccaaatagtggtttcgctaggacaatgaggtactagagtgga

SEQ ID NO: 206737 - DNA, 537 bp, Glycine max
tgtgtttgcggctgaggatttcgaacgagcgaccttcttcgtttctcgcaaagtttaagtcatcatgggtaaggaaaagactcacatcaacattgtcgtcattggacatgtcgactctgggaagtcaactaccactggtcatttgatctacaagcttggaggtattgacaagcgtgtgattgagaggttcgagaaggaggctgctgagatgaacaagaggtcattcaagtatgcctgggtgcttgacaagctcaaggctgagcgcgaaagaggaattaccattgatattgctttgtggaagtttgaaaccaccaagtactactgcacagtcatcgatgcccccggacatcgtgactttatcaagaacatgattactggtacctcccaggctgattgtgctgtccttatcattgactccaccactgggggttttgaagcttggatttctaaggatggacagactcgtgagcatgctcttcttgctttacccttggtgtgaacagatgatctgtgctgtacaagatgatgccctacccc

SEQ ID NO: 206738 - DNA, 435 bp, Glycine max
accatcaaaacaaaaaacagtactcatcaaaaacaaacagcaatgaaaattgaccaccgccgatcaagaacctagttttgaaagttacggctacatgaaatcggcagaaacttaaaaatataacttaaacaaaacacctaagactctgcaaggataaaactactataaaggagtaaccacgatgatgatcacatgtgctagcaaaattgcccaaatgcaatcacttcttcttggcagcggccttggtgaccttggctccggtggggtctttcttctcaacactcttgatgactccgacagccacagtttgacgcatgtccctcacagcaaaacgaccaaggggaggatactcagagaaagtttcaaccaccatgggcttggttggaatcatcttaaccatacctgcatcaccattcttcaaaaatttgggctcct

SEQ ID NO: 206739 - DNA, 552 bp, Glycine max
cacaccaaaggatctgattcattaaaagcaatagattcttcacaaccacacaccactcacttgacatatatggaacacatacataatccatatagccttaccttagggggggggcatttcttaacttttatttaatgcacaaacataacaggggcaggaaggaaaaccacaaaattaaaacgaagatcatatagctgttaataataacaacaacacatgcaacataaaaaccacatgcagttgtggtagtggcatcttcttcagattggaaacgcctcaatgatggaagggagagcgttgatcttgatgaatgttgtaacgcgcgaaaccggtttccttgaacagccacttccagttctcttcggtcctctctttgccaccggcgttgtgagcgagaagcatcatgtcgaatgcgatgccaacgtctgtgaagaagttcgttgccttcgggtcgaagaacgtgatccacgattatgacttttcctgtcttctctggtattgccttcctgcagttcttaagatcttgatgcagtgctcgtcgctccagtcatg

SEQ ID NO: 206740 - DNA, 432 bp, Glycine max
gataggaaatacataatatctctttatgagttacacactttattggaaactagtaaccatatatgtattaccacacacacatatataagtagttgaagcatatagataattttcaatccgaaagaagctctattttgatgcctctgattttaacacgccctttcccatatctcggaaccagcgtcaccctaacactgtcatcatcttccgcttccaattcttccaacaaatccgtaagtcccagcctcaaacaagtaatgatgtccttgtttttgtgcatatgtgaatgaggcacactcacaaagcttcctgcaaattctgtattatctggtcgaatctgcttatcatcttcatcattgataaacacatcaaatttacagggtgtgtttctctcaaactcaatcccttcaatcaccaaaacctcttcctcct

SEQ ID NO: 206741 - DNA, 511 bp, Glycine max
cttatctatcttcacctccatcttttaacagttcccctcgaaacttctgaagatgggtggcattgcattcggacgcttggatgattctttcagtttaacctcaatcaaggcctatattgctgagttccattcaccctgctctttgtttttgccggtgttggttcagccatagcctatggtaagttgacatcagatgcagcacttgatcctgctgggttactggcagttgctatttgccacggttttgcactctttgttgcagtttctgttggtgccaacatctctggtggccatgtcaaccctgctgtgacttttggattggctcttggtggccacatcaccatcctcactggcttcttctactggattgcacagcttcttggctccatcgtggcatgttttcttctcaactatgtcacaggaggcttgccaactccaatccacagtgtggcttctggggttggagctgttgaaggagttgtgaccgagatcatcatcacattttgtttgg

SEQ ID NO: 206742 - DNA, 385 bp, Glycine max
atatatataaagcacttctgcacaccaccaacctcttgaattctcaccaaattaaacagtagtagcacactttacaaataaattaagagaagaaaaaaaaagcatagaatggagagagagaaaaaaaagagagatagaaaaagaaagaaaagcaagaactgcttttcctccttttattatcaagaaacatgaattacaaaggccatgacttgaatcagatcaaaattcactggaaagaggtgcatggtcagagcgaatgaagacattgccgtagataaggccagccaaaccaccaccaataagaggtccaacccagtagatccagttgtcatggaagtcaccactaacaactgcaggcccaaaggagcgtgccgggttcatcgag

SEQ ID NO: 206743 - DNA, 543 bp, Glycine max
  unsure (1)..(543): unsure at all n locations
gctcaactccttcccccaagccttttggcatttccatgatgacacaagattcatcagaggtgttggaaaaacatgcaagctcaggctctgttgtgagggggagtagtgaatatattagactggttcatattcgatgaaccaaagggcggttgaagctgaaaccttgctgcctcgagcagaatcaagaatcaagtctttctggtggtggatgaaatcctttttatggtgtgttatctttgtgttccttgcttttattcttgagaaatggggagtgtcacttttttttgaaaaggttctttacccaatcatggaatgggaagctactgcctttggccgnccagttcttgctttagtactagttgcctctctggctttattccgcgtagttcttaatcccttctggcccctncatgtggctggctgggatgatttttggttatggcctttgcttcgttatataatggttggaacaaccattgngatggtgctgccatacttaattgggctactgttccgtgaccgaattcataatggtttaagaga

SEQ ID NO: 206744 - DNA, 419 bp, Glycine max
tttttgaggagttggtgagggagttgtttcctaaattggccaatcatctggattatctgggagtgcaggtggcatgggttactggaccatggttcctgtccatttttgtgaacatgcttccttgggaaaagtgttcttcgaggggggggatgtgcttctttttgaaggaaaccgagtcatgctctttagaactgcagttgctttaatggagctatatggtcctgcgttggtaacaacaaaggatgctggagatgcagttactttacttcagtcgttggctggctccacatttgatagcagtcagcttgtactgacagcttgcatgggttaccaaaatataaatgaaactcgtttgcagcagttgaggaaataaacatcgccagctgtaatagctttcattgaagaaagatcaaaagggc

SEQ ID NO: 206745 - DNA, 513 bp, Glycine max
tgcacctgctccgacacctttggtcaacacgaccaatgaggattcccagtttccagttgaaaatggcaaaaggcatttgtctgaagaagaaatgaagatcaagacaaggagagagattgcaggcccttggggtgcagcttggtaagatgaatattgctgcatgggcaagcaaagatgagcaggaaaagaacaaatcttctccccgggacatgagtgtgcaagaacaggagagaattgaatttgaaaaacgtgcagctctgtgggaggaagctgagaaatctaaacatactgcaagatttaagcgagaggaaatcaaaattcaagcatgggaaagtcagcaaaaggcaaaattagaagcagaaatgagaagaattgaggccaaagttgagcaaatgagagcccagacacatgcaaaaatggtaaaaaagattgctatggcgaggcaaagatcggaagaaaaacgtgcagcagctgaagctagaaaaaatcgagaagcagaaagaactgtggctc

SEQ ID NO: 206746 - DNA, 393 bp, Glycine max
atctccaccttctctttcactgctccttgctctttcttctgttaggtagccgcaagatctgcataccatggcttacaggaaattcgacaaccctcactccggcgacggggccagtacaggcaaaaatcttgatcggagggggagccaaagacaccaccctagagacgttcgtgaagtactttgagaagtacggggagataacggactccgttataatgaaagaccgtcacacgggtcggccaaggggattcggcttcatgacctacgccgatccctacgtcgttgaccatgtcatacaggagaaccacgtcgtcaacggccagccggtcgagattaagaggaccgttcccaaaggctcttcgcaggctaatgacttcgacaccaagaagattt

SEQ ID NO: 206747 - DNA, 535 bp, Glycine max
gatgaacgctcccctcgcgccctcgctctcacagccgaagccgttcaattcaactccggcaactacactgtgtggcatttccgacggttgttacttgagtcgctaaaagtcgacttgaacgatgaactggagtttgtggagcgtatggccgctggaaattctaaaaattatcagatgtggcatcatagacgatgggttgccgagaagttaggtcctgaagctagaaacaatgagctcgagttcaccaaaaagatactgtccgttgatgccaaacattatcatgcatggtctcatagacagtgggctcttcaaacactaggaggatgggaagatgaacttaattattgcacagaactacttaaagaagacatttttaacaattctgcttggaatcagagatattttgtcataacaaggtctccttttttggtgggccctaaagctatgagagagtctgaagtgctttacaccattgaagccattatagcctaccctgaaaatgaaagctcgtggagatatctacgatgactttata

SEQ ID NO: 206748 - DNA, 423 bp, Glycine max
caacggaaaaaaaaacttaaatttcttattctgcatggctttcaatccttacactcaaatgccagtaatggcatgacaaaaagataaatttgcacaaacagatacatgacaacataaaaaataataataaataaacatccagtttcaataaactaggttacacataacacagagttgccctttaattactttggttactaagctgatagaggaagtctgctcttgcgccaaatccaatagttggttctaattggatcaacttgttttaggatagaacaaatatttcgggctatatttaaattttgttgttcccctttctcatcatcatctaaatcttgtttatccatatctgcggtctttaaggcgtcaatggcatctctaatgtcttcatttggttgataaccaaagcatataagatctaaa

SEQ ID NO: 206749 - DNA, 229 bp, Glycine max
aaggaccacacatttccttggatttcccacttggttttggcaagcctccctcccaaaaattcccttcctcaaaaaacaccgggggttaaacagtttcctgatcctatacggggaaaattttccccgccccaaaggaaaaaggtcacaacaaaaatttttatacaaaccccccttaggccagtttcacattacaaccccaatcgggcctttttttggatttaaggggggg

SEQ ID NO: 206750 - DNA, 594 bp, Glycine max
  unsure (1)..(594): unsure at all n locations
gcgttgaatcattcaagatagtacgcaaataacaatacagtattcaatagcaacatgatcccttactaagtaattattaaggcatttcgtttgagtggactttaagtaattttatccgactaaactacatcaatactaggaaatggaaagattccttcatgaacatagaagccgcaataaaaagttctatagagcatttaagagacgaaattcagtggataaaatttcaagacaaaataaattagaaaccaaaaccattaaataaaaactaccaaacactcaaagtctattcatttcctaaagatttaagcagcagttgcttgttgggcggcaatccttttcctagcttcctcaatgattgatagtttaatacctttacccttgggaagagatatccatgngttttgttcccttgccaatggtgaacacattgcccatacgagttgcaaactcgtggccagtggcatcctgaacatggatagtctcaaagcttcccttatgcttctctctggtcttgatcactccaacacgacccctattccttccacctgtcaccatgactacattcccaacatcaaacttgatgaaatcgac

SEQ ID NO: 206751 - DNA, 588 bp, Glycine max
cggctcgagaattctgcagaatggattatgagcatgcaggcttgcaatgctcatggactttattgtgttcctttatatgataccttgggtgctggggctatagagtttattatatgccatgcagaggtctaattgcatttgcagaagaaaagaaaatacctgagctattgaagacatttccaaatgcaacaaagtatctcaagacaattgtaagcttcggaaaggttacccctgaacaaaagcaagaagttgaaaattctgggttggaaatatattcatgggatgaattcttacaagtgggtcaaaatcagagttttgatcttcctattaagaaaaggagtgacatctgtacaataatgtatactagtggaactactggtgaccccaagggagtgttgatatcaaatgagagtattattactctcttagctggggttaagcgactgttggagagtgtaaatgaacaattgactgagaaggatgtatacatatcataccttccacttgcacatatatttgataggtcattgaggagacattcatatgcatggtgcttaatagggttctggcgtgggggatgtcaaatgt

SEQ ID NO: 206752 - DNA, 508 bp, Glycine max
  unsure (1)..(508): unsure at all n locations
gaataattatatatgtaaaaatgattcatggatactgtaatacacctagagatagaaaaagagaagaaagacaacttacttagataagtccggtagaatagataatatgacgtgaaaaaaaaaatcaaaataaatgacgtatccatatataactactcagcgtatatacagtcaccaaaaggaaacaattgaacggagacaaacaccatcacatacagaaaataaattatctcccaaatcaggtctcaggcactgggtttacttccactcttatacatgttgtcaatggcattctgatagtatttaagcaactgtggcctcttcttcttgtatgttggagtgataaggtcacgttccatgtcaaatggaattgagtcaaggtgaactgcttttataaactcaaaacctttcaacttcttttccttcgcaatctttgagagctcttcanttatgtaactttttgctcgagcatcttcacagagagaattgaagntcatggatataccat

SEQ ID NO: 206753 - DNA, 337 bp, Glycine max
  unsure (1)..(337): unsure at all n locations
cagcgtttctgcaaattccaatttttcaaacttaaaaacaaaaacgggcgttggagaaaaagctgttattaattcgggagcgatatggaggtcgtactcaaagagttgcacgccnnnncttcaatctntgagccaatcgcttcccgatccatctcaccatgatttgctccgcaagattcaattgcgtgttgaggaccttgcgaagcttgcagaggctgcacctgttcgtcgctctaaagntgaggatttgagtgctgangttcgacatagcaatccttatagtcggcttatggcacttcagagaatgggtattgtggacaactatgaaagaatgcgc

SEQ ID NO: 206754 - DNA, 466 bp, Glycine max
tgaagagtgagagagagagagagatagaggcacttggaatccaaaaatgagagaaatcatcagcattcacataggtcaggccgggatccaggttggcaactcctgctgggaactctactgcctggaacatgggcatccagcccgatggcatgatgccaagtgactcctccttcggtgtagcccacgacgccttcaacaccttcttcagcgaaaccggatccggcaagcacgcccctcgcgccgtcttcgtcgatctcgagcccaccgtcatcgacgaagtccgttgtggcacttaccgtcaactcttccaccccgaacaactcatctccggcaaggaagatgccgccaacaactttgccagaggccactacagccgttgcaaagagatcgtagatctgtgcttggatcgcgttcgaaagctcgcagacaactgcactggtcttcagggcttcctcgtcttcacgct

SEQ ID NO: 206755 - DNA, 402 bp, Glycine max
  unsure (1)..(402): unsure at all n locations
aaaccaccaaaatagaagcataatgatgatatcacttcacagtttgaataatggagaactatatcacacaggagtaaaaacaaaaaggaacgaacaatactggttcagggtaatgtaacgaagcatataccctttttactcgaaacaattacattgataataaaaccttcatttatgaataggcctctccttcctcataattttccgctccttcagccccaacctcctcatagtccttttcaagagcagcaagatcctcacgagcttcaaagaactcttctttttccataccctcaccaacataccagtgaacaaaggccctcttggcatacatcagatcaaatttgtggtcaatgcgagagaacacctcaaaactgcagngttgttgctgatcatgcatac

SEQ ID NO: 206756 - DNA, 564 bp, Glycine max
  unsure (1)..(564): unsure at all n locations
gacaagagagtcaggaaggcaagattgaaaattgaagaaccaaaagccaaacagaaagcgaattcttttttaaaacaaaagaaaggaagcaagaaacagaaagcagctgagcttcatccacaaactacaagctgattcgcgaaagcatagataaatatttattattgagaagggtagaaaaggcaacaaaatgtttgttgtctgaaatgtgttttaccgtttaagcgaccaaataaaatagtccaggtggacttcaatgagcctccacaaacgtgccatggaagccatagggcactcttgaaggcagcatgacagtggcctccaacttcaaatcaagtgcattcagaatctgcaactcggactgccacgtcatctcgtcatgcacaaaagccatcacgtacccttcatcctcattcccattcctccacgtgttggcaagaagaatggctctccaccgaaccttctttctccgtactcgtgcctcttcacttccccactctccaggtccaccttcgccacccncgacaccttcggccacggttccgctatgcacaaatatgcgaa

SEQ ID NO: 206757 - DNA, 559 bp, Glycine max
  unsure (1)..(559): unsure at all n locations
gaacagagcaacactgaacaatggcgcaaccttcctcctcctcgaagcctgttgtccctctcctgaaggacgagctggacatcgtgatcccgacaatccgaaacctcgacttcctcgagatgtggcggcccttctttgaaccttaccacctcatcatcgtgcaggacggagaccccaacaggaccatcaatgtccccgaaggcttcgattatgaactctacaaccgcaacgacatcaatcgcatcctcggacccaaagcctnctgcatctcgtttaaggattctgcgtgtcgctgctttggttacatggtctccaagaagaagtacatctacaccatcgatgacgactgcttcgttgctaaggatccttctggaaaggatatcaatgcacttgagcagcacattaagaatctcctttgtccatccactccattttttttcaacaccctttatgacccttacagagaggtgctgatttcgtccgtggatacccttttagtcttcggagggtgcccccatgctgnttctcatggcctctggctcatatacctgattatgat

SEQ ID NO: 206758 - DNA, 354 bp, Glycine max
atcaataaattggtctataatcttgcattataaaaaaaatatggtaacaaatatgataatcaattaaaactgacaaggaagaaactactccaattgaaaactaaaatccgcaaccataaaaggttcacttggcagcagcagcaccattggttggctttgaaggaacttcttcagatgtgttgttgttaagctcatcccaagcttcaatccaagtaaccatggcatctgctagcttgatgaagtagggatcaacagccccaagcttctccttgacttgcttggagagttcaatgtaacatttttggacagacgtgcactcttttaaaagagtggcactttggaagaatggaatga

SEQ ID NO: 206759 - DNA, 494 bp, Glycine max
gccacttgttcactcatttccacactcttaccttctccttcttcttcttctttatcactctgtcgttcttcctcaaacaccaccaaaccaaccaccattcacctctgcaaatccctccatctccaaactgccatactcttcctcctttgcctgccaaagccaaaaccggcgcttccaatgataccgctcttccccaaactcaccgtttccaactcccttctccttcgctgcacctccctcgctctctccttcactctcgtggtctaccccggcgactccgacgacgtctttgatgacacctccccaaggaagctccagtccgatgaactcgacaaccgccgtctcttccaagagaacactccctacgttgtctacataaccaaccttgctgtcaagcaggatgcgtatacattggacgcgttggaggaccctcaggggtcaggatctggctatgtttgggataaggagggtcatattgtgaccaagtatcacgt

SEQ ID NO: 206760 - DNA, 500 bp, Glycine max
caccattccaatttccatggcactctcctttcgccccgtcatccacccccgcgtcaccgaccggtcactctttcagttcctcccacccaagcctccccctcttccaacttcgccacctccctccgttctcctccccctcacgcgtcgccgcggcggcttccttccctcctgcctctccgacgacgccgtctccacccgcaacttcgaccgcggcttcaccgtgatcgccgccatgctccgccgcatcgagcccctcgacaactccgccatctccaaaggcgtgtcccccgccgccagagactccatgaagcagaccatctccaccatgctcggattgctaccctccgatcacttcgccgtcaccatcaccgtctccaaacaccccctccaccgcctcctcttctcctccatcgtcaccgggtacactctatggaatgcggagtacaggatgtctctgacaaggatttggatatatcaggttccagggatgaagggtcaga

SEQ ID NO: 206761 - DNA, 560 bp, Glycine max
tgggcgtaatcacgatcgaggtacggttcggcatagctatgccgggtcgacgcgctcgctcgtcggcgggcgtcctgttcgagttgagcgattcatcagcttcattatgagacttaacagtaccaaactccttagggccttcttcaaactcctctttcgtgccactatcttatctcactcatcctcgtcttcctcttcaccttcaactaccctcctctcgccccagacttcacctcccaccgccacctccactcccactcccacttcctctcctcctcctcctccttcgcctcctgggagaagcaggtccgccactcctccacccctcgccgccccaacggcctcaccgtcctcgtcaccggcgccgctggcttcgtcggcagccactgctcccttgccctcaaaaaacgcggcgacggcgttctcgggctcgacaacttcaacagctactacgatccctccctgaaacgcttccggcaggcaatgctctggaaacaccagggtttcattcgggaaggtgaccttaacgacacccccttgcttgagaagctcttcgacgt

SEQ ID NO: 206762 - DNA, 429 bp, Glycine max
atctttcaatttcaatcaacggctatacccttttctatttgagcatcatcatgtccaccgcagcgcagcccatggccacgtaaacggcgtcgtccacgaagcctctctcccatcctaccttcgccgcgatgatagcggaggcgatagccagtctgaatgagagaaccggttcgagccgctacgcgatcacctaatccatcgaaggctggcacagggtgttgcctacaacctacaggatgcttgatctagaccatttcatgaagtcggcagatgctggcaagctacctaagggcatgaactctttcatgcttgtaccggctaagtctgctcctgataaagccgatgctgctcccaagaagcccaccaaagctgcagttaatcccgtcgtcaagcccgctttcaagcccatagctgctgcacctaagaaga

SEQ ID NO: 206763 - DNA, 415 bp, Glycine max
gggcatatctcttgcctttctttgatgatctgtcctcatacctaacttctatgttcggtaaagacagaacctcagaggaaaggagaattgccatttgtatatctgatgatgtcgctgagcatggtcgtgaagctgctcttaaatattatgagactttgcttccattcttactagaagcttgcgatgatgaatatccacatgttctacaggctgctgtctatggcgttggtgttcgtgctgagtttgggggatctgttttcaaaccccttgatggataggcactttcaaggttagatgctgtgataaggcatacaaatgcactacattctgataacataatggcatatgacaatgctgtgtcagctcttggaaaaatatgccaatttcatcgcgatagcataaatgcagcacaggt

SEQ ID NO: 206764 - DNA, 588 bp, Glycine max
attggcctcttccatcgcagcctctgctggcaacttctaccaggattttgacgtaacttggggagatggtcgtgccaagatactcaacaacggcgatcttctcactctttcccttgacaaagcctctggctcggggtttcagtcccaaaaacgagtatctcttttggcaagattgatatgcaactcaagcttgtacccggaaattctgcaggcactgtcaccgcctattatttgtcatcaaaaggatcaaattgggatgagattgactttgaattcttggggaatctgagcggtgacccatacattcttcacaccaatgtgttcagtcagggcaaaggcagcagagagcaacagttctatctgtggttcgacccaactgcagatttccatacctattccattctttggaatcctcagcgcataatcttctcagtggatgggaccccaataagagaattcaagaacatggaatcaaaaggagttgcattcccaaaggaacagccaatgaggatatactctagtctatggaatgctgatgactgggcaacaagaggtggacttgtgaagacagattggacaacaagctca

SEQ ID NO: 206765 - DNA, 619 bp, Glycine max
  unsure (1)..(619): unsure at all n locations
gtgataatggtgactccaactccatatgccctagtcataatgagcctaatacaccacatgccgttcctgctgatgtaagacctgaaatcaagagtggattagacaatgagaatagggataatgaaaagcaggctgctgctgcacgtgcagataatggaaactcaatctcaaagaacttgtactttttggatcctgatgattcatatgatggtaatgagtcaggaacagaagaggagcaatcagcttttatgaaggagcttgaaaatttctttagggagaggagcatggaattcaaaccacccaagttctataaagaggagcttaattgccttaagttatggagatctgtacacagattgggcggctatgacaaggttacctcatgtaaattctggcggcaagtgggagagtctttcaaacctccaaagacatgcacaacagtttcatggacttttcgggttttttatgagaaggcacttcttgactacgaaaggcatacaacanaaggtggtgagctgaatgtgcctattactcctcttgcagagccaataaatattgaaaatcagtctgtccagggttcagcatcataggtagggcacggagagatgctgcagcaagg

SEQ ID NO: 206766 - DNA, 626 bp, Glycine max
tggcttcctcgtgtgcttcctctgccattgcagctgttgccatctccacaccaagttcccagaagaatggatcactcttgggaagcacaaaagcttcttttcttagtgggaggaaactgaaggtgaacaactttacagcaccagttggagcacgatccagcactacagtttgcgcagttgctgagcctgataggcctctgtggttcccaggcagcacccctcctccatggctagatggcagtttgccaggagattttggctttgatcctctaggtcttgcatctgatcctgagagcctgagatggaatgtccaagcagagcttgtgcactgcagatgggccatgttgggagctgctggcattttcatcccagaattcctcacaaagattggtatcctgaacaccccttcatggtacactgctggagagttggagtacttcacagacaccaccacactcttcatagttgagctctttttcatcggttgggccgagggtagaaggtgggctgacatcatcaagccaggctgtgtcaacactgaccccatctttcccacaacaagctcacaggaactgatgttgggtacccaggtgggctttgtttgaccacttggctggggagtggtc

SEQ ID NO: 206767 - DNA, 572 bp, Glycine max
gcgcctctaacgctcgcagttccttgatctctcctgtcaagatgcatatattcatgaaaactttgaccggcaagaccatcacccttgaggtggaatcctccgacaccattgacaacgtaaaagctaagattcaagacaaggaaaggatcccacctgaccagcagagacttatctttgcggttaaacaacttgaggatggtcgcacccttgccgattacaacatccaaaaggaatcaaccctccatctcgtgcttcgcctcaggggtggcatgcaaatctttgtcaagactttgaccgggaagaccatcacccttgaagtggaatcctcggacaccattgataatgttaaggccaagatccaggacaaagagggcatccctccagatcagcagaggctgattttcgctggtaaacaacttgaggatggaagaacccttgctgattacaacattcagaaggaatccacccttcacttggtgcttcgtttgagaggtggcatgcagattttcgtcaagactttgacaggaaagaccatcaccttggaggtggaaagttctgatacaattgataat

SEQ ID NO: 206768 - DNA, 544 bp, Glycine max
cgcactagataggattcaggtccggtccggacttaatatcaggttcgacgcgctcactcgtcagctggcgatcctgctcgagaagaaggaactgtcatgaatattaaggaataatgcgtcaccgaaattatacactctaaatgttgtacgagctacgctgagctactaccctatcagacattagagcctactctaataactgaacacgctgcagaagtagctaatcacgagatattgcatgaacataatgagttcctggaatcttccaacaaaagaacgcgcatgatatcgcacatgcatgcacattgcgattcttaagagtgctgctttagaatgccacactatgtcttgcaaccctgatgatgatgaaaagcttttgtcgaacttgtgaaactctagtgtgtcacccgcggtctttcgcagctgcaccatgagcaatgagggagccacttgaaaaacctatgaatcaactgaaaggtgaccctttcttccgctcttatcaccttgcactgcatcttataattccgcttgtgaacattaaatc

SEQ ID NO: 206769 - DNA, 601 bp, Glycine max
ggaaaatcatagtattttgtaactaaatgcttttgttcttgtgaattaattttcattcactttcagatttctggtttcatcatctattcaaatagcttccagcataatattttgaatttgactgctaaggaaagaccccatttttctgagttggaaagtgacttatatttttttgagctgagaggaatatttggaatcaaggattgtgtgcttggttgaccagacttgctatctcagcaattgatgtgagatccacggggcgaaaaaagaagcaacttggccttatattattcatcagatgtctgcattctggagctgaggaaatgggttcttgcatctcaacaagcagtaggagtacttgtagcagcaagagcaatggagatatggtctctccatcttgcttagaaattggatgctgtggccaaaagagaacaaggagaacattctctgatcatgttatttctctccaccatttaccatccttacctagcagaattttctccaatggaaagagccgcggttcgtgcatatttaccagcagggccgcatggtattaataagatgccatgatgtgtggaagattcatgtcgaagatctatct

SEQ ID NO: 206770 - DNA, 614 bp, Glycine max
ctgagctttgattagtgtggcctagttgctgttttctcgatgagaaaggcttcttccactatgcattgcgcacttctgcgcttttgggttcccttgttgctgcttgctagcttcagctatgctccttctgtttcggccacaactgaaaatttcagggaatgaaatgaacacagatgggaaggtgataaatgaagagttagcaaaaccaagtctaaaaggacatgatgaagaagcaaagttcaaaggattttttccaaaaccaattcctatagttaaaccaattccaaagccaattcctattattaaacctattccaattccagtttataagcctattccaaaaccaattcctattgttaagcctattccaaagtcaattccagttgctaagccaattcctaatgaagaagaaaaattcaaaggatttattccaaagccaattcctataattaagcctattccaaagataattcctattgttaaacctattccaaagataattcctatcggtaaacctattcctattccagtttataagcctaaaccaatactaattcctggtgttaagccaattgctgtattagcctgttccaaagataattcccgttgtaaac

SEQ ID NO: 206771 - DNA, 511 bp, Glycine max
tgggcgtccttttttaggcgtgaatgtatcccttttgatgaacttatgggccaaaacgttttccatagaacaagcatgttaagttccttgctgatggagcaggcaaatacaccaatgccctaggacttgagcttgacctaaccgacaagggtctcggtgtacgctcaaagaggatagctaagatggtggaagacctcaaggagaacgtcgcaaatgatgaaagtggatgagagttcaccatattcagtgctgaagagatcattaaggtcctctaaaccctagaatcctcttgcatggtcttttgccgactataatgtgtggcgtgactcatttgatgcctgaacatactaaaatgctttccattttcatagatgtaatcgtgaaatgtgctctggaaaggaccatgatttggtgcatattatggaaatcaataagatttcttgcttcatatacttcttattattagaaaacaatttggaagccaattttgcatccttgaatggggccccaa

SEQ ID NO: 206772 - DNA, 485 bp, Glycine max
gcaaaatggataatgggtcgggtctgcttcagagacccgattcgtttgggaggtttggcaagtttggagggaagtatgtccctgagactctgatgcatgctctcactgagcttgacgctgctttctattccctctctgatgatgaacagtttcagaacgaactaactgggattctgacagattatgttggacggtagagtcctctctattatgctgaaaggttgacggagcattacacgaggcctaatggtgaagggcctcacatttatctgaagagggaagatctcaatcacaccggggctcacacaattaacaatgctgctgctcaagctttgattgctaagaggttgggcaaaaaacgcattattgctgaaactggagcgggtcagcatggagttgccactgctactgcatgagctcgatttggtttacaatgcgttatttatatcggcgcacaggatatggaaaggcacgctctaacgttt

SEQ ID NO: 206773 - DNA, 595 bp, Glycine max
gcaagaatagtggttctgctacctgcaagcgtgggtttgttcagttctgttatgagcccatcaagcagattattaacacttgtatgaatgatcagaaggataagctgtggcctatgctgcaaaagcttggggtcaccatgaaaatctggaggagaaggacctcatgggtaaagcattgatgaagcgtgtcatgcaaacctggcttccagcaagtagtgctctattggaaatgatgatatttcatctaccctctccatcaacagcccagaagtatcgtgtggagaacttgtatgagggtcctcttgatgatcaatatgcttctgctatcagaaattgtgatcctgaaggtcctctgatgctctatgtctccaagatgattccagcatctgataaggggagattttttgcctttggccgtgtattctctggcagggtttcaactggtttgaaggtgaggattatgggacctaattatgtccctggggagaaaaaggatttgtatgttaaaagtgtgcaacgaactgtcatttggatgggaaagaggcaagacactgtagaggatgtcccctgtggtaatacagtggctatggttggt

SEQ ID NO: 206774 - DNA, 420 bp, Glycine max
tgagaaatatgaacgacggatttcagactattcagtatggaattgaatcatatacatggatcagtgggattgtacacatcttacgatgttacatgatactacagattcaatagcaaacaggcggataaatagatgaagcattagacttgcactttcagtcgatgcatgagcgagacaaatagctaatggtagctagcaatatctcgattgatataccagtaaatggtatctttcgtagaaatagcattcttgcttatgtcgatgattctcaataccgaacacagagcacgggaatcactaaatataggactattggtgtgaatgacatttttagcacggaggattctttaattgagcatgaaggaggtaaagaatttaagacagaatggcatcttaaagcatgtcaagcatagttcattt

SEQ ID NO: 206775 - DNA, 493 bp, Glycine max
ctttgaagttcacacacacttgttcacccctgaaatggaacacaacctcacaatgaagtgtcgtagaaatgaaaaccttctaaccagtggcactcatttgccagaaagccctcgagtaccaatggagtttctgtcaagatcatggagtgcctcttctcttgaggtctctaaagcccttacacttccaccacctccacctctttcttcttacataccttccaagcctcctaatgcaccctcttctgtgactaactccatttccgaagaaacttcagaggaattctcaaccatgtgtggcaaccagttctcttttgcttcctctgccacctcacaacttgtccttgaccgcataatgtcacagtccgcaagagaggaagtgtctccattaacgtcaggtagattgtctcatagtagtgaacctttgaacggtggtgcttctttaaccggaacggatagtccaccaatttctccttctgacgagtttgacgatgtt

SEQ ID NO: 206776 - DNA, 631 bp, Glycine max
cgcgtcgctccgcaccagtttcaccgcacgaatatcttgttgtttggagcgatccgagaaaaactctgtaaacatgttggtttaccaggacctccttacaggtgatgagcttctctctgactccttccgttacaaggaaattgaaaaatggaatgctgtgggaagttgaggggaagtgggttgttaaaggagcagttgatgtagacattggtgcaaacccttctgctgagggtggaggagaagatgagggagttgatgatgcagctgttaaggttgttgacattgttgacacattcagacttcaggagcaacccgcattcgataagaagcagtttgttaccttcatgaagaggtttatcaagaatttgactcccaagctcgatgcagagcaacaggagttgtttaagaagcacatcgagggagcaactaaatacctgctctctaagattaaagatttccaattttttgttggtgagagcatgggtgatgatgcttgcttggtctttgcctactacaaggacggcgctgctgatccaacattcctgtactatgcatatgccttaaaggaggtcaagtgctaagtgacttaatgtacccagctatctactcattttatctaagtttttttacg

SEQ ID NO: 206777 - DNA, 549 bp, Glycine max
gaaagagcaccatggacccagcattggcgactgctgtataatgcgctaaggatgtaaaggtgatgcaagatggcagtggggaattcaagaccatcactgatgccattaaaagtatacctagtgggaacactaagcgtgaataattacattggagctggaaattataatgagatcatcaatattgagaagacaaagccttttgtcaccttgtatggggtaccagagaaaatgccaaacttgacttttgggggcactgcacaacaatatggcactgttgatagtgctacattgattgttgaatcagattattttgtggcagctaacatcatgatctcgaacactgcaccgagacctgatccaaaaacgccaggaggtcaagcagtggcattgcgtatttcgggtgacaaagcagcattttataattgcaagatgtatggattccaggacacaatttgcgatgataggaatagacattttttcaaagactgcttaattcaaggcaccatggattatattgtcggaagtgggatgtcactatatgagagtact

SEQ ID NO: 206778 - DNA, 561 bp, Glycine max
cgcactaggtcggatctacgtacggtatcggcatagctatgacgttgcatgcgctcattcgtaagctgggcgttctgcttttgctaagtgtattacgggaagcaaataagcacgggcgagagcgttgtaatcaaagtaatctacaaagagcaagtgtgaaaagaaggaatgatggaacaaatcaaacgcgaaatttccgtgatgcgtatggtgctacacccaaacgcggaggaaatcaaggaagtgatggccacaaagacaaaaatcttcttcgcgatggaatacgtgcgtggcggggaactcttcgccaaaatctccaaaggcacactcaaagaagatctaggctgcaagtctttttatgtgttaatcagcgccgttgattactgacacagcaaaggtgtattccaccgtgatctcaaaccacagaatctactccttgacgaagacgaaaaccttcaaatctacgatttcggactctccgctctgacggagcagattgggtacgatggactccttcacagccaatgcggcacccctgcctacgtgggacctgaagtgtta

SEQ ID NO: 206779 - DNA, 494 bp, Glycine max
ccgaggagatcccttccgccatcaagccctacaggaacttccagaaggagaagaagctcgaggacaacgacttcaccggcgccgttttcgaaggcaagttttacggccccgatgaggttaagaacctcgaatccttgcccacgcgcgctgagatttacgccacccttttgggggctttgaagagccctgcttccgctcttgttggcactcttcagtctcctgctagggaacttgttacggttctcaaggcgcatattaagaaccttgaagaacaacaaggtgttgcgcaatagataccaataggtgtgtagccttgtttatgtgttttctttattgcatttcagttgttctttgtttccttatttgtctatggatgtgtagattattattattatcatgtgttttcttgtgaagaaaaaaaaatgtagaatggtgcctaggaattgggaatgctggaaaatctgttccctttgaatcatgctatttcactattt

SEQ ID NO: 206780 - DNA, 616 bp, Glycine max
cgggcggtttgtcccacgcgcagtgctgatggacctggagcccggaaccatggacagcgtgcggactgggccgtacgggcagatattccggcccgacaacttcgtgttcgggcagtccggcgcgggcaacaactgggccaaggggcactacacggagggcgccgagctcatcgactccgtccttgacgtcgtgcgcaaggaggccgagaactgcgactgcctccaggggttccaggtctgccactcgctcggcggaggaaccggctccgggatggggacgcttttgatttccaagatcagagaggagtaccctgacagaatgatgctcaccttctccgtttttccttcccccaaggtctctgatactgtggttgagccttataacgctactctttctgttcatcagttggtggagaatgctgatgagtgtatggtgcttgataatgaggcgctctacgatatctgcttcaggactctcaagttgaccactcctagctttggtgacttgaaccacttgatctctgcgaccatgagtggtgttacatgctgtcttcgattccctggtcaactcaactttgatctgaggaaattgcccgtgaatcttattccttccctc

SEQ ID NO: 206781 - DNA, 563 bp, Glycine max
  unsure (1)..(563): unsure at all n locations
tgaaaggctaatattgaaaatgccgtacaacatagtgaaacctaatgaacgaacttgtggcatcataataagtggttattgcaaggaaggcaatatgccagaagccttgaggtttctatacagaatgaaggagcttggtgtggaatccaaatccagtagttttcaactctcttatcaaaggatatctagacactacagacacaaatggagtagatgaggcactgacgttgatggaagaatttgggatcaaaccagatgtagtaacctttagcaccatcatgaatgcatggagttcagcagggcttatggaaaattgtgaggagatattcaacgacatggtgaaggccggtatagaacctgacatccacgcatatagcatccttgcaaaaggctatgtgcgtgccggacagccacgaaaagccgaagctcttctgacttctatgagcaaatatggcgtacaaccaaacgtggtgatcttcactaccatcatcagtggatggtgtgccgcatgcaaaatggatcgtgcatttagactttgtgagaaaatgcatganatgggaact

SEQ ID NO: 206782 - DNA, 614 bp, Glycine max
  unsure (1)..(614): unsure at all n locations
cagattacaaggcagcaagtagagctctggacttcttctttggttggtattctgatccggttttctatggtgactatccggagagtatgaaatcttcagtaggttctaggctcccaaaattcacaaaagctgaatctgaaagtctaaaaaattccatagattttcttggtgtgaattactacaccacttattatgcggaacatgctgaacctgtcagtgccaaccgaaccttctacacagacatactagccagtctcagtacggaaaggaatggtctacatgttggaaccccgactgatttgaattggctctttatctttccaaagggaattcatcttcttatggcacacataaaggataaatacaagaatcttcctatttacatcactgaaaatggcatggctgaatcaaggaatgactcaataccagtcaatgaagcccgcaaggatagtatcatgattagataccatgatggacatgttagatcccttcataagcgatcaaggaaggtgttaatttgaaaggctattatgcatggtcattttcggacagtnttgaatgggatgctggttacacagttcgattcgggctcatatatgtggatacaagaacac

SEQ ID NO: 206783 - DNA, 494 bp, Glycine max
  unsure (1)..(494): unsure at all n locations
cctccaccccttagtccttttcctcaaagggactaccataatttttctctcccaaacaaacccaagagaggaagaaagaaagaaaagagtataaacacacaatatctctttaaactcttgacccttctcttggaggcatggctttcccaattctcttccttctcttcatttcccttcccttctcctccgcaaagctcaacgtcgattactacaaaaacacatgcccagacttcgaaaaaatcgttagggaaaacgtcttcaccaaacaaagcgctagcgtggccacagcaccgggtctccttcgcctcttcttccacgattgcatcaccgatggctgcgacgcttccctcctcataacttccaatgcatacaaccctcatgcagaacgtgatgcggacctcaacctttctctctccggtgatgccttcgacatcatagttaaaatcaaaaacgcattagaacttgcatgccctggtgttgngtcgtgttccgac

SEQ ID NO: 206784 - DNA, 499 bp, Glycine max
gcgtccttttttttgatgttttatgtatactttactgttggcacttgcacacatgatttgccctgaacatgacgtgatcttagacgcactgtctggcgaacatgatacgggggaacatgattggagcgcactactattcgtagccactgtctcaacaccctattgaatacggaaaactatgtagcactccaatttcaaaacttactgcctacataagaaaattatccacacagtagcatgaccgatcatttgataatggcaggtgcatcggaaggaaatgatgccacctaccagacagcatacagttttattagatagagaggctgttggcaattcctctgaaagtcaggcctttcccactggtaggaataagcccggtgtatggcatttgggccggtccattacggttcctaaggcttgaattcgcgttgctccctgagattttgacctgaatttccttcaagtcggatccaaactatttaaaggcttgaattgcctt

SEQ ID NO: 206785 - DNA, 406 bp, Glycine max
tagtgatataggagcaacatttgagctaagtgcaaaccacgccacaatttcattatttacattaacacccgattctgcttaaattggcacaccaccaattcttcgcgggaacccgaaccaataaaacaaactgagagtcccatgttgggaaaatcattaccattcattcttattcatcaacgtatacccttctgagcccacttgcaaatcttatcctctctctatggattgaggctgctgccttccacagagggattcaaggcagtagggtcgacccaattcctacaatggtggatggcacgacgcccagaatctaacggtcaagctagtgctctcatgtgattctggtgtcggcataagctgtattgctctaccattcggtcgcggtcagcttgatccaacatct

SEQ ID NO: 206786 - DNA, 494 bp, Glycine max
ggacgtcaacactgggagtttgatcctaatgctggaactccacaagaacgtgctcaagttgaaagggtacgagaggaatacaaaaagaaccggttttgcattaagcaaagcggtgacctactcatgagaatgcagctcacataggagaacacgtgtgggcccattctagcaagagtgaacgtgaaagacacggaaaacgtaacggaggaagcattgatcactacaatgagaaaggctatcaattactattcctctattcaagcccatgatggccactggccagcagaatctgctggccctttgatagtccttcaacctttggtaatggcactctatattacagggtccctaaatgatgttctaggaccagaacaccagatggaaattattcgttatttgtataatcatcataacgaagatggatgttggggattgcatatagagagtcacagcacaatgtttgggtcagcgttgagctacattgccatgagaat

SEQ ID NO: 206787 - DNA, 392 bp, Glycine max
ggcatgttggctagttggcgtccccaagaggaggttttggctcacccagcggttgggggattcttgacacattgcggttggaattcaacgttggagagtgtgtgtgaaggggttccaatgatgagttggcctttctttgctgaggcactagaccaattgtcgaattttgtgcatggagtgctggattgtgttggagatagaggatgttaagagggacaaagttgaagcacttgttcgggagtcgttggctggggtaaatgttaatgctatgaatgcgagatcttccatgtgtcagaattcggcacgctatgctgcgtctaatcctgatggatcttcacttgggaacatgtacaacgggttatgacaggtcctgatgatcacatttggtccat

SEQ ID NO: 206788 - DNA, 532 bp, Glycine max
atactctgacaaccagcctggtgtgttgatccaggtctttgaaggtgaaagagcaaggactaaagataacaatttaggtgaacattgatggctagtctgtacatactactgccttcagcggtgatgctcagattactgcgtgctttgacattgatgccaatgggattttgaacgtctctgccgaagataagaccactggccagaaaaataagatcactatcaccaatgacaagggtagactgtcaaaggaagatatcgagaagatggttcaagaggctgagaagtacaaatctgaggatgaagagcacacaaagaaggttgaggccaagaatgctttggaaaactatgcatacaacatgaggaacactgtgaaggatgacaaaattggtgagaaacttgatcctactgacatgaagaagactgacgacgcaattgatcaagctatccagtggctagacagcaaccagctcgcagaagcagatgaatttgaggacaaaatgaatgaattggaaagcatctgcaatctatcatt

SEQ ID NO: 206789 - DNA, 495 bp, Glycine max
aaattatatttttcttacaaaaaaaatggcaggtgaggtggtgaagaaggaagagtctctcaacctgaaagtcactaacaagagccatgttcaatcagaggagaaaattggaagaaaagagtaccaattggtcacttttgatctttcctacttggccttttactacaaccagaagctcttgttttacaagggtgaagatttcgagggcatggtccaaaaactcaaagttggacttggagtggtgctgaaggagttccaccaacttgctggcaagttagggaaagatgaagagggggtgttcagagtggagtatgatgatgacatgcttggtgtggaggttgttgaagctgctgtagctgatgatgaaattggcgtggatgatctaactgtggctgaaattagtaacacttaattgaaggagctgataccttatagtggtatcttgaatttggaaggcatgcataggcccttgctggctgttcagttaacgaagct

SEQ ID NO: 206790 - DNA, 495 bp, Glycine max
cacacctcatcgtttctctctctagatctctgtttcttctttttctccaaccttcgtttcaccaccacacttacattactttgtcgaaatggctccaccaattgagaccccaaacaaggtttacagctatcaacagtccccaaaccctcgtcttaacgagaggattctttcatccatttccaggagacacgttgctgcacacccgtggcacgatcttgagataggacccgaagctccaaagatcttcaactgtgtggtcgaaatagggaaaggaagcaaggtgaaatatgaacttgacaaaagaactggacttattatggttgatcgtatactttactcatcagttgtttatcctcacaactatgggttcattccacgtactatttgtgaggacggtgatcccatggatgtcttggttattatgcaagagccagttcttccggggtgctttcttcgggccaaagctattggtctcatgcctatgattgatcaggg

SEQ ID NO: 206791 - DNA, 497 bp, Glycine max
ataacacaaagcacaaagcaaagctcatccttgagttaaaaaatggcagcagcttcttccatggctctctcatccccatccttggctggcaaggccgtgaagctgggcccatcagccccagaagtgggaagggtgagcatgaggaagaccgtcaccaagcaggtctcctcaagaagcccatggtacggcccagaccgagtcaagtacttgggcccattctctggcgagcccccgtcctacctaaccggtgagttcccaggcgactacggctgggacactgctgggctttccgcagacccagaaaccttcgccaagaaccgtgaactcgaagtgatccactccaggtgggccatgctcggagccttgggctgcgtcttcccggagttgctgacccgcaacggggtgaagttcggagaagccgcgtggttcaaggccgggtcccagatcttcagcgagggtgggctcgactacttgggcaacccaagcctgatccacgc

SEQ ID NO: 206792 - DNA, 239 bp, Glycine max
gatggggtggttgtatggatcactcacagaagatgtgctaactgggttgagtatgaaaagaagaggttggagatcagagtgttgtacaccagatccaattgccttcacaggatgcgctcccggaggattactctctacaatggtaccacaaaagagatggttcactggccacactgtaatcttttttggaaagcattctcctcttatgtgcatgctctttggtaaaatccagttcagag

SEQ ID NO: 206793 - DNA, 602 bp, Glycine max
  unsure (1)..(602): unsure at all n locations
ctctgtgtttgcggctgaggattccgaacgagcgaccttcttcgtttctcgcaaagtttaagtcatcatgggtaaggaaaagactcacatcaacattgtcgtcattggacatgtcgactctgggaagtcaactaccactggtcatttgatctacaagcttggaggtattgacaagcgtgtgattgagaggttcgagaaggaggctgctgagatgaacaagaggtcattcaagtatgcctgggtgcttgacaagctcaaggctgagcgcgaaagaggaattaccattgatattgctttgtggaagtttgaaaccaccaagtactactgcacagtcatcgatgcccccggacatcgtgactntatcaagaacatgattactggtaccttccaggcttattgtgctgtccttatcattgactccaccactggtggttttgaagctggtatttctacagatggacagactcgtgagcatgctcttcttgctttcacccttggtgtgaagcagatgatctgctgctgtaacaagatggatgccactaccccgaagtactctaaggctaggtatgatgaaattgtgaaagaagtctctttctacttga

SEQ ID NO: 206794 - DNA, 617 bp, Glycine max
gacgaatgcattcgtcaaagtttagctctactgactcatgtgaccttctcatatgtgatgaggctcacagactgaaaaatgatcagacgataacaaaccgggcgtttgcaggggagagctgccaatgcccggtttgttatcgtctgctaacgttgaattttgttgcaggaacttccttgcacaatgacttagaagaattctgtgcaatggttaactttactaatcctggaatattgggtgatattgcacattttcgacgttactatgaggcaccaattatttgtggaagagaacctgctgccactgcggaagagaagaagctaggtgctgaacagtctgctgaattaagtgtcaatgttaaccggttcatattaagaaggactaatgcattgttatcaaatcacttaccacctaagatagttgaagttgtttgctgcaagttgactccactgcagtcagaactatataaacattttatacaatccatatatgttaagcgggcaattactgtagaactgaagcaatcaaagattttggtctacataacagctctcaaaagttgtgcaatcattccaagcttattctttgataccatacgaagtgggagtccaggaact

SEQ ID NO: 206795 - DNA, 554 bp, Glycine max
atttttcttcatcccccaaagtttcaatctttgtattcaattcaccctttctctctctccatggccacttgtgttgatgcctcaacccctctttctcggaaacctaacgggtcccaatccgatgatcattcctttaattacatgaaattctgccgaccctctttctctgatcgcgttccctgcatgcccatttgcaagaatcgcgacaccgccttcacacgtgtggaggagtttgacacacgtgtggagaatcatgttgaggttgacgttgtagagggtgttgatctttggttgaagattcaagaggaagcaaggttagatgttgatcaagaaccaatcttatccagctactatttcagttccattttgtctcacaaatccttggagagtgccttggccaaccacctctccacaaatttgagcagcttgagccttccaagcagcaccctttatgaccttttcatgggtgtttttgccgatgataatgacatcataggtgctgtcaaagatgatttgatagctgttaaggagagggaccctgcttgcataagtat

SEQ ID NO: 206796 - DNA, 513 bp, Glycine max
ccagcagcaacatttgcgcaaatcgaaattgattctctgccacttaacctaaaatggaaatctttccgattcccgccgaatcctacactctcggcttcatcggcgccggaaaaatggccgagtccattgcccgaggcgccgtccgctccggcgtcctgccgccttctcgcattcggaccgccgtccacttcaacctcgcccgccgtggcgccttcgagtccttcggcgtcaccgttctcccttcaaacgacgacgtcgttcgcgaaagcgacgtcgtcgttttgtcggtcaaacctcaattagtgaaagacgtggtgtcgaaattgacgccgcttttgacgaagaacaagcttttggtttcggtcgctgctggtaccaaattgaaagatcttcaggaatgggctgggaacgacagatttataagagtgatgcctaataccccagcagctggtggccaggcagcatttgtaatgaagctggggggatctgcaacggaagaagatgaaatattat

SEQ ID NO: 206797 - DNA, 314 bp, Glycine max
agtggccaagtgggtttattttatttttactggtagtactcttcttttgcaaggaaacttcaagttctcatatagactcggatgcattcatgatgctagctcgaaaagactgttatggccaaacattcttgtttactcctctcaaagaagagccccaagttctcataatagtgactgaaaattcgaccgaaatcagattttggtctaaaaaaaaaagtagaatcctaatctcttgattcaggaaagctctcggctgcgcttagcagcagcaacaacagcattcatcagtgttccacggaacccaccattttcta

SEQ ID NO: 206798 - DNA, 430 bp, Glycine max
aatccttgtgcaccgtaagggttgtgaagcaggcagagaagagccatggtgcacgtttccttctaccgaaactatgggaaaaccttcaagaagcctcgtcgtccgtacgagaaggagcgtttggacgccgagttgaagctggtcggtgagtacggacttcgctgcaagagggagttgtggagggttcagtacgctctcagccgcatccgtaacaacgccagaaatcttttgaccctcgacgagaagaacccgcgccgtatcttcgagggagaagcccttctccgaagaatgttccgttacggacttctcgatgagactcagaacaagcttgattacgtgttggctctcaccgtcgagaactttctcgaacgccgcctccaaaccctttgttttaagtctggcatggccaagtccatccaccacgccagag

SEQ ID NO: 206799 - DNA, 457 bp, Glycine max
gcaagaataccattgatcaccacaggcattggaacaaaacttgaatagtttagaaagaacagttcaaaaccatgatatctcaggcacagctttacctcaaaacaagaaacaaggatggcaaaattataacaagtcagaccatttcaaaaatctaaaatgtctaccaacacagataatataaaaaaaataacaaccgcaaggcctaaatatcagtagccattaataatttaatcttcgtcctcctcatctccatctccaccagcagccttcttagcagcagccctttggttctttctcttcacacgtcctggacgaccaccaccaagtggactggtcagtgagaagtcaatgtgcttctgcgaatcaaccctaaccatgaatgatgggatgttcaccacctgtctcccaaccctgatgtgcctctgcctgatgaggactctggcgtggtggatggact

SEQ ID NO: 206800 - DNA, 368 bp, Glycine max
ctgatacaatcgaccggatcatggaacgcgttgaagaaaaggagggaattccacctgggccgcagagacttatatatgcaggtaaacagcttgctgatgaccaaacaggttaagagtacaacattgggggtggctctgtactttacttggtgcttgcattggggggggggacttaatagtggagatgccatatcagaacccaaaggcctggaagggagctttatttctggcccggcttttttgaagacataatggttctttaatgggctgggtttttgtaattgtggctactattggtggtcaggaactcagtatctttttagtggtatgctatttaaaaccctaaggtggcctttataatgaatttc

SEQ ID NO: 206801 - DNA, 590 bp, Glycine max
ctgcttcctcgtagtacttcattgagagagacatggacactgtactaagtactacgctgctactcatgttggcatgctccatcgtgcatgttcttcgttcactacaagcaagaatgagaagaaaatcaaactacaatcttccaccaggaccctctcttctcaccatcattagaaactctaaacaactctataaaaagccacagcagacaatggccaagcttgccaaaacctatggccccataatgcgtttcaccataggccaatcaaccaccatagtaatctcctcaatagaagccacccaagaggttctccaaacccatgactcattattctcggacagaacaaaccccgacatcacaacctcgtacaaccacaaccgttacagcttggtttttctccctgtctcacccctctggcaagaactaagaaaaatctgccacggaaacttgttttcggcaaagacccttgacgcatgcacggaccttaagcgcatgaaaatgaaagagcttcttaccgatatccgccaaagaagcctcaacggcgaagtggtggacattggaagagcagcccttatggcatgcattaacttt

SEQ ID NO: 206802 - DNA, 571 bp, Glycine max
gtcatctttgtcatattccaaaattaagcttgcattattcaccagaatggctaattcatatgaaaacaacttcccccctcagaagcaagacactcagcctggcaaagagtacctcatgaatccaccaccccaatacaacagctcccaatacaagccatcaaataaacttcagggaaagatagctgtagtaaccgggggtgattctggaattggacgagccgtgtgcaacttgttttcattagaaggtgctactgtgatcttcacctacgtgaaggggcaagaggacagggacgcgagtgacacgcttgagattataaaaaaagctaagactgaagatgctaaagatccattggctatacctgttgacgtgggttatgaagagaattgcaagaaagtggtggacgaggttatcaacgcttatggccgcattgacattctggtcaacaatgcagctgagcagtacgagagtgattcccttgaagatattgatgatgcaagactcgagagggtcttcagaactaatatattttcccatttcttcatgaacaaacatgctcttgagcacatgaag

SEQ ID NO: 206803 - DNA, 511 bp, Glycine max
gaaagaatgagtgattggcaaaagcgtcttgtctctcagctagggaaaaagatggttgaaatgactggagactatactcctgatttgacggctctcttgtcggccaatatcatcatatctactcctgaaaagtgggatggaataagtcgtaattggcatagccgtagctatgtcacaaaggttggacttatgatattggatgagattcacttattgggggctgatcgtggacccattcttgaggttattgtttctaggatgagatacatatcatcccaaacagaacgtgcagtacggtttgtaggtctttctacagctctggctaatgctggtgatctagctgattggttaggcgttgaggaaattggactcttcaatttcaagccaagtgtgaggcctgtacccctggaagttcatattcagggttatcctggaaaatattactgcccaaggatgaatagcatgaataaaccagcatatgcttgcatatgcacacattcacctgcaaaac

SEQ ID NO: 206804 - DNA, 537 bp, Glycine max
gcttgcggagatccattccttcacaatttataaatgttcagacatctttcaatccttgcactgtaaacctttatacttacaaatggcgacacgacttggaaaataaataaagaaaatctaaaaacaagatcattatgattacctataaaacaattaaatgcaagagattgcaaatcctatggatatacatattgactttttctcaagttaaaaaaaaaacattttttggtacaacctgggcagccccaaccctcttcaagaaatcttacgtttacgttgtatgtacaatggcactgaccaatggtgtctccactacttaacatacatcaagttcttcaatggagtgttcttgttcaaatccaatgtaacaatcggagactaaaatcagttttacgccctgaagattagctggagtcagaggcaacttcattgaggtaactaagtgatctgaaacagaaactcttttcaaagcatatagctcagacgtagaggtattaccaagaaccaaccaccattgttccctctttatctttggaa

SEQ ID NO: 206805 - DNA, 485 bp, Glycine max
cgaaaatattcatcacacagggttttggtttattattccaatttttggttttcccttttgttggatattagagtgtgtaagaaagagaagagagagaaatgggaaggggaagagtggagttgaagagaattgagaacaagatcaacaggcaagtgacctttgcaaaacgaaggaacgggcttttgaagaaagcttacgagctttccgttctttgtgatgccgaggttgctctcatcatcttctccaatagaggaaaactgtacgagttctgcagcagttcaagcatgctcaaaacgctagagaggtaccagaaatgtaactatggtgcgcctgaggctaatgtgtctacacgggaagccttggagttaagcagtcaacaggagtacttgaagctgaaggcacgttatgaggccctacaacggtcccagaggaaccttatgggagaagatcttggtccttaagcagcaaagagctcgagtctcttg

SEQ ID NO: 206806 - DNA, 601 bp, Glycine max
  unsure (1)..(601): unsure at all n locations
ggctcatcccgtcaaagaaaaaaatgacgggaaagctataaatggaggtaagaacgaacgaagttgcaaagcaaagaatagaagacgaagggtatagagctcataacaatccatttggtcttaatttgtttctgttttcttcattctgtcagccatatatggcttccttggcgacggtgcaagatgaacgttgcgttcagagaagctactggattgaacataccacagatttgtccgtagagtcaatgatgctcgattccaacgcctctgatctcgacaaggaagaaagacccgaagttttgtccctactaccagcatatgaaggaaaatcagttgtagaacttggagcaggtattggaagattcacaggtgaattggccaagaaagctggccagttgcttgctgtggatttcattgagagtgctataaagaagaatgaaagcattaatggacaccacaagaatgtcaagttcatgtgtgctgatgtcacttctncaacttgcatatttctgaagatcagttgatctgatngtctccaatggttactcatgtatctttcagataaagaggttgagaatttagctgncaggatgatcaaatg

SEQ ID NO: 206807 - DNA, 340 bp, Glycine max
aattcggctcgaggcgtggcctcacttctgctgggaaaagcaataggggtttacgtggcagaggacatctctaccacaaaaatcgtccatcacgcagggcaacctggaagagaaacaataccctctcccttcgtcgctaccgttgattttgttgcagttatcgtatgttgcttcattttctgagtatttggaggaaaatcgtcagttttggatccctgaatcatgccttttttccccgataatgtctttagtactaaaacagcagagattaatgatgtaagctttctactatgtgccgggattgtttttatttattttgttcgacttttttcgttgtggc

SEQ ID NO: 206808 - DNA, 330 bp, Glycine max
gccacaacgaaaaaagtcgaacaaaataaataaaaacaatcccggcacatagtaaaaaacttacatcattaatctctgctggtttagtactaaagacattatcggggaaaaaaggcatgattcagggatccaaaactgacgattttcctccaaatactcagaaaatgaagcaacatacgataactgcaacaaaatcaacggtagcgacgaagggagagggtattggttctcttccaggttgccctgcgtgatggacgatttttggggtagagatgtcctttgccacgtaaacccctattggttttcccagcagaagtgaggccacgcctt

SEQ ID NO: 206809 - DNA, 471 bp, Glycine max
ggaaaacaaaccagaggaacccatggcaaaggagaaaaacccagaggaagaagcaacccaagagaaaaaaccggagcaagagtccaaagaggaagttgctgctgctgctgctgctccgccaccgccaccgacaccgtcaccgtccgagattgtgctcaaagtgttcatgcattgcgagggttgcgcccgcaaggttcgtcgctccctcaaaggattcccaggtgtcgacgatgttgtcaccgattgcaaatctcacaaggtggtcgttaagggagagaaagcggatccgctcaaggttttggagagaatacagaggaagagtcacagacaggtcgagcttctttctccgatcccgaaacctcaagaggagaagaaggtccaagaggaagagaagcccacgcccaaccccgaagagaagaaagaagagcctcagattgtgacggttctgaaagttcacatgcattgcgaagc

SEQ ID NO: 206810 - DNA, 364 bp, Glycine max
agaaaaggatgatcgtgtcgttatcaaagatcccaaccctaacttgttttttgctagtcaggtaattaataatgcttgtgctacccaagcgatcttgtccattcttatgaattcaccagatattgatattggtccagagctgacgaaattgaaagaatttaccaagaatttccctcctgagctcaaaggtttagccatcaataacagtgaggccatacgtacagcccataatagctttgccaggccagaaccttttgttcctgaagagcaaaaggttgctagcaaaaatgatgatgtttaccatttcataagctatctacctgttgatggggtactatatgagcttgatggattaaaggagggt

SEQ ID NO: 206811 - DNA, 409 bp, Glycine max
gagtaagtaacaatgacatgtaacaaagatggcacaataacacagatattcccatagagattattcttctacagattctcatccacactaaacaaacggtcttatctggggaatcggctactagaagaccaaccgaacgatgctaacattggaagagcccaagcgcggagcgcttttgaaaattttgaggactgagatccaattgctgctgggcttctatatgaacctctaaaatctcagggatcctctgtttgagataattagcgactctggcaaggacagtggaacgcttgtgccaaaaccgaccactaaggctaattttcacaaaaggcccatccaagtcagctagttcaaccactcctgtcatgccaacagaggtgtcaaagatttgacccagctcctttcgagc

SEQ ID NO: 206812 - DNA, 510 bp, Glycine max
ctcgagccgcaaaatatgactgccttctttttgatttagatgacactttgtatcccctcaaatctggtcttgcaaaatcatgtctccaaaatattaaagactacatggttgagaagcttggcatacaccctaacaaaattgatgacttgtccaacctcctttacaagaattatggaacaactatggctggtctaagggcaattggatatgactttgactatgatgaatatcacagttttgttcatggaagattaccttatgagaacctaaaaccagaccaagttctgaggaacctgttgctgagcctaccctatagaaaacttatcttcacaaacgcagacaaagttcacgcggcgaaagcgcttaacaggcttggattagaagactgctttgaaggaatcatatgctttgagacccttaatcccatccacaagagcattgtttctgatgatgaagatgacattgagtttgtaggttcaagaaccaccaatccaaccaccacttgtaatg

SEQ ID NO: 206813 - DNA, 435 bp, Glycine max
atcacaacaacatggccgaacgtggaggcggagaccgtgccggtttcggtcgcggctttggcggtcgtggacgcggcggcgacaggggacgagggcggcgcagggcaggagggcgccgcgacgaggaggagaagtgggtcccagtgacgaagctggggcgcctggtgaaggaggggaaaattccgagcctggagcagatctacctacactcgctcccaatcaaggagcaccaaatcattgacaccctcgtggggcccaccctgaaggacgaggtgatgaagatcatgcccgtccagaagcagacccgcgccggtcagcgaacccgcttcaaggccttcgtggtggtcggcgacaacaacggccacgtcggtctcggagtgaagtgcagcaaggaagtcgccaccgccatacgcggcgccatcattctcgcaaagc

SEQ ID NO: 206814 - DNA, 511 bp, Glycine max
gaaagttcagtaaataatatccattcaactaaatttgagaaaaaacaaaaagcatggagatatataatatgtccttcaatagaaaatgaaataacaaaaggtagcaaaacatataattactgggtcctagcatgcttaagacgaggcacaatcatccgataacatcaaaactgctgctgcttctgctaactcaagccttcaccctttcctcctcgaggataagggccttccctgttggctttgccaatagatcagagtactcttggaatggtgatttggagaaccgagtctccttccagaattcaggtgttagaaaaccgtaggttttcagcaaacagtcaaaagtagccttgacgaaatttccgagggttttggtggaacccctggaggaagtgaagacgtcatcgattccagcgaactgtaagaccttcttggggaccctagcggcgacgattccggacccacgaggggctgggaccatgcggactgtgacggagccacactttccggt

SEQ ID NO: 206815 - DNA, 550 bp, Glycine max
aatcaagtcaacccctctttcaatttcaaccctatatctgctctctttttcttcatcatttgtttttgggtctctctgtttccaagtttttgagttatggcatcgaaacgcatcgtgaaggagctcaaggatttgcagaaggaccctcctacatcctgcagcgcaggtcccgtggcggaggatatgtttcactggcaggcaacaatcatgggacctcctgatagcccatatacaggtggcgtattcctagtttcaattcattttcctcctgactatccattcaaaccaccaaaggttgcatttaggactaaggtattccacccaaacatcaatagtaatggaagtatatgccttgacattctaaaagaacaatggagcccagcactaaccatttctaaggtccttttgtccatttgctcattgttgacggatcccaaccctgatgacccgcttgtgcctgaaattgcccacatgtacaaggctgacaaggctaagtatgaagccactgctcgtagctggacacagaagtatgccatgggataatcatgct

SEQ ID NO: 206816 - DNA, 538 bp, Glycine max
ggtgccctaggttcttatttgccaaatgcttcatggcacaataggaaaatccaaaaagaatataattttttgaggtttcggtggccaagtttgaaccaccattacaaaagcattgaaggagggtgtacatgtaaaaaatgtaatataaaatttgttgtgaaagcgacctctgaaaaatcttttgagtctgaacctcaagcttttgatccaaaaagcattttggactctgtcaagaattccttggatgctttctacaggttttccagacctcacacagttattggcacagcattaagcataatttctgtgtccctccttgctgttgagaaaatatcagatatatctccattattttttactggtgtgttggaggctgtggttgctgccctgtttatgaatatttatattgttggtttgaatcaattgtctgatgttgaaatagacaagataaacaagccgtatcttccattagcatctggggaatattcctttgaaactggtgtcactattggttgattctttttcaattctgagtttt

SEQ ID NO: 206817 - DNA, 526 bp, Glycine max
catcccaaaagaaatatatcttcatttaaattagcaattaaaaacttaaaactaatgtagcgactccaagccggcctgtgacaaaggcagcaccatttaaacaaaactaattctcaagtcaatattgccgctgcatcctcatctaacaaaaggaatgagtaagtattctgcataaaatagcttccaaataaacatatagaaggatgttatcgaagctttgcttttcaaatctacagatttggcatgaaaccagagaattgaagccagaacagcgtgtcccaaacccgtgacaattttgctccaaagacaaggagatgcagttcccaccaggagggcgactccataagctatttcaagaaggataacacaagtccagaataccggcttctgacctaaacgcactgaaaaagattggatgccaaatactttatctccttcaatgtcaggtatatccttaaacagtgctataactacagagaagaagctcatgaatgcagtagcaaaaatcaatgatcttgaaaagaca

SEQ ID NO: 206818 - DNA, 586 bp, Glycine max
caaagcgcaaagcgcagttgttgctctttgaactcgaacgaagttctccgaagtcgaaacactcgttcgattcgctgaactctgaagttaatttttgttgcgaaaatgtcggtggcgaagaagttgattagatgcgtcatccttgacttggacggcacgctgctcaacacagatggcatcgtaggcaacgttttgaaggttatgttaggtaaatacggaaaggaatgggacggaagagaagctcagaagataattggaacgacgccgtttgaggccgctgctgcggttgtgcaagattatcaacttccctgctccgccattgaattcctctccgaaatttcgccactcttctctgaccagtggtgcaacattaaagcacttcctggtgctaataggttggttaaacatttgaagagtcatggagttcctatggccttggcgtcaaactctccaagggaaagcatcgaagccaaaatatcctatcatgatggatggaagaattctttctctgctataattggtggagatgaagtacgaacagggaaaccctttcccctgaatatccttgagctgctaggaggtaaca

SEQ ID NO: 206819 - DNA, 506 bp, Glycine max
ctggctctctttatgcatgttgcaaattacatagcatcggcatgattatgaatgatagggactaatatgcaaactgatgtccagtagaataactggattatgcccttacaacgatcaacaccaaggtcctattcgacctgaagctaagcggatgataagattgttctacgagcttttcgaatacgaatcattcttaaaacttgaatataacgggaggatcaagagccctatgggcatctgttcgatttcatgaatttgagctaccaccctttgaagggatgaaaaattgacctggggacgtttgtaaccaactatatcaagccgactttcttacccatagaaatgtcgattaaagccatggagtaaccatggttctatagcccaaaatttgttgtagaaatatggatgccaaccaatgatcatcaccattttaaaagcacctcttgccgccatccagctcatccggaataaacacttgcacgatactgtgaaaggatatctgaata

SEQ ID NO: 206820 - DNA, 527 bp, Glycine max
aacataattgataatccttaaggacatcaaacagaaaatcccctgaaaacgaggtctttgagttcacaaaaggataccctataataaaaacctatatatagtcctatactactgcattagctacaagataaaataaactccacataagctttaagcaggtttcttgctgtggactccatcaccaacatcacgatcacaattcctgaaagcaaatacaaaaatcaaaatgataataatatacatatacattcagaaacatgcagggatgcaaaaaaataataataataaaactagaagcagaatgaaaattacgaacttgtagctttatttacataaaaggggagataaagggtgttcagaagactcctgccatggaaggcaggtcgtccaagcttcaaaggttcatagggtttccggcggcgtaatgagttgcgtctccgccgagcaaagacgccaatgtagcatcagcccaggctttatcaagaaaagaaggggtctcaaagaacttgagctgggattcaatgtct

SEQ ID NO: 206821 - DNA, 563 bp, Glycine max
  unsure (1)..(563): unsure at all n locations
atatcatttcacacacctccttgttcttcttgttgttttttttcttccctctcttctctttgtttttcttctccttcggttgaatcaatgggtgcagaggttaagatctggaatcccgttgaagtcgctgagcaagctcgccatgactacgcttcgcagattcatccctcacatctcaccattgatccctccctcgagcttcctcaaatgacacctctcgtcctaaagttgtgcaaggatatgttcaaggcgtggtcgaatttggatgattcttgctttgttgttgagaaaatttccgggggcataacaaatttgttactcaaggtttcagttaaacaagaaaactgcattgaggaaactataactgtcagattgtatggacccaacactgagtacattattgatcggcagagggaattgcaggctaccaaatacatcacagctgcaggatttggtgctaagtggctcggcatatttgggaatggcatggtgcaatcttttataaatgcacacactctatctncttcagatatgcgagagccaaagctggctgctaaaatagc

SEQ ID NO: 206822 - DNA, 517 bp, Glycine max
atgatgacaacaatacaagaaaaagaatgatatatcaatttatatagcctatgtactaggattacaacatagaatgtagaagagcctgtagctcaaacataaacgcctaattagccattattgtgataagcgtctaaaaatgatatgttacacaaacattaaactacatgaatcaggggactcatgctacaaacttgacgtacaaaaatcccacgaatgactgagtataagtataatctatctatctactcatctcattcttgcatcctgaaaggtaggactgtgccagcaagaaatacttctctttgtgccttttgtactcgtggtatcgaaggaaaaagtaaccaagataatcaaattcaattgcagacatctttgcctgaattagaccccacaatgcccagaaaatgtgagaagcaagggaaaatgtatttgcctcaacatacaaagtttcaagatctttctcagacacctcttggggtctttcaggtttcaagtaatgcctgaggaaatgata

SEQ ID NO: 206823 - DNA, 557 bp, Glycine max
tggtgctaaaaaggagcctttagttacttgggtgcaccattggctagaccattcttaggtccatttgcagccttttcagatggtctagccaatggtgctaaaaaggagcctttagttacttgggtgcataaaaattttcagggaatactcaccaacgagactaggtgcctgcgatgtgaaactgtgacagctagggatgaaacattttttgatttgagccttgatattgaacaaaatagttcaattacaagttgtttgaaaaacttcagttcgacggagacattgaatgccgaagacaaatttttttgtgacaagtgctgcagtttgcaagaagctcagaagagaatgaagataaagaaaccacctcacatcttggtcatccaccttaagcggtttaaatacattgaacaactgggtcgctacaagaagctgtcttaccgggttgtcttccctcttgagctgaaattgagcgatactgctgaaaattcagatattgagtattctctatttgcagtagttgtccatgttgggaagtggcccaaccatgggcattatgt

SEQ ID NO: 206824 - DNA, 522 bp, Glycine max
ctcgagccgattcggctcgaggaacgatcaggagttccgcggacggaggaagaacacaagttgtttttggttggattgcagaaagtagggaaaggtgattggagaggaatctccaaaaactacgtcaaaacgcgaactccgacgcatgttgtcagccatgctcagaagtactttctccgacgaagcaacctcaatcgccgtcgccgtagatccagcctctttgacatcaccaccgacacggtctctgcaattccgatggaggaagaacaggtccagaatcaagacaccctgtgtcattcacaacaacaacccgtgttccctgctgaaactagcaaaatcaatgggtttccagcgatgccagtgtatcagcttggcgttggctcttctggagtgatttcagtccaaggtactggatacccaatggaagaactcactctgggacaaggaaacgctgaagaacacaatgtgccaaacacggcctctacagtgtctggtatcatcaccccctgttcttctagttct

SEQ ID NO: 206825 - DNA, 510 bp, Glycine max
attttaatcacgcgcacatcatcacaacacaacaattcactaagctaaaatcacttcatcatggcttcctcgtgtgcttcctctgccattgcagctgttgccatctccacaccaagttcccagaagaatggatcactcttgggaagcacaaaagcttcttttcttagtgggaggaaactgaaggagaacaactttacagcaccagttggagcacgatccagcactacagtttgcgcagttgctgagcctgataggcctctgtggctcccaggcagcacccctcctccatggctagatggcagtttgccaggagattctggctttgatcctctaggtcttgcatctgatcctgagagcctgagatggaatgtccaaacagagcttgtgcactgcagatgggccatgttgggagctgctggcattttcatcccagaattcctcacaaagattggtatgctgaacacccctttatggtacactgctggagagttggagtacttcacaaacacc

SEQ ID NO: 206826 - DNA, 462 bp, Glycine max
gcaaaaactgtgattacttcctgaatttacattaaatgcatctaaaccttaaataggtatttgtacattgaatcttcaatctatgcatgacaatagaagtagccattttacaagctttcaccaacataaacactcccacctaaaaccatttaagcgttacaacttagttaaaaaggtttgccaatgtttctccaaggcttgcaatcatagagttgttccaacacttctcacttgggagtgaaagcagcaaaaatagtagcatggccaggatctgcaaggtgagcaaagaggttgtcaataggaccagtgccagtgtaaatgtgctggaaccatgcccccatcacagccaacatggccaacctcccattcttgatctcctttgctctcaactccttgatcttctcaggagaaccacttccccagccaagtgggtcaaaccaaagcccacctgggtacccaaca

SEQ ID NO: 206827 - DNA, 569 bp, Glycine max
cgaaagggggccaagtatcattccaccgttaacacattacacaactttaccatctccatctcctctgtgttatattttgtcctcttttattctcatctgatcacacacactctgtcacgcacccaccattctactacactcctctctctcactctcactctctgctccgtgatagctgtaccacgtttttctctccatctcgaaacaccatctctgcctcagtcccaacccatcaccattctcatggctgctctagctctagcacttcttcttctggctttcaccggcacttcaagtgctacatggtgcgtttgcaaggatggaagcgacgcgatcctgcagaagacgttagactatgcttgtggagctggtgctgactgtaaccctcttcacctaaacgggccttgttttcagcccaacaccgtcagggcccactgtaactacgccgtgaacagctacttccaaaagaaaggtcaagctcaagggtcatgcgaagttgcgggaacagccactgttactgcatctgaccccagctctagcggttgtgtctacccttctagcgtcagcgc

SEQ ID NO: 206828 - DNA, 355 bp, Glycine max
accttctgaggttaaagcaatatacaaagagagagagagagagaaaatgatgaaggcggcgatgctcagatctctacactccgtcgccacccgcggtgcctttcatattttctcggcgtggtgacgcctccgagccggtgccggagcgcaaggtaacccttctcggcgccgtcggcgggattggaaaagcctctctccctctaaatgagcttaatacccatagttcgagcctctttctttacgatatagccggaactccccggtgttgtccccctatttaaccccacttacaccacttctggggtatggggtaccaaggggacgaaaagtttggaaaagcatatggagggtgccg

SEQ ID NO: 206829 - DNA, 365 bp, Glycine max
gtttctcagtcatctttggcatatatcaaaattaaccttgcattattcaccagaatggctaattaatatgaaaacaacttcccccctcaaaagcaagacactcagcctggcaaagagtacctcatgaatccaccaccccaatacatcagattccaatacaagccatcagataaacttcagggaaagatagctgttgtaaccgggggtgattctggaatcggacgatccgggtgcaactaggtttcattagaaggtgctactgtgatcttcacctacgtgaatgggcaagaggacagggacacgagcgacacgcttgacattataaaaatagctaagactgaagatgcttaagatccattggctat

SEQ ID NO: 206830 - DNA, 469 bp, Glycine max
ataatagatcttgcttcaaatatatttcaagtagtacattttcttaggtttatacgtttgaaagcaatatttatgcttgctttcaacgaatcttcatccagacatatattatacattcatacatatcgatagaaccgtgctcattcactgccattcgtaacatagtgatggcgtagacaagaaccacactgagtcaatgacatttcatataccagtctcgattaatgaggtatcatatatatatccgccaattcatcaagcattcacaatgattccaccattggggtggaggacttggccagtaatgtaagaggagcatatgttgctagcaagaaagacatgagagggagcaacttcaataggttggccagctctcttcattggcacatgcgaaccaaattgaacaataggttcctcgtgcatagttgctactattaacggaggccagatgggtccatgtgcaaccccg

SEQ ID NO: 206831 - DNA, 523 bp, Glycine max
atgattttagggttctcactgccgttgaattggggatgcggaatcatgaaatcgtacccaccgaactcatcgaccgaattgcgcgtctcaagcatggaggcacgtacaaggttttgaaaaacttgctcaaacacaagttgttgcatcacgactcttctaaatatgatgggttccgccttacctaccttggttatgattttcttgccattaagactatggtgaacaaaggagtgtttgtagctgttggacgccagattggtgttggaaaggaatctgatatatttgaggttgcccgtgaagacggaacagttctggctatgaagttgcataggcttggaagagtctctttccgagccgtcaaatctaagcgtgactacttgagacatcgcagtagttataattggctctatttgtctcgcctcgctgcacttaaagaatttgctttcatgaaggctttggaaacacatggctcccctgttcaaatgcaatagaaagcaatagacattgtgtagtcatgtcactc

SEQ ID NO: 206832 - DNA, 555 bp, Glycine max
  unsure (1)..(555): unsure at all n locations
ctctctctctcctgtatttgtcttgattccgatgcgaatggtaattgcagaaaccccaaccctcctttcctctccctcctcctagatcgagtcagaatcatggccaaagctgaaggtggcaaggaaccaataaatgaacaagcagtagcaaatatgtatgctgcaatgaggtctgagctcaaccaaatttactccaaaataactgaactggagatggaagttagtgagcacacattggttaccaatgccattcaaccacttgaccaatctagacgatgctatcgtatgattggaggggtgcttgtggagagaaccatcaaagaggtcttgcctgctgtgcagcgaaataaagaaggactcgaagaggttgtggcaaggcttaacgaggcgttggaaaagaagaaaaaggaaatttctgagtttgaggctaattataaaatcaggataaggaaggctgatgctgangtgaaggatgaatctggtaagaaggaagggtctgctcaaggggttcatcgtggtcctgcangtggaagtgaatgatttggctatttttat

SEQ ID NO: 206833 - DNA, 508 bp, Glycine max
ggctcgaggaactaccctaaacgacgccgcattcaaatttccgccaccgacgcattaaccccttccaagccccgacggttcccgagtggtgatggcggaaacgcacgaagacacaccgaaagaaaccgttcacaaagaagaagaagaagaggaccaaagcttcgaagagctcggcgtggacgctcgtctccttcgcgccctaatcaagaaaagaatcgagaaacctactccaattcagcgcgtcgcgattccactcattctggaaggtaaggacgtggttgcacgtgccaaaacaggttcgggaaagacactcgcgtaccttctcccgttgcttcagaaactgtttactgctaactctgatcggaagaaactcgcgccaaatgcttttgttcttgttcctactcgcgaactaagtcaacaggtatatgcggaagtgaagtctctggttgaattatgcagagttcagctgaaagttgtgcagttgaatagtaacatgcttgctaatgac

SEQ ID NO: 206834 - DNA, 594 bp, Glycine max
ccaggcgcacgttagcacaaactatcatggccacggcaacagcagctgccacctcgtcctttatggggacgcgtctcctggaggctcactccggagcggggcgagtgcacgcccgattcggcttcggcaagaaaaaggctcccgccccaaagaaagcctccaggggatcgggccgagacaccgacagacccctttggtatccgggcgccaaagcgcccgaatacctcgatgggagtcttgtcggagactacgggttcgatccgtttgggctagggaagcccgcggagtacctgcagctcgagctggactcgctggaccagaaccttgcgaagaacgtggctggggacatcattggaaccaggaccgagctcgcggacgtgaagtccacgccgtttcagccctacagcgaggtgtttgggctccagaggttccgtgagtgcgaactcatccatggaaggtgggccatgctcgccactctcggagctctcactgttgagtggctcactggtgttacatggcaagacgccggaaaggtggagctagtagaatggtcatcataccttgggcaaccacttcattctcaacaccacactg

SEQ ID NO: 206835 - DNA, 417 bp, Glycine max
gctaattgaaggcatgggaggtggtccagagaaatcaaaatctccttcaacttcgtcttccctttaggtgtaaaagtcacagctaacgatatagaaatgaaaccgctaactgttaacactgaagattctttttccagttttactggaacttgcttctaacaatgatattgaaggcttcaaggtccttttagagaaggattcttctacgatcaatgaggttgggctctggtatggccggcaaaacggatcaaagcaatttgttcttgagcacagatcccctttgatggttgctgccacttatggtagcattgatgttatgaagatggtacttttgtgccccgaggctgatgtgaatttcgcgtgtggggcgaacaaaaacactgcccttccactgtgctgattctggtgggcctacca

SEQ ID NO: 206836 - DNA, 478 bp, Glycine max
gcttgaacacaccgtgtttcggagagagacgtcgcaatggggaggaggcctgcaaggtgttatcggcagataaaaaacaagccataccccaaatcacgcttttgccgtggtgttcctgatcctaagatcagaatttatgatgttggtatgaagaagaaaggtgttgatgagtttcccttctgtgttcatctggttagctgggaaaaagaaaatgtttcaagtgaagcattggaagctgctagaattgcatgcaacaaatatatggcgaaatttgctggaaaagatgctttccacttgagagtccgagtacatccattccatgttcttaggatcaacaaaatgctttcatgtgctggagctgataagcttcagactggaatgagaggtgcatttggaaagccacagggaacatgtgctagagtcgccattggtcacgttcttctttctgtccgctgcaaggacaggaacagtcatcatg

SEQ ID NO: 206837 - DNA, 465 bp, Glycine max
tgtcgcccttttttaccttttttgaaaacactattggttccattttttttggtgtataacagattcgatcaacttaacatagtgtaatagtttaatactacgagtcgagcaattaagaaactcagattgagtcgaacacaactattgtggtcaaagcccactgtttccatgtgacaagccatcttagcagtcgcagtagcactagattgaaaagctcgtcctggttagacggtttgccagtggtccatggcacccacgaagcttagcattcacaccatgaggcacaatcctgctctctgacttgtacttgagataatcagcacggctaaacttggtgaaaccccatttccggctaactatgatcttctgacgaccagggaacttacacttagcacgacgaagagcctgctgtgcatgatgactgatgctgtccttgcagcggacagaaagaagaacctgaccaat

SEQ ID NO: 206838 - DNA, 438 bp, Glycine max
gggaattgctcaaggagatggttgatgatgcagggatacagccggatgtggtgtcttataacatactcattgatgggtgtatactggtggatgacagtgctggggctctttccttctttaatgagatgagagcaagaggaatagctcccaccaagattaggtacactactttgatgaaggctttcgcatactcgggtcagccgaagcttgctcacagagtgtttaacgagatggacagtgaccctcgggtgaaggtggatttgatcgcgtggaacatgttggtggaaggatattgcaggttgcggttggtggaagaggcgaaaaaagtggttcacaagatgaaggagagtggatttcaccctgatgtgggcactgatggcagtttagccaacggaattgcattggcaaggaacccggagaggcacttctgctttggaa

SEQ ID NO: 206839 - DNA, 463 bp, Glycine max
ctctctctctcctgtatttgtcttgattccgatgcgaatggtaattgcagaaaccccaaccctcctttcctctccctcctcctagatcgagtcagaatcatggccaaagctgaaggtggcaaggaaccaattaatgaacaagccgtctcaaatatgtatgctgcaatgaggtctgagctcaaccaaatttactccaaaataactgaactggagatggaagttagcgagcacacattggataccaatgccattcaaccacttgaccaatctagacgatgctgtcgtatgattggaggggtgcttgtggagagaaccaataaagaggtcttgcctgctgggcagcgaaataaaaaaagactccaagagcgtgtggccaggcttaaccaagcggtggaaaagaagaaaaaggaaatttctgagtttgaggctaattataaaatcacgataaggaaggctgatgctg

SEQ ID NO: 206840 - DNA, 545 bp, Glycine max
tctcactcttgttcttcggtctcctcctattctccgctgccgtagccaccgtcgaacgaatggacgatgaagacaaccttctgatccgtcaagtggtgccggacgcggaggaccaccacctgctcaacgcggagcaccacttctccgccttcaagacaaagttcgccaagacctacgccacgcaggaggagcacgaccaccgcttccgtatcttcaagaacaacttgctccgcgccaagtcgcaccagaaattggacccctccgccgtccacggcgtcaccaggttctccgatctcactccgtctgagtttcgcggccagttcctcggcctgaagccgctccggcttccctccgacgctcagaaggctccgatccttccgaccagcgaccttactaccgatttcgattggcgcgaccatggagctgttaccggcgtcaagaatcagggctcgtgcggatcgtgttggtcatttagcgccgttggagctttggaggtgcccattttctttctaccggtgggctcgtgagccttaatgagcagcaac

SEQ ID NO: 206841 - DNA, 383 bp, Glycine max
acttgcaataactataggtaaccgcgggtaaaatttgtagctcaactaattaacataaatacttacggctttaatgcataaccgagggcttaacaagaaccgcctccataacatatttcattactgcaatttttgacgtacgccctatactggggcccctaccatgttaaggcatccatccgtatgtttaaggggtaaaaacgtgtatagcatctacagttgaaaccatagagctcaccccacatacattgcaatctatgcaaatctttgaatatcctttttttacccagctttccccccaagaattttttatgagccagttagggctttccttaaaacgaatcggagcattagcaccagatccatagcccacccaaagaacc

SEQ ID NO: 206842 - DNA, 531 bp, Glycine max
gtggagggcaaccagctaatactgttatatgagtacatggaaaacaattgtctatctcgcattctttttggcagggatccaaacaaaacaaaacttgactggccaacaaggaagaaaatttgtcttggtatagctaaagctttggcttatcttcatgaagagtccagaataaaaatcatacatagggatgttaaggcaagtaatgtattgctcgacaaggattttaatgctaaagtctcagattttggtttggcaaaacttattgaagatgagaaaacccacattagcactcgagttgcaggaaccattggttacatggctcctgagtatgcaatgcgtggctatctaactgacaaagcagatgtttatagctttggggtggttgcactggaaactgtcagtggaaagagcaatacaaatttcaggccaaacgaggattttgattaccttcttgattgggcatatgttctgcaagagaaagggagtcttctggagctggttgatccaaatttgggttagaataattaactg

SEQ ID NO: 206843 - DNA, 498 bp, Glycine max
gtacgctataattatttttcgtcacaaacaatggattagtgctcaacaaagcacaaaccaacaataataacagttttagttgcattaatttacacaagaaagtaaattaacgtaatatgcaacacatgtgtgtcacgttcatgaggatcattttataatgatatgcaacattgaattaaatattctcatgcaatggagcattctggaggaaggccttgagggaaacgtctgatatcagtgcaataattgtaaatcatgtaattcttttgcacccaacggatctttgcctgccccgtggcgtccagtgattggccagtggaggaagaagtttgggaattgaagtttctgtatgaggctgtgaatggggccttgctccaatcccgtttcacaagctcacccattgtgggccaatcctcaatgttccaaagactagagtatattttcatgggttggcttttttggaatggaacccctttaggtttcaaattcttgaactcc

SEQ ID NO: 206844 - DNA, 584 bp, Glycine max
  unsure (1)..(584): unsure at all n locations
gacaggttcaaaccggagcaaaaaaacttgttacgatggtttcttccgacaaggatccacgagaggaagtccttcaagcatggtacatggatgatagtgatgaagatcaaagactcccccaccacaaagaacccaaggagtttgtctcgttggaccaacttgctgaacttggagtccttagctggaaattagatgctgataaccatgaaaatgatccagagctgaaaaagattcgtgaagagcgtggctacacctacatggatgtttgtgaggtctgcccagaaaagttgccaaattatgagcagaaaatcaaaagcttctttgaagaacatcttcacactgatgaggagatccgcttttgtgctgctggaagtgggtattttgatgttagggattgcaatgatgcttggattcgagtgtgggtcaagaaaggaggaatgatcatcttacctgctggaatttatcatcgctttacactagatgagagcaactacattaaggctttgcgttnttttgttggtgagccagtttggacttcacacaatcgtccatatgaccatcttccctgcaagacaacatttgtc

SEQ ID NO: 206845 - DNA, 526 bp, Glycine max
aattgaatcttataaataagaataaagatagtacttgatagcataattttacaaatcagctaaatatatgacatagcttaaaatggactataacttacatgaatatgtagctataatattatggctatctttcaaagggtcacctacacagaaacacaggcgtgggtaaaaggcttaaagggtcatctacacagaaaccataacataaaaagctgggaccctttatttaaaggcaccattattttcatttgttcaaaccttactttagcaacacaaagtctcagtcccacgtactacgattaggcggaaccagatcttacgcggcggcatcaacagcatggttgccaacatccttttccacaaaatccttgacatattgttgccttgcagggagatggtcatttggacgattgtgtggagtccaaactggctcaccaacaaaaaaacgcagagccttaatgtagttgctctcatctagtgtaaagcgatgatgaaatccaagcggtaagatgatcattcctccttt

SEQ ID NO: 206846 - DNA, 466 bp, Glycine max
gcctatcattaatgtgcaactgtatacataccagatatgccgtggtttaaatgatttgcatcatgtgatcagagtctgtcatcgggacattaaaccccagaatctattggttaatccccagactcatcagttaaaagtatgtgattttgggagtgcaaagatgttggcgcctggcgaacccaacatatcgtacatatgctcgcggtattatagagctccagaacttatatttggtgcaacagaatacacaactgctattgatatttggtctgctggttgtgtgttggctgagcttcttgtaggacatccaatgtttcccggagagagtggggttgatcaattggtagagatcattaagatcttgggaacaccgaccagagaagaaatacagtgcatgaatccaaattacaccgaatttaagtttcctcagataaaagcacacccatggcataaggtttttcacaag

SEQ ID NO: 206847 - DNA, 470 bp, Glycine max
gaaacatgatcaaagaactgtaagaactcgttatcttttacaaatgaggcatacatcaatcataaactacttgaaaaaatggttgcaaccctatcaccaggcactacttcatcaatgggattgtagcttgcgagtcaatgataaaaaggtttcatggttttaaggttcctatgagctgtatagtcatgattgtgcaggtggacagcagagacctagactattagcaaaggtagcattgctggtgtagatatctctattaatccaaaaacccatttacaatgctcaataatgaattcaacttcttgcatgctcaggaatgagacgtcgccgcaactcatcaggtgcacctgccagttcttgagcagtgaaatcgaacaatggaggcaatgattgcccatttggcaagcatgcatttggatctcgcatatcatcaaagaaagggtgtgcacatgcttccaaagcagtgcatc

SEQ ID NO: 206848 - DNA, 347 bp, Glycine max
attttgcgttcattctgttttcttgaagtctttccctagccaatggccactgatcgtttgacccgggttcacagtctccgtgagaggcttgatgaaaccctcactgccaacaggaacgaaattttggcccttctgtcaaggatcgaagctaagggcaaggggatcctgctacaccaccaggtcattgctgagtttgaggaaatccctgaggagaacatgcagaagcttactgatggtgcctttggagaagtcttgagatctacacaggaagccatagttttgccaccatgggttgctctggctgttcagtcaaagcctgctgtgtgagagtacctgaaagtgaatgt

SEQ ID NO: 206849 - DNA, 424 bp, Glycine max
ggccaagttatggcaggtacctgagacactgctggatgaggtgcttggtaagatgagtgcaccacccaagagtgacgtaccagtcattacccccaatgaactatccgaggctgatggctttgtattcggcttcccaacaaggtttggaatgatggctgctcaatttaaagcctttatagatgctactggaggcttatggagagcacaacagcttgcaggcaagcctgctggcctattctacagcaccggttcacaaggtggtggacaagagactacagcactcactgctatcactcaactggttcatcatggaatgatattcgttccaatcggttacacattcggtgccggcatgtttgagatggagaaagtgagaagtggaagtccatatggtgctggaacttacgccggtgatggctcaaga

SEQ ID NO: 206850 - DNA, 542 bp, Glycine max
actcaaactggtcgttgcaatgtttatgtgcttaacggggcaatacaaaagataggaacaagtactgtttccgcctaacactaaaggactagacacaaactttcctcattcaacaaattgcaacatccactgcaacatgtaacactcatacaaagcatttcctttaccaagattagaaagaaaaaaaaaatacttgcaagcacaggaaaaaaaaactcaatatatttcaagtctaaaaattggacaatgattttcaagcaatattgtggtatggtttaataataatagtatgatctaatatgaaggcaaggcaacattatgcagcttgcttgagcttctttgtgatgccagcaatgtacttcccttggtggaatgcttgttgtaactcaagctcactaggctgtcttgagccatcaccggcgtaagttccagcaccatatggacttccacctttcactttctccatctcaaacattgccgcaccgaatgtgtaaccgattggaacgaatatcattccatgatgaaccagtgagtgatacagt

SEQ ID NO: 206851 - DNA, 499 bp, Glycine max
ttctgcgtctccaatgcccttggagaatagggtgcttgaccctaagaagtctcagaacattgccattttgcttagagcgctgaatgtgactattgatgaagtttgtgatgctcttagggaaggcaattgtgatacgttggggacggaacttcttgaaagtttattgaagatggctccaactaaagatgaagaatctaagctgaaggagtttcaagatgaatcgcccttcaagcttggcccggctgagaaatttcttaaagtcgtgcttgatataccttttgcttttaagagagtggatgctatgctctacattgcaaactttgattctgaattagaataccttaagaagtcctttgaaactctggaggtggcctgtgaggaattaaggaaaagccgcatgtttttgaagatactcgaagctgttcttagaacaggaaattcgatgaatgttgaaccaatcgtggtgatgctaatgcgttcaaactggacacacttttga

SEQ ID NO: 206852 - DNA, 520 bp, Glycine max
  unsure (1)..(520): unsure at all n locations
cattttcgcttctcgtagcgttttcggaacagttatggcttccattgccggatccaactgcgtcgctctccgaaccgccaacttcggcgcctccggtaaccggaaaatcggccagatccgccaatggtctccgattctcacgaatctccgtcccgtttccggtcttcgtcaccgatcgaatactccgtttagctcctccggtgtgagagcacaggttgctactctggaggaagcaggaaccggagcaactcagaaagtggaagcgccggttgcagtggtgaccggagcttccagaggcattggcaaagcgattgcactgtcattaggtaaagcaggttgcaaggttctggtcaactatgcaaggtcatccaaggaagctgaggaggtttccaaggagattgaggagtttggtggtcaagctcttacatttggtggagatgtttctaacgaggctgatgtggagtctatgattaaaactgcagttgatgctnggggaacagttgatgttataataaacaat

SEQ ID NO: 206853 - DNA, 476 bp, Glycine max
  unsure (1)..(476): unsure at all n locations
ctcgagccgattcggctcgaggttgttgttcgctctgtgtctctcactctctctatatttgcatcattcatcggaaatggctctcgaggttgctgttaaggctgctgttggggctccaaatgttctcggagattgtccattttcccaaagggtcctcttaactttggaggagaagaaaatcccttacaaactccacctcatcgatctcagtaacanacccgaatggtttctgggtgtgaatcctgaagggaaggtgccagtggttctttttgatggcaaatgggtggctgattctgatgtaattgtggggatactagaggaaaagtacccagaaccctctctaatcactcctcctgaatttgcctccgtgggatcaaagatatttgggtcttttgtgagttttctgaagagcacggatacaaacgatggaactgagcaagcatcggttgctgaattgagtgccttggatgaacatc

SEQ ID NO: 206854 - DNA, 570 bp, Glycine max
  unsure (1)..(570): unsure at all n locations
tgttatttgaaattaacaagtattaagatgtttggaatcatcggaggaaacaagggtcacaagataaaggggaacttggtgattatgcgaaagaatgtgttggatatcaacagcattaccagtgttaagggtgtcatcggaaccggcattaacatcattggaggagtcgtcgacaccgttactgctttggcgtcccacatctccatccagctcattagtgccaccaaggctgatggacatgggaaaggaaaagttggaaaggctacaaatttaagaggacaagtgtcgttaccaaccttgggagctggcgaagatgcatacgatgttcattttgaatgggacagtgacttcggaattcccggtgcattttacattaagaacttcatgcaagttgagttctatctcaagtctctaactctcgaagacattccaaaccacggaaccattcacttcgtatgcaactcctgggtttacaactcaaaatcctaccattctgatcgcattntctatgccacaatacatatcttccaagcgagacaccggcttcacttgtcaagtcagagaagaaga

SEQ ID NO: 206855 - DNA, 569 bp, Glycine max
aaggacaacccttgctgtaatggaaatcgtttacataagatgatgatttattctagtttgcactttgccatgccagctatcattgttgaaacatgcgcgagaacacttaacagcaatttatacaaacagaatttcttcattaacacttaacagcaaacacgagaacattcaatcaccccaaatacataacttaaccatacataggtagatgaaggaatcatattccttctattcacttttattgaaaaccagggaaagtactgcaacaaccatagagcccctagatggagatactgttgggaattcctctgaaagtcaatccctcctcactagaaggatagagcaaagtgtaaggcattttagccggcccactgcggtttctcaacgtctcgtccttggtcttctgtataagcttttggtcaatctcttgaagcttctttccaaacctcttgaaggcctctagtggaccagcatcagaagtccaatagtcaccaccatctgtgttcccaaggtagaactcatcagatgtgtgccttgacaagatttctatagttgcaaggtcaatgagg

SEQ ID NO: 206856 - DNA, 491 bp, Glycine max
ggctcgagggtaagaggatgcgcatgccaacaaagctcacatgctgcagtataagagcattgctgaggcgaatgaagatgcattgaaagagatagaaaaggcgcatgagaagtttaaaacagaggctgacaatggaaagaaagttatggaatctgaacttaactcacttagagagaagatgttagagattgaaaatgaatcttctttgaaatatgaagaagttgcttctgaaactgttggaaaggaagaggctcttacatctgctatggctgaaatcacaaatcttaaagaagaaattttgaccaaatcttctgaaatttcagcaatggaaattcagatctcaggtttaaaagaaaacctggacagggagcatcacaaatggcggtcaactcaaaccaattatgaaagacaaggtgttctgcagtgcgaaactattcacgagttgacaaaaacatctgaagcactagccttgctgcaagaggaggcatttg

SEQ ID NO: 206857 - DNA, 532 bp, Glycine max
ctcttcttctcttgcggctagggttttagcgcatcttcttctagatttaaggaagatgggtaaggaaaaggttcacatcagtattgtggtcattggccatgtcgactctgggaaatccactaccactggtcacctgatttacaagcttggaagcattgacaagcgtgttattgagaggtttgagaaggaagctgctgagatgaacaagaggtctttcaagtatgcctgggtgctggacaaacttaaggctgagcgtgaaagaggaatcaccattgatattgctttgtggaagtttgaaacaacaaagtattattgcacagttattgatgcgcctggacatagggatttcattaagaatatgattactgggacatcccaagctgactgtgctgttcttatcattgattcgaccactggtggttttgaagctggtatttccaaggatggacagactcgtgaacatgctctgctttcattcacccttggtgtgaaacagatgatttgctgctgtaacataatggatgctactaca

SEQ ID NO: 206858 - DNA, 492 bp, Glycine max
gaacactacaaatagaaagttgacatttaataaaccaaagcaacacaacgcagcaaagtcctgaaactcgctgcgcttaacaaaaatgtaatcaggggttccgacaaacacagcacattaaaacacagataaataaaagcaattttgccaccgtcgatcaagaacccagttctgggaacaacagttgcgagatgatggtggagacttcaaactttgtccgaaaaacaagctacctagaaaagaagacacaagagtacagaagagaaaccaacatttattgtaaccaacatcccctgatgaaccagcccgcacgattcacttcttcttctgggcagccttggtgaccttggctccggtaggatccttcttctcaacgttcttgatgactcccacagcaacagtttgacgcatgtccctaacagcaaacctaccaagtggaggatactcggagaaagttttaacaaccatgggtttggttggaatcatcttaac

SEQ ID NO: 206859 - DNA, 483 bp, Glycine max
  unsure (1)..(483): unsure at all n locations
ctttctcctaaaacatctccagtgggttcttcttcttctattacaacaacgtcgtccaagaccatgaccatggccatggccacgatcctgctcctgttcacggtcttcgcggtttcatcggccctagacatgtcgataatctcgtacgacaacgcccacgccgccacgtcgcgcagcgacgaggagctgatgtccatgtacgagcagtggctagtaaagcacggcaaggtgtacaacgcgctcggagagaaggagaagaggttccagatcttcaaggacaacctgcgattcatcgacgaccacaactcccaagaggaccgaacctacaagctcggactgaaccggttcgcggatctcaccaacgaggagtacagggccaagtacttgggaaccaagatcgatcccaaccggaggctcggcangaccccgagcaaccgatacgcgccacgtgtcggcgacatactacctgaatcggctgattgg

SEQ ID NO: 206860 - DNA, 457 bp, Glycine max
aacagcaatcaaatatgttcgccatttggaattggaatttgaatacaaatacagtgcatcaataatataaccctatgtacacagccaatatctgactgaaatttgatacagaatagtatcaattcgtatcataataaaatggcacagagaaatttatgtgaaggtaaaggggaagtgtatcagctggtgttttaattcttcgtctttcatttacttcatcattggctccttgctgcacgtgcacatttcctttatctgcttaagcactgatgaccttggtcttacgcccaaaggtccaatggggtttagccggagtacgcctcaatgccttcactccgaatgggttgttcttgctcttgagacaagttccagcataagtgttgcagatgggatagtcgatagggcagcaactgtagtggtcatcacagcaggtagcacccttaagaggacagcagcc

SEQ ID NO: 206861 - DNA, 525 bp, Glycine max
  unsure (1)..(525): unsure at all n locations
tggccacctctgctattcagcaatcagcattcgcaggtcaaactgctctgaagcagctcaatgagttggtccgcaagaccggtggcgccggcaaaggtcgcaccaacatgcgccgtaccgtcaagagtgctcctcagagcatttggtatggccctgatcgtcccaagtacctgggtccattctcagagcagattccgtcatacctgaccggagaattccccggtgactacggatgggacactgctggactatcagctgacccggaaaccttcgccaggaaccgggagctggaggtgattcacagcagatgggccatgcttggtgcacttggctgcaccttcccagagatccttgagaagaatggtgtgaaattcggcgaggccgtgtggttcaaggctggttcacagatcttctcggagggaggacttgactacttgngcaacccatacctgatccatgctcaaagcatccttgccatctggggctgtcangctgcgctcatgggttttgttgaggctacagagt

SEQ ID NO: 206862 - DNA, 548 bp, Glycine max
  unsure (1)..(548): unsure at all n locations
agggacagaaatttctaatatatataatataatggttctcatacagattcttctggtacacaggtgtaggtacattagagaaaatgggagcagaagattgcattgaattgcaatgctcattgtccagggacaaagttagtggcataagcccaagcattgttggcaacaggatcagcaacatggtcgtaaaggttctgaatagggcccttgccagtgacaatggcctgaacaaagaaaccaaacatggagaacatagccaagcgaccgttcttgagttccttgaccttcaactcagcgaatgcatcagggtcatcagccagaccaagagggtcaaatgcaccaccagggtagatagggtcaagtccttcaccaaggggtcctccaccaactctgtaaccttcaacaaaacccatgagcacaacctgaacagcccagatggcaaggatgctttgagcatggatcaggtttgggttgcccaagtagtcaagtcctgcctccgagaagatctgtgaaccagccttgaaccacacggnctcggcgaatttaca

SEQ ID NO: 206863 - DNA, 452 bp, Glycine max
ggccaagttatggcaggtacctgagacactgctggatgaggtgcttggtaagatgagtgcaccacccaagagtgacatcccactcattacccccaatgaactatccggggctgatggattagaattccgctttccaacagggattggaatgatggctgctcagattaaagcctttctagatgctactggaggcttatggagagcacaacaacttgcaggcaagcctgctggcctcttctacagcaccggttcacagggtggtggacaagagactacagctctcactgctatcactcaactgggtcatcatggaatgatattcgtttcaatcggttacacattccgagccggcgtgtttgagatggagaaagtgaaaggtggaaattcatatggagctggaacttacgacggtgatggcttaagacagccaagtgagcttgagatacaacaag

SEQ ID NO: 206864 - DNA, 487 bp, Glycine max
actcaaactggtcgttgcaatgtttatgtgcttaacggggcaatacaaaagataggaacaagtactgtttccgcctaacactaaaggactagacacaaactttcctcattcaacaaattgcaacatccactgcaacatgtaacactcatacaaagcatttcctttaccaagattagaaagaaaaaaaaaatacttgcaagcacaggaaaaaaaaactcaatatatttcaagtctaaaaattggacaatgattttcaagcaatattgtggtatggtttaataataatagtatgatctaatatgaaggcaaggcaacattatgcagcttgcttgagcttctttgtgatgccagcaatgtacttcccttggtggaatgcttgttgtaactcaagctcacttggctgtcttgagccatcaccggcgtaagttccagcaccatatggacttccacctttcactttctccatctcaaacatgccggcaccgaa

SEQ ID NO: 206865 - DNA, 536 bp, Glycine max
cttttaagttaaatagtttttcattgtttcatttaatctacaatggctgcttcaacaatggctctctcttcatcatcattggctggccaagctatcaagcttgccccctccacccctcagcttggtgttggaagggttagcatgaggaaaacagcctccaagactgtttcttctggaagcccatggtacggcccagaccgtgtcaagtacttgggcccattctctggtgagcccccatcctacctcactggtgaattcccaggtgactatggttgggacactgctgggctttctgctgacccagagacctttgccaagaaccgtgaacttgaagttatccactccagatgggccatgttgggagccctgggctgtgttttccctgaactcttggcccgcaacggtgtcaagttcggtgaagccgtgtggttcaaggccgggtctcaaatatttagtgagggtgggcttgactacttgggcaacccaagcctgatccatgcacaaagcatccttgccatctgggccactcaagttat

SEQ ID NO: 206866 - DNA, 555 bp, Glycine max
aatccaattaatgcgtataattaataatataatgcgctcttgttggtattgcagctctaccacatctaccgaaatatataaagtgcatcaacactacaaaactaaataaagatctcaatgcacaataagatatataattcatattcttcttaaaagaaaacattcaatatgtatttctccaaataacaatgaaactctcactctaattttcaagtcactgtgtttctctttgtttcactattgctatgctcactttccggggacaaagtttgtagcataggcccaggcattattgtttaccgggtcagctaggtgatcagcaaggttttccaaaggtccctttcctgtcacaatggcctgaacaaagaaaccaaacatggagaacatggccaacctaccattcttgagctctttcaccttcaactcagcaaaagcctctgggtcatcagcaaggcccaatgggtcaaagctgccacctgggtagattgggtcagtcacttcaccgagaggcccaccagcaatacggtagccctcaacagcacccatcaagataac

SEQ ID NO: 206867 - DNA, 470 bp, Glycine max
cggtgacgaaaggaaagaagaagaagaagcgttctttcggagagttcgaagatgtcgggcgttaccaacaacaacgaggaagacaagaagccaaccgaacagggagcacacatcaaccttaaggttaaggggcaggatgggaatgaagtttttttcaggatcaagagaagcactcaattgaagaagcttatgaatgcttactgtgaccgacagtcggtggatttcaactccattgcttttctgtttgatggacgccgcctccgagctgagcagactccagatgagttggaaatggaggacggggacgagattgatgccatgcttcatcagacaggaggttctgttgtctgaaggatgtgattacctttgctcctcattataagtaggaattagttaacttagagctatgtatggcataagatacatattttattatctgctattatatacagcttttgccggtggatttt

SEQ ID NO: 206868 - DNA, 498 bp, Glycine max
gcttgtgaatcagcaccacattcacctgagctttttgtgaggattccaaagcatggcttcccttgcagcatccactgctgctgcttcccttggcatgtcagaaatgcttggaaaccccatcaacctcagtggtgccacaaggccagctccatctgcctctagccctgcctccttcaagactgtggctcttttctccaaaaagaaggctgcacctccaaaaaaagctgcagctgctgctcctgccaatgatgagcttgccaagtggtatggtcctgacagaaggatcttcttgcctgagggtctcttggaccgatctgagatcccagagtacttgaccggagaagtccccggagactatggttatgacccatttggtcttagcacgaagccagaagatttttccaaatatcaggcatttgaattgattcacgccagatgggcaatgcttggtgctgctggattcatcattcccgaggccttcaacaaatatggagcaaa

SEQ ID NO: 206869 - DNA, 549 bp, Glycine max
ccaaggaacaaagccaaatgccttaatatctcagtgatatgtattgtacattaagtaagattggagaaaaacatgaagatgaatgatttagagagttggagctctctcagcagatccagaaatgacagtgagcaagttgttgccaaaagggtcactgagatgttttgcaaggttctcaacaggaccttctccagtgacataagcttggaagtagaaaccaagcatggcaaacatagcaagtcttccatttttaatttccttcacctttagcagtgcagcttggtctggatcatttgcaagccccaatgggtcaaatggaccacctggatgaagtttgtcttcgaaattcaggccattaataattctgtagtactctgcacctcccacaagaacaatctcagcaatgacagccacaataagattgatggggatgggtttcccgaagtagttcaaggtacccccatcaagaagcagagctccagtcttgaaccaaacagccttaggaccgcagtttgctccatgattgttgaggcctcgggaatgatgaat

SEQ ID NO: 206870 - DNA, 524 bp, Glycine max
  unsure (1)..(524): unsure at all n locations
aggaacagcatgtggccaaaacattataagactatatggccgaaaagcttggcatagagaaaagcaaaattgatgacttgtccaacctcctctacaagaactatggaacaactatggctggtttaagggcaattggatatgactttgactacgatgaatatcacagttttgttcatgggagattaccttatgagaatttgaaaccagacccagctctgaggaacctcttgctgagcctaccctataggagactgatcttcacaaactcagacaaagtccatgcagttaaggcactaagcaggctaggattagaagactgctttgaaggaatcatatgctttgagacccttaatcccatccacaaaagcactgtctctgatgatgaagatgacattgaatttgtggggggttcaggcacaaccaatccaaccacataaaaagatgctagcagctntcaaatctttgacatcattggccattttgctcaacccaatccccacacagttttgccaaagacacccatt

SEQ ID NO: 206871 - DNA, 521 bp, Glycine max
ctcgcaagcaaaaagaaagaatcccaggcgaggagaaagatggaggggaaggagcaggatgtgtcgttgggagcgaacaagttccccgagagacagccgattgggacggcggcgcagagccaagacgacggcaaggactaccaggagccggcgccggcgccgctggttgacccgacggagtttacgtcatggtcgttttacagagcagggatagcagagtttgtggccacttttctgtttctctacatcaccgtcttaaccgttatgggagtcgccggggctaagtctaagtgtagtaccgttgggattcaaggaatcgcttgggccttcggtggcatgatcttcgccctcgtttactgcaccgctggcatctcagggggacacataaacccggcggtgacatttgggctgtttttggcgaagaagttgtcgttgcccagggcgattttctacatcgtgatgcaatgcttgggtgctatttgtgggcgctggcgtgtgacggtttcgaggggaaaacaaat

SEQ ID NO: 206872 - DNA, 488 bp, Glycine max
cggcctgtcgttttttttttaccaacaaaatatgacattcattccatttaagatgggtcatcagacattcattacacatgacatgggcctattgcaacttacaagcagaggataacattggcccatgacgcgacacatgcaccacctaataatcataattttacatctttacatacaaaatacaaagactttaaattttaaaaagaagaaaagagataaacagatcatcttaatgaaatgaaaccaaaacccacaaacattggcttgatttttgttgttgttgttgttcccaacttgattaagcatgaaccgtttgattgaatcacttggacttgaagggaatggccctgattacgacctggtggtagagtgctgcaagagctgcaccgatgaatggtcccacccagaagatccagtgttcatcccaaccaaggtccttgttgaagatgatagcagcaccaagactacgagcagggttgataccagtt

SEQ ID NO: 206873 - DNA, 507 bp, Glycine max
ggtcctttctctaatccaaatatctctccgttaatgctctcaccacaaacttcaatagactagccaaaagctaacaccaactataggccaaatcaccaataaatattatttcccgttcttttggcgtgttggccacccactgaacacatttgcactcacacatagaagcagagagaggccattggttggtttcagagatgggaagcatgcacatagaaaccccagaaacttttgctgatggtagcaaaaacttcgatgatgatggacgagctaaaagaactgggacttggattactgcaagtgctcatatcataacggctgtgattggttctggagtgctatctcttgcatgggcaattgcacagatgggttgggtagctggtcctgcagtgctctttgtcttctctttgataacatacttcaccttcactcttctcgctgactgttaccgttcacctgaccctgtacatggcaagcgaaactacacatattctgaggttgtcaaag

SEQ ID NO: 206874 - DNA, 542 bp, Glycine max
aacatagcaaactaaacattttattatattactttagtataacaagttgtctcgatttcgagaattgaaaatataacaactatttcaaaacatagtaatacaaattttgtcgccctcaatagaaactcttggctcaagttggaatactaagtatgaaagttctattgttctgcttggaagggcttgtatttcttgatactaaccgaaaggccttggatggaacccacaagtgagataatagaaatgatcaagcaaacccaactcaatatcttgagccaagtccaggtgaaggaaaatctttgcatatttgacttcttaatgtacatctctatagggaagtaaaccgtcaatggccagaaagagagtgcaccaataagggccaaaaagtcattgaagaatgggagtaacatagctacaacggcagtgataatcacatatgcaggccttcacactaccctaaagaagttcacattggagctttcacatagaggaatgttcaaagtatgctcggcatttataaattggctttctgtccattttct

SEQ ID NO: 206875 - DNA, 586 bp, Glycine max
catccagaaagctaaatgacctaagcaagagacgatcagaagaaaccatgagaatgaaagagatcatttctaaggaggagaaggcaaaagaattagcaaaactagaaagagagaaatatcaagatgcatcacgagaagctgaatatttgaaagaatgtgctgaaagagaagcggcagataagaaagaaatggagttgagagccattcgtgctgcaaaagagaaagaaaagctggaggatgctctcagtggttccacgccccagtaccggaagtttacatgggatgaaataatcttagctacttcatctttctctgaagatctgaaaattggaatgggagcgtacggagtagtatacaagtgcaatttgtatcacacaactgttgctgtgaaagttctcactctcaacactaacgtaaacagcaaaagacagcaattccagcaggagttagagattatgagcagaattcgtcatccaaacttgcttcttcttcttggtgcatgtccggatcatggatgccttgagtatgactatatggagaatgctacttggaggacagactactacgaaaaaccacacttccccaa

SEQ ID NO: 206876 - DNA, 519 bp, Glycine max
ctaaaactaaggtatgtattcaggaggatatatcattcataaataaaagagtacacatgaatgtttatacattagctagccttgaatgtatacatggttcttattttatttatagtaagaacaagatttgacatatgtatgtatacacagaatcagacaatagaatcaaatttatctacacttgaaatcgctctacctaaattaaccagacagcatgcttggaatggtacaactacgaaaaaaatctgcatccaagacactgctaaaggtcatacccaccaaactttctagccactctctacatcagagaaatcattggtctcaatattaacatggagaaagataatgctgatatcacgattctctggacttccactccaaaattgctgagagcagtgtgtaattaggaattaaatgcttatgaggtaaagccatgttcgtcattggtgatttgtcgttctcttcaagccacttttcaaattgctttgcgatcatatgtatatccatcagcagcaacac

SEQ ID NO: 206877 - DNA, 528 bp, Glycine max
tgctctattttgatctagcgtgatttattcccggatcgacgcgcttcggctcgagaaacaattctaacatacttttctttcttttttttcccctctttaaaagtctggcttttggtcctttgattcccaacttcacttgtcacatatcatattatgaagctcacaggtttcctgcaagcggtgactcttgctttggtgttagccaccgtctctgcatcagatcctgatcctcttcaagacctctgtgtcgcagaccttgcttcagcggttaaagtgaatggattcacatgcaaagatgctgccaaggtaaatgcgagtgatttcttctcagacatactagccaaaccaggtgccacaaacaacacctatggctccctagtgactggagccaacgttcagaaaatcccaggactcaacacccttggcgtgtctttatcacgcattgactatgccccaggtggcatcaacccacctcacacgcacccacgtgccaccgaggtagtgtttgtgcttgagggacactagatg

SEQ ID NO: 206878 - DNA, 423 bp, Glycine max
atactctaattccaaaactttgaatttatgagtgcccaaccaacatgaattgtaaagcaacaggaaccaggacaagagaggaaggtgtttgatgtaacaacagagagagagacattacaaccacgtcccacattacgtattaataatcccttaggagcaagcctagacttgatggtcttcaacctccttggttcccacctggaacgccttggtataacacattgtctggaaccggaggtgatcctgcaaacaacgttagagcaatggactgagtgccaagcaattgactgatgaatgctgcaattactgaagcttgctacttgacattggccttttggaagtgaaccaacccttttgggaacacaaatattatagccttgcttatgctctttgatatgatcgcgcaggctgaggatatgaacc

SEQ ID NO: 206879 - DNA, 491 bp, Glycine max
gaagaactgttaaaacatcgcatgcttaagttcagaaagattggtggattccaggaaggtattcctatagatcctaagagaaaagccaacatgaagaagagggatctatctattgctaagatttctgatgctgaactagaagttgaggttgagaaactgaagcaacaggttttggaagctaaggaatcttctcctgttcctgcaaaactagatctggatgagatgctaaagcaactgacaagggaggttgatctagaatactctgaggcagctaaagccacgggcttgacagacagtttgttgaaactaagggaggaagtttcaaaagcaaatgcagataatcaaattgctgatccattgctgaaggataagatagaaaagctaagggtggagtttgaacagcaactgcgtgcagctcccaattatggcaggctgcagaataagtctacctatctgagcgaattatgtaaagttaagcttctggcagatgc

SEQ ID NO: 206880 - DNA, 449 bp, Glycine max
acttacagcaccaagcgtcgttgaatgactcggaacgtctacctgaaactaattatacactgtatagataaagatattgagggagaaaccgaacatttgaagatgagtaaccaagagcataatgatcatgaaaagaaaagaacataagatgacatcctaaacataactgccacattgtgactcacacacatacagaagggtattcaatgctagaccccgctactgggcctttattggcagagtattgactgcacattggccaccattaacaccgaatgtgcttaaaatgaccaaacatgcatctaagaagtatggcgattataatactagaggatgatctaaatctagagtcaccaatcctactgtatggttctgaatcatgcgtctctccagccttaggaaccttcaatttcaattgcatggcctagctcttaatatcatgcgatgag

SEQ ID NO: 206881 - DNA, 435 bp, Glycine max
accattaaaacaaaaaacagtactcatcaaaaacaaacagcagtgaaaattgaccaccgccgatcaagaacctagttttgaaagttacggctacatgaaatcggcagaaacttaaaaatataacttaaacaaaacacctaagactctgcaaggataaaactactataaaggagtaaccacgatgatgatcacatgtgctagcaaaattgcccaaatgcaatcacttcttcttggcagcggccttggtgaccttggctccggtggggtctttcttctcaacactcttgatgactccgacagccacagtttgacgcatgtccctcacagcaaaacgaccaaggggaggatactcagagaaagtttcaaccaccatgggcttggttggaatcatcttaaccatacctgcatcaccattcttcaaaatttgggctcctc

SEQ ID NO: 206882 - DNA, 501 bp, Glycine max
gagaaagtggcatcgcttaggtacagatacagacacaacctggtaaaaatcccgaccccagtgccgcacaattttccttcactcgcagcggaggtttacttttgatctagtacctgctatccctatgtataagcatggacttctagcatactattgtttgattaaccaagttcttccatattggttgaggaagcctcgagtcaatatttagtttttgctgccatctgtgggtttctgatggatgatgccgggcatcgtgaaaatggaaggcacaaagcagcagatcaatataaatctgctcagggacagtggttgatgcaacatcagccttccatgaagcagattatggcaattatggctgaaagagatgtagccattcaagaaagaaatctggccatttccgagaaaaaagcagcatatgctgagcgcgatatggcattcatgcagcgagatgctgcaattgctgaacgtaataatgcaattttggaacgagataatgca

SEQ ID NO: 206883 - DNA, 478 bp, Glycine max
agcggacatactagaccgttatggtaaaccactatccttgtcgcaaattgtggagaacatagaagacgcaccctccccagatgcctctcttctccagagagtcctgagagtgatggtgcgcagaaagatcttcagtgcacaagaatcagagacaggagaaaccctcttcggcttgacacgagcctcgaagtggatccttcgcgacacgaaaatgaccctagcacccatgttgctgctggagaaccacccaattcacctgaaccctgcgcactacatcagtgagattattagagaaggcacaaaaaatggcactgctttctttaagtgccatggacatgagcaatttgagatgacgggtttggatcctgagtataataggttgttcaatgagggcatggtgtgcactgctagggttgtgtccaaagctgtgatcactggctacaaagatgggttcaaccagattaagtccttggttgat

SEQ ID NO: 206884 - DNA, 479 bp, Glycine max
aacaccaaaggatctgattcattaaaagcaatagattcttcacaaccacacaccactcacttgacatatatggaacacatacataatccatatagcattacttaggggtggggcatttcttactttaatttaatgcccaaacataacaagggcaggaaggaaaaccacaaaattaaaacgaagatcatatagctgttaataataacaacaacacatgcaacataaaaaccacatgcagttgtggtagtggcatcttcttcaaattggaaacgcctcaatgatggaagggagagcgttgatcttgatgatgttgtaacgcgcgaaaccggtttccttgaacagccacttccagttctcttcggacctctctttgccaccggcgttgtgagcgagaagcatcatgtcgaatgcgatgccaacgtttgtgaagagttcgttgccttggggtcgaagaacgtgatccacgattatgacttttc

SEQ ID NO: 206885 - DNA, 601 bp, Glycine max
  unsure (1)..(601): unsure at all n locations
aaacaaagaagtgaaaataacagcaaaaagtagcagctgctgcagctcccccgaagcttatctcagcagcagatactcaaccctgtttgagtagccgagaataacaccaatgggagaggaggaaaagaaaccagaggaacaacccaaggcagaggagaaaaaaccagaggaagagaagaagaaagaagaagcagcagcagcggaaaaaccaagcgaagagaaaaaaccggaacaagagtcgaaagaggaagttgctgctccgccaccgccaccgccaccggccgagattgtgctcaaagtgttcatgcattgcgagggttgcgctcgcaaggttcgtcgctccctcaaaggattcccaggtgtcgacgatgttgtcaccgattgcaaatctcacaaggtggtcgttaagggagagaaagcggatccgttgaaggttttggagagaatacagaggaagagtcacagacaggtcgagcttctttctccgatcccgaaaccgcangaggagaagaaggtccangaggaagaaaagcccaagcccacacccgaagagaagacagaagaggctcagattgtgatgacggttctgaaagtggcatgc

SEQ ID NO: 206886 - DNA, 417 bp, Glycine max
ctggctcttgcttcattatcactgcgtgctttccggttctcttgtacacgtactcaaccaactttgctggatcgtacacccccttcacgctcacttgtgagttctgcagatcgggttctgctgattccactcccttcattctctgtatgcgtctcttgatttcctgagagcaagcttcgcagtgcatgccaactttcagaaccgtcatcacaatctgagcctcttctttcttctcttcgggtgtgggcttgggcttttcttcctcttggaccttcttctcctcttgcggtttcgggatcggagaaagaagctcgacctgtctgtgactcttcctctgtattctctccaaaaccttcaacggatcccggtttctctcccttaacgaccaccttgtgagatttgcaatcggtgacaaca

SEQ ID NO: 206887 - DNA, 600 bp, Glycine max
aaagggtcaagagatgaggttgatgagtctggtaagtgtttgagttggttggacaagcagccaccttgttcagtgttgtatgtttcttttggaagtggtggaacactctctcagaaccaaatcaatgagttagcctcgggtttggaattgagtggtcaaaggttcttgtgggttttgagagcaccaagtaattcagttaatgctgcttaccttgaggctgaaaaggaggaccctttgaaatttttaccaagtgggtttttagaaaggacaaaggagaaaggtttggttgtgccatcatgggcacctcaggttcaggttcttagtcacaattcagttggagggttcctgagccattgtggttggaactcgacattggagagtgtgcaagagggagtgcctataatagcatggccactctttgctgagcagagaatgaatgcagttatgttaaccgatggacttaaagtggcgttgaggacaaaatttaacggtgatggcatagtggagaaggaggaaattgcgagggtgatacagtggctgatggaaggtgaagaaggtaaaggatgcttgaagaatgatgaatttaaagattctcttgta

SEQ ID NO: 206888 - DNA, 465 bp, Glycine max
  unsure (1)..(465): unsure at all n locations
cgcaaatacgagaaggaacaaaacaccgcggaagcaaccatggccgaagcagaacacaacgatcccacctcgccggagcgcgaggtccaaaccaaaagcaacaagaagaaactccgcaagaggaaaaggcctcacaagaccgagcagaaacgagatgaggacaagaacgatgctaacattgatagtgcccaaacacaaaccgaagatgaagaagaagaacaaaaagaagaagacacaaacaacttctcatccggaatcatgagcaccgagtctttctcctctctgggcttgtccgaacccacttccaaagccattgcggacatgggcttccaccgtatgactcagattcaagcgaaggcaattccgacgcttctgaccaggaaggacgttctgggcgcggcgagaacgggtgcgggaaaaaccctagcgttttagtatcgcggttgagtngctgtacagcattca

SEQ ID NO: 206889 - DNA, 531 bp, Glycine max
tgaagtactctgggatagtgatgcatactcccgggtcgacgcgctcactgatcgagagaaaatgaaagtccttgttttctttgttgctatagttctagcagcatggcattgccatggctcagaccatgaccatgaccatggccacacctaccaaattttccctctgagaatgaaaactggccatggtggccactacattccggaggtatcatgccaaagttggaggcttggtgtggaagcacacaacgtcattgactggaaaaccgttcctcaagattgcgagggatatattgggaactacatgcttggcgaacaatatagatcagactccaaaatagttaaccaacaagcttatttctatgctaaaaccctcaatatcactgccaaaaccgcatgggtgttcgacatagatgagactacactctctaatctcccttactatgctgaccatggatttggggtggagttatataatgaaacatcgtttaataaatgggttgaccttggcgaggcaccggcactgccagagag

SEQ ID NO: 206890 - DNA, 396 bp, Glycine max
aaaaaaaccccaaaagaaaaaaccccgggggggttggacaggtttttaccacggggcctttgggcccacacaaagggccatacctgggaattaaataacgggggcccctggggtaaaggcgatttctccatttttccaacggggctttttttttattcaagggaaccgggctaaaagagccctaaaaaccccaactaaggggggaccggggaacagggcacttaaggggcctatcgccgggggggggtcccaaaagaacgctccatggggccccaagggttccaaaggattgggaacctttttcccccaggttttttttttcaagaaaattggcaggaaaggggggttaacccggggtttcaaagggtttctggggaaataacttttcccaggggg

SEQ ID NO: 206891 - DNA, 482 bp, Glycine max
caaggtaaaaattttattgcacaatgagaaggcagagaaaattgatggttctgtttctcagtacaagttttagaatgaaaaatgaagcaacaagtgtttgtagtggtagtagtagtagtagtaagcatacaaaactacaatggcatggtacatacatataataattgaattaccaattcagaatttgatggctctcacttccacttgttggcaacaatgtcagccaaatccacaaccctttgggagtagccccactcattgtcataccaagcaatcaccttaaccatgtcatctcccatgaccatggtcaacgatgagtcaacggttgaggacacatcagtgcacctgaagtcaacagacacaagtggctcatcacacacagagaggattccctggagctcattgtctgcactctctctgaatgctgcattcacttcttctgcaaaggtcttctttgagacctgaacaacgaggtccaccac

SEQ ID NO: 206892 - DNA, 515 bp, Glycine max
cgacgacggcgatgacgatgccgtaaacccgaagccgggaagcctccggcacgccgtgatccaagacgagcccttatggataatcttcgcaagagacatggtgatccagctgaaggaggagcttctcatgaactccttcaagaccatcgacggaagaggcgccagcgtgcacgttgctgggggtccatgcataacgatacagtacgtgaccaacgtcatcatccatgggattcacattcacgattgcaaacagggagggaacgctatggtgcgggactccccacggcactacgggtggagaaccgtgtcggacggcgatggcgtgtcgatcttcggagggagtcatgtgtggatcgaccattgctcgctctctaactgtaacgatgggttgatcgacgccatccatggctccaccgctattaccatttctaataactacatgacgcatcatgataaggtcatgtttgtgggtcacagcgatgcttacacccaggacaaggccctgcaagtcacta

SEQ ID NO: 206893 - DNA, 526 bp, Glycine max
ggaaagaatgaataagccagaagagaagttgcttgattgtttgtcagcaaggagaacctttcttacaactgagtgcaccagcacctgttgttatggaaccaacaagggaagatggtcttgcacttaagctagaagcccttgcatagctagaggaggctccagcacccgatgatgtgaaaaacgcaccgtttactaacaagtccccttctgacctccaattccaatcctgccactcactctctggcgcatcttcacgttttgtcacctctttgctgaatctgtcatcgggtgcaacaaacctattgccttggcagttgatggttggattagcacttccaccaatggcatacattttccagtgagtataatcattgttcaccacatggaaatacccaagcctacaccttggcatcctttgaacaaggccttcaccaaagtggttgaaagcaatagtgacttgcatggccttgtactgggtgtaagcatcgctgagaccccacaacatgaccttatcatgatgcgtcat

SEQ ID NO: 206894 - DNA, 511 bp, Glycine max
agattatgttattgtgaccattatcttgacaaggtaagaggatatatggagtatttttcatatttatatgatgtacacacaaaacaaggccaatgagaggaagccacttataggttgggaagaagcagcttcaattcagagagtgagtgctttttctctggcccatgagattccatggcttcatttggtgcagtcaattacaaattcttcttgtgcctacttctatggctctggaactttctacctctatctcaaggtaatcagcactggcatgaaaatagatacccttttatcagaaatgcaagctcattctcatcaccatcaatttcaactacgacaagcaataatgcctatgactacataatagttggaggaggcacagcagggtgtcctttggctgccaccctctctcagaacttcagtgttttggtgcttgaaagagggggtgttcctttcaccaaccccaatgtttcatttctggagaactttcacattacattggccgacattt

SEQ ID NO: 206895 - DNA, 459 bp, Glycine max
gactactaataaatcaccctttactagaaattactaccaactacattcattttcaatcctaccactaacgcttttttttttcttgatgtgcaacagtgcttctcttatcttccttttacacaccttttttcaagatttgccatgatcttcacacaagggattcctccttatataccagccaatttccccaacctatgtctcaaaatcttcagccccatgtacctgcccatcatcatgacagttgcttgaggatttgttcctggtgattcgtcaaatgttgagccgtctaccacacgaagtctgtcaacgccaagaaccttgtaatcagggctgactaccttccccacatggcaccctccatggtagtgccaaattgtgatcacggtgtctttgcaaaactgtgctatcgacgctgtgacattgggatgcttgggtatgaagttgacattagccttgaca

SEQ ID NO: 206896 - DNA, 464 bp, Glycine max
caagaaggagaaaaccaagaagaccaagaatctcattctcatcctcaccaattccatatccaattccaacctcttcatcatcaacaagaacaacaacaacaacaatcttacacaggtttagacacggagatcttaaacccactccaaccaccgaagaaacggtcttgcctaccgcctcttccgccgccaccaccgccgccttcgtcgcttgcttcatccgaacatgcaagaaaaatgggagagctacaacaccatcaacaacaggcagcagcagcagcagcaccgtcgagagcggcgatgagaggcgtcggcggcggcgagattgtggaggtgcaaggcggccacattgtccgctccaccggacggaaggaccgccacagcaaagtctgcaccgacaaaggccccagagaccgccgcgtgcggctggcggcgcacaccgtcatccaattctacgacgttcagga

SEQ ID NO: 206897 - DNA, 593 bp, Glycine max
catatccccccctagctacagagcagccaaaggggaggaataataataagcctatattctaaggccggaaaaataaaaaaggaataacaaaaatgtctggaaaggtaattatctcggctgtttctctcatcctggtggttggagtggccataggtgtggtggtggccgtcaacaagaagggcgaggatcccacacttcaatctcaacaaaaatcagtaggggttatctgccaaaacactgatgaccagaagctctgccacgaaaccctaagctccgtgaagggcatggacaccgctgatccaaaggcttacatcgccaaggcggtgaaagccaccatggacagcgtgaccagggccttcaacatgagtgataggctcagtaccgagtacggaggcaacgataacggaaccaagatggcccttgatgattgcaaggacctcttgcaatccgctatcgagagcctccaactcagcattgacatggttcacaacaacaacttgcaagccgtgcataaccaacaggctgacttcaagaactggctcagcgctgttatctcgtaccaacaggcctgcatggagggttttgacgatggc

SEQ ID NO: 206898 - DNA, 497 bp, Glycine max
ctcgagccgtggcgagtcacagaagtggagagactgaggataccttcattgctgacctttctgttggtttggcaacgggtcaaattaagactggagctccatgcaggtcagagcgtcttgctaaatataaccagctcttgagaattgaggaggagcttggtgcggaagtagtgtatgctggagctaacttccgtacccctgttgagccctactaaagttttcaagtggaaaaaacctggagatccccacgagtttgagcaatgagatttggatgcgcggttttagttgtgatcaataagtcgatagttagaacaatagtcttggtataaggaccttgccaataattttttagttctgattcacagagctaagacagttccgtcttagactttaaaagttttgatatttagctttaatacttgaagtttacttccaattttatggggtatccccaaaacatttcatactctttgctatgttaacttttttcccctttc

SEQ ID NO: 206899 - DNA, 381 bp, Glycine max
tttttttttttatttttatcttactttcttttgttttgtcttttttatattttttatatttttttatatataattaatttacttttttttattttacttataatagactgggaaaaccactaaaaaacttaatcttaatcaaaggggggaaaaaaaagcacaacaacaaaaaaaaaaaaagcggggggggccccccccaaaaggaggagaaacagcgagccaacagccggaaaaaaacacactcaaagagcaaaaacaaaaaaaaaccaacccgggaaaaaaacccaaaaaaaatagggccgggggacccacccaaaaaatacgggaaaacccctcacaaaacggccaaacacaaaaccccgcccacaaaaatggttgagc

SEQ ID NO: 206900 - DNA, 571 bp, Glycine max
  unsure (1)..(571): unsure at all n locations
agcccgtcctacaaaatcctttagtggtggctggaggatgagaatttctttagctcgagcactttttgtgcaaccaactctattattgcttgatgaacccacaaatcatcttgacctgagggctgttctctggttggaagagtatttgtgccgttggaagaaaactctggtggttgtctcacatgatagggattttctcaacacagtgtgtactgagattattcatctccatgatttgaaacttcatttctatcgtggaaattttgatgattttgagagcgggtatgaacagcgtcgtaaagagatgaataagaagtatgatatttatgccaagcaattgcaagcggctaagaagagtggaaaccaggctcagcaaaaaaaagttaaggatcaagctaagtttgcagcagctaaggaaaaaagcaagggcaagggcaagggcaaggttgatgaggatgaggccccaccagaggcacctcagaagtggagggattacagtgtggagtttcactttcctgaacctactgagctcacacccncacttctgcagcttatngaagtcagctttagc

SEQ ID NO: 206901 - DNA, 493 bp, Glycine max
atcagctgtgactgaccacttatagccagaatgtgatgagtcttgaagatggtattgtcaagggttttgatattcggactgccaactctgattcctcatcagatctgagttctacatttacacttcatgcacatgacaaagctgttacctcagtatcctataatccatcggcacccaatctccttgccactggatccatggacaaaacggtaaaactttgggatttgtcgaacaaccaaccctcttgtgtagcatctaaatctccgagagcaggggttatctttaaaatttctttctcagaggacaaccccttcttgttggctataggaggctcaaagggaaaattgcaagtttgggataccttatctgatgctggcatttctcgaagatatgggaattacaagaatagatcgcaatctgggtcttgaagttgtagtcttgcttaccgtactgctcaagttgcgttgcatacatcacaattttgggattcact

SEQ ID NO: 206902 - DNA, 500 bp, Glycine max
atgtaacatgataggacttacatacgggtatcaaatccaagttggtgacatagagaaatttgatttgacattcatagatcagaatatcagacttacatacgggtgaacatgatacgggtgaacatgataggagcacaatactatacataaaaactgacacaacaccctattagatatgaaaaactagatagcatccaattacaaaacttaagcatacataagaaaattatgcacacataagtttgcacgtttatttgtcaatgagaggtacgttggaaggaaagaaaaccacacaccacacaccacacactcttattagatagagatgctgttgggaattcctctgaaagtaaggccttccccactggtaggaagaagcacagtgtagggcatttgcgccggtccattacggttcctaaggcttgaaatcttgttcctccctgagattttgtcctcaatttccttcagcttgtttccaaacttcttaaaggcttgaattg

SEQ ID NO: 206903 - DNA, 440 bp, Glycine max
ttttttttttttattttttttattttttttttattgtgaatttctatttttttattatggttttttttttttttattttttcttttttttatttatttttttgttttttttttttttttttttttggggggggggcgccaaaaaaggaaaaaaggggggggaaaaaaaaaaaaaagggggggggggaaaaaaaaaaaaaaaaaacaagaaggggggggcccaaaaaaaagagggggggcaaaaaaaaaaaaaacgcggagggggggaaaaaaaaaaaaaaggttccgacgggcgcaaccaccaataaaaaaaataacaggggggggggggggggaaaaaaaagtgggggcccccgggccaaaaaaaaaagggcaccacccgggggggaaaacccccgggggggggtaaaaaaaaaggggggagggggggggggggttttt

SEQ ID NO: 206904 - DNA, 600 bp, Glycine max
gtttcattagatgaaaagtgaaaaatgtgacaccatctatcccaacatacatataaataagaaaaatatataaaaatatgaaatttaattaaatcaattttattcaaatcacataaacaaatccacgtggataacatggtcacattcacttcactgttatcaaataaaacttattaaaacatctttggctcaaaataaggtcgtccaagtttacaaaaggaaacaaattaagcagcgaaataaaataaagtaaaatagcatgttcagaacattatgcaattaaaacaaaatctcatgccccaatgtcacatcctatcagagcattatgtcacaacgtcctctagcacgaggttctttaaagtcgtccacctagtcatctgctcccatgaaaacaaggttcgagatcatcacaaaatctaaacacaaacaacacgtagggagtgagttatcatatttttaaataaaatatagataaacaaatacataagcaaaatacattataaaaatatttatcacatagttcaacttaatacaattcacgtcacttcatcactttatcatttaaaactcatttttcaatcatcaattacattacacatg

SEQ ID NO: 206905 - DNA, 559 bp, Glycine max
cggaggcgcagagtagagcagcagagaagagagaaaacggcactgcagccgtagaaggaaaaccgaccatggtgcacgtctccttttacaggaactatggtaagacgtttaagaagccccgccgtccgtacgagaaggagcgtctagacgcggagctgaagctggtgggggagtacgggctgcggtgcaagagggagctgtggagggtgcagtacgcgctcagccgcatccgcaacaacgcgcggaatctccttaccctcgacgagaagaacccgcgccggatcttcgagggcgaggctcttctccgcagaatgttccgctacggactcctcgacgagactcagaacaagctcgattacgtcctcgccctcaccgtcgagaatttcctcgagcgccgccttcagacgctcgtcttcaaatccgggatggccaagtccattcaccacgccagggttctcatcaagcagagacatatcagggctgggaggcaagtggtgaacatcccatctttcttggtgagggttgactcacagaagcacattgacttctcactttacag

SEQ ID NO: 206906 - DNA, 457 bp, Glycine max
aatggaaaatcttgatactttaaaatatccaaattcacaaaaacataatatgtcaccacttaatattttctcaaacaagggaaccaaaggatgaaaatgtataacaaccaaaatcgattaggtaggcaaagtaaaaggtggcataagatctaatagcactagagaaagacataatgaacagtctaatcctcgtcttcctcgtctccgtctccacctgcggccttcttagcagcagccctttggtttcttctcttcactcttccagggcgtccgccaccaaggggacttgtaagtgagaagtcaatgtgcttctgtgagtcaaccctcaccaagaaagatgggatgttcaccacttgcctcccaaccctgatatgtctctgcttgatgagaaccctggcgtggtgaatggacttggccatcccggatttgaagacgagcgtctgaaagcggcgctcga

SEQ ID NO: 206907 - DNA, 502 bp, Glycine max
ctgagattcagatgatggcgagtgagtcgcaaaactgggtgttcatggtcactgcacagacaccaaccaacattgccgttatcaagtattgggggaaaagagacgaaaccctcatcttaccggttaacgacagtatcagtgtcactctcgatcccagccacctctgcaccaccaccactgctgccgtcagtcccgctttccaccaagatcgcatgtggctcaatggaaaggagatttctctttctgggggcaggttccagagctgtttaagggagatccgtgctcgtgcttgtgatgttgaggatgaaacaaagggtataaagatcacaaaggaggattggggcaaattgcatgtacacattgcttcgtacaacaacttccctactgcagcaggactggcttcatcagctgccggttttgcatgccttgcttatgcccttgggaagctaatgaatgtcaaagaagatgaaagccaactatctgctatcgcaaggcaaggatc

SEQ ID NO: 206908 - DNA, 544 bp, Glycine max
gcagcagcaacagcaacaagatcaaccttcggtggacgagaaatacacgcagtggaagtcccttgttcctgtcctctacgactggctcgccaaccacaacctcgtctggccctctctctcttgcaggtggggcccccagcttgaacaagccacttacaagaatcgccagagactctacctttctgagcagactgatggtagtgtgccgaatactctggtgattgcgaattgcgaggttgcgaagcctagggttgctgctgctgagcacatttcgcagtttaatgaagaggcgcggtccccatttgtgaagaagtacaagaccatcatacatcctggtgaggtaaacagaattagggaattgccacaaaattccaagatagtggctacacatacagacagccctgatgtccttgtttgggatgttgaaagtcaacctaatcgccatgctgtccttggagctacaaactctcgttctgaattgatattgacccgacaccaagataatgcggaatttgctcttgctatgtgcccaactgaaccctat

SEQ ID NO: 206909 - DNA, 472 bp, Glycine max
caaacagaaaatagaattgtatcaattaagtaacactaaccacaaatcatcgtcagatctacgttaatctaggttttccctactccagccccatacatgaatggttttaaaatgccatgaaacatccaccgcaaatgttaaattaaatacaacagcaataataatataactcatttttgcctacgacgtatgtcatttttcagtctttgaagcacacgccacaacatgagatttgaatttctccagctcggccaaaacctcatcttctggtctgtagatcaaatcactcatgcgccatatctgcaacgttccccctcctccagtactttcacagtcattagacacactaacaatcgtccatggatcatatgcattccaatggaagtcaacaactttatccctatgacctgcatgttgaaaaaacaaccctggaggagaacttattgattttccagatcgctctatcttttta

SEQ ID NO: 206910 - DNA, 538 bp, Glycine max
  unsure (1)..(538): unsure at all n locations
gacaaataacattattatatcaacatataagcttacaaatttccacattttcaggaaacaaatgaaggaaattcatcccagttttgacttctgattgagtgaagccacaagacacgtatcgaagttcccaaattaacacaaattgcttggtcagatgacccaaaaccaagctataacagacccagcagctagaccaaaaactaagaataatacactcacaatccctgcagtctctgcatgctgcaacattacaattttaggaatcagaatcatcaatgcactggttaggtagccattagtaagccctaacaggcaagtcagtattgtcacgggaatctcagtccggaagaatttgggaccatgcaagcaacctaagaagagagggaaaaacaacaatcttgctatgcaaccacctatggcaacttttgcattctgtangaggtaaactgcagtcagacacttgccaacangatcaaacacattatagccagcaattaggagaattggataccaatccttaagaattgagagtgaacat

SEQ ID NO: 206911 - DNA, 496 bp, Glycine max
gacaggcaaccatgcatatatatacttcataataagatgttcaaaagtcaggcccccaaggaaactgcatacataattaacaattaaagcaaacaactttggccacacttgcagaacacaacatcctgctgcattgctcaacagacaaacctaccaagacattgttaatttgcaaggggatctttcgttaatctatcttgtaggcccatccatgtttgtccaaaaatgcctccaccgcttccttaatggccaagtttggcactaactgtgatggatcaaggggttctcgtgtgattgggtcgaatttaccaaccttctgaagatgttcaagaatcacagctctctcatatgtaagtccacttggagtgataacaggatcatgaaaaatgtcgagtgtgattctacagcacaaataatctggcacctcagtaggtatgtcagcttctgcagctgtattgaagactctttctaaagcctctaattgttctgaatggga

SEQ ID NO: 206912 - DNA, 440 bp, Glycine max
gccaaacgtagtgaacaaattttatgcaaaaaattcgaagttattcaaacagccgtgttcggacttcagactccaaaagtgctacaaattaaagagccttccagaaaaaatggctttcaacattagatacaaaataagtaaccttgtattcttccaattatgtgatgattaataagaaacaaatgctacaaaaccaagcctaaatgtctcatttcttgacttcctcatactcggcctcgggagcctgttcaccaccctgagaacctccggctgaggaaccgccactagaaccacctgaaatgtgctctccaatcttggagacagctttgtttgcagcatcaagctttgccttaatttcgtcagcattgtctcctgccattgctggtctcaaatccgatactgcattttcaatctctttggccacttcactggggatctta

SEQ ID NO: 206913 - DNA, 500 bp, Glycine max
gaccttaaacagttgaactttgaaaggagacacaaaatctagattttgctgctccaatattaaaagctggtttggtatcccttcaaatagacagataaacgaattatttatataacttatttatataaactcgtccttgaatttttacctttataagaatacatactgatctaaaagaatgttttttctttcctaattagaggtgaaaatcttattgatgaatttgcaaatgaaactcatcaaattttcacatctattttgaggacatctaccaaatagagacctaagaggtgaactcaggaggaagttctcctcgtaggaaaaatgagatcatggttagggctctctgcggttggtaacttggaaccatgtgcccagctcctcttacagtgattagtgtgagccctttgtacccaaccaagtatcctccaacctcattgctagaataccatggacgccatgttgtctccactggaagtttcatggaatttattgaatac

SEQ ID NO: 206914 - DNA, 590 bp, Glycine max
caagaccacagggcagaagaacaagatcaccatcaccaacgacaagggtagactatcgaaggatgagattgagaagatggtccaagaggcggagaagtacaaggccgaggatgaggagcacaagaagaatgtcgacgcatagaatgctttggagaactatgcctacaacatgaggaacaccattaaggatgagaagattgcatcaaagctttctgatgacgacaagaagaaaatcgaagatgccatcgagagtgctattcagtggttggatggaaaccagctagcggaggctgacgagttcgaagacaagatgaaggagcttgagagcatttgcaacccaatcattgccaaaatgtaccagggtgcaggtgctcccgacatggctggaggcatggatgaagatgttcctccatctggatccggtggtgctggccccaagatcgaagaagttgattaaattggttcattatttagatgggatgggcttgtgttggatctattccgttttttattctttatttaatttgtctagatattggccattatttgttactacaccaggatgggatggaaatctttttttggtttga

SEQ ID NO: 206915 - DNA, 573 bp, Glycine max
ttccaatatattccattctctctgtgtatttccctacctctcccttcaagatgcagatcttcgtcaagaccctcaccggcaagaccatcacccttgaggtggaaagctctgacaccatcgacaacgtcaaggccaagatccaggacaaggaaggaatccccccggaccagcaacgtctcattttcgccggaaagcaacttgaggacggccgtacccttgctgactacaacattcagaaggggagtactcttcacctcgtcctacgtctccgtggtggcatgcagatcttcgttaagacactcaccggcaagaccataaccctagaggttgaaagctccgacaccatcgataacgtcaaggccaagatccaggacaaggagggtatccccccggaccagcaacgtctcatcttcgccggaaagcagctcgaggacggccgcaccctcgccgactacaacatccagaaggaatcaacccttcaccttgtccttcgtctccgtggtggcatgcagatcttcgttaagaccctcaccggcaagactattactctagaaagtcgaagctccgacacca

SEQ ID NO: 206916 - DNA, 456 bp, Glycine max
cacacattcataacaaacgtaggtgggatattagagtactattattaatgggacacaattgagttcaacacaaaccgaacttattttcaagggacattattacagacccattaaacatcaaagttcttcaaatgttttgggaacacattcaacattacacaacgagcttaaaaccccccacggagacggaggacaaggggaagggttgattccttctggatgttgtagtcagcgagggtccttccattctcgagctgctttgccagcaaaaatcagcctctgctggtccggtgggatgccttccttgtcctgaatcttggccttcacattgtcaatggtgtcagagctctccacctcgagggtaatagtcttacccgtaagagttttcacgaaatttgcataccaccacgaagacgcacaccaagtggagagttgactccttttggatgttgtagt

SEQ ID NO: 206917 - DNA, 555 bp, Glycine max
ctttcattggtgtggcctagctgttttctcaatgagaaagccttcatctctgcaaagcgcacttttgcgctttggggttcccttgttgcttgttatcaccttctgttatgctacttctactgctgcagcaacaaactcaagtttcagggaatgaagagctgccaaagacaaacctaaatgggcatgatgaagaagcaaaattcggattttttcatcataaaccaatattcaagaaacatattccaattccagtatataaacctgtaccaaagccatttccagtgtataaacctataccaaagccagttccagttccagtgtacaagcctattccaaagccagtgtataagcctattccaaagccagttccagtgtacaagcctataccaaagccagttccagttccagtgtataagcctattccaagccagtgtacaagcctattccgaagccagtgtataagcctattccaaagccagttccagtgtacaagcctataccaaagccagttccagttccagtgtataagcctattccaagccagtgtacaagcct

SEQ ID NO: 206918 - DNA, 580 bp, Glycine max
  unsure (1)..(580): unsure at all n locations
tgttgttcttcttcctcttctttttttgcttctgcaaagccagtagtactaccacctccaccacaaagtcactgtcccccccttcttcaccctccactacttcctcctctgacgttgagcttctcttgggaaagatcaaagcttcactgcaaggtagtaactctgacaaccttgttttgtcttcatggaactcctccaccccactttgtcagtggaaaggcctcatatgggtcttctccaatggcactcctctctcatgcactgacttgtcctctcctcaatggaccaatctcacactcctcaaagacccttctcttcacttgttttccctccggctcccttctgcaaacctctctggttccctccctagagagcttggagggttccctatgctccaaagtctctaccttaacattaactcattggagggtaccatccctcttgagcttggttatagctcctctctctctgagatcgatttgggtgacaatatgctaggtggtgttctttcaccttctatttggaactngtgtgagaggcttgttcccttaggctccaccggtattctttatctgggtta

SEQ ID NO: 206919 - DNA, 530 bp, Glycine max
gcataattgtgtgactatatttgatttcaaaaacaatagggactacctgatgcaaagagttatggagtaaaccaaaaattacaacattctctctagatcatcaaaaactagccttatattcagattcagctgagaaaaaggaaacacaaatattaagtaaaaatcactagttcgcttaagcatgttgaaagggaaggctcaaaatggggtaacacttccacttcttgtttctgtagggctgtataatgcagacctgttccttggtctattctcctccaactgcctcacaacttcatccatgcttggcctaacagatgccactggtgcacagcaccccattgccagttttagcgcctgcaccaacccatctttcatagggcttcttatccctttcaaaagctccacattaaacacttgcatcgtcgtgttcttcaaaaccgccactttcaccatcgaaggcaagtccacatactcgccatttattccaatcttcccaggcttcttccaatcaagaattcaagcagcagtat

SEQ ID NO: 206920 - DNA, 486 bp, Glycine max
tatcaaccctgctcgtagtcttggtgctgctatcatcttcaacaaggaccttggttgggatgaacactggatcttctgggtgggaccattcatcggtgcagctcttgcagcactctaccaccaggtcgtaatcagggccattcccttcaagtccaagtgattcaatcaaacggttcatgcttaatcaagttgggaacaacaacaacaacaaaaatcaagccaatgtttgtgggttttggtttcatttcattaagatgatctgcttatctcttttcttctttttaaaatttaaagtctttgtattttgtatgtaaagatgtaaaattatgattattaggtggtgcatgtgtcgcgtcatgggccaatgttatcctctgcttttaagttggaagaggcccaactcatgtgtgatgtacggctgtgattgtgtaatttaatttgcaaaatcaaaaataacaccagagtcatataaaaaaaaaaaaagaa

SEQ ID NO: 206921 - DNA, 470 bp, Glycine max
atatgactctggtgttatttttgattttgcaaattaaattacacaatcacagccgtacatcacacatgagttgggcctcttccaacttaaaagcagaggataacattggcccatgacgcgacacatgcaccacctaataatcataattttacatctttacatacaaaatacaaagactttaaattttaaaaagaagaaaagagataaacagatcatcttaatgaaatgaaaccaaaacccacaaacattggcttgatttttgttgttgttgttgttcccaacttgattaagcatgaaccgtttgattgaatcacttggacttgaagggaatggccctgattacgacctggtggtagagtgctgcaagagctgcaccgatgaatggtcccacccagaagatccagtgttcatcccaaccaaggtccttgttgaagatgatagcagcaccaagactacgagcagggttgata

SEQ ID NO: 206922 - DNA, 467 bp, Glycine max
caaacataatgtactttaatatatatccaaagggaggaaagcaacctaacagcacaacaccattgcttcacaccagaaaacacaataatggaaattctcaaaaagtaccccaaaactgcttatttttcattataagggtaattctggccatggaagtatgtaaatacttctttcactttaaaattccccactggattctttccatccaccatagctctcttcaggttcagcataatcctgctcctcatttttctcaacagtaaaagtgagagccaccttaatctctccacaatattcttcgtccttcacaaccttgtaagcagtttctggaatgctacccgcttcaaacactggatccagatgaatggttgccacgccaagacaatcatcttgactaaagttgtctttatccattatctttagattaagttcagatgcactgtcagagacagtgaatagaaagctct

SEQ ID NO: 206923 - DNA, 377 bp, Glycine max
aaacaagccttaaaagaatttttttttctcacccaataaatccaagaaattctgcaaactgaaaaaggggttttttactaaagcaaacttaaacaaaaacaacttccccttatttggcatctaccggggtaaaacaggaacaaaagccgctttttgatagaacacacctttgttttatattgaacattttgcacaggggtttatttttcacagcttttggaacttaaaatacttgcaaaggttttggaaataccaaactttttttttctcccttttttttggagatgacaaaggggcccgatcatgaaacaataatccacccccttggaattgaatcttgttttggggtgggaacgaggcccccctttttttatttt

SEQ ID NO: 206924 - DNA, 419 bp, Glycine max
gagagccatgatcacaattactactaccattctccactacacacaaaaattctcacaacgatgtaatcaaaagaatagtacattttcgaaaccacaaatgacactagctagaggattcatcaacagataacaaaacttagggagggcacatatttagaatatggcttcacacttatcctgttgcataatgtatcaatcaaaccctggaatctagggccatgatggtgctaagattcatggggtgcatgtactggtcagagccagtcatcatctgttggactatgattcggttagctttctccgatgggtgaaatggatcccaaaacgcgtataggtctctatttggacacaagttggaaaggggtgtgcagagtccaaccccattaaacgggccttgcccacaacaagctatctttgat

SEQ ID NO: 206925 - DNA, 420 bp, Glycine max
caatatgaacaatatacatgaatataagaaatatatgtaagtacacgcatggtcagttcatatccgaagggtcctaaccaaccacaaaacggtcgtctcagcggtctgaagtaaaacgtgataaacaacatttataaactgtaccagcataagcaatcaaacaaacacaacatatcaatatgacctattgggtttggaagatgatgaggttttggatttggcaaaatcaacaagatccttgaaaagggcatcttctggcttctgttgtttggttggggtggatgaattcagggagagattttgagtttgtcccaccaagctgtcataagaggaactggatccactacttgaatgagatacaccttgttgctcaaaaaactgttgtctttgattatactttgaaggtgggggccggatgat

SEQ ID NO: 206926 - DNA, 563 bp, Glycine max
ctcgctttctcccccgacgaggaaatcggtggccacgacggtgccgagaagttcgctgactcctctatcttccaaagtatgaacgttggcgttgttcttgacgaaggtctggcttctcccgacccccattaccggtctttctatgccgaaaggagtccctggtggttggtcatcaaggcctttggtgttcccggccatggcgccaagctttatgataactctgccatggagaatctctttaagagcattgaaagtatccgaaggttccgctcctcgcagttcgacttgatcaaggccggcttcaaggccgaaggcgatgttgtttctgttaatatggtctttctcaaggctggaactccatctccaactggttttgtcatgaatttgcagccttctgaagcagaagctggatttgatattcgggtgccacccactgctgatccagaatcgttggagaggcgcattgctgaggaatgggcaccttcatcccgcaatatgtcatttactttcaaccagaggcgcacacacgagataagtctgggaaaccaatcctcaccaaaact

SEQ ID NO: 206927 - DNA, 385 bp, Glycine max
ggaaacaaacatatttgtttcctttttattggtatggggcaaaagctacaacaaagtcaggggggggggtatttttcctctttattggtacataaaaaaaggccaaaaatgagaattaggtggggggaggggccacaccacttgctcataactaatttttggaggctccattttttccattatcatccaacgatgcatataccttaattattggctcggaaattttaatccctttcaaggattcatttttgtgcaaaaactcattgtggtcatgtaaaaaaacaggagtgtttgccataggggaaaatccaattgctggtaatccacgttcacggaagtagcgtgaatttgtagcggggggaaaaacctcgggcttaccaagttt

SEQ ID NO: 206928 - DNA, 609 bp, Glycine max
ctcgagccgattcggctcgaggagagagaggagcggaggagagaaaatgacgacgaggttcaagatgaacaggaagaagagaggccacgtcagcgccggtcacggtcgtatcgggaagcaccgcaagcatcccggtggtcggggtaacgccggtggcatgcaccaccaccgcatcctcttcgacaagtaccatcccggtttcttcggaaaggtgggtatgcgctacttccacaaactccgcaacaaattctactgccccatcgtcaacattgataagctatggtccctcctaccccaggaggccaaggacaaggccaccgccgacaaggcgccattgctcgatgtcacccagttcggttactttaaggctttgggtaaaggggttttgcctcagaaccagcctctggtcgtgaaggccaagcttgtttccaagatcgccgagaagaagatcaaggaggccggcggagccgtcgttctcaccgcctgattcttttggggtatttttatttacaaggattttgagatctgtcgttatttttgttttggctcttgcttaatctgctgaactggattagttaaatgtcccttttatattctcaaggcctggat

SEQ ID NO: 206929 - DNA, 441 bp, Glycine max
aaaaacgatataatccagaacattgagaatataaaaaaaaacatttaaactaatccagttcagacagattaaaacaagaaccaaaaccaaaaataacaacagatctcaaaatccttttaaataaaaataccccaaaaaaatcaggcggggagaacgacggctccaccggcctccttgatctttttctcggcgatcttggaaacaagcttggccttcacgaccagaggctggttctgaggcaaaacccctttacccaaaaccttaaagtaaccgaactgggtgacatcgagcaatggcgccttgtcggcggtggccttgtccttggcctcctggggtaggagggaccatagcttatcaatgttgacgatggggcagtagaatttgttgcggagtttggggagtagcgcatacccacctcttcgaagaaaccgggatggtact

SEQ ID NO: 206930 - DNA, 557 bp, Glycine max
  unsure (1)..(557): unsure at all n locations
cttaatgatatggtattgcagggaataataaaggaagagcaattggatacttttaacatccctttctacactccatccccatctgaagtgaaattggaagttcttaaagaaggttcatttgccattaattgtttagaggtgtctgtagtgcactggagcgcttgggatgaatggagtgttcttgactttgaatctgaaagcggatacaatttgacacagagcatgagggctgtggcagaatctatgctggttagccactttggtgaagctatcattgatgagcttttcagccgttaccaagaaatcttggctgatcgtatgtccaaggagaaaactaagttcatcaatgttaccatattattgactagaaaaccataagcaagaagtttgcatctaaagtttctcaaaaggtttgtcgttgtaattattgtgactgtttgcttgatttgttcttctttttctagcaaattataactacgagtattctggtgtacctttggtagtagagctttcttttatatattttctccattctgggtataaatattntattacgt

SEQ ID NO: 206931 - DNA, 497 bp, Glycine max
ctacgaaataataacgatgtttttgaaagtgaaacagacaatacagtatatattgattcagatatgcaaggtcgaaaagtagtgttcaaacagaagtactaaacatgtggatatgtaatagtcttcttaaccgtaggacctgagagaaaaatacatgttaaaattctctcagtattcaagggagccaattgatggtagtcctgaaacaatttcatgagaatctgcaccagtgctattcagcctctgtcctggacttggaccaagggattccagggcttgttctcccattttatggatatcttcaggtgaaagtattttgatataccatacattattgacaaatgattcccacggatcgtctccaaggagaagaacatcgttctccctgtcgacgaatacaagctgccagcctgatctaagagggtcttctaatttcccctcaaataccaaacatctgtgccaactcctccgcagctcatgataactgctgaaccggg

SEQ ID NO: 206932 - DNA, 562 bp, Glycine max
ggaaaacgaatctcaaacttcacaagtgtttgaggcgccatggcggatcggttgacgcgtattgccatcgtcagcaacgacaggtgcaagcccaaaaagtgccgccaggagtgcaagaagagttgccccgtcgtcagaaccgggaggttgtgtattgaggttacttcctcgtccaagattgctttcatttcggaggaattgtgtattggatgcggtatttgtgttaagaaatgtccttttgaagctattcagattatcaacttgccgaaggacttggacagggatactactcatagatatggtcctaatacttttaagctgcataggttgccggttccgaggcccgggcaggtgcttgggttggttgggactaatgggattgggaagtccaccgctcttaaagttttggccgggaaactgaagccgaacttgggtcgattcactaatccccctgattggcaggatattttgacctattttcgaggatctgaactgcagaattatttactccgattctagaggatgatttgaaagctatcatcaagcctcagtatgttgacca

SEQ ID NO: 206933 - DNA, 565 bp, Glycine max
  unsure (1)..(565): unsure at all n locations
cagtttcggacactcactcccactcgctccgattaccgcaccattctgcgtcgccatttagggtttcttcgctcctctttgttggatcttcctcactttgcatcgttctcttcgattcgtaaaatttttcttgcttctcctgtcttggctcgagatccgggccaagcacagaagaatccgtttctgatttgcattttgtactcactggtttggcttgtttttttctctttgtataaatggcttcgagcgaggggtttctgaccgatggccagagggaactgctaaaaattgcaagtcaaaatgcggagaatctgtcttcgtcgccgaagtctcagtcgtccttgctgtctgaccatcatgtgaaagcccctgctggtggtaaggcacaaaccgctggaatagctgtgaggcatgtgcgtcggtcacactcgggaaagtatgggaaggtgaagaaggatggtgctggtggtcagggtactcgnggaaaattgctcgatacagatatcgcttctcacatagacctgcatgatccatattatgacagtggcgaagaaccctatcagct

SEQ ID NO: 206934 - DNA, 543 bp, Glycine max
agaaagctcaaaatgatcttttatttaatattggaggtcgaaaggcctataagaaacagccacgtgagaataaaccgaaaagtcaccacaggttggggagcacatacaataaacattgaacaatcagaaatataaaaagctcataatgtgggacaggaacgactaatacaaaaggagcaatacgtaagcaaatccaagagagaaagtggtaactaaaagcacatccaaacccccaccgtggcttgctgagtcatgcgagtttggcagcagagaacatcctaagcatgcttagcaaactgatggtgaatgttggccttgtcagaattggaaagctgcacctttcgttgctgtgaggacaatatgtaaggatacataacagagtcctctttgtgagagtgatcaagtccaagtagatgccctatctggtgcatcgccgcagtctccaagtccaaaactccatcatctttagacagtgtggcgttttcacttggaagtaaccagcccatgttaccgttcagaagtaccacccctttcttactagaa

SEQ ID NO: 206935 - DNA, 579 bp, Glycine max
caccgagaaagtcgtactgattcctcttcatctttcgttaaagcgagtacttttcgttcttgatctgttggttacgatgtcgtattcaaggagatctaggtattctccttctccttctccttctccatacaagcgatacggtaggtctgtgtccaggtctctctcaatatcaagatccagaagccgttcaaggagtttatcaagagatgcagaaaatccaggaaacaatttgtatgtgacaggattgtctcctaggattaccaagagagaactggagaaacattttgctgctgaaggaaaagtgatagatgtccatctggtagttgatccttggacaagggaatcccgtgggtttggctttgtgacaatggagactcttgaggaggctgaacgatgtgtaaagtatctgaatcgctctgtacttgaagggcgtgtcatcacggtggagaaggctaaaagacgacgtggtcgaacccccacgccagggaggtatctaggactgagaactattcgtgctcgacgtcgctctccagttactctcctcgtcgctcttctagctattctcccttcagaagaagc

SEQ ID NO: 206936 - DNA, 637 bp, Glycine max
  unsure (1)..(637): unsure at all n locations
atgggttgttgccaatcatcgacgttgctgagagtgggagagagggagactcaccctgaaaaggaaaaggaaaaagaccaccagaggctctctgaggccgagaaagagggctttgatttctccttctctgagttctcgctggctgagctgaaggcggccaccaacaatttcagctctgactatatcgtgtctgagagtggggagaaggcacccaaccttgtttacaagggtcgcctccagaaccatagccgctggattgccgtcaagaagttcagcaagtctgcttggcctgatcccaagcaattcgtcgaagaggcttccggcgtcggcaagttgcgccatccaaggctcgctattttgatcggtttctgctgcgacggcgatgagaggcttctcgttgccgagtacatgcctaatgatactcttgccaagcatcttttccactgggaaactcagactattgagtgggctatgcggctgcgagtcgctctttacatcgnccaggctttgcattattgcagctctgagggtcgtcccttgtaccatgacttgaatgcttaccgtgttctcttcgaccaggaaggcgatccccgtctctctttgctttgttttatgaagaacaccnggatggtagagt

SEQ ID NO: 206937 - DNA, 498 bp, Glycine max
ttttgtgctgccactaataaaactgcacttcaacttcaaattttcaacctttccccattcacgtcccttcttccttccaatgttcccttccatcataaattctaatcaatctcgtgaccagcaacaacaaagcaaaagggagaatggttagcaggaagtttcaaggcagagaacttcattccagggcttgttataggtttcatttttgggttgttgctggatttatcaaagcccggtagaaatcacttgtccaagaaaatttgctcatctgccagacctcaacaacagcaaatctcagtctcaagcaatgctgatcaagaacttaaaatggttctggtcgttaggcaagacctaaagatgaaatctggaaagattgcatcccaatgtgctcatgctgccactggcatgtacgctgaattaatgcaaagtgatcggtatcttttgagaagatgggaacagtgtggccagcccaaaattgtgcgacttgcaggaatcaac

SEQ ID NO: 206938 - DNA, 549 bp, Glycine max
tggactagcaacattactaaatacattcgtgtacgatatccatatgttaaagccgtaacctatggactatcacacaacagttctgctactgattacctttgtgagtgcaaccattattctcatattcattcggagattattcaaccaaacctcagaatcagaatatgcaaagcttccaccagggcctcgtccatttcctatcataggaaacatcttggaacttggcacaaatccacacatagcactcaccaaattctcaaagatttatggacctcttatgacttttaaacttggcagaataaccaccatagttatctcctctcctcaagtagccaaagaagtactacttgaaaatggtcaagtcctttctagcagaacaattccacattcagtccatgcacttgaccatcacatatactctactgtgtggctgccaccatcagctcaatggaagaaccttaggcgagtttgtgcacaaatatattctctccacaattgcttgactccactcaaatccttcgccaacaaaaggttaaagatttattggat

SEQ ID NO: 206939 - DNA, 526 bp, Glycine max
atataaaattaatcgcgtttgattggagtagcttgaactcgaagaggctgaaccttctttaatgttatcgcatattgctcctccatgttcatgtgttctggaattaacccatcagctagcttccattcaaagttgtgtacaagggatgctactattaaatgcattgtcctgtgagctaatggcaatcctgggcatatccttttaccagctccaaagggtatgagcttaaaatcgtgacctttaaaatcaatctcacatttcaaaaatctttcgggcataaaaattgttggattctcccaaatggttggatctcgtcccatggcccacacatcttggcaaaatgtgtgcatttttaggcacattgaagccagatatgtttaccatttcatcacacttatggggtactaaaagtggacctgtgggatgcaagcgaagagcttcctttaccactgctttgaagaatggcaactttaatgatttgtgattcttcaaaggttacaatcttttcaattggtttagataactt

SEQ ID NO: 206940 - DNA, 484 bp, Glycine max
  unsure (1)..(484): unsure at all n locations
ggctctttcacaccaattttcctatctcctcttcctccttctaattctcttatcttctctcccaaacatttcccaagccacctctcgtgccccaaatcgcatgttagctttggttcaaaaacaaccacttgtcctaaaataccacaaaggtccccttcttaagggcaacattacgctccatttgctatggtacggtacattcacccccacgcaacgctctatagtcatcgacttcctcgaatccctaacctccacgtcatcacctgaatccccttcagtttccacgtggtggaaaaccaccgagagctacaggggaggcccctgcaccctcgtcgtagggaaccaaatcctcgacgagaattactccctcggaaaatcactcaaaaacgacaacctcgtagctctcgcgtcgaatccgaaactaaattcggcgcccggngatcgcgtcgtccacgtcatcctcaccgctgctgacgtggccgtg

SEQ ID NO: 206941 - DNA, 607 bp, Glycine max
ccctcctcttcacacattttcttagctctctccaacaatccctctcgttcacactttcagattgtgtgaagatgggggctggtggccgaactgctgttcctcctgccaacaggaagtcagaggctgaccctttgaagcgggtaccatttgaaaaacctcagtttagtctcagccagattaagaaggccattccacctcactgtttccagcgctctgttctccgctcattctcctatgttgtttatgacctcaccatagccttctgcctctattatgttgccacccattacttccacctccttcccggtcctctctctttcgtggcatggccaatctattgggctgtccagggttgcatccttactggtgtttgggtcattgcccatgagtgtggtcaccatgcattcagtgactaccagctgcttgatgatattgttggccttatcctccactccgctctcctagtcccgtacttttcatggaaatacagccatcgccgtcaccactccaacacaggttctcttgagcgagatgaagtatttgtgccaaagcagaagtccagtatcatgtggtacttctaatacccttatcatccaccaggcagagt

SEQ ID NO: 206942 - DNA, 303 bp, Glycine max
aaaaacagaatatgataacaacttggattcaagaactggaacaagaataagcatccccacaatcttgagaaacttagtcgacatgcactgattgcaaaacatggggcaataatcaaactgttcagagatgctatatcttattctgcaaacaaaaacgctatgctactttctagatactactaccaacatcagggttcaacaaaattattcccaataagcaagcatgatactaaacagtcacaaaggaaagtttaaaccatcccacctgacggacaagaagcccccggctacattaatcatcac

SEQ ID NO: 206943 - DNA, 467 bp, Glycine max
gaacacacagaagaatatcagctacatgtatttcccaattcccagcactcacaagagaagtttcatacaaacaaactaaaaaatcctccgcaccgcactgttacctatcctcaatatgtcaacagcgggaatgaaaagatagattatacattaatgtcttttaaaaatggaaggatcacgtcctatcctataatacaatgccttattccaacatgctagcccattgcatacttctgagtccagctcctagcagttgtttcatacttggacctgtctgtcttgtacatatgagcaatttcaggcaccaaggggtcatctgggtttggatcggtcaatagggagcaaatggagagcaacaccttagatattgtcaatgctgggctccactgttcctttaagatatcaagacaaatactaccattgctgttgatatttgggtggaaaaacttagtcctaaatgcaacctt

SEQ ID NO: 206944 - DNA, 344 bp, Glycine max
ttttttttttttttttttttttttttttttttttttttttttttttttttttttttttttttttttttttttttttttttttttttttttttttcccccaagcccttttggggggggggaaaccccccggtaaaaaaaaatttttaccaacggaccggggggggtcccttatgaaagggacggaacaaacttttttcaaagggaaaacaaaacccaattttggcctttccccctaagaaaacaggtccaacgggaaaaaaatgaaaacgggaaccaagggaaaaggggggggggtcggctaacttacccccaaaaaaaaaacttttttttttatgggggggggg

SEQ ID NO: 206945 - DNA, 467 bp, Glycine max
gatataaatttaaactcatttgcgtgttggaaacacctcaccaagcatgcaatagtttagtagtaaatgagtgacatattttcactcatccttctcaaactctatctttatgttctgaattgtgatgcttacattctcagatcgtggtaccaatgtgaccaaaacactatcatcattttcagcatccaagtcctctaacaaatctgttattcccagtgtcaagctagttttgatcttcttgtccatgttcatgttcgaatgggaatgacccagagtcgaaaagcttcctgcaaactctgtgctctctggtccaatatcctcgacatcttcatcagtaatatagacatcaaacttcacattatcatccccatcaaactcaatcccatcaatcaccaacacttcttcctcttcctccttgtccctcttgctcctcaactgctttggccttttaactagtagggttacct

SEQ ID NO: 206946 - DNA, 509 bp, Glycine max
gcaacaccaacacctccaccacccatttgcaacgactcaccaaaatcgaattttgcaatcaacccatttcaattcacccttccaatcgttcaacgcacccttcaatttcgcttccgagtgattcctccccccaaattcagaattaaggttcggtctctggtggcgcaaccatgccggagatcggccaggcggcggtggctgcggcggcggatgacaccgccctgttcggaaaatacgagctgggccgcatcctcggctgcggcgccttcgccaaagtccactacgcgcgcaacgtgcaaacggggcagagcgtggccgtgaaaatcatcaacaaaaaaaaactcgccggaactggcctcgccggaaacgtgaagcgcgaaatcacgatcatgagcaagctccaccacccccacatcgtgcgccttcacgaggtcctcgccaccaagaccaaaatcttcttcattatggacttcgtacgcggccgcgagctgttcgggaaaatctcaagg

SEQ ID NO: 206947 - DNA, 484 bp, Glycine max
  unsure (1)..(484): unsure at all n locations
aacccaagcaattcaaatttcctttgacttcattcacaggcaaccttcgactcaggttcttgttcctgtttttcttcttgatgttgttgttcttcttcttgatgttgttgttcatcctcactactattactatacgacgtggttgcaccaccaagcaacaatggcttcaacctctcctcccacacacccctcaccgcggcgtcgcctcccctcttccttacctccaccaccgcgagctccgccgtgagccggtaaacctccaccccaatcccaaacctcccattaaatccttccaactccaccccacactccttctttcacctcacgnccatcctcggcgnncgccccgccttcttcgccgncttcaaaaccctctccggcggctcccgcgtnaccaacctctccccccactcccccccaaacatcccggacanatccaaccccgaagaaaaagatatcaaatcaaaagcgttcaaattcacca

SEQ ID NO: 206948 - DNA, 525 bp, Glycine max
cttagctatttcttacctcttggcatggccattcaaatgtcttcttttgtctttgtttctcttacaattttattttgcttctcttccttggagaagagttttgcctttcaaacaacaaaggaggacacagaaagcaacaatcttcatcaatatactcatcttgttcacctcagctcactccttccttcatcttcctgcagctcttctgccaaaggtcccaaaagaaaagcatcattagaagtggtacacaaacatgggccatgctcccaactgaataatcatgatggcaaagcaaagtctacaacaccacacagtgagattctgaaccaagacaaagaaagggttaagtacattaactcaaggatctcaaagaacttgggccaagatagtagtgtgagtgaattggactcagttacactaccagccaagtctggtagccttattgggtctgggaattactttgtggctgctggtcttggaacacccaagagggactttgcactcatctttgacactggcagtgat

SEQ ID NO: 206949 - DNA, 566 bp, Glycine max
  unsure (1)..(566): unsure at all n locations
ctttgatagtttgattagctctaataaggttaaggaccagagagagaaagagaaataagaagaaaaacacaagatgggttattggaagtctaaggttcttcccaagatcaagaaggttttcgagaagaataagcaccaagaaagctgctgctgctgaggccaccaagtcctttgatgagtcaaaggaggaatacaacaaagcctttgaagaaaagaagactgaacttcaaaccaaagttgttgaaatatatgaggcttcatcaactgaaatcaagagtttggttaaagaacccaaggaagctggtttgaagaagaactccacagaagtccagaagttcctagaagagctggttaaaattgatttccctggatcaaaggcggcatctgaagcatcttcaaagtttggaccagccttggcttcaggttcagttntctttgtgtttgagaaggtgtccactntcattgctacagaagaaaaagaagttgaagcccctcctgcagtagaaactaaaacagaagaagaaacagtagtgtngtcaaagagagggagacagtggttgaagaag

SEQ ID NO: 206950 - DNA, 612 bp, Glycine max
gttgatttgtacaagtttgatccatgggttcttccaggtaaggcagtgtttggagagaaggagtggtacttttttagcccaagagacaggaagtacccgaatggttcacgaccaaacagagtcgcgggttctgggtattggaaagcaactggaacagacaagatcatcaccactgaaggtagaaaagttggcataaaaaaagcacttgttttctacattggcaaagcacccaaaggctccaaaaccaattggatcatgcacgagtatcgccttctcgattcttcccgcaaacacaacctcggaaccgcaaagcttgatgattgggttctatgtcgtatctataagaagaactcaagttcacaaaggttgaggctaattttttggctatggaatgcagcaatgggtcatcaccttcttcatcgtcccacgtggatgacatgctgggatcgttgccggagataaatgaccggtgcttcaccctgccacgagtgaactcactcagaacaatgcaccagcaggatgagaaattcgggtctcgaacatgggatccggtttttctcgatcggttacttgaccagaaaacccaagaatgggaatatgatgcatgacttt

SEQ ID NO: 206951 - DNA, 550 bp, Glycine max
aaaaagttagattccagtaatcagccagagcaggaatttctttctcaggtctccatcgtatcaaggctaaagcatgaaaacgttgtcgagcttgttaactattgtgttgatggtcctttccgtgcccttgcctacgagtatgctcctaaaggatcccttcacgatattctacatggacgcaaaggtgtcaagggtgcacaacctggtccagttctctcatgggctcagagagttaaaattgctgttggagcagccaggggacttgaatatcttcatgaaaaggcagagattcatatcatccatcgttacattaagtctagtaacatacttctttttgatgatgatgttgcaaaggttgctgattttgatttgtcaaatcaagcccctgatgcagcagcacgtcttcattctactcgtgttcttgggacctttggttatcatgctccagaatatgcaatgactggacatctcacttaaaaagtgatgtttatagctctggagttatactgctggaactcttaaacgggcgtaaaccagtggatcatacact

SEQ ID NO: 206952 - DNA, 477 bp, Glycine max
gacaaatcttgatatataaaattactggatatacaagtttaaatgatggcatatttcgttccaatacaaacattgatccagtaacttggaggatacaaaacaatgcgctgaattttcaagtatcgacacatgtcatttgttccctatagcttattgcacatagttgacggtgagcctttcttttttattctcctgagtcctgaccacataaagaataccaatcttgaattgatgctcctgtattctaccatgactcattttcaattcctgtttttgttacacaacacttgctttagccattcttttctggccccgagtagctagtagctcagaatcctgtacaatagcctgtgcacaaagcttcccagaaagaacagcgccttccattgaagctaaatatttttgttttgtgtaatctccagctaaatagaaaccttctaaaggagatctttgtaagggacgacaaggttcacaatt

SEQ ID NO: 206953 - DNA, 510 bp, Glycine max
agcgccaccaccattatactctctgttgctaatcatggctagcaaattggccttcacactgacatacccgcttccacttacaccaatctcttccttgtcctcctcttctgcttctcgactccaccttcttcaattcaatggccgccacatatgccttcgccctcggctatttctgttttctcccatggccacagccgatcaagacaaggttgaggaagatgctgccgttgttgatagtaaaatcctacaatattgtagcatagacaaaaaagagaagaaatcagttggtgaaatggagcaagaatttctacaggcactgcaagcattctattatgaggggaaggctattatgtcaaatgaggaatttgataatcttaaggaagaactcatgtgggaagggagcaccgttgtgatgctaagttctgatgagcaaaaatttctggaagcgtctatggcttatgtgtctggaaaaccaatcttgagcgacatgagtctgatgagttgaaactc

SEQ ID NO: 206954 - DNA, 508 bp, Glycine max
actcataacacaaagcacaaagcaaagctcatccttgagttaaaaaatggcagcagcttcttccatggctctctcatccccatccttggctggcaaggccgtgaagctgggcccatcagccccagaagtgggaagggtgagcatgaggaagaccgtcaccaagcaggtctcctcaggaagcccatggtacggcccagaccgagtcaagtacttgggcccattctctggcgagcccccgtcctacctaaccggcgagttcccaggcgactacggctgggacactgctgggctttccgcagacccagaaaccttcgccaagaaccgtgaactcgaagtgatccactccaggtgggccatgctcggagccttgggctgcgtcttcccggagttgctgtcccgcaacggggtgaagttcggagaagccgtgtggttcaaggcccggtcccagatcttcagcgagggtgggctcgactacttgggcacccaagcctgatccacgctcagagca

SEQ ID NO: 206955 - DNA, 470 bp, Glycine max
gtaaaaagcaagtaacattaagttggattcggatacacaagataattcacattatctgaagtacttcaccaaacacaaatctaaaaactctcaaaagtcatttcgttctttgacgctcactttccggggacgaagttggtggcataggcccaggcgttgttgttgacagggtcagcaaggtgatcggcgaggttctccaatggaccctttccggtgacaatggcctgaacaaagaagccaaacatagagaacatggccaatcgtccgttcttgagttccttcaccttaagctcagcaaaagcctctgggtcatcagcaaggcccaatgggtcgaagctgccacctgggtagattgggtcagtgacctcaccgagggggccaccagcaatacggttaccttcaacggcacccattaggataacttgtgtggcccagatggcgaggatgctctgggcgtggatcaggcttgg

SEQ ID NO: 206956 - DNA, 556 bp, Glycine max
aatgcccactttttttcttccaacgctcctcctccttctcatagccttcgccacctctgtctccggccgccgtgacctcgtcggagactttctccggctgccctccgaaactgataacgacgacaacttcaagggcacccggtgggccgtcctcctcgccggttccaatggttactggaattacagacatcaggctgatgtttgtcacgcctatcaaatattgaggaaaggtggtctgaaagaagaaaatattattgtttttatgtatgatgacattgcattcaatggggaaaacccaaggcctggagtcatcattaacaaaccagatggaggtgatgtttataaaggagttccaaaggattacaccggcgaagatgttactgttgataacttttttgctgctttacttggaaataagtcagcactgactggtggcagtgggaaggttgtggacagtggtcctgatgatcatatatttgtatactatactgaccatggagggtctggggtgctcgggatgcctgctggtccctacttatacgctgatgatccgatg

SEQ ID NO: 206957 - DNA, 499 bp, Glycine max
gaataaaaacacacatcatattactatgtgttgtcatacatgcattgtaatgagtggatattccaaagcaattggtccctttatccctccttaatccttatgccgtaaatggcaccatcccttgtaaattgtaattgcttcttcagaaatagaattatacaaaggtagttgcaatatctatttgccaaactataaatgtaaagacccttcttcccaatcctagtagtgtcccaattgtatttacaaaggtgggacaagatatgtatatacaagtacaaccatgtaacataatgtaacaataatcatactttggtctttactagtgcacattacagggagttattatgcactgaaacccctttgcagagaactccagggattggaaggaatactgacacaagcttgtgctgaagcctcagccatttgttcattctttatccctacattgcagatgtttgcaaaggacctcatgtgtttcatcccgtattgagacaaggat

SEQ ID NO: 206958 - DNA, 513 bp, Glycine max
taacaattgaagagtgtttgacgactcagagagcacattgcattggcgacaccgcgagcgacgacggaaattgaattgctcgtgcgcgtcggtgcgtgatcgatcgaaggacgaacgatgtcggagatggcgagcccagatcccgagggactcgacggagtccgcatgacgtggaacgtgtggccccgtacgaaggttgaatcgagcaagtgcgtgatccctctggcggcgacggtggctctgatccgtccccaccctgacatcccccgcctccagtacgcccctctccgctgcaagacctgctcctccgccctcaaccctttctcccgcgtcgacttcaccgccaagatctggatctgccccttctgctaccagcgcaaccacttcccccctcactaccacgccatctccctatctacaattccctgaaccctttacccgtcttactcttcctgctagacacctgcctcatcgacgaggagattcacttcctcaaatgcgtgcttcgtcgtg

SEQ ID NO: 206959 - DNA, 553 bp, Glycine max
  unsure (1)..(553): unsure at all n locations
gttcttatattcaattcaggtcactggtggacacggactaagctttttgacgtgggctggtattttcaggttgataactcactgaagcttggaatgacaattaactctggtttcaacacagctttactcacctgcgcatcttgggtagagagtacaattaacacaaacaggacaagagtatttttccgcaccttcgaatcatctcattggagtggacagaatcacaattcttgcaaagtgactaaaaggccttggaagagaactaatcgcaaagagagaaacccaatttcaaatatgatcaataaagttgtcaaaagcatgagtgctccagtaacagttatgcatgttacaccaatgactgcatatagaagtgatggacacgtgggcacttggagtgaccagccatctgttcctgattgtagccattggtgcttacccggtgttcctgatatgtggaacgaaattctactctcgtatctgctaccaaaataaggagcanattagcatgagaggtaccaacatgttagaccttatatcatttaagccttatata

SEQ ID NO: 206960 - DNA, 423 bp, Glycine max
gtgaatgccaattatttgaaatcactatacaaacattattcatttccaatgtacatttggtaccccccggtgacgttaaaggctaacaggttaatcctgattgctgagtacaattgagtaccaagctatatatggcttaaatgatataaggtctaacatgttggtacctctcatgctaatttgctccttattttggtagcaaatacgagaggagaatttcgttccacatatcaggaacaccgggtaagcaccaatggctacaatcaggaacagatggctggtcactccaagtgcccacgtgtccatcacttatatatgcagtcattggtgtaacatgcattactgttactggagcactcatgcttttgacaactctattgatcatatttgaaattgggtttctctttttgcgattagttctct

SEQ ID NO: 206961 - DNA, 522 bp, Glycine max
  unsure (1)..(522): unsure at all n locations
caaaaaacagattactagaagcactatcaaaaatgtggcaacaagaggcagcttcaagagctgcaatggaaaatggaacggaggaaggacttggagactcttctgaatcagttcctgctgcttttcctcaagacacgcgaatggaggaaactcatgaacctgttaggaacaatccccttcccattgctcggcgctaccaagatcagatggttccaagcatcacttcttccttgttgagagtggaagaggaagaaacgtcttctgatcttcgaaactcagcagaagagagcagcagagctgaagtgccagtaactgcaaatgcacaacaaaatgcaggagttgcattgaacgaacggatgttgcagaccactaataggaatacacaaacccaatacaatactacgatggacctgagaaatgtagctgatgattctgcagtagaatcttcaagtggtaccaggagagaaagggatggaggcttagttccagtatggtctccaccagcttccagntactcagaac

SEQ ID NO: 206962 - DNA, 526 bp, Glycine max
  unsure (1)..(526): unsure at all n locations
gagaagtggccttcattaaaaatgtaatatgtagatacagaaccaacaaggagataagtggggaaacaagaggaaatatgtttcatggggaagtttgtgaggaagagaatgatatagaagttacagagaagagaggaggaaaaaagctttatgaacattgtggataaaattcagatatctgcttgctcagaagtaggtttcatagcagacacacactaagaggcatataactagaaatgactttcaaattttttcatccattgagatatcccactttttcgatcaaagcctggatatcagcaccgctactcccctcagttgcctcgacgatgttggggctgtccaatggcgtgacatctgaaagagggtagcttctgttattatggagttgactgattgcactgcttcccactcccttcagtatgacacttttgtgtaggccaccaagaagtccttcgtaatctgtgtcaccgcattctccaacgaacaccaccatctttgacagttcanaaccccatcgaacata

SEQ ID NO: 206963 - DNA, 385 bp, Glycine max
ctcacacaatgcaaacaataatatttagaacacatatatacacaaacccagataattacatgctgtagcaacgacaattcacattctccctggcttcatccggagattatataatcaacaattggcgaaattaaaaagacattaattaaacatgacaaacaaataactaaaaccaatatgtacaataaatcagcacccatttacatcttcgagttcaggcaagggaaacctgagaattgccgcaacacccgtgagttgagcgagttgcggtgcataaacatgcatcgacgaatacaccaaagcctttccttcaccctctttcaccgacttcaccaaactcgcggacttttttctcgtctcaacatcttcgttcctataaagatca

SEQ ID NO: 206964 - DNA, 545 bp, Glycine max
  unsure (1)..(545): unsure at all n locations
cttggatccttagttctttagttctccttctcctgcgagaaacagaactttcagaagcggaatcgctcactattgatccgattccaccgtcatcggatctttctgcagccaccgtctatcgcacttcgttgccgtcattggcgccggaattctgaatgttaatgaatttgtgaagtaatgatgagtggaagagctatccaataacatgacatgaactgcaaattcttgtatacttgaaggttaagacagcttaaacaatacaaggatgttttcgttgctttatggactatggaagtacttgttcagcaagatggagcttcatgtactcattctggggattgacaaggctggcaaaacgactttgctggagaagatgaagtcggtgtactcaaatatagaaggcattcctcctgatcgaattattccaacagtgggattgaatattggtcgcattgaagtggcaaatagntaacttgtgttctgggacctaggaggtcagcctggtcttcgctcaatatgggagaaatattatgagaggcacatgc

SEQ ID NO: 206965 - DNA, 559 bp, Glycine max
tattgatatatgtgtgtatttcctttgggcttgaaactcaaaactataataatgggttcttcttctcctccggacactagcaagagcataaagctagagcgatacaacagctacatcaggagactcaacagcaccaaactcctcaacgcctcctccaaactcctcttccgtgccactatcttagtcgcactcatcctcgtcttcctcttcaccttcaactaccctcccctcgccccagacttcacctcccaccgccacctccactcccactcccacttcctctcctcctcctcctccttcgcctcctgggagaagcaggtccgccactcctccacccctcgccgccccaacggcctcaccgtcctcgtcaccggcgccgctggcttcgtcggcagccactgctcccttgccctcaaaaaacgcggcgacggcgttctcgggctcgacaactttaacagctactacgatccctccctgaaacgctcccgtcaggcaatgctctggaaacaccaggttttcatcgtggaaggtgacctaacgacaccccttgcttgagaag

SEQ ID NO: 206966 - DNA, 427 bp, Glycine max
atatataccccgatatttatattatgtataattgctacaccaacatgcatttggatccatggacacggaccaccacaataattaagaaaaaataatagtaataattgaagaaaaaacaagaaaaatgatccaaggtaggtatttgaattatttgtttttctttgtttcttgtaaaaacaaaaacaagggcatgtggtgtgaggataattaaggcttgggtacgtacgtaggtgattattcattgtcaaggtgatattccttttttagcctttgctggaggccgtaataaccgaggtaccacttgacgaacttcctgagaccggtggcgagatcggtggtgggattgtaagagaaatccctgtaggccaagctgacattggcgtgtgtgaagggaacgtcgccgtttgatggcatcttaatgacgtgc

SEQ ID NO: 206967 - DNA, 593 bp, Glycine max
  unsure (1)..(593): unsure at all n locations
atgcccactttttttcttccaacgctcctcctccttctcatagccttcgccacctctgtctccggccgccgtgacctcgtcggagactttctccggctgccctccgaaactgataacgacgacaacttcaagggcacccggtgggccgtcctcctcgccggttccaatggttactggaattacagacatcaggctgatgtttgtcacgcctatcaaatattgaggaaaggtggtctgaaagaagaaaatattattgtttttatgtatgatgacattgcattcaatggggaaaacccaaggcctggagtcatcattaacaaaccagatggaggtgatgtttataaaggagttccaaaggattacaccggcgaagatgttactgttgataacttttttgctgctttacttggaaataagtcagcactgactggtggcagtgggaaggttgtggacagtggtcctgatgatcatatatttgtatactatactgaccatggaggtcctggggtgctcgggatgcctgctggtccttacttatacgcggatgatctgattgaagtctgaagaanagcatngctctggacatataaaac

SEQ ID NO: 206968 - DNA, 420 bp, Glycine max
aaacaataattttggcatcataaattcttccggaataattatacaaaagtgaccagggaaaacccgatctgccagttgcccactgaataaaaacacacatcatattactatgtgttgtcatacatgcattgtaatgagtggatattccaaagcaattggtccctttatccctccttaatccttatgccgtaaatggcaccatcccttgtaaattgtaattgcttcttcagaaatagaattatacaaaggtagttgcaatatctatttgccaaactataaatgtaaagacccttcttcccaatcctagtagtgtcccaattgtatttacaaaggtgggacaagatatgtatatacaagtacaaccatgtaacataatggaacaataatcatactttggtctttactagggcacattacagg

SEQ ID NO: 206969 - DNA, 586 bp, Glycine max
  unsure (1)..(586): unsure at all n locations
gtcttgttggtaaagaaagaaagagaagagaagaatcgaagacgaagatggaggacgcatcagcatcaaagttcattccacaccaaatcggaggggtccaaaacgacgcgcttcgattcggtctccatgggagtcaagagcgacatcgttggttctcaccctcttcaatcttcactccaatctacaaggagaatggatgaagcgatgaagaggcaatgcaaagttaacctgtacggaactgcttttcccatgaaggaggagcttgacaggcaaatcctgtccaggttccagcggcctcctggaccaattccttcttcaatgctgggtttggagactgttacaggaagtgttgatcactttggttctgaggattgtctaaatgacccccgtgagtcagagactttccggccattagacatgcatcatgggatggaagttcgccttggtctatctaagggaccagtgtacccaagtattatataattaaatttgactgttattctagtaccagaaaacagtattttgtgatcgaagcttctggtattcattaaaatggaagtgtncgagggattctcatatgtagtcg

SEQ ID NO: 206970 - DNA, 443 bp, Glycine max
tttttttttttttttttttttttttttttttttttttttttttttttttttttttttttttttttttttttttttttttttttttttttttttttttttttttgagggggagcggggggacccccaaaaaaaagaaggggtgtttaaaaaaaacccgggcccccctttccgggggaagccccccaaaaccccgggattttccccccccccccccggcaaaaaaaaaaaaaccccccccaaaccatatttaaaaaggggaaacgggggggaaaaaaattttaccccaagggggggggggcccaaaaaaaaggccccaggcaaaaaattgggttaaaaaaaaaaaaaacccccttttttttgggccccaaaattttttcgccccccaaggaggggaaaaccccaccccccaccccccagggggaaaaccccgccccccccctttt

SEQ ID NO: 206971 - DNA, 330 bp, Glycine max
cattcactaagactagtctctgagagactttattttgtcattttgttgcctactttcagtccttttaggaactagtattgattaataaaaataaataaggaatgaacaaaattcaatttactttttaaatacatgacttttcccaccaccatttggggatactgtataaatattatagccatacagctgcagctttcagggaaagaaaatctgaaattttgttggtataaaagcccggctgtatggagttgttagggctttgaagcatggccagtgtggtgacccctgaaagcacaagaagagttttgcaaccaccattttgtccaaaca

SEQ ID NO: 206972 - DNA, 239 bp, Glycine max
agacaacttcaaacatagatagcacttaaggtagatttacacatagcagatatatataaccagctattattgaagatttttaagcaacactgaaagaacttgctgcactctccacaaatcttcttgctcccttgaaccacctcttgtctccagcttgagccttgcaaatgaacagttttccatcttttacagttgctctaattatgtggtgcttgccacctttatctccatcagcagtc

SEQ ID NO: 206973 - DNA, 587 bp, Glycine max
atcgagataactagaaacagtgtgatgaaaatgaaggaccttgttttcttcggtgctacaattttggtagcatggcaatgccatgcgtacgatatgttccctctacgaatgaacactggctatggtgcccgtactccggaggtgaaatgcgcaagttggaggcttgctgtggaagcacacaacatctttggctttgagaccattcctgaagagtgcgttgaagcaacaaaggaatacatccatggcgaacaatatagatcagactccaaaacagttaaccaacaagcttacttttatgccagagacctcgaagttcatcccaaggacacatttgcgctcagtatagatggcaccgtactctctaatattccatactacaaaaaacatggatatggggtggagaaattcaactcgaccttgcatgatgaatgggtcaacaagggcaatgcaccggcactgaccgagactcttaagaattacaacacgctggtgtctgatggcttcaagattatattctcgtcaagatgaacactggtcaaacaggccgtagcagaagcaaacttaacgaatgctggctaccacacatg

SEQ ID NO: 206974 - DNA, 573 bp, Glycine max
  unsure (1)..(573): unsure at all n locations
gggaggagcggcattaaaaatgcagatcttcgtgaaaaccctaacggggaagaccataaccctcgaggtcgaaagcagcgacaccattgacaatgtcaaggctaagattcaagacaaggaaggcaatccctccggatcagcagcgtttgattttcgccggaaagcaacttgaagatggaaggaccttggccgattacaacatccagaaggaatcaacccttcaccttgtcctcaggcttcgtggtggcatcatcgagccttccctcatggctttggctcgcaaatacaaccaggacaagatgatttgccgcaaatgctatgctcgtctgcaccctacggctgtgaactgccgtaagaagaagtgcggtcatagtaaccagctgaagcctaagaagaagatcaagtaaattctgggtgggatattgttggtctctactttcgttntgtttgtcttagaacagtgacttgtttggcatttatcgtatctggctctgattaatggtaacttgtttgagacaataggtttgaactagtcattatatcttgatgatgccatttagtcctagtcagaac

SEQ ID NO: 206975 - DNA, 421 bp, Glycine max
gactaagaccaaaatggcatcataaaaatataattgactagttcaaaactattgtctcaaaacaattaacattaatcaaaaccagaaacgataaataccaaacaagtcactgttctaagacaaacaaaacgaaagtagagaccaacaatatcccacccagaatttacttgatcttcttcttaggcctcaactggttactatgaccgcacttcttcttacggcagttcacagccctagggtgcagacgagcatagcatttgcggcaaatcatcttgtcctggttgtatttgcgagccaaagccatgagggaaggctcgatgatgccaccacgaagcctgaggacaaggtgaagggttgattccttctggatgttgtaatcggccaagggccttccattttcaagttgctttccggcgaaaat

SEQ ID NO: 206976 - DNA, 514 bp, Glycine max
agcatgtcctttaccaccattctagatatcacagaactttgcagctctcttaggtttttaaaaaacaccacgcaaacagcaagatggccacttacgacagtaacatgctactaaattatgttccagtttatgtgatgctaccactcggagttgtcaatgttgacaatgttcttgaagacccagatggccttaaagaacagctcttgcagcttcaagctgcgggtgttgactgtgttatggttgatgtgcggtgggggatcatagaactgaaggggcctaagcagtatgattggagagcctacatgagttctgttcagctggttcaagagtgtggctcgacactgcaagctattctgccattgcatctatgcggtgggaacgtcagagatatagctaacatgccaattccacagtgggcgcttgacattggagaatcagatcatgatatcttatacaccaaccgctcaagaacccggaacatggaatatctaactgacggtgtagacaatgagcc

SEQ ID NO: 206977 - DNA, 450 bp, Glycine max
gataaaatagtttattaacttcgtgatcggaatacacacataacaagtacacgagagtactttggagatgtttaggcagtgctacttcatggcattattatcagcattgcacattacagaggctggatgctttatttatattggcagatattatttccagcagattatttaattactcatggcaccaaattgggaaatcaaccatcaactttcatgtctgtctctggaagccaggggaatggcagcgttggtttagttgcttccagaagaacctcaatgggaatctttggtgcagatggcttcaatggtgctatggcgtgagtatacttttgcgggtctgcacagggatcctgagctgcatgcatctatagcacagatttttagaatatattaaaattggatttttgcagtagatcatctgatagacgaaggtatgttactccgaacatg

SEQ ID NO: 206978 - DNA, 541 bp, Glycine max
  unsure (1)..(541): unsure at all n locations
gagcacactcgtgaatcgtgatttagcatttaccacaccaaaatcaatctgcggagtcagaaagccatggatccctacaagaatcggccatcaagcgccttcaattctcccttctggactacaaattccggtgcctcccatctggaacaataactcatcgctgactgttggatctagaggtccaattctgctggaggattaccatctggtggagaagcttgcaaactttgacagggaacggatccccgaacgtgttgtccacgctcgtggagctagcgcaaagggtttctttgaagtcacgcatgacatttctcacctcacatgtgccgatttccttcgagcccctggagttcagacccccctcatcgtccgtttctccactgttatccacgagcgtggcagccccgaaaccctcagggatcccagaggttttgctgtcaaattctacaccagagagggtaacttcgaccttgtgggaaacaacttccctgtcttcttcgtccgcgatggcctcaagtntcctgacatgggtcatgccctc

SEQ ID NO: 206979 - DNA, 523 bp, Glycine max
aagcccaagtaaacagagaatcatggaactgtccagatcctcatccttatcacaatggacatatagtattaagtggacaagtcaagaagttgagttcatgaaataagcaatatacaatatagcaatactgtaataaaaggaccagtcctttcaaattaatactgtgccacaaacttctcacttgttcctacatctgcatctcttaaaagctagggtttccaccaccaatcttagatacttggcttcaagttcaggtgagatgctatcttttgtccaagagaacgatcagcctgagaccagtatgatatccagatgctacggatttcatgggtgacacgtgggtcagacaaagcatcaacccatcggcggacaaacctttcttgcctgtcagaaggccaagatcggtatctctccccaggttgcttgaagttgttctccttctcaatcatgcacttttcacgcttcccacctaggatacgaggaggaacggggaccttttccgcatgacggacaggatcatacc

SEQ ID NO: 206980 - DNA, 533 bp, Glycine max
gtggattgtgctctacactcccccccagtgatccatttcccaaaccagccctacaacaaacctgaaattaccaaagaacccaccacctccaccgcggaaaggcctcagtggaacccattccaaaaagccgcagcaaaggccctcgacatgttcgagagcgcgttgctctcacgcgagctcaaccaaccctttcccaaaaccactgacccacgcgtccaaattgccggtaacttcgcccccgttccggaacaccccgtcgaacattctctccccgttattggcacaatccccgacgccattaacggcgtctacctccgtaacggcgccaacccattgttcaagccaaaagcgggccaccacctcttcgacggcgacggaatggtccacgccgttaaattcaatgacggcaccgtcagctacgcgtgccgcttcaccgaaacgcagcgtctcatgcaggagcgcaaattgggaaaacctgtgtttcccaaggcaatcggcgaactccacgggcattccgcatcgcgaggttgatg

SEQ ID NO: 206981 - DNA, 484 bp, Glycine max
agccaaacagaaagcgaattcttttttaaaacaaaagaaaggaagcaagaaacagaaagcagctgagcttcatccacaaactacaagctgattcgcgaaagcatagataaatatttattattgagaagggtagaaaaggcaacaaaatgtttgttgtctgaaatgtgttttaccgtttaagcgaccaaataaaatagtccaggtggacttcaatgagcctccacaaacgtgccatggaagccatagggcactcttgaaggcagcatgacagtggcctccaacttcaaatcaagtgcattcagaatctgcaactcggactgccacgtcatctcgtcatgcacaaaagccatcacgtacccttcatcctcattcccattccctccacgtgttggcaagaagaatggctctccaccgaaccttctctctccgtactcgtgcctcttcacttccccactctccaggtccaccttcgccacccccgaca

SEQ ID NO: 206982 - DNA, 523 bp, Glycine max
aaactaactaatcttatattatgtagaaggttttagtattacacttgtatacatgaccaatgcacataacacgtatgctattgggctactctagtttagagaaaatttgacacaagcagcagaaaccagtaggcagaatgcaatagagaaatattacatcatcaaccgggctttaaagcttttgtgtacaaaacccaaaatcaagcactgtagcctctgtttgatggatgcaatagcccagcattgtagccttcacaggctgccaaacaagcctcttccatggaggcctcagaaacgccactgttgcaaatgttggcgaatgctcgcatgtgtttcatgccatactgagtcagtgtcccacagtgagtttcaaacacccgaaccattgattttaggcatgtccagtcatcaacaagggacgaaccaggagccctcacggattgtagaacagaagaaccttttcctggtccatacagtaaaactccaatcaattccacgctaccatctatgtgttttctatgct

SEQ ID NO: 206983 - DNA, 569 bp, Glycine max
ctctcttctctctgcatcgcttcaggttcttctgaaaagatgtctcgcgtgtatgttggtaacttggattcacgagtcaccgagagagatctcgaagacgaattccgtgttttcggagttattcggagtgtttgggttgcacgtagaccacctggttatgcttttattgactttgatgaccgcagagatgcacaggatgctatccgtgaattggatggtatgtttagaagaattatgttgttggaatgtaatagaattaaaatcaaaattaaaatgtgcatatatatgtatatttgctacattcttcttatctgctaatgtgttattgtttttcccccatgttttttccggttgatatgttgaagggttttcctcaactagctagttaagtcttctttttggcctatggggcaagcagatgctgctctctctttcttctacttctgccttgggctgcagtaatggttttttcttcgttgtgtcttcgtcaaagtctgctgcttgtacagtttgactacttctactactactgcatgttaagaggattaagaatgggacaccggggattt

SEQ ID NO: 206984 - DNA, 506 bp, Glycine max
attctgcaaagatctggaactctatttaacatactagtagcaacaaccttaacaagatcattacctgcaatgaaactacaagtattctgcaaataaattaaacacaagcttggacatagagaaactaacgaatacaatccaagagtagaaactcagggccttgcccaacaaaatagactcatacttcagtctaagcaccactatagattaacaaaatctcactattctcttaacaatcacagataccaagtgtcaaaatcaacttctgcttctgcgtcgttccctaaggccatttccattagcatatgggacctcctcacgcccacgataaggaggtgacctgctgtagctacgtccacgaggtgacaaactacggcgcctaggggaccgcccacgaggactgtaactccttcgcccataacttgggctcctacggaatctgggtggactacggctacggcgtctttctgaaccaccacgcatgcgacatttacgagcaaaatgac

SEQ ID NO: 206985 - DNA, 475 bp, Glycine max
gttttgctatggagattctagaagcagagaacgttctggtccttccctctgagcaacccaacaacaataggccaaagccaaaaccaaagcgtttcgtgaaaaaccaaatcccagactcaatccttaacaaccctcttctgagcgccgcaatctctgtgctcccttccaactacaacttcgaggtccacaagtgcgtctggcgcgtgctctccacgggagcaaaacgcgtggctctccagttcccggagggtctcctcatgtactctctcccactctccgacatcttcaccaccttcgccggcgtcacccactgcttcgtcctcgccgacgtcacctacggcgcttgctgcgtcgacgaccttgctgcctccgccctcggcgccgacctcctcatccactacggccacagctgcctcgttcccatcgacgccaccacaatgccctgcctctacgtcttcgtcgacataaaatcgac

SEQ ID NO: 206986 - DNA, 466 bp, Glycine max
ctttcgccctttttttttttttttttttgttttttggctatctcaaacaattatttttatttatggggaaccaatctaaaggccaaattagcgggggggacacaaagctatgagaaggcttaggggttttaaacaattgatagagggtttaaggacaactgggaatgttaactcaaaaaatcatttttcctttatgtccattaccagaacaattgtaaatgccatgttatataactgccatcattgttcctttcccatcctcacgctttaaaactgcaaccttgccactgccaccgaagtacatatatactttctggataacccatatgctcatcactgactttaaacaaaaaaggcctaatccaatgaagtataatatcccaaccaatgcattgttttccaacacattaatcgcatccaaaatgcctgtgagagattttccttttaagataattggtggaacaac

SEQ ID NO: 206987 - DNA, 549 bp, Glycine max
ccttcaaagtcctgtactccaatttgacatccctgttgttagggtcaatgtcaagagctttcttaatgtcaagttcagccaaatccaagttagtcaactgcatatgtgcttgggcccttctatagagggctttcacatttgtactctcaaggtccaacaccttagtacacaatttctctgcttctttgtagtcttttaacttcaacttgcaagcagcattgttcagattgcaggcaaccttcaaggtcttggcctgctttttctcctcctcaccaaaggaggaatcatattctatgtacttcacggccttttcatatcttttggaagctcttgcatatttactagctttaaacaagacatttccctcttctttcttcttaccagcagcttcaagtttctcttcagtgttcagatcccaggactccttctctttctcaaatgacactagctcaacttcaaaatacacggctgagttaggaggaactacagccaactcctgttgggactctgatgtaccgaaagcataatcaggtgcaatggtaacaacgc

SEQ ID NO: 206988 - DNA, 533 bp, Glycine max
gagtttcatagacccagaatggctttatggctcgctaccaggtgactatggttttgacccactaggactaggaaaggacccggcattcctgaaatggtatagagaagctgaactcattcatgggaggtgggcaatggctgcagttgtaggcatcttcattgggcaggcatggagtggagttccatggtttgaggctggagcagatcctaatgcaattgctcctttctcatttggctctctcttaggtacccagttgctcctaatggggtgggttgagagcaagagatgggtggacttcttcaacccagattctcagtcagtggagtgggccactccatggtcaaaaactgctgagaactttggcaactctactggtgaacaaggctaccctggaggaaaattctttgaccctttgggatttgctggagctatcaaggatggccgttacattccggatgccgacaagctagagagactgaaaatggctgagattaagcatgctaggattgctattgtggctatgctgattttct

SEQ ID NO: 206989 - DNA, 476 bp, Glycine max
caggctgcgcagtgtttgaacgttgaaggagagcgtagaggcagtggttttctttttttgatttctctttgtagaatcgaatcgagttaatttttgatcgtgtgagtgtccgatcttgaaatccacaacaacaatggtgagaggattgctcaacaagctcgtctctcgctccctctcggtcgccggaaaatggcagcacaatcaactccgccgcctcaacatccacgagtaccagggtgctgaattgatgagcaaacacggagtcaacgttccgagaggcgtggctgtttcctctgttgaagaggccagaaaggtcatcaaggaccttttccctaatgaaaatgagttggtggttaagagtcaaattttagccggcggacgaggtttgggaactttcaaaagcggccttaagggatgagtgcacattgttaagactgaccaggttgaagacatagctgggaagatgcttggacaga

SEQ ID NO: 206990 - DNA, 434 bp, Glycine max
attaaccaataatattttagttaaaacatgtccatggccatcattaacacttttggaaacgttgatgtctatattctattattatcatcatggtttctcgtatctgctgtgtgtgtttggggacgacccgccacttttctgcaagactttgaaatcacgtggtcaaagactcatatcaggcaaattgatcaaggcagatccatccaactcattctagatcaaaactctggttgtggctttgcttccaagagtaagtacatgtttggccgtgttagcatgaagatcaagctcatacccggagactctgctggcactgtcactgcattttatatgaactctgacaccgacactgtacgtgatgagctggattctgagttcttggggaaccgtaatggtcagccttacacagttcagacaaacatttatgctcacgg

SEQ ID NO: 206991 - DNA, 368 bp, Glycine max
aaaaaagacaacccagagagcgcgttttaataaacgctcttctctgaaaacccccatttggggtggttctttcttcttctctttcgcttcttcgatcttcgatcttcgtcgctgaaaatgagagagcgcatttcaatccacatcggccaggccgggattcaggttggaaacgcctgctgggagctttactgcctcgaacacggcattcagcctgatgggcagatgccaagtgacatgaccgccggtggaggtgatgatgctctcaacaccttcttcagtgaaactggggcaggaaagcacgtgccccgcgcgatttgttgtgatctctgagcccactgcgattgatgaggtttggactgggacatacc

SEQ ID NO: 206992 - DNA, 345 bp, Glycine max
cgaacccaaagtttaatacatttagggctctgggtttcaccaagcaacttcaaataaatgttttcaccacacttcacataaagctccaaaagtaccggaacaaggcaagttccacggaaagtacaacgatccacagagcacgagaagaaaaacaacacagaaagttacataatagtgcaaacttctaatcataatcctttccttaatcaccatcttcagttgcctttgcaccaacttccttataatccttctccagggcagcaagatcttcacgggcctcatagaactccctctctttcatacccttaccaacataccaatgatcaaacgccctcttggcataca

SEQ ID NO: 206993 - DNA, 546 bp, Glycine max
gcgagaattggggtatattccaggttgttgattacggtgtggatcaacaactggtggccgagatgacccgtctcgccaaagagttctttgctttgccaccggacgagaagcttcgttttgatatgtccggcgccaaaaagggtggattcattgtctccagccatctccaaggggaatcggtgcaggactggagagaaatagtgacatacttttcgtacccaaaaagagagagggactattcaaggtggccagacacgccagaagggtggagatcggtgactgaggaatacagcgacaaagtaatgggtctagcttgcaagctcatggaggtgttgtccgaagcaatggggttagagaaagagggtttaagcaaagcatgtgttgacatggaccagaaggtggtggttaattactaccccaaatgccctcaacctgacctcactcttggcctgaagcgccacacggatccgggcactatcaccttgctgcttcaggaccaagtgggtggacttcaagccaccagggacaatggcaaaacatggatca

SEQ ID NO: 206994 - DNA, 549 bp, Glycine max
  unsure (1)..(549): unsure at all n locations
gtaacgatcatgcgagncattattattgtggcagctccagccacggccgcccttcgtttttatatatcataatttaagttttcctagtaatgaaaataaaaatatggctaacgttccatttaaatcctcatataaggacaaaaactgcatttaaaactaaatgcaacatataacattatggaggagggggcataaagagaacataaatgaattacatattatgcacgacgtttactcaaacgccatgaatttggctcatggtatctgtcataaagtggttcaattcgctcttgacgctttcgcttgctcatctttgtaggatctgccactttgaagtatcttggagccaattcaacaagccatttggggtctatgacagtgacctcacgcatatattccttagttgtcatcacaagctcatggtagatgacccagtctggttgtctctggaacaaagctgaacttggatggatatacacaggctggttctcaacaagggttctgtaaccttcctgggggtcctttctgaaacatggaaaaaaaccctgc

SEQ ID NO: 206995 - DNA, 457 bp, Glycine max
aaaacaaaactcaatttccataaatttattaaaaatctaaaaatgtcagaggggcgttgaaatgagctacatgctaaacatacttccttcccatctacattcctaatctcattgttcctgctatcattgataggactttttttcaagtggactgaggagttttccaatcctttggcacaggtccaaaatcatatataacttctctggggcaagaccatacaagttttatagcctccggtgttccaattcctgcacctcttgcgtcgccagcgggaccaaaccaatgattctgaggagctccggttgtccttgctcttagaccagcataagtagtaccatttactgaattgccaacaacttcctgtaaaaacaaaggatcatttgaaactacagcagccgttaaatggttatgcattctttccacagcatccaatacaactgatagttgactgttttt

SEQ ID NO: 206996 - DNA, 520 bp, Glycine max
aaatgtaagaatggaaatatatattttcacaactatactgacatgttgttacattatttacaaactcattatcaaaatagtgctactaagaatccaaaaaatgcgtagtaataacgcttctctggtgtgtgctaaagaaaatactaatattagtaatataacactgaatagcctataagatatgctcaaaatatggccaaaagcacaaaaagggccatcataaacgcagaagtaggttttatcttaaatgagagattaggtgacagcacaggattattagactggcttgatcttgcttcaggattcacagctatggcaggagaaatagcaggtgtatttgatcggttaataggtaaagtagagagttcatcatcataacagttagattccctccaaccaagattcatgttctcacggtcaaagactatacggtaaccagtcatgaaattttgtgctatgatattcacgttgttgcttttcaggactcccaaacaaagtatgttaataccctcaccactga

SEQ ID NO: 206997 - DNA, 535 bp, Glycine max
  unsure (1)..(535): unsure at all n locations
ctttctttacaattccttctctcaataattctcctctgtttttcacaaagcaacatggctgcatacagagaacccatgaacatgaacatgagcgacagagccccggtttctccgcagcaaccacactctccgtggcattccccggttccgtacttgttcggagggttagcggcgatgttgggtctcatagccttcgctctattgatccttgcatgttcctactggaagctctcagggtacctcgaagggaacggggaaacagaacgggacctagaagctggcgaaacggagcaggaccagaaacctgcgaaaccatacgaggagaagatcttggtgatcatggccgggcaagagaagccaacattcttagcaactccgagtgtttcgagttgcagcactagcaggtcctctttcttcggcgacaacaccagcacgtgcacctgcgaggagaaccgaaaatcgcttgaaatggcacaggctgggactggngaccaccgaaccgcacactcctcgtcggattagaacccttgatcgg

SEQ ID NO: 206998 - DNA, 511 bp, Glycine max
ctcaaacattgtttgttgtaggaagtttaatcttgagaaatggcaggggacagcaagagcgggattctgttcatcggtgggaccggttacatcggaaaatccatcgtggaagccagcgccaaagctggccacccaactttcccttttggtgagggagtccactctctccaaccccgcaaaatcacccctcatcgacaatttcaaaggcctcggtgtcaatcttgttttaggagatctatacgatcaccaaagtttggtgagtgctataaagcaggtcgatgtggtaatttctactgtaggacacctgcagctagctgatcaagataagatcatttctgcaattaaagaagcaggaaatgttaagaagttctatccatctgagtttggaaatgatgtggaccggactcatgcagttgaaccagccaagtctgcatttgcaacaaaggccaaagttcgccgagctattgaggcttgaggaatttccttcacttatgtgtcaagcaacttcttt

SEQ ID NO: 206999 - DNA, 382 bp, Glycine max
aaacaattaataacaaataaatcccaaaagcctagttgatggttgcaatgattcataaaagtttcaatcgggataggttatcataaaatttgccggttgccaagggggggggatcaacaaagacaaattcttccaaccaagcttgggggaaccattttttttgaccagggtttcccctttccaagggaacattcccagaaacaagttcgtttgtgcagccggtttgcccttgagcgaaacgggcccaaacccggcccgtttaaattattccccccaccttttcaactaaacctcgcgggtccttttgggcccgcccacggcccagatgttcctgatcttgcagcccaacagatgctgctcccccgggtgccttttcaggttg

SEQ ID NO: 207000 - DNA, 518 bp, Glycine max
  unsure (1)..(518): unsure at all n locations
ggagatgaaccaaccccgttgtttgtttggatctagtagtcttggttcgattgctattgttgctgggggaagtgataagtatggaaatgttctaaaatcagctgagttgtatgactcttcaacaggtatgtgggaacttttaccaaacatgcacgcaccgcgtagattgtgttctggtttttttatggatggcaaattctacgtgattggtggaatgtcgagtacaactgtttcattaagttgtggagaggagtatgatctcaagacaaggagttggcggaaaatagaggggatgtatccatatgttaacgtgggtgttcaggcacctccacttgtggctgttgtggataatcagctatatgcagttgagcatctaactaacatggtgaagaaatatgacaaggaaaggaacacctgnaatgaattggggaggctttcagtccgagcagattcttctaatggttgggggttggctttcaagcttgtggagagcacttttggttggggtggacaagggg

SEQ ID NO: 207001 - DNA, 398 bp, Glycine max
agctgcgtttgttccttcttcagttttgtttgattttgagtgagtgacgatgggcgcgagcgtggaccttgcccaagacggttccgacgagcaccagaagcgtccggagatctacacctacgaggccccctggcacatctacgccatgaactggagcgttcgccgtgacaagaatgtccgtctggccatcgttttcctcctggagcagtatccgaaccgcgtggagatcgttcagctcgactactccaacggtgagttccgatccgttccttccctcttctttgagcatccctacccttcctcctaattcattttcatcccctttcaggactgtcacctgctccgatcttcttgccactctcttcgactttctccgtcgtttggcacattctccgaat

SEQ ID NO: 207002 - DNA, 417 bp, Glycine max
  unsure (1)..(417): unsure at all n locations
agaagtctttcttgaccncattaagagttaaaggcnaaaacctagcaaactagtcggagaccgcccttttttttttttttttttttgtttctgaaaatcccattaaaatacttggggactaaggtagcattaacaaactaaggctcgctttaccccctaaaccctaatcaaaactactttcgttccaacgccagaaacttccaattttaacattggtttcaacaataaaagacacaacaatacaactgtgtgtccaaatctgaagcattcccaattatgacatgcacatacagggaacataatcagaagtgatgagttatcattaataaaatttcaaaccctaagaatcatacgcttggtggagaaagcaattgcgacccaatcatgctgcgaagacgaccaccgaagctgcttaat

SEQ ID NO: 207003 - DNA, 538 bp, Glycine max
  unsure (1)..(538): unsure at all n locations
atttcttcctcctcctctcaatagcccttttctcagtttgttgcttagcagcatctcaagctcccaccaccaaatcacacccctatatccttcccattaagaaagaccccgcaacaaatttgtactacacttcagttggcattggaactcctaggcacaactttgatttagtcattgatctttctggtgaaaacttatggtacgattgtgacactcattacaactcatcatcctacagacctatagcttgtggctcaaagcaatgccccgaaattggatgtgttggttgcaatggccccttcaaaccaggttgcacaaacaatacatgccctgctaatgtaatcaaccaattagccaaattcatttacagtggtggcttaggtgaggatttcatattcattcgtcaaaacanagtgtctggtttgctttctagttgtattgacaccgatgcattcccatcattctccgacgatgangtacctctattnggctttacccataacaccaaaggaatcataggcctttcaaagtcacaact

SEQ ID NO: 207004 - DNA, 555 bp, Glycine max
ccatgatgagcttattgccaatgctgcttacattggcactcctggaaagggtattcttgctgctgatgagtcaacagggacaattggcaagcgtttggccagcatcagtgtagagaatgttgaatccaacaggcgtgctcttagggagctgctttttaccgctcccggtgctcttaaatatctcagtggtgtcatcctctttgaggaaactctctaccagagcacagctgcaggcaagccctttgtggaagtcttgaaggaggctggtgtgcttcctggcatcaaggttgacaagggcacagttgagcttgctggcactaatggagaaaccaccactcagggtctagatggccttggtcagcgttgcgccaagtactatgaagccggtgcacgttttgccaagtggcgtgctgtgctgaagattggtcccaacgagccatctgagctggctatccatgagaatgcctatggcttggccagatacgctgtcatatgccaggagaatggcctggcttccattgttgagcctgagatccttgttgatgatctcatgac

SEQ ID NO: 207005 - DNA, 500 bp, Glycine max
  unsure (1)..(500): unsure at all n locations
gtttctttttcttctatagagacacacggagagagtctcagagcaataaacacccttcaatggctaccactaaagtttacattgtttactattctacgtacggacatgttgagaagttagctgaagagattaaaaagggagctggttccgttgaaggtgtggaagcaaagctatggcaggtacctgaaacactttctgaagaggtccttgggaagatgggtgcacctccaaagagtgatgtaccgattattacacccaacgagctacctgaggctgatggcttattgcttggtttccccacaagatttggactgatggctgctcaattcaaagctttcatggatgcaactggaggcctgtggcgcacacaggcactagctggaaagcctgcaggaatcttttacagcactggttcttaaggaggtggacaagagacntactccgtgacatctattactcagcttgttcaccatgggatgatttttgtgccattggttaca

SEQ ID NO: 207006 - DNA, 569 bp, Glycine max
tgggttttcaccgatcaagcattgcctaatgatcttgtcaagagaggagttgctggtaaggatccatctgctccccatggagttcgacttttgatcgaggactatccttatgcttctgatgggctagagatatgggatgctatcaagtcttgggtggaagaatatgtctcattctactacaagtcagatgaggaacttcaaaaagaccccgagctccaagcttggtggaaagaacttgtagaggtgggtcatggggatttgaaggataagccatggtggcaaaagatgcaaactcgtgaagagttggttgaagcttccgctaccctcatatggattgcttcagctcttcatgctgctgttaactttggacagtatccatatggaggtttaatcctgaataggccaactattagcaggagattcatgcctgagaaagggtctcctgaatatgatgcgttagctaagaaccctgagaaggagtttttgaagactattactggcaagaaagagaccctcattgaccttacaattatagaacatttatcaaggcacgcatctgatgagttcta

SEQ ID NO: 207007 - DNA, 512 bp, Glycine max
aattagaggaaaaagaggctgagatttcatcaatgcacaatgctttgttggcaaaagaagaaaactccctctttccagcatctcaaatgagagatctctttgacaagatagataggatcaaaatccctattgtagagtccaaagaagatgatttggagccacatacttcagcccctatgagaaaactcttttatattattgatagtgttcctaggttgcatgatcaaataaactctctgtctcatgataaagaaaagctgcaatcaatccttgaaactagggatcttgacattaaggatctgaaggatgaagtcaaacaactcaatagaatctgtgaagactctaaaatgatcaagaatgaattgtctgagctcacctatgtattagaaaaaattatggatattctgggagctggtgaatgggttgtagataggaaatctaaaggttcgaaggaattaataccagcattggagaagcatatcattgccattctttcagaatctgaaaattca

SEQ ID NO: 207008 - DNA, 502 bp, Glycine max
  unsure (1)..(502): unsure at all n locations
gtggaaaaccaaagggaagatgggggttgtgatcgttttcctgtgggtatgcgtgttcttgctgtggatgacgacccaatttgcctcaaggtgttggagaatctccttcgcaaatgccagtatcatgttactacaactaatcaggcagttgaggcactgacaatgttgagggaaaacagaaataagtttgacctcgttatcagcgatgtgaatatgcctgacattgatggatttaagctccttgagttggtgggacttgaaatggacctacctgtcatcatgttgtcagcacacggtgatacaaagctggtgatgaagggtgttacacatggtgcatgtgactatttgctgaaacctgttcgaattgaagagttgaagaacatatggcaacatgtggttcgaagaaagaattttgatagcagggatcagaacanggcttccaatgaggagaaggctcctaattttgctgggggaggtagtcaaggcctaagatcagaaaaca

SEQ ID NO: 207009 - DNA, 360 bp, Glycine max
caagtttctcatatgatattgcaattttatcacttgttacccactatacatacaactgtggggtgctagtgggagttattgcgagctatgacatcttcttacaacacctgtatcacctgcaattgctttaggaactgttatctctctcgctcgcgctccaaaaaaattcaagggtgaagcgtattaaggcaaagccaaaaacagctgaattttcaatcgcaagaatgtagttccatgcatcacggaagccaaatagttgcaatctgcaattctgaatttctttgtaggcgagatagggaatttgaagattatctttaaaaaacaaaatgaaaatgttttaaaagaaaacctaaaagtttg

SEQ ID NO: 207010 - DNA, 300 bp, Glycine max
aaaagaggatcttggaattccctatctcgcctacaaagaaattcaaaattggggattgcaactattgggcttccgggatgcaaccaacaaatttttacaattgaaaatctaagctgtttttggctttgccttaatacgctccacccttgaattgaggaaaacgccagcaagagctttagctgttccaaaagcattcacaggtgaaacaggtgtttggaaaaagatgacagagctcacaatggccacaacccgttttacacagttgcccacggtgtggtgaacaggtgataccctttgcaa

SEQ ID NO: 207011 - DNA, 561 bp, Glycine max
gcgaaatccgttcccctatctgcttttcgagttgttgctaaagagtgatggactcaccgcccagcaatcagcacgcggtcgacggagacgccaacgacgtcgttagatccttttcccaccgcgacgacgatgaagacggcaagccccaacccctcaccggggacggcgccagtcctggaaagatattcatagggggtttagcgagagaaacgacgattgcgcaattcatcaagcactttggtaaatacggtgagataacggattccgtcatcatgaaggaccggaagaccggccagccgcgtggtttcggcttcataacttacgctgatccctccgtggttgatacagtgattgaggacactcacattatcaatggcaagcaggtggagattaagcggacgataccgaggggggctgctggctcgaactcaaaggacttccgaacgaagaagatttttgtgggtggaattccttcgactgttactgaagatgaatttagggacttctttacacgctatggagaagtcaaagatcaccaaataatgcgggaccactctacta

SEQ ID NO: 207012 - DNA, 533 bp, Glycine max
  unsure (1)..(533): unsure at all n locations
ggaactaacaacaacacaaggccatcatcatggcagctgcttctcctatggcgagccaactcaagtccaccttcactaaaactcttgtagctcccaagggcctctctgcctcttcaccactccacctcctgccttctaagaggcaatttagcttcactgttagggccatccaatcagaaaagccaacctatcaagtgattcaaccaatcaacggtgatcccttcattggaagccttgaaaccccagttacatccagccccttgattgcatggtacttatcgaacctccccgcatacaggaccgcagtgagcccactactaagagggatcgaggtgggcctggcccatggctaccttctggtgggcccattcgtgaaggccgggcctctgaggaacaccgagatcgccgggcaagcaggctctctcgccgctggtgggcttgtggtgatcctcagccttngcctcacaatctatgggatttcatcttttaacgaaggagaccnaatcactgccccgtcactgaccttgacgggc

SEQ ID NO: 207013 - DNA, 538 bp, Glycine max
gaaggccagaacaggagagagagaatttaacattgtaacatgttgagagtcatacaatacatcatttacatccatctctattgcacaaataaggatccatttccacccattgtccattcatagagaatgaataacaacaaaaagtaaacaaagataataagcactttcttcacttgatgtagtaaggaaggtccaagacgtagaggaggaagtaggcccaaataacacccgaaatgcctccgaagaagaagcctccggtgaacttggcccacccatcagcagtttggagctgatcgggctccttcttgcggcccgtcaaggtcagtgacggggcagtggatgggtctccttcgttaaaagatgaaatcccatagattgtgaggcaaaggctgaggatcaccacaagcccaccagcggcgagagagcctgcttgcccggcgatctcggtgttcctcagaggcccggccttcacgaatgggcccaccagaaggtagccatgggcccagcccacctcgatccctctagtagtgggctcact

SEQ ID NO: 207014 - DNA, 243 bp, Glycine max
acacgtatcaccccccaaaacgacaaaaacaattggtctactcaaatctacaaaaaatttgacacaaaccaacacaacccaataatcaaactgccatacagaaatatgacatcaatcaaccggacccaaaaccatttgtgcacaaaacccaaaatcaaacactgtaccctctgatggatggatgcaaaaccccaccattaaaaaggggagaaccccccaaacaagcctcttccatggaggcct

SEQ ID NO: 207015 - DNA, 377 bp, Glycine max
ggcaggcggagccagatgttggctatttcgaggaggaggacatcctgctgaaggccaaccaccacttctacagcttgaaggccaagttctccaacacctacaccatcaaggtggagcacgatcatcggttccgcgacttcaggtccatcctgggtagagtctggctgctcactgagctcgacccctacgacgtgcacggcgtcaccaaatgctgcgatctaactgcggacgagttccgtcgccagtgcctcgggctggagccgatccggtttccggcgcacgcccataatgcgcccatcctgggcaccaaggatctcctcagggtattttattggcgagaccgacgagccgtcactaacgtcaaggaccaacgggcg

SEQ ID NO: 207016 - DNA, 460 bp, Glycine max
tccaaaagggtcagattgtcacaagttttgctgttattggtgacaccattggagaccctctagaggatacatctggaccttcacttaacatccttattaagctcatggcggttgagtctcttgtgtttgctcccttctttgctacacatggggggctactctttaagatcttaaaggatttgattgaaaaagagtatcgtccatcatttttttacatcgacagaacaaggaaaagccgtcctttaccaatgccttctcgtttttgcgttagtctttaactcatctgtcatgtcaattccattgtgtttgaaaccttttcctcccccacctttgaaacaaagtatattttgtctcatgttagtttaagacaactttgattaggctgagtctgttgcgaaaatttttcttgtatgatgacgatgatgtttaccatctctttcccggggtcaattttttaaat

SEQ ID NO: 207017 - DNA, 588 bp, Glycine max
ctggtgcacagtaacagtgtcacctgaaaattttggacatggatctcctccaaaatgtcttgaagaaactctcagtggaagctatttgttcctgatcattttaacctcagaaaataaatagattaaactctccagattgatttttcccaccactattcatttcaatacagttcttttgggtcaaccaaagtctacacttctgaatctgatcaacacgagcattattattttggctttaccaaggtgaagttgcagaaaacacaacacaccatatggttgaaagcctgtaaagattgctgagatgattgtggatatgtgtatatacttgtgttctgcatgttatacagaggtgaaaggtgatgatttgcttggtgcactatgagacgatactgaattgagtccatgtgctagtgttttagacttaggtgtggaagcctcttgcttcctgtaatattagttttcccttgtaagctgcattcatagtgatttagtttctttcttcctgtaagaaacttctcaagatgataaagatcagattcagtcattttggtttcgttatttcatgcattgtggcctttggttctaaaa

SEQ ID NO: 207018 - DNA, 561 bp, Glycine max
tatctctctattattctcgttttcaatatgcagatcttcgtcaaaaccctaaccggtaaaacgattacgctagaggtcgagtcctccgacacaatcgataacgtgaaagctaaaatccaagacaaggaaggcattccaccggatcagcagcgtttgatcttcgccggtaaacaactcgaagacggcagaactctcgccgattacaatatccagaaagaatcgacgctccacctcgtcctccgccttcgcggtggcatgcaaatcttcgtcaaaaccctaaccggtaaaacgattacgctagaggtcgagtcctctgacaccatcgataacgtgaaagctaagatccaggacaaggaaggcattccaccagaccagcagcgcttgatcttcgccggaaaacagctcgaagacggcagaaccctcgccgattacaatattcagaaagaatcgacgcttcatctggtgcttcgactccgcggagggatgcagatcttcgtgaagacgctcaccgggaaaactattactctggaggtggagagttctgatacgatcgataacgtg

SEQ ID NO: 207019 - DNA, 477 bp, Glycine max
gctattacaaaacgaagaaactattattggaattcattcaaattgaagtgcacatgattaataagattcaaccaaactagagaaggccaccacggagcctaaggacaacatagacatagaaattttgttatatcatacacattcaaggaagagaaaatctcaatagcaagattcaactgaaactagaaatcgccaccacggagcctaagaacaaggggaagcgtggattccttctgaatattgtaatcggcgagagtgcgtccgtcttcgagctgcttcccagcgaagataagacgctgctgatccggtggaatcccttccttatcctgaatcttcgccttcacgttatcgatcgtatcagaactctccacctccagagtaatagttttcccggtgagcgtcttcacgaagatctgcatccctccgcggagtcgaagcaccagatgaagcgtcgattctttctgaatattgtaatcg

SEQ ID NO: 207020 - DNA, 403 bp, Glycine max
tatctctctattattctcgttttcaatatgcagatcttcgtcaaaaccctaaccggtaaaacgattacgctagaggtcgagtcctccgacacaatcgataacgtgaaagctaaaatccaagacaaggaaggcattccaccggatcagcagcgttagatcttcgccggtaaacaactcgaagacggcagaactctcgccgattacaatatccagaaagaatcgacgctccacctcgttctccgacttcgcggtggcatgcaaatcttcgtcaaaaccctaaccggtaaaacgattacgctagaggtcgagtcctctgacaccatcgataacgtgaaagctaagatccaggacaaggaatgcattccaccagaccagcagcgcttgatcttcgccgggaaacagc

SEQ ID NO: 207021 - DNA, 581 bp, Glycine max
attttatcaatgtagtgccatgttgccaagctgtttaaatagagatttgtgaatgttcattgatcaatgctttagaaaactttgttatgcttctagcagataatctggaggcaaatagattacggtgtggtaagcttggcaaagaccctactgttgaaactagctttctacctgacaggagtgctgaggattcttgttcagtgagcgagaggctgaggagcaagctgagcgtgaaaggctgcgcaaacagtggcttcgtgagcaggagcaaattcgaaatgagcctcttgaaatcacatacagctattgggatggaactggccacaggcgtgtgatccaggtacgcaagggtgacagcataggagagtttcttcgagcagttcaacagcaacttgctcctgaattccgagagattcgaacaacatcagtagaaaatttgttatacgtgaaagaagaccttatcattcctcatgtattagcttttaattcaaaaactctgtgtgcaacttgctatcttggttgtgtgtgtataagctatgttaacattattttaaccaaaggatatctgctaacttatttac

SEQ ID NO: 207022 - DNA, 418 bp, Glycine max
gcatgtaataaagggatcatgggatatatcatagcataggtatttcatacattgttcttttgaggagcacatgcagcaattcagtcttactacatgattctctttatttagaaaacaaagttttaccaattaaacaaacttatcagctaggctttgcaccttagacaaactgattaaggtactcatccacagggatgtatttcacatcaggatatagagctgaagcttccactccaaaagaagactcaatttcaaagttagtatgatcccccttaacataagaagagtggttaattgacaggttcacattcacgggtggggcggactccttaatttgcttcaggagttgtttttttggaacataaattctttgaagagttctaccaatctttccctcccagagagtaacaagctcatt

SEQ ID NO: 207023 - DNA, 526 bp, Glycine max
gctagtctcagtttagttagcaaacaaccccacaggccacatccaaaggttcatttcaatatggcaatcttgtcaagttttgctcctttgaccattcttagtttagtcttgttagtggttggaatcattgtgtctggggttgaagctaggccaagagcattctttgtgtttggagattcacttgttgacaatggaaataacaattacttggccaccacggcacgtgccgatgctcctccttatgggattgattaccctccaactcatagaccaactggtcgtttctccaatggctacaacattcctgatcttatcagtcagagacttggtgcagagtcaacattgccatacttgagtccagaattaagaggagataagctactagttggtgccaatttcgcttcagctggaattggaatccttaatgacactggagttcagtttgtaaacgtgatcagaatgtatagacagctagaatattttaaggagtatcaaaaccgagtgagtgctataattggagcttcag

SEQ ID NO: 207024 - DNA, 430 bp, Glycine max
aacatataactttccttacaattaataaactaaaacatgtagacagagaaatgtcatgaactagcaaggaaggtgaatacaattaattttgttctaggaaatttgggtttgtttatcttcatgtgtttgcgtccaacgctaagatggtgctaaggttcattgggttcatgtaggctttagaacctgacataatttcctccacaatgagcctattggccttttcagatggatggaatgcatcccaaaatgcatactgctctctgttggagcaaaggttggagagtgctgtgcatagcccaagtccattgtaaggtccttgcccacagcaagctacttgtgatgtaacaaatccaaattgttgggggttagtaacgaagtcgttgtgagcttttcctgtgtttgcagcaatgataacgtcacttccaatttt

SEQ ID NO: 207025 - DNA, 544 bp, Glycine max
atctgaagtgtgtgtagagttaacaagaccagagagagagacgaagccgaacgaaacataaataaaaccttgctcttttttcacgccctagctcattttcttctccgttctcttctctctgttcctcactcactcgcatttattcaccatgactaagcaacaagctaattggtctccatacgataacaacggaggatcatgtgttgcaattgctggagcagattactgcgtcatcgccgcggatacgaggatgtccaccggttacaatatcctcactcgcgattactccaaaatctcccaactggcggagaagtgtgttatggcttcttctggttttcaagctgatgtcaaagctttgcagaaggttttgtctgctaggcatttgatttatcagcatcaacacaacaaacaaatgagctgccctgcgatggctcagttgctctcaaacactctttattacaaacgcttctttccttattatgctttcaatgttttgggtggccttgacaatgaaggaaagggatgtgtcttcacatatgatgct

SEQ ID NO: 207026 - DNA, 459 bp, Glycine max
gatcttcttgacatcgactccattgttgctgccataaagggttgttccggcgtaatccacggtgcatgttctaacatcattggtcaagtcgaagatcccgagaaacagatattggaaccggcgataaaaggaacggctaatgtgttgaaggcggcgaaggaagcaggggtggagcgcgtggtggcgacttcatcgatttcgtcgattatgccaagtcctaattggccagctgataagattaagggagaagagtgttggacggaccctgaatactgcaagcaaaaggggttgtattatctcattgcacagactctagcagagaaagcgggttgggactttgcgaaggagacaggttttgatgttgtcatgataaaccctggtacagcattggggcctctgcttcctccagaatcaatttaagcatggttgtgcttgttagtgttctcaaagggggcaaag

SEQ ID NO: 207027 - DNA, 480 bp, Glycine max
  unsure (1)..(480): unsure at all n locations
ggtcaacctctggtttgacccttctgcggattttcacacttatactattatgtggaatcatcatcatatcgtgttctacgttgatgattttcccattagagtgtacaagaacagtgagggaaagggaatcccatacccaacaatgcaagcaatgggagtgtattcaacattgtgggaggctgataattgggcaacaagaggggggttggagaaaattgattggagtaaggcacctttttatgcatattacaaggactttgacattgaagggtgcccagtgccaggacctgccaactgtgcctctaaccaaagtaattggtgggaaggggctgcataccaagctcttaatgccattgaagcccgaaggtacaggtgggttcgtctcaaccatatcatctatgattactgccaagataagtcaaggttctcagtgaccccacagagtgccttgccgcatttaaacncttaattcaagtcact

SEQ ID NO: 207028 - DNA, 491 bp, Glycine max
  unsure (1)..(491): unsure at all n locations
agatcatagtatgnccctcgangangttgcacggaaagagggcgnaagtctnggaaaggcctctacgagcgaataaaccgtacctgttatttgctcgctatcttnaatactatggaaatcgactgtgcagtgaggcactcgtggggctttttctattgcccccaatccccgctggcggactccgtaccagaaagattctctggcacctagtttactatcaatgctcgagcagttttgtggctcatcgccgtctttcaggctggcgatgtcttaatacaatcatatcacaatttcatcacagactttgagacgaaactcaaccttcttaagcttgcacattttgctgccacagattctcggcagtattttgaaaaagaagctgctgttggctaacttggaggggtgatttacaaacttcaagacactttggagcagcgcatagataaaacctatcttttacatttagatgtcaatagccattttcatgcttg

SEQ ID NO: 207029 - DNA, 565 bp, Glycine max
  unsure (1)..(565): unsure at all n locations
ctcgagccgaatcggctcgagaaaagattcaggatcaggaattaatccactagatatcccaaagatattcactaagtttgcacaaaaccaatcgttaacaacaagaaatcctgctggaagtggacttggcctggcaatttgtaggagggttgtaaatcttatggaaggacatatttgggttgaaagcgaaggtattgataaaggatgtacagtcacttttattgtaaaacttggaatcccagaccgatcaaatgaatttaagctaccttttgtacctaaagtaccgggaaatcatggatctacaaactttgctgggctcaaagttcttgtcacggatgacaatggggttagcaggacagtaacaaagggacttcttatgcatttaggatgtgatgtcaccacagcaagctcaagtgaagaatgtctgcgtgttgtttctctggaacatgaagtggtcttcatggatgtctgtgcagggctagatggttatgaactagcantccgtatacatgaaaagttactaaacatcaagattgaccactaatagttgctcttactggaaaca

SEQ ID NO: 207030 - DNA, 518 bp, Glycine max
  unsure (1)..(518): unsure at all n locations
acagaataagaaagagaggaagccgtagattccaacgctttctctctgagtcacacacacacacacattgcagcaacaacaacaaccacacccgattccatgagtcgctacgatcccaatcccttcgacgaagaaccggtcgaggttaatcccttcgcggatggagcagctaaaggaaaaggctcagggcaatcaagttatagtggaggtgcattttatactactaacactggaagtgttccctcctcaaactcaaggctctcaccccttccaccagagccttatgatcgtggggcaactattgacatccccctaaataatgcaaaggacgcaaaagcaaaggagaaggaacttcaagctaaagaggctgaattgaaaagaagggaacaggaactaaaacgaagggaagatgctatagcacgaagctgaatagttatagaggagaaaaattggccaccttttttcccatcattcatcatgacattgcanaggaaataccagtacatcttcaaaggatc

SEQ ID NO: 207031 - DNA, 484 bp, Glycine max
ggtaaggggctatctcaaacaatgatttctatatatgcacaactaagcttctatcttaattaggtgggttgacacaaacctaggaaaacgcatcccagtattaaacaaagagtaaagtttgtaaggagaactggtaatggtaactcaagaaatcatttttcgggtatatccattaggaaaacaattgtaagtgccatgttatagagctgccatcattgtccctctcgcagcctcacgctttaaaactgcagccttgccactgccacggaagtacatatatacttgctgtataacccagatgctcagcactgactcgagacagaaaaggccaaatccaatgaagtagaatatcccaaccaatgcattgtctcccaacacatcaatcgcagccaaaatgcctgtgagagattttcctttgaagataattggtggagcaactgcagctaaaatgcaaaaggcaatgtgcaacatgtaaagcaagaag

SEQ ID NO: 207032 - DNA, 559 bp, Glycine max
  unsure (1)..(559): unsure at all n locations
ggcaattttagctgcatctggaaagttttctctgtgctcctcctcctttgtcatcaacctacccactgtatcttatctacttttccgtgcactgcttcactacatctatgttggctggacccagattccccaggaacaactcggttctttgagggatttaagtctacagtttgaagtgacaccactggtgaagcagtgtgaagagactatggaacggtttaagctagataagaagttgtttgacacgggcaagaatgtggagttaacatatccatctatccgacctcattgctcaactttgccctcacttcctgtcagcactcagcaactgaaacaattgaaattaacaggccagtacagtgatgtaaacatctacattgagggttatgggctcattgcacgagctcataaaattgttcttagcttatggagtatccnctctgctcggatgttcacaaatggaatgagtgaaagcatgtccctcgaggctactttaagggatgtcccaccggaagctttcaaggcctatgctaactttttatatgatgggcaattgaat

SEQ ID NO: 207033 - DNA, 591 bp, Glycine max
  unsure (1)..(591): unsure at all n locations
gaagggaagactaaaactaaaaccccactctctttttccgagtcttccagtgaaagaaaggcagcgatggaagaagacttcgacatccccggcggcgaggaaatggatctcggcgaagacgaggtcggcgaggagagggagatcggctctggcggcctcaagaagaagctcctcaaggaaggtcaaggctgggaaacccccgaagtcggtgacgaagtccaagttcattacacggggactttgctcgacgggactaagttcgattcgagccgcgacagggattctcccttcagcttcacgctcggacaagggcaagtaattaaaggatgggatgaaggtattaaaaccatgaagaaaggtgaaaatgctattttcaccatccctcccgagctagcttatggtgaatctggttcccctcctactattcctcctaatgctacactccaatttgatgttgagctgctgtcatggactagtgtaaaggacatatgncaggatggcggtatatntaagaagataattactgagggggagaaatgggagaaccctaaggatcctgatgaagtattgggtaagtatgaaagtcatcta

SEQ ID NO: 207034 - DNA, 497 bp, Glycine max
gaaaatagtaacaattgacaaattcttgttattgacaataacattgtattttgaggatacatcattatgacaaatgacaacacaatagtattgaacccaagtgttgattactttctctctctctctcattctctctctctaattaacatcttattctgttggaaattatgaactggaaactggacatatgacgcacataactcttttgcttgcttaagtatatagaaacatgaaatggtagatgtatagagatctcactgagatgatcccttaagcttcttagcaatgccagcaaagtacttcccttgatgaaaagcttgagccaattctaactcagttggttgtctggaaccatccccggcataggtacctgcaccataaggggatccacccttcacattctccatctcaaacatcccagcacaaatgtgtaaccaatgggcacaaaaatcatcccatggtgaacaagctgagtaatagatgtcaacggagtagtc

SEQ ID NO: 207035 - DNA, 411 bp, Glycine max
gtgatctcacttggactcagtgtgaaccatgtgctcgttcttgctacaagcaacaagatgctatctttgatccatcaaagtctacatcatattccaatattacatgcacatctacgctttgcacccagctctctactgctacagggaatgagccgggatgttcagcctccacaaaagcatgcatatacggcatccagtacggtgacagttcgttctccgttggctacttcagccgcgagcggctctccgtgaccgccaccgacatcgtcgacaacttcctcttcggttgcggccaaaacaaccagggcctctttggtggctccgccggcctcatcggcctcggccgccaccccatctccttcgtccaacaaaccgccgccgtatatcgtaaaatctcttcttactgcctcc

SEQ ID NO: 207036 - DNA, 493 bp, Glycine max
agatgcaagtatttatacgagttggcgatattataaatgtataatgcagatacaaggtgaatgcatccaagattagagcataaaatttgaaacttctcaagggagaaatctggctgtacaggacaatgattcaagttgtctccctagtgtacattattttgcttacaagccaagagcaccaaggggtgtcttgccctggccagcctcaaagtagaaaatcagcatagccaacatagcaatcctagcatgcttaatctcagccaatttcagtctctctagcttgtcggcatccggaatgtaaacgccatccttgatagctccagcaaatcccaaagggtcaaagaattttcctccagggtagccttgttcaccagtagagttgccaaagttctcagcagtttttgaccatggagtggcccactccactgactgagaatctgggttgaagatgtccacccattttttgctttaacccaccccatttggagcaact

SEQ ID NO: 207037 - DNA, 526 bp, Glycine max
aaacaatgaaaatccttcatttattggtgtacatatttggctaaagaagataatagaacatatctctgtgtaagcctactcagtaatctcaaatgcaatttataattatggaccaggaaagtgagaaatacatccaaataaaccatgttaaaaaagaaagaaaccaaattctgagctagggaaagctatcccagcaacaattaactctcagtaaatgaggtgattgaacatggaggcacccttcaaggctaagtcagattggggatatcaacattctctgttgagtcaatctaaaatcatctcaacaacccataacagcacaattatacacgaacaccccgacatgctccttcacgccaagtacctgccaatctatggtgccattgctgatccctgacttaggacaccatgaactcagcacaatagcttcaccttctggacccctttgtccacccacaaccaaaagttgctctccacaagccttgaaagccaacccccaaccattagaagaatctgctcggactgg

SEQ ID NO: 207038 - DNA, 390 bp, Glycine max
gttctagatcgcgagctgccgcccttttttttttttttttttttttttttttggtttttacggaaatatgaaattttacttggctaattaaaacgataccaaaaacaaaacacaagccaagtgaaagtgagaaaaaataaaaatcaaagagcataatgtcagggatcattcacaagattggggagaccctccatgtgggagggcacaagaaggaggaggagcataagggtgagcaccatgctggagaatacaaaggggagcaccatggtgaacacagtagtgagtccaaaggagagcatcatggtgaacacaaagctggagagtaccatggggagcacaagccagagcacaaagaggtgttcctagacaaagtcaaggacaagatccatg

SEQ ID NO: 207039 - DNA, 409 bp, Glycine max
aaaaaaaatcacagaattttcgcagtccaagaagacacgcatcccaaaccgttttgatttggaacgtgtcacgctctaaatttgcatggcatattgtctttaactgagtcaatttcgcttaataaaacctctcttcactcctctgctttaccaacccaaccccctgttcctgtgtgtgtgagtgaccgagtgagtttgtttttctcagctgatatatatggcgcttgatcgctccattataagcaaaacgacgtggtacagcgtcgtattatggatgatggtggtgctggtgagagtgcacggtgcagccgcgaggccgaaccggaaggagtgggactcagtcataaagttaccgactgaaccggtggatgctgactcggatgaagtgggaacacgatgggcggttctc

SEQ ID NO: 207040 - DNA, 577 bp, Glycine max
atttggttctgaagtagaagttacttaatttgtgcctttttctactctattgtattttgaatacaaagaatttagaagcttggaagttctacgtttattttcatgtattaggcttgcgaagagtaaaaaaaagtgagtgtgttctgagatacaatgtagcggtgtttgcaggtcatgccattggggcaaaggctgcaattcctagaatgtttccaaatatgtttccactggttataagtcagagaaagtcacaaacagaaggctgattgcagtcatgaaattgtctcttgacaagtctgcccaaggagaaagaatttctgacataagcaagaatggtcatattgcttcctacaggttaatgactttgtgtgcttatcagacattgcttatgttagtgaacaagtgttgatgatggagaaaacaattcttaggaagcttgaatagtacttaacagttccaacatcctatgtcttacttggtttggtatatcaaaggctccactccacctgttaaagagtgtaccctaggaatgagccctttcgggacaagcacttttgagcactatactggttacact

SEQ ID NO: 207041 - DNA, 482 bp, Glycine max
aatcgaataggtactaactatttcgtgctgtgagtgagtgtgaggattgttgaatcgaatcgcgaaactcttacttacacccctctctgtttttctattcacaagggttttgaaagatggcggttgaaaatcccgaggatggattgaagaagctggaatacttgtcgctggtgtcgaaggtgtgcaccgagttggagtcccacaccggcaccggcgacaaggttcttgcggagttcatcactgagttgggtcgatcatcggagaatgttgaggaattcgacgagaaattgaaagagaatggcgcggagatgccggattactttgtgcgaacgctcctcaccatcatccacgccattctccctccgaagccgatggattcgaagaaggagaaagacagtgtcaacggcaagaccaccaagttcaaggctctggccatcgcggacgacagggacccggccaaggagcttcaaaaggagttagaa

SEQ ID NO: 207042 - DNA, 516 bp, Glycine max
cctagtaatgaaaataaaaatatgtctaactttccatttaaatcctcatataaggacaaaaactgcatttaaaactaaatgcaacatataacattatccaagacattgcataaagagaacatagatgaattacatattatgcacgacgtttactcaaacgccatgaatttggctcatggtatctgtcataaagtggttcaattcgctcttgacgctttcgcttgctcatctttgtaggatctgccactttgaagtatcttggagccaattcaacaagccatttggggtctatgacagtgacctcacgcatatattccttagttgtcatcacaagctcatggtagatgacccagtctggttgtctctggaacagagctgaacttggatggatatacacaggctggttctcacaagggttctgtaaccttcctgggggtcctttctagaagcatggaaaaagaaccctgcagtgatagccttcctgactttggtgaattttttcccgcacttacaaca

SEQ ID NO: 207043 - DNA, 605 bp, Glycine max
  unsure (1)..(605): unsure at all n locations
atcttgctgagagaagaaagctagaagacttgacaatcggcccagtcctcacatgtacgactggtatgatgctagaacacaagaataaattgcttgagataccaggatcaaagctgctctttgggggtagtcctctagagaaccattcaattccacctatttatggtgccattaaaccaacagctgtctatgttcctctcgaggaaattatgaaggataagaattttgatcttgtaacaaaagaaatatttggaccctttcaggttatcacggactacaaaaacagtcaactatcagttgtattggatgctgtggaaagaatgcataaccatttaacggctgctgtagtttcaaatgatcctttgtttttacaggaagttgttggcaattcagtaaatggtactacttatgctggtctaagagcaaggacaaccggagctcctcagaatcattggtttggtcccgctggcgacgctagaggtgcaggaatcggaacaccgganggctataaactngtatggtctngccacagagaagttatatatgattctggacctgtgccaaagatggcaaacttctcagtcacttgaaaaaagtcctatcat

SEQ ID NO: 207044 - DNA, 515 bp, Glycine max
cggaaccttctcagttctcacacaacataaacacatacaagaacagagcaatatatctatctatttctctgttctgttgtctcagcaaaacaaataataaaatcctctcgtagctaccttcaacaactcttgttcatggcgtgtcaccgttggctctgtatatcactgttgctgctgctgctgctgagtttagcttcgcagagttgccacgctctccattcgttcgggttcgacattcaccaccgtttctccgatcccgtgaaagagattctcggcgttcatgatttacccgacaagggaactcgacaatactatgttgctatggcccacagagaccgaatattccggggccggagactcgccgccggttaccactcgcctctcacttttatcccctccaacgagacttatcagattgaagcctttggattcttgcattttgccaatgtttctgttgggactccaccattatcgtttctggtggcattggatactggcagtgactttgtctggta

SEQ ID NO: 207045 - DNA, 614 bp, Glycine max
  unsure (1)..(614): unsure at all n locations
ngcgacgcatgagcactgttatgacgtttgatgcacacgacccaagctcggaagttttctcgaggtttaatgcacacatttttaggtttttttatgaaacgacactattatcatgaggacgaaggggatattttaactttatgctttcatatgctctatgaaataactgatagttttcataaagcatgttaacgtagaaagttacagtaagcattgtaaattaagagattagtccttagcttctggctgaggatatcctaggtcgacctaaaaaaaataactgataattttcgggcatgtgcagatataggaagaactataaacgtgtcagcatacaagctataaagaattgggctcgccaaatcttacaaggtcttgtttatctacattgtcatgatccacctgtgatccatagggacctcaaatgtgataacatatttgtcaatggtcatcttggacaagtaaaaattggtgacctgagactggctgcaattcttcacggttcccaattagcacatagtgttataggacctcctttggttcaataagtgttgcacacttaatttcagtactaagaaactgttctatttttattgccaataaaattttctctt

SEQ ID NO: 207046 - DNA, 432 bp, Glycine max
cgcctccgcggagtctcagagatcaattcccacgccctttctcaccaaaacctatcaactcgtcgacgaccaatccatcgacgacgttatttcctggaacgacgacgggtcaacgtttatcgtctggaaccctaccgttttcgccagagacttgcttcctaaatttttcaaacacaataatttctctagcttcgttcgccaactcaacacttacggattcaggaaagttgtgcctgatcggtgggagttctcgaacgattatttccgccgaggcgagaagcggcttctttgcgaaattcagcggcggaagatctcatcgccggcgccgtctccgactgcgccgacgacggttacagtggccgatgccgtgaccgcgataccgatcatatcgccgtcgaactcttgcgaggagcaagtgatatcgtcgaactc

SEQ ID NO: 207047 - DNA, 541 bp, Glycine max
  unsure (1)..(541): unsure at all n locations
atccagcactactacgacctgttagttgccatcaagactttgatgtttccacgagcatcaagcccatcaagctgattcactgaagattccgcaacagagagtagaaaagatggcgcggttgatcacagtggtgtggtgcgcggtggcggtgctactgtgcgccgcggcgggcgcgtcgtgggtggaggaggcggcgaacccgatacgaatggtggcgggggtggaggcggaggtggttcgggtgatagggcagtgccggcgcgcgctgaagtttgctaggttcatgagcaggttcgggaagagttaccgaagcgaggaagagatgagggagaggtacgagatattctcgcaaaacctcaggttcatccgctcccacaacangaaccgcttgccctacactctctctgttaatcattttgctgattggacttgggaggagttcaaaagacacagactaggcgctgcccaaaattgctctgccactcttaacgggcaccacaagctcactgatgctgttcttcctcccacgaaagactggagg

SEQ ID NO: 207048 - DNA, 580 bp, Glycine max
  unsure (1)..(580): unsure at all n locations
ctcgagccgctttccttgaaaagcttaagaagaaggggttcgaggttctctacatggttgatgctattgacgagtatgctgttggtcagcttaaggaatttgagggaaagaagttggtctctgctactaaggaaggcctgaaacttgacgagagcgaagacgaaaagaaaaagaaggaagaattgaaggagaaatttgagggtctctgccatgtgatcaaggatgtgttgggtgacaaggtggagaaagttgtggtgtctgatcgtgttgtggattctccttgctgtctcgtgactggtgaatatgggtggacagccaacatggaaaggattatgaaagcacaggcattgagggacagcagcatggctggatacatgtcgagcaagaagaccatggagattaaccctgagaaccccatcatggatgaactgaggaagcgagctgatgctgacaagaatgacaaatctgtgaaggatctcgttctcctactctttgagactgctcttctaacttctgggttcagncctgatgatcccaacactttcngtaacagggattacaggatgctgaagcttggact

SEQ ID NO: 207049 - DNA, 536 bp, Glycine max
  unsure (1)..(536): unsure at all n locations
tgagaaaagaattggcaacattccaggtattgaggttggatatcagttctattctcgtgctgaaatggttgcagttggctttcatagccactggttaaatggcattgattatatgggccagagctatgccaaagcgtgcagctatgaacttccagttgctgttgccattgttatttcgggcatgtatgaggatgatctggataatgctgaggatgttgtgtacactggtcaaggtgggcataatctgactggtgataagcgtcaaattcgggatcaaaagttggagcgtggtaacctggctctcaagaactgtgctgagcaatgtgtgcctgttagagtcattcgtggtcacgaatcttcaagcagctacactggtaaagtatacacatatgatggcttgtacaggttgtcaattattgggcagagaagggaatatctggatttacagtctacaagtttagacttangaggctcgaagggcaacctacattaaccacaaatcaggtatattttacttatggacgtgtaccttaaac

SEQ ID NO: 207050 - DNA, 466 bp, Glycine max
cagaaagcaagctcatcctagagttttaaaaatggcagcagcctcctccatggctctctcttccccatccttggctggcaaggccgtgaagctgggcccatcagcccccgaagtcgggagggtcagcatgaggaagaccgtcaccaagcaggcctcctccggaagcccatggtacggcccagaccgcgtcaagtacttgggcccattctctggcgagcccccgtcctacctcactggcgagttcccaggtgactacggctgggacactgctgggctttcggccgacccagaaaccttcgccagaaaccgtgagctcgaagtgatccactccaggtgggccatgctcggggccttgggctgcgtcttccccgaactgttgtcccgcaacggggtcaagtttggagaagctgtgtggttcaaggccgggtcccagatcttcagcgagggtgggctggactacttgggc

SEQ ID NO: 207051 - DNA, 502 bp, Glycine max
  unsure (1)..(502): unsure at all n locations
gaacaagttgtttgagtttatgcatgagacacatcctggagttcaggatatggcctgtgacacatttctgaaaatagtccagaagtgcaagcgaaaatttgtaatcacccaggttggggaaaacgagccatttgtgtctgagcttctgacaggccttcccatcactattgcagatcttgaaccccatcagatacattccttctatgaatctgttggtcacatgattcaggcagagtctgatgcacagaagagagatgaatatcttcagcggttgatggagctcccaaatcagaaatggatggaaattattgggcaggcacatcaaaatgttgattttttgaaggatcaggatgtaatccggacagttcttaatataatgcagacgaatacaagtgttgcaacttctttagggacatatttcttgccccaaatctcgttgatctttttggacatgtngaatgtgtacagaatgtacagtgagcttatttcanagagtattaca

SEQ ID NO: 207052 - DNA, 554 bp, Glycine max
tccagtgaaagaaaggcagcgatggaagaagacttcgacatccccggcggcgaggaaatggatctcggcgaagacgaggtcggcgaggagagggagatcggctctggcggcctcaagaagaagctcctcaaggaaggtcaaggctgggaaacccccgaagtcggtgacgaagtccaagttcattacacggggactttgctcgacgggactaagttcgattcgagccgcgacagggattctcccttcagcttcacgctcggacaagggcaagtaattaaaggatgggatgaaggtattaaaaccatgaagaaaggtgaaaatgctattttcaccatccctcccgagctagcttatggtgaatctggttcccctcctactattcctcctaatgctacactccaatttgatgttgagctgctgtcatggactagtgtaaaggacatatgcaaggatggcggtatatttaagaagataattactgagggggagaaatgggagaaaccctaggatcctgatgaagtattggttaagtatgaagttcatctagaaaatgg

SEQ ID NO: 207053 - DNA, 449 bp, Glycine max
tgggttttcaccgatcaagcattgcctaatgatcttgtcaagagaggagttgctgttaaggatccatctgctccccatggagttcgacttttgatcgaggactatccttatgcttctgatgggctagagatatgggatgctatcaagtcttgggtggaagaatatgtctcattctactacaagtcagatgaggaacttcaaaaagaccccgagctccaagcttggtggaaagaacttgtagaggtgggtcatggggatttgaaggataagccatggtggcaaaagatgcaaactcgtgaagagttgggtgaagcttccgctaccctcatatggattgcttcagctcttcatgctgctgttaactttggacagtatccatatggaggtttaatcctgaataggccaactattagcaggagattcatgcctgagaaagggtctcctgaata

SEQ ID NO: 207054 - DNA, 461 bp, Glycine max
aatccttagaaaacatgtatcaatattttcccactctacaaaatttgacaaaaaacaaaacaaaggaaaggagagaagttccacgcataagcatcaatcaaatgatcaaagctaaacatgtaaaagatcagaaacaatcaataaaaagaagctaccaaactaccatcaagcaagtccagcttccagtccaccaaatgtatcatagagaggttggtttagagtctcgggaagattaaacgcaaacatccctcccactatcccacatgctgcaaacaccgcaaacggcaaataccctcccaaaacgaccacaaacggcgccaatatcgctcccatttgcgccgcttgagtagtacacccgagcgcggcgttcctcaccactgtcggaaacagctccgccgtgtaaataaacagcaaattataagtccccgccatcccaaatattcccaaaacaccacacacca

SEQ ID NO: 207055 - DNA, 477 bp, Glycine max
gctatcacaaaacgaagaaactattattggaattcattcaaattgaagtgcacatgattaataagattcaaccaaactagagaaggccaccacggagcctaaggacaacatagacatagaaattttgttatatcatacacattcaaggaagagaaaatctcaatagcaagattcaactgaaactagaaatcgccaccacggagcctaagaacaaggggaagcggggattccttctgaatattgtaatcggcgagagtgcgtccgtcttcgagctgcttcccagcgaagataagacgctgctgatccggaggaatcccttccttatcctgaatcttcgccttcacgttatcgatcgtatcagaactctccacctccagagtaatagttttcccggtgagcgtcttcacgaagatctgcatccctccgcggagtcgaagcaccagatgaagcgtcgattctttctgaatattgtaatcg

SEQ ID NO: 207056 - DNA, 584 bp, Glycine max
gacacgaaatccactgtaatatagatctgactaattgtccatgttgtctgtaatgaataacagaaacacaaaacctagtcattctaaacactgaaatgactaacaatagcataattatcaccaaggcgtacaaacgcatgaccaaattaaatgtcaatacaggaaatgctaatgcaaattatttggcagcctcaaatcaatccccgtggatagtataacgttcccatttcttcgttggatcatatatctcccatcttgaagcaggaaatatatgcttgttcttttcataccaatgcctttctacaaccttcccagcatgagactcatccttctctatagtggcatcagcaattgttcgtacatcctcatgcacatcaaaatgaaaaagcggtccacttttgcctctagctttgttcacaattagctcatagaagctatgttgctgtaatacacatggaaacaggtaaataagttagcagatatcctttggttaaaataatgttaacatagcttatacacacacaaacaagatagcgagttgcacacagagtttctgaaattaaaagctaatacatgaggaatga

SEQ ID NO: 207057 - DNA, 539 bp, Glycine max
gatcttcttgacatcgactccattgttgctgccataaagggttgttccggcgtaatccaccgtgcatgttctaacatcattggtcaagtcgaagatcccgagaaacagatattggaaccggcgataaaaggaacggttaatgtgttgaaggcgaccatggctgaacgacaggctagtggggctgcgtactaatacaacggaggatcatgtgctgcaattgctggagcagatgactggattatcggcgaagagtctaggatggccaccggatacagtatgctcactcgcgagtactacaaaatctcccaactggcggagaagtgtgttgtttgggactttgcgaaggagacaggttgtgatgttgtatgatagaccctggtacagcgttgggccctttgcttcctccaagaatcaattcaagcatggctgtgcttgatagtgttctcaaagggggcaaagagacctacgaggacttctttttgggaacgggctacttcaaagacataacattggcacatattttgggacttgagaacatt

SEQ ID NO: 207058 - DNA, 476 bp, Glycine max
accatgtccactctttccactcagaacgtcaccgtcacccacaaaacgcagcaacctttgcagattgcaaagcgcttagagaaatttcagacaacaatcttcactcaaatgagcttgcttgccatcaaacatggggccataaaccttggtcaaggctttcccaactttgatggtccagaatttgtaaaggaagcagcgattcaggcaatcagggatgggaaaaatcagtatgcccggggttatggagttccagacctgaacattgccattgctgagagatttaagaaagatactggacttgtggtagaccctgaaaaggaaattactgtcacatctggatgcacagaagcaattgctgcaactatgataggattaataaatcctggtgatgaggttattatgtttgctcctttttatgattcttatgaggccactttgtccatggctggtgcaaaagtaaaaggcatcactttgcg

SEQ ID NO: 207059 - DNA, 590 bp, Glycine max
  unsure (1)..(590): unsure at all n locations
agatgtagttccagattcagaganatcagtttaannnnnttnntcnctntnnnnnctnntntntntnntttttttttnttttttttttttttttttttttttnttntttttntgnnttttactagctcccctgggggctcactggtccgtttcattgtaatatttgctttatggtacagaaccatggctttggccaagttgccaccaaacgcttcatcagttccagcagttttagcgtttggagattccatcgtggacccaggcaacaacaacaacataaaaacattgatcaagtgcaacttcccaccttatggaaaggattttcagggaggaaacccaacgggtcgattttgcaatggaaaaattccttctgacttaatagttgaacaattgggtattaaggagtatttgcctgcatatttggatccgaatctcaaatctagtgatcttgttaccggcgtctgctttgcctccggtgcttcaggatacgatcctttgacacccaaaataacgtcagttctatcgttatctactcaactagacatgttcagggaatacataagaaagctgaaaggcattgctggagagag

SEQ ID NO: 207060 - DNA, 562 bp, Glycine max
ccaaccagtaaaatcatcaaaaatcatatttaaacacctgaatacaacaacatacatccactttaaaggtaaatatttcacacgggaaaaatgtggaacgtctgtgagatggatcgatgcctgtgaacattgaaatctacaaaaagtaccgaacaatcacaccaaaactcgacaaatcaaaatactcattgtcttcgttgacatcaacataactaataattgatattacttcccgtaggcaaacttaatcgagctcaaaacaatcgatctatgtacttttcaagaacataatttacgagctttctgtaaactccttctgttggatgataactatcccaaaagacatattccgaagcattggaacaagtggcatccaaagggttgcataacactgcaacctctagtttgcctgtgccacagcaacctctgtccataactttatagccatatttttggtagttttcaatgatatcgagcagaggggtgtaaacatcaatgtaaactatcctggtatcggacaagttgtgaccgagggaatcaagttcctttgaagtttggaatt

SEQ ID NO: 207061 - DNA, 695 bp, Glycine max
  unsure (1)..(695): unsure at all n locations
gctgaacatgcgctcngcagaccaatgaaaaattaaaccaaaaaaccaaaaaaaanaaaaaaaaaaaaaaaaaaaaaaaaaatttaaaaaattaaaaaaaaaaaaaaaaaaaaaagggganaaggggaaaaaaaaaagaagaaaggaatgacataaacaaggatctgaaaactgatccaaaagatgaatatctgcaattattgagggcagccattaagtgcttgacttaccctgagaaatattttgcaaaagtcttgaggctggctataaacaagctaggaactgatgaaggggcccttactagagtggtgacaaccagagctgaggttgatttgcagcgaattgctgaggaataccaaagaagaaacagcattcctctggaccgcgcaatagccagtgacacttctggagactatcagagcattctccttgcactggttggacatgaggattaagttttctttcttaatctgttcagttgtcatgggattgcttgctaggctatttgcttttcctcttatcatgaatgtgatattgctatggatctctggacagaggaattcagtggcttgctgttaacgcttgctatgaggggtataaattatcatgcctgttcagaataatatgttttgatgtccaaaattcagcatagcactcacatcttattaagatcaatattgtttagataataaata

SEQ ID NO: 207062 - DNA, 455 bp, Glycine max
aacagtagtaaaagacgcagcaaatattttattattctaaaacatataattgatccttaataaagatgtgaagtgctatgtcttgaattttcgacattcaaaacatattattctgaaacagcatgataatttatacccctcataagcagcgttaacagcaagccactgaattcctctgtccagagatccatagcaatatcacattcatgataagaggaaaagcaaatagcctaacaagcaatcccatgacaactgaacagattaagaaagaaaacttaatcctcatgtccaaccagtgcaaggagaatgctctgatagtctccagaagtgtcactggctattgcgcggtccagaggaatgctgtttcttctttggtattcctcagcaattcgctgcaaatcaacctcagctctggttgtcaccactctagtaagggccccttcatcagttcctag

SEQ ID NO: 207063 - DNA, 457 bp, Glycine max
ttctgattcgtcaaacggacaaaggaagtgaaagggtttagggtgtgacctgagatcaacatgttgcggaggcttctctcttctcacctcaaaaccctagccgccaccgcttcttcttccactccccgatctgcttccgccgccgccagattcgccgctctctctcgctcctcccgctacttctcaacccagtccgaggatgctactgccatcaaaaagaaggttgaggatgtaatgccaatcgctactggtcacgagcgcgaggagcttcaggctgagctcgagggaaggaatattcttgaaatagaccatcccgaaagtccattcggcacgaaggaagcacctgctgttgtcaaatcttactatgataaaaggatagtcggatgcccaggaggtgaaggtgaagatgagcatgatgttgtctgggtttggctggagaaagacaagccccacgaat

SEQ ID NO: 207064 - DNA, 542 bp, Glycine max
aaaaaatcgtcaagttctatcaattatttcacaatgcacaaaacattgtctaacagaattggtagctcaagcaaatgagcatcctgcgttcaaataatcgcataaactttctagctcaaaagttgcaacacaacaaggtatagacaaatcaaaatcaaacataggccacaggattttgaaaggccagagtgtattctaaacaatgtctctccatctttccagaatttattccagatttaattgaaggattgcaatcaatggtgatcatcatcgccatgcccatcgggtgatccaccaggtcctaccacttcaagaacaaaatactgtgcgcacactggacattcgtggggcttgtctttctccagccaaaaccagacaacatcatgctcatcctcaccttcacctcctgggcatccgactatccttttatcatagtaagatttgacaacagcaggtgcttccttcgtgccgaatggaccttcgggatggtctatttcaagatattccttccctcgagctcagcctgaagctcctcgcgctcg

SEQ ID NO: 207065 - DNA, 450 bp, Glycine max
tggtaattcatgtaataaaattcaatttcagttactaagatgaaactaattggaaaactcagaactacaccgaaagtatttaaaaaagtgaatctaattgtcagcgtctaagatttgatggccttgtttctggggtgtcttagaaggtgatgtaactgtgcagggaaaaacagtatctctataatcgtgccaattgttgtcccaattgtcgttgtgattgtacttttcattgttggagtctgcttcctacgtaagagggcaagcaagaagtataacacttttgtccaggattcaattgtggatgatcttaccgatgtggagtccttgcaatttgatttggctacaattgaagctgccacgaatggattctcggatgagaacaagattggccaaggtggatttggtgtggtttataagggtatcctccttaacagacaggagatagctgtg

SEQ ID NO: 207066 - DNA, 474 bp, Glycine max
aatctggtctctcccggggcatcatgttttagctactgtatgtgttcatccaagaagtatttgacagaattcttttaactattaatatttacaatatatatgcactaggattgtataacagcaacaccatggtttgacacatttaaacatatcctggattggtcaaagaaaacatgaaaacaatcctttagcgagggtatatgtctgtaatggatacttcattcacagaccatggaattgaacaagtggtagactgatcagagtcaagcccttggtttagcctgttaggatttcttccgcgcagaaaagatgctggttgtcgtggcattgacaaggtaactgaataactgttcagcataagtgcaatggtggccatcgaaggtctgtcagatggattttcctgaacacataataaaccaatatggatgcatctgtttacttcatttcttgaataagaacctctcagagttggat

SEQ ID NO: 207067 - DNA, 539 bp, Glycine max
agaacagggactcattctcttttcagcggcactctcggtggctttcatgttctcggggtgagttgtcaagatgtacacatcgaggaagaaaattcacaaggataaggatgctgagccaactgaatttgaggaatcagttggacaggcattgcttgatctagaaaataccaacaatgagctgaaaagtgatctgaaagatttatacataaactcagctgtccaaattgatgtttctggcaaccgaaaggctgtggttatccatgtcccctacagactaaggaaaggattccggaagattcatgtcaggcttgtgagagaacttgagaaaaagtttagtggaaaagatgtaatcttgattgccaccaggaggatagtaaggccaccaaagaaaggttctgctgttcagcgcccccgcaccagaacactcactgctgtacatgaggcaatgctggaagatattgtattgcctgctgagattgttggaaagcgtgttaggtataaaattgatggctccaagattatgaaggtctttttggacc

SEQ ID NO: 207068 - DNA, 562 bp, Glycine max
aaaaatacggattcataggatgttaaaatcttaaaaatacggattcataggatgttacaagaaaatatatcaaattctacattgataaaccaggacacagtattttctataagtaactaaagaaaatccagaattaaagccaacttaacaaaaccagcatccaccatatgtaattcaggaagaaattcaaagctaacaaatagaacctaagcctcggtagtaggatactcaaacacgacacctttgcctgaaagtttcctgtatactgcagcaaaagtctccaacttgtactcggtattgtttcgctccttggggtccaaaaagaccttcataatcttggaaccatcaattttatacctaacacgctttccaacaatctcagcaggcaatacaatatcttccagcattgcctcatgtacagcagtgagtgttctggtgcgggggcgctgaacagcagaacctttctttggtggccttactatcctcctggtggcaatcaagattacatcttttacactaaactttttctcaagttctctcacaagcctgacatgaatctttc

SEQ ID NO: 207069 - DNA, 637 bp, Glycine max
gggttacttcagctttacattttttgaagaattgatcaatgggcaagtctgtagttgagaagctactttggatggcaattgtgtgcttggtgctgggtgtaatttccattactcccaaggcccaagcagcagtgacatgcaaccaggtggtgagcaacctcaccccatgcatttcttatgtgctcaatggtggcaaaaccgtgcctggcccttgctgcaatgggatcaagaccctctttaacctcgctcactccacaccagaccgccaaaccgtttgcaagtgcataaagaacgctgttagtgcgttccattatggcaagtccaatgtggaccgtgctgctgctcttcctaagcagtgtggggttaacattccttaccagatcagcccttccaccgactgtaccagagtgcagtgaggttaatgatatatggagcggtaactcgagaagagaaggatatacaatatatagctagtgtgtgaataagtggctggctatacgtaggccacacattacattaatgactggtggctgcctattattacatccatcaactagtcttgttattgagtcattggaatttttttatttgaagattcaaaattatattaagaattataaaattatgtttttattca

SEQ ID NO: 207070 - DNA, 630 bp, Glycine max
gggttacttcagcttccacatatcttgaagaattgatcaatgggcaagtctgtagttgagaagctactttggatggcaattgtgtgcttggtgctgggtgtaatttccattactcccaaggcccaagcagcagtgacatgcaaccaggtggtgagcaacctcaccccatgcatttcttatgtgctcaatggtggcaaaaccgtgcctggcccttgctgcaatgggatcaagaccctctttaacctcgctcactccacaccagaccgccaaaccgtttgcaagtgcataaagaacgctgttagtgcgttccattatggcaagtccaatgtggaccgtgctgctgctcttcctaagcagtgtggggttaacattccttaccagatcagcccttccaccgactgtaccagagtgcagtgaggttaatgatatatggagcggtaactcgagaagagaaggatatacaatatatagctagtgtgtgaataagtggctggctatacgtacgccacacattacaattatgactggcggctgcttattattacattcaatcaactagtctggtattgagttattgattttttttattggaagaatcacaataatttaaagattatataattatgattt

SEQ ID NO: 207071 - DNA, 539 bp, Glycine max
tttctctctcaaaaccctaaccctaaccccaatccccagagtctggaagcctctccaatggcgtaccagacccccgatcaagattcaggttccgatccgaagaccccaacgcgcctctacaacccctacaaggatctcgaagtccccattcgcaacctctaccagctcccaacctccccggagtacctcttcgtcgaggaggcccgccgcaagcgccgatcctggggcgagaacctcaccttctacaccggctgcggctacctctccggcgctgtcggtggcgccgcctccggcctcgtcggcggcgttaaatccttcgagtccggcgacaccgccaagctccgcgtcaaccgcgtcctcaactcctccggccacgccggccgcgcctggggcaaccgcctcggcgtcatcggcctcctttacgccggcatcgagagcgggatcgaggcaacgagggacaccgacgacgtctggaacagcgtcgcggcgggacttcgcaccggcgcgctgtatcgtgcagcgagaggggtgcgttcggc

SEQ ID NO: 207072 - DNA, 446 bp, Glycine max
ccagcattaaagccgtcccaattattcatgcaagatgtttcgacaaattacattaaaaaggttagtcattatcaagctgaaaaaaaaatgcataataataaaaccaattgtttgcaacagcaacgctgccacatgctggtataataatgcttatacctaacaatcgctcaaaattgatagtaaccccccaaaaaaaggaagaaaaaaattaagcgctcacacaaagttttgttctcatcatataggcacgtagcgtttcaaagcctgcttcgccgtgacagcgactccaaccacgacgccgccgacggcgcccgttaccgccgccgaacgcacccctttggctgcacgatacagcgcgccggtgccgagtcccgccgcgacgctgttccaaacgtcgtcggtgtccctcgttgccttgatcccgttctcgatgccggcgtaaagga

SEQ ID NO: 207073 - DNA, 607 bp, Glycine max
  unsure (1)..(607): unsure at all n locations
tattcatcaaactcatcaaaatgaatctgtaccactcctccaccaccaccaccaccaccaccatcttcaccgtcatattcctcctccttgcaatattattcactctcacaccccacaaggccaacggtgccacgtgtcaccctgaggaagaagcgggcctgttgggcttcaaatccggtatccgatccgacccgtccggcctgctcagtaactggatatcgggtacggactgctgcacatggaccggagtagaatgccactataacagcacccgggtccaaagattattcttaacgggtcaaaaacccgaaaccatcttatcgggtaccatctcacccaccctctcaaaactcaaactcctcgatggactctacctcataaacctcatcaacatttcgggtcccttcccaaattttcttttccaacttccaaatctccaatttatctatctagaaaacaacaatctctcgggtcgaatacccgataacatcggtaaccttacccgattagatgtactcagtttaactggtaaccggttcatcggacccgtaccgagttcaataaccaagtngactcagctcactcagctcaaactcggtaacaattt

SEQ ID NO: 207074 - DNA, 490 bp, Glycine max
aaagtaaatatatatagtatatattgaaagttaaaattacaatttacttattaaattacataattattggaaaacttagcagtaaaaggaaattaaacacttgaaatcatcaacaacaaagcttactacacttatgctttgttgcagggtggcaaaggagaaccacagagacaatcatttccaacaaaagcacttgccggaaacttattcttgggaagctgaccacaaagatggttatagctaacattcaacttctcaagcccaacaacactgtttggaaccttcccaaacacccaattacgagacaaatccaaaaacttaaacctctccccaaaccttaacttccccaaatcaaacttcaacttgttccccgaagcccaaaaccccaccaaatactcagtactattcaccaacccaattgcactccctgaaatttcattccccgaaagatcaataaaatcatagaaataagtctccgaaggcttaaaat

SEQ ID NO: 207075 - DNA, 612 bp, Glycine max
  unsure (1)..(612): unsure at all n locations
gccataatcatgcatgggacaggactcagtattccagatgctatgactgtcgccctgannnncntcnnntnnnnntngnctcnctcgctcnncnnnccccctcttctttttctcttctttttcttcttctcttttcccttccttctcgggccccgtggccctctcttcaatgattccgtacaatgccataacacaaggatctgaaaactgatccaaaagatgaatatctgcaattattgagggcagccattaagtgcttgacttaccctgagaaatattttgcaaaagtcttgaggctggctataaacaagctaggaactgatgaaggggcccttactagagtggtgacaaccagagctgaggttgatttgcagcgaattgctgaggaataccaaagaagaaacagcattcctctggaccgcgcaatagccagtgacacttctggagactatcagagcattctccttgcactggttggacatgaggattaagttctctttcttaatctgttcagttgtcatgggattgcttgttaagctatttgcttttcctcttatcatgaatgtgatattgctatggatctctggacagaggaattcaatggcttgctgt

SEQ ID NO: 207076 - DNA, 558 bp, Glycine max
aacagtagtaaaagacgcagcttatattttattattctaaaacatataattgatccttaataaagatgtgaagtgctatgtcttgaattttcgacattcaaaacatattattctgaaacagcatgataatttatacccctcataagcagcgttaacagcaagccactgaattcctctgtccagagatccatagcaatatcacattcatgataagaggaaaagcaaatagcctaacaagcaatcccatgacaactgaacagattaagaaagaaaacttaatcctcatgtccaaccagtgcaaggagaatgctctgatagtctccagaagtgtcactggctattgcgcggtccagaggaatgctgtttcttctttggtattcctcagcaattcgctgcaaatcaacctcagctctggttgtcaccactctagtaagggccccttcatcagttcctagcttgtttatagccagcctcaagacttttgcaaaatatttttcagggtaagtcaagcacttaatggctgccctcatatatgcagatattcatcttttgatcagt

SEQ ID NO: 207077 - DNA, 651 bp, Glycine max
  unsure (1)..(651): unsure at all n locations
gctctatcgctgcgatagactcganaccgttnnnnnttnnnncnnnnnnncnnnnnnttnnnntnnnnntnnnnncnntnnnnccgnntttcnaaacttggcaagagtggtggcactccaacagaaccaactatctttctctaccttagcttcctctctttctgacttcagtggaaccagacttcaaactcaacttcagttcaagagaaagcaatgccatccaaaagggtctttctacgtctccgcatcgagcaccaagaaaatcctaataatgggaggcaccaggtttattggtgtgtttttgtctaggctccttgtcaaagagggtcaccaggtgactttattcacaagaggtaaagcgcctgtcactcaacagttgccaggtgaatcagacagtgattatgctgatttttcttccaagatcttgcatttgaaaggagacaggaaggacttcgactttgtaaaatccagtctctcagcagagggatttgatgttgattatgacatacatggacgcgaggcagatgaagttgaacccatactggatgctctgcctaatctggagcagtttatttactgctcttctgcccgtgtctatctcaaatctgatctattacctcacgcagagactgatgcagctgatcctaagag

SEQ ID NO: 207078 - DNA, 527 bp, Glycine max
gaacgaaaagctcatgaatatttcacgacttcataatgtagcaaatccgaacagcttttctaaatacaagtgaaatacttaaaattgaaatagaaaagtttatacgctaacaagactcttgccaagaattatgtcatctgttgagaaatcagcctctttccgatatgttcctctaccaaagtccaggttgtacgagtctgctagaccctctacaagtccaaattcaggttccaatccaagcacgctctttgctttctcaactgatgcaaagaaatgctggtcacggaatggaaatgatttctttttcccaaaatcaaaatctttagggttgtagtgaatgatctctggctctgggaacccaccagccttagcacatgctcttgctaatccatcaaatgtgacatacttatctcccgagatgttgaatacttccttgctggccttctcattaccaagaacctggataaaagcttttgccaaatccttaacatgaccaagttgggttatctgtattcctgagccgggga

SEQ ID NO: 207079 - DNA, 519 bp, Glycine max
gacatcaaacaaagcctcaactttacagggtaattagtgttactttcttgtaaaacatacaagaaaagcccataaatttaggcaattaaaacaggacaaaatgcataaatagaatgctcatgtttataataatacacttcatatcagggctcataaattgccattgctaattaatatgttcacttccttaactgaaaataataaatcctaaaaacagacaattagcatagaaccatagccaaggcaaattcaagcaagaaagatcaatagaagcggtaagttatgtagcaccttcgaatatagaattaattggtcgttcaaaggtgcagaatggctctgcttagcatctccaagttgaaactgagatgagatccttcctttgccagcaaagaacaagggaagactgcctcttctcaacatggaaccccttgctaggagtcctctgcaccaaacactcagcctgggattctgtaaagttactaaatgtcaatggtgaaaacccagatgacaagagaaggt

SEQ ID NO: 207080 - DNA, 551 bp, Glycine max
cctcttaaaaaatgaaaattttagaatattcgctttgccactgaaactttattgtagatgtagtccaaatgaaagatttggaggttttgtttgttccaatagtacatttgtctctaatcccgtacgtttaaaacctctcaaagaaaaaatatcgttgttgctaaatatttttttatcttgttttgtttgtgttggatcgacagtatctgaatgaagctagttggaattggagattgatgaagataatcatgacagtgtgtcatgtgtacgacaaggagcaaaactatgttgccttcgacgaactcgcccctgaagattcacgtccaattacatttttgaaggaaaccatgcctgattatgcttaattaggttcaagctggcttttttctcatatgaaattttttatgtatcaaattacgttcgtatggcattcattttctttttacattttcgatcttgcttagtaatatagttctatttctcatatcatgtattacgagaaaattgcttgctgctctcaaagtcacgtatagagtaattaattatattac

SEQ ID NO: 207081 - DNA, 678 bp, Glycine max
  unsure (1)..(678): unsure at all n locations
tgtcttgctcggtcgatacgaatcantnanccnttnnnnnnntnnnncnnnnnnnnnnnnnnnnnnnnnnnnnnnnnnnnnnnnnnnnnnnnnntttnnnnntttttntttttttttttttttttggtttttggtntttttttttttttttgtttttttgttcattgagcagatgtcaggtctgaagcatctagtacatggagcaaagcagcatcacaatgtgaaaaatgtatatgtatggcatgcactagctggttattggggtggagtgaagccagcagcaaccggcatggaacattatgacactgccttggcatatccagtgcagtcaccaggcgtgctaggaaaccaaccagacattgtcatggacagcttggctgtacatggccttggcctagtgcacccaaagaaggttttcaatttctacaacgagctccatgcttacttagcttcttgtggagtagatggagtgaaggttgatgtgcagaacattattgagacccttggtgcgggacatggtggccgagtgtcacttactcgcagctatcatcacgcgcttgaggcttccattgctagcaattttactgataacggatgcattgcgtgtatgtgtcacaacactgatgggacttatagtgctaagcagacttgtattgtgagagcttnctgatgatttta

SEQ ID NO: 207082 - DNA, 641 bp, Glycine max
  unsure (1)..(641): unsure at all n locations
cggcgactcgctcgagacagttaatgattncnccgcacgcccacgaagcacggaacacggctcgaggtctctctaatcactttatcatttttcaaaaaccctaacccgcgcgcgtgctcacttgtcatccctctctcttcttcttcttcttctttatcgtggccgccatggattccgaggtgcagcaatcgcaagtcgccgccatcctcggcgcggatccctcccccttcgagacgttgatctcgcacctcatgtcctcctccaacgagcaacgctcccacgcggaggccctgtttaacctctgcaagcaaaccgatcccgatagcctctccttgaagctcgcgcacctactccactcctcgccgcacgaggaggcgcgtgccatgtccgccatgctcctccggaaacagctcacgcgcgacgactcctacctctggccgcgcctctcccctcacacgcagtcttgcctcaaatcgctccttctctcctcgattcagaaggagaacatcaaatccatctccaagaagctctgcgacaccatctacgaactcgcctacggtattttacccgacaacgcctggccggagcttcttcctttcatgttccagtgtgtttcctccgattcccctaagcttcaggaa

SEQ ID NO: 207083 - DNA, 470 bp, Glycine max
gcaggcaggtaagacagttttggaatttcaagctatggagcacaacgctagcgttgtcctggcttatgctcacttacgagaccggactgcgcataagtttgttgatgagctatttataaagagacgagatccattcccctcttactctgcttccttcgtagattgaaagataatatacctgcatggccaccaagcggatgctaagagaactcacggacctctggaaagaccccttaacctattgcagatccggttccgtatcggaacatatgaaccattgggcagcaactaaaatggatcccccatatagcccttgtggagtgggtgtatgtctagctagctattaatatacctccacatgatccatgcaagccacccaaggtattgacctaatgatgcccaagacaatgactactattctgaacttgattacatatacttgacgaatattgaacctcattgtgtctata

SEQ ID NO: 207084 - DNA, 605 bp, Glycine max
  unsure (1)..(605): unsure at all n locations
gctatctcttgtgtcgattgatcagtattccgtagnnnnnntnnnncngcannnncncnnnnnnnnnnnnnnnnnntnnnnnnnnnntnnnnttttnnnttttttnnnntttttttggtttttactggcccaatggtnataattgcatttcttgccatcgcacacctaattcttactggggaggatcagcttcaggggaagaagacgtccaaacttccaaggtttcgcctatggacatttcctgtgcttgtgaagggaccatttggggttgtttctgccacagagcttattgggattgtcctcgttttgttgtatgttatctgggctctctatgcttacactgtgagggcgcttgattttatctctgaatttgatgtgtcgtcctttagagacaagagcataatcatgttcaaagttatgggacttcgcacgggcgcaattgggttaatgtgtttgactttcctatttatcccagtttcaaggggatctgttcttctccgctatatagatatcccttttgaacacgccacangatatcatgtatggctgggacatcttacaatggtgatttttactgtccacggactcctctatgttgctgcatg

SEQ ID NO: 207085 - DNA, 623 bp, Glycine max
  unsure (1)..(623): unsure at all n locations
gctcggcatgtgcgaccgatcagtatacagtgaatgattccncgtgacaagccacggagctnggtattacgttggagcgaggagctggttttgaccatttttgcagaatatggcacagaaaattgagacttgggggagaaaaaattgaaggaaatgagaatactagaaaatgtcgaattgactgcagaatttgcagatatactggttaagtccaaagaggccattgatattcctagtgaggagcagcaaagttctgaacaagcagaagcagaagacgaaaaagatgatgatgaagtggaagcagttgctaaaaagaatggaacagatgaaagttccattgaggatgagaaagaagagttgcctgagccagtaccagaaccaccaaaattggttcgtatggcaaatttgtgtgttgtgggtggtcatgcagtgaatggggttgcagagatacatagtgaaattgtaaaagatgatgttttcaatgcattttataagttgtggcccgagaagttccaaaacaaaacaaatggtgtgacaccaaggagatggatcaggttctgcaatccagatctgagtaaaatataaccgagtggataggtactgaggatcgggtcctaaatact

SEQ ID NO: 207086 - DNA, 555 bp, Glycine max
ctcctccccacaccctcctccgaaccttcccccaaaaaaccaccccccaaaagaacctccaccaaagaccggcacacgaaggtcgacggtcgcggtcgtcgaattcgaatgccggctctctgcgccgctagggtgttccagctcacgcgtgagctgggacacaagtctgacggcgagaccatcgagtggctcctccaacaggcggagccatccgtcattgctgccaccggcaccggcactatccccgctaacttcacctccctcaacatctccctccgcagctccggctcatccatgtccgttccctcccaactacgatccagctacttccacaactcaaacttctccctccaacctagaagaagcctattcctagaaaacaccaacactccttccacaacaacaacactccttcatttccaatccaacaacaacaacgccatcttccaacccaagcacgaattgcgcgaatcttcatcactagacttgtcctcagagaacaacaacgaagagggttattttggaagaataagaagacccttggagcaagaccta

SEQ ID NO: 207087 - DNA, 590 bp, Glycine max
  unsure (1)..(590): unsure at all n locations
tgctcatcgtgcggcgtcagatcgaanaccgatganngatanaccaaaanagcaaaaaaataaaaaaaagaaaggagaaggangatggagattgaggagttttatactacctattaggattagtcttcgctttgggctccccctccaacggcttcatcggtaaacatttcttcggcctcaaggacatcccttcatcctcctacgactacagctacttcctctaccaatgggccttcgccatcgccgccgccggcatcaccagcggaagcatcgccgaacgcacacagttcgtggcctatctcatctactcctccttcctcaccggcttcgtctatccggtggtctcccactggttctggtccccagacggctgggcctctgcctttaagatcaccgaccggctattttccaccggcgtaatagacttcgccggttccggcgtagtccacatggtcggcggaatagccggcctatggggagcgctgatcgaaagcccaagaatgggacgtttcgatcatgcaagacgagctgtggccttgcgaggccacagcgcgtccttagtagtcctgggaaccttcttgctntggttc

SEQ ID NO: 207088 - DNA, 557 bp, Glycine max
  unsure (1)..(557): unsure at all n locations
gctctacatgctgactgcatcgcatgcagtgaangataanncnnaaaanctanaaanaanaanaaaaaaaaaacttatgcatgttcactttgtggcttatcgtaacagtgatcctcaactaggagacttgagtgagagcgagttcttgtatgagcaggttaaatcaattaaaaagattgcagagtatgtgactcaactgagattagttggacagggtcatggtgtgtggcactttgatcaaaggcttcttcatgatgaagatctataatctttgaacagcctctgttttctatacatatggccctatgtgaagttatcaccgtgtcgttctgaccgtagtaatagtgaataagtgtgttgctctgtttgtagcaatagtgaatagtgaataagtgttcctctcctaggtgataaaaatgtagggaactttgtgcttgtattatagctgatggtagaatggtagcagtagtattattatgtgcaatctcatatatgagggtaccatgtaatcatatgattagaaattacatatgacgtccgggtaagaaaactatata

SEQ ID NO: 207089 - DNA, 479 bp, Glycine max
aaccgaacgtttttttttatttctaataaaatgatggggtggtacaaacatatatgagattgcacataataatactactactaccattctaccaacaactataatacaaggacaaagttccctacatttttatcacctaagagaggaacacttattcactattcactattgctacaaacagaacaacacacttattcactattactacaaacagaacaacacggtgataacttcacataggaccatatgtatagaaaacagaggctgttcaaagattatagatcttcatcatgaagaagcctttgatcaaagtgccacacaccatgaccctttccaactaatctcagttgagacacatactgtgcaatgtttttaattgatttaacctgctcatacaagaactcgctctcaatgaagtctgctagttgaggatcattgttacgatctgccacactgtgaacatgcaaaagtttctccta

SEQ ID NO: 207090 - DNA, 563 bp, Glycine max
gatgcatatggatcttggagcataaccactgctgctgaacgaagcaaattactgaggaaatggtatgatttgctaatggtacataaagaagaacttgcacagcttataaccttggagcaggggaaacctcttaaagagtctgtgggtgagatagtctatggggctggctttattgagtttgcagctgaggaggcaaaacgtatatatggggatatagttcctgcacctttttctgatcggcgattatttgttctaaagcagcctgtaggggttgtaggtgcaattacaccttggaactttccccttgctatgattactcgaaaggttggtccagcccttgcatgtggctgtacagtggtcataaagccctctgaacttacacctctcactgctttagctgcagtggaactctccattcaagctggaataccaccgggtgtcgtgaacgtggtaatgggaaatgctcctgatattggggacgctttacttgcaagtccacaggtaaggaagatcacattcacaggctcgacagcagttgggaagaaattgatggctggttcagc

SEQ ID NO: 207091 - DNA, 465 bp, Glycine max
actaacctcgtacctttcacagtgcattttttaatggggtaaaaatctgggaaaaataaagagaatgaaaaaggaaagcaaaaagaaccaaacagaaaaatgaggaggccctttgcaagccagcacttatttgtatacaacacgggagcagctatatgcatattcttcaactaagaaacgcaaggtgactcctccctattttgcttggcactggctcgggcttcattctttggtcatgtttccgaagcacacatacttgatctctaaagattcatccatcccatatttggagccttctcttccaaggccagactgtttaaaaccaccaaatggagccacctcagttgaaattactcctttattaacacccactaatccatattcaagagccttagaaacacgccatgatcagtggatactgtttgtaaatacatatgaacccaaacctgcgttagtgtcattagc

SEQ ID NO: 207092 - DNA, 552 bp, Glycine max
  unsure (1)..(552): unsure at all n locations
gcaagatcttggtgaatgcatgttggctggtcaacaaccctgcacactggaagaagccagaggagttccggcctgagaggttcttcgaggaggagtcgcttgttgaagccaatggcaatgactttaggtaccttccctttggtgttggcagaagaagctgccctggaatcattcttgcattgccaattcttggcatcactttgggacgtttggtccaaaactttgagctcttgcctccccctggccagtcacagattgacactagtgagaaaggagggcaatttagcttgcacatactcaagcattccaccattgtggcaaagccaaggtcattttagactccaccacatgatcatgatcatatgatcaatccccttaattntttcttttttcttttcccttttctttactctgtattgtatcaatgcttgaaaatggggttgttccaaaaatgtcatatatacttggcctgctaatgggtattgaaatctctgaacttgaagtgatgcatcggtttgagatggtttctaataaacctacacttttgtctct

SEQ ID NO: 207093 - DNA, 458 bp, Glycine max
agagacaaatgtgtaggtttattagaaaaccatctcaaaaccgggcatcacttcaagttcagagatttacaatacccattagcaggccaaatatatatgacatttttggaacaaccccattttcaagcattgatacaatacagagtaaagaaaagggaaaagaaaaaagaaaaaattaaggggattgatcatatgatcatgatcatgtggtggagtctaaaatgaccttggctttgccacaatggtggaatgcttgagtatgtgcaagctaaattgccctcctttctcactagtgtcaatctgtgactggccagggggaggcaagagctcaaagtttaggaccaaacgtcccaaagtgatgccaagaattggcaatgcaggaatgatttcaaggcagctttttttgccaacacccaagggaaggtacctaaagttattgccattggctttaacaagcg

SEQ ID NO: 207094 - DNA, 452 bp, Glycine max
gaaatatctctttcatagaacggagaaagacacgatgcaggaagcgacgaaggtgataataatcggtgccggaacttctggtatcgccaccgccggttgcttaacgaagcaatcaataccttacataatgctcgagagagaagactgtttcgcttcgctgtggcagaaatacacctacgatcgtctacaccttcattcgaggaagcaagtttgcgagttaccgcacttaccgtttcccaagtcttaccctcactacgtgcctcggaagcagctcatagactacttgggaaactacgttaaccactttgagatcaagcctctgtaccagcgtgcagtggagttggtggagtatgatggatggaaagggatttggagagcgaacgctcagaatagtagatctggtgagcttgacgaatacgctggaaagtacctggtcgtggccagtggctaaa

SEQ ID NO: 207095 - DNA, 535 bp, Glycine max
aaaacaacatacctaattcatatccccaaaagaagaaagtgtcatgtacatactgtttctgcaaccaataatagataatagatcattacatgacacaaattccttctctttcttcttgaggaattaacgaggcaatatcatttgctactaattgggcatccatgttagctccaaagaaaccccttcttgacagcccaacacaatacaaaccatttcgacctttccaatgatttgggaaactgttttttggaaagccatcctcatttagaagatcatcaccccccttaagccacttttgagttgatctcttgaagcctgtacagaaaacaattgagtcgaatgtgtacgatttgccatcctggaacaaaacttcattacctcttatactctttatttcagctggcaacacctacataacatataatagaattaatcaacctcagctcatacgtctcttcagttgaaatttttttttcttaacctcttaattttaaccaatcagctgaaatttattttgttaaccttttaattttaa

SEQ ID NO: 207096 - DNA, 586 bp, Glycine max
actgaaagcactcagtagggtttgcggtttcagagtttgtgacgcacgcatccatggccaccaccaccaacgccgccgcagccccgccgcgccagctctcccagaaggaagccgacatccagatgatgttagccgccgacgtccacctcggcaccaaaaactgcgacttccaaatggaacgttacatcttcaagcgccgcaacgacgggatttacattattaaccttgggaagacatgggagaagcttcagttagcagctagggttattgctgcaattgagaaccctcaggatatcattgttcaatccgcaaggccttatggtcaaagagcggttctgaagtttgctcagtacactggtgctcatgctattgctggaaggcacactcccggtaccttcaccaatcagcttcagacttcgttcagtgagcctcgtctccttatcctcactgatccatgaacagatcaccagcctattaaggaagctgctcttgtgaatattcccaccatcgctttctgtgacactgattcgcctatgaggtatgtggacattggaattcctgccaaacacacgggaaacacagcatt

SEQ ID NO: 207097 - DNA, 270 bp, Glycine max
gataaaataaaaaaaaataaaacaaatataaaaaaaaaaaaaaaaaaaaaaaaaaaaaaaaaacaaaaaaaaaaaaaaaaaccaacaaaaaaaaaaaaaaaaaaaagacaaaaaaaagcaaaagcaacctaaaaacacaaaaagcaaatcagaaccacaaacaaagaaacaaaaaaacaaccccaaagaaagaaacaaaaaaacccaaagtgtaaaaatagaaaaaccaaaaacaaaaaaaaaaataaacccaacccccaaagaaccccc

SEQ ID NO: 207098 - DNA, 613 bp, Glycine max
  unsure (1)..(613): unsure at all n locations
tgccttctcatgtgcacatccgatcagcatatcgttggnatgttcnctcggcactccctcgtaatgcaggaattctgctcgagtttcgttattctcttattcatttttctcttctgaataatccagatctgtttctggggttttctccgtcacgcttttcgtgaccggatctgtatggatttgatccagatctacacgccgatggtggctttggccgggtctttcatagatctggtgcgtagaggctcagatctacggtaccgaggtacaacagagaatcgatgacaagaacgcagatccgacggtagatccagccgattccgcttgttcgatcgctacagacccctgtatcggatcattaagcagcgtgtctcgcgcgttctacacgtgttgccgatctcggatgttgtaaaattagtttatgatgtgaagctatggagtggaaaatatgtggatgtaggagatttcgggatgaatggcctcaaaacgctttgtcgtttgtggctattgagtcctgagtgatcttgtcatccgacctttgccatgacaggtgcgcttgcatggcaggtcaaaaaatgttaataaaaaaaggtttattggtttggggagagat

SEQ ID NO: 207099 - DNA, 567 bp, Glycine max
  unsure (1)..(567): unsure at all n locations
atggaggctacttcagcagccactgttccgacaaccttctacatgtccccttctcaatctcacttgtccaacttcggaatgtgttacggtgtcggagaaaatggtaacttccattctccacttacggttatgcctctcaagtctgatgggtcactttgtatcttggaagctctcaaaagatcacaaacgcaagtgatggtgccaacttcgtctccgaaattggaggactttctaggtggtgcaactatgggaactcacgaatatggaagccacgagagaggtttgagcctagacagcatctattataactcccaaaacgcagaggctcaacccaacagagaccttctttcacaacccttcaggcaacaaggtcatatgagtgtccaaacacacccttattactcaggccttgcttgccatggtttatatcaagcaccgttggaggaagaaacaacaaaggaaacgcacgtgtcggattgcagctccctaatgcctcanatgacagaaggcttgaaaaactgggtggctccaacaagggagtttttcactcaccagcaggttttggag

SEQ ID NO: 207100 - DNA, 595 bp, Glycine max
gaaaatgtggaagagaacgggttttgaagaagaagcagttcaattgatcaactcagatttcagggacctaagtctagctgctaatagactcgcccatcatgccatcaaacttggtggcattggctttggagcctcttttttcggattgtttgctgccattgctgctatttatctgttgattttggatcgtacaaactggaaaacaaatattctcacagcactactcattccatacattttcttcagcttgccttcattaattttcgacgtcttcaggggagagcttggaaaatggattgctgcagttgctgttgtattacgccttttccttccaagacacttccctgattggctggaattgcctggtgctctgattcttcttatcgttgtagctccttctctaattgcaagcacctttagagacaacattgttggggtggtagtgtgcctcatcattgcatgttatttgctgcaagaacacattcgggcttctggtggtttcagaaactccttcactaaagctcacggcatatcaaattccattggcataatacttctgttgtttatcccatctgggcgctggtgtcatactttt

SEQ ID NO: 207101 - DNA, 496 bp, Glycine max
agcaacaaatgtaaatttatattatatcccacaggtaaaaatacaacgatttcccaaatcatacatgatttatgaatacacgacagctagaaagacaccacatcaatcctcttcatcttttgttttctacattctatgaaaccagaggacttaaactgagattttattccactttttaacacatgctaactttaggtcttaggacaaacatgaatcacaaaacaatggccgggtgtttatagatatcaagttgcaacaaatgaatgatacagaagacacttggtttaattctcacatatcaaccaagtccaaatggtggtgcctaaaaaagtatgaccaccagcgcccagatgggataaaccaacagaagtattatgccaatggaatttgatatgccgtgagctttagtgaaggagtttctgaaaccaccagaagcccgaatgtgttcttgcagcaaataacatgcaatgatgaggcacactaccaccccaacaat

SEQ ID NO: 207102 - DNA, 577 bp, Glycine max
gaaaatgtggaagagaacgggttttgaagaagaagcagttcaattgatcaactcagatttcagggacctaagtctagctgctaatagactcgcccatcatgccatcaaacttggtggcattggctttggagcctcttttttcggattgtttgctgccattgctgctatttatctgttgattttggatcgtacaaactggaaaacaaatattctcacagcactactcattccatacattttcttcagcttgccttcattaattttcgacgtcttcaggggagagcttggaaaatggattgctgcagttgctgttgtattacgccttttccttccaagacactttcctgattggctggaattgcctggtgctctgattcttcttatcgatgtagctccttctctaattgcaagcacctttagagacaacattgttggggtggtagtgcgcctcatcattgcatgttatttgctgcaagaacacattcgggcttctggtggtttcagaaactacttcactaaagctcacggcatattaaattgcagtggcataatacttctgttggtttatcccatctgg

SEQ ID NO: 207103 - DNA, 564 bp, Glycine max
  unsure (1)..(564): unsure at all n locations
tgcacatctccatgtgtctatcaactcgcatatcagttaannggttanatcttaaanacgcaatatttaaaaaaaaatatgtatattattttattttttttatatttatttataattattttttttaggggtatttggtaataatatttaatttatattattattattttttattttacatggtaaggatcaattctgaaccaaatatgggaatctaattttacacctcagaaaatcatcagaggtttaggtccttggggtcctgatatggtcctcaagtataccagtgccaggtttgttacatatacaactggggaaacgctgacagaatctgaatcgagattactgacagattatgtttaccatactttagcagccaaagctagtggcgagctgtgcttaaaatatatattttcatttggaggactcccgaggtcacctcttcttcacagtgcttcagagtggaaagtgcctaccaccttcatatatggctttcaggactggatgaattatgaaggagcccaagaagcacgcatacaaatgaaggttccatgtgaaatcctt

SEQ ID NO: 207104 - DNA, 484 bp, Glycine max
cagtattgaaatttatattagacgtcattattttttgaattgccattacaagttacaattgcaaattccatttaagcatgaataggacatggcttgaataaataaaggagtttaatttgtaaaagaaatatataatcatagacagcattacacaagattatactctatgcagaggttagcccttcaggaagggattcactgtctggatcaggcctaagaaaccttttacaagcataaaacactgctgaatggaagccacttgggttgtcaatgaacacaaagtgcccggcctggggaaccctaaggatttcacatggaaccttcatttgtttgcgtgcttcttgggctccttcataattcatccagtcctgaaaaccatatatgaaggtggtaggcaccttccacctctgaagcactgtgaagaagaggtgacctcgggagtcctccaaatgaaaatatatattttaagcacagctcgccacta

SEQ ID NO: 207105 - DNA, 637 bp, Glycine max
  unsure (1)..(637): unsure at all n locations
gcttattcatgctgacgtcagatcgaataccaatnananataaaacanaaaaaccaanaaaaaaaattaaaaaaaaaaacaaaataaaacattctnagctttanaataacttgattctggtgggacctgctggattctcatcagaatcagaaagaattacaaagttcttatcaacatggaaaggatcaatcctgaaccacatatgggaatctaattgtacacctcagaaaatcatcagaggtttaggtccttggggtcctgatatggtcctcaagtataccagtgccaggtttgttacatatacaactggggaaacgctgacagaatctgaatcgagattactgacagattatgtttaccatactttagcagccaaagctagtggcgagctgtgcttaaaatatatattctcatttggaggactcccgaggtcacctcttcttcacagtgcttcagagtggaaggtgcctaccaccttcatatatggttttcaggactggatgaattatgaaagagcccatgatgcacgcaaacagatgaaggttccatgtgaaatccttagggttccccaggccgtgcactctgtgttcattgacaacccaagtggctatcattcagcagtgttttatgcttgtag

SEQ ID NO: 207106 - DNA, 419 bp, Glycine max
cagtaatgaaatttatattagacgtcattattttttgaattgccattacaagttacaattgcaaattccatttaagcatgaataggacatggcttgaataaataaaggagtttaatttgtaaaagaaatatataatcatagacagcatttcacaagattatactctatgcagaggttagcccttcaggaagggattcactgtctggatcaggcctaagaaaccttttacaagcataaaacactgatgaatggaagccacttgggttgtcaatgaacactaagtgccaggcctggggaaccctaaggagttcacatggaaccttcatttgtttgcgtgcttcttgggctccttcataattaatccagtcctgaaaaccatatatgaaggcgggaggcaccttccactctgaaacactggg

SEQ ID NO: 207107 - DNA, 562 bp, Glycine max
tctctctcctctgtcttataactttacctttctatcctcatggagtagtaaagaagtaactaatcaaccacaaacctaaacaaccccttttgcctaaagctccttccttttctccaatggcaacctgggttttatcagaatgtggcttaaggcctcttccaccagtgtttccacggtcaacaagacccatttcgtgccaaaaaccttcaaagtctagatttttaagcacaaacaagggtgtgccagatctgaatctccaagcaagagggttaacatgctgtagttttagggatagaaagtgggaattgggagtgagtgctccactgaaagttgccaccaatgaaggagaggaagaagagagaaccaatggggctaataatggggttggcgaggaagtttcagaatttgaccctagtgcaccaccacccttcaaattggcagatattagagctgccattcctaaacactgttgggtgaaggacccttggacgtccatgagttatgttgctagagatgtcattgtggtttttgggttggctgctgctgcagcttatctcaacaa

SEQ ID NO: 207108 - DNA, 471 bp, Glycine max
gctacaattctattcaattactatcattcaacattggtgtttgagtttgagcaaaaaattgtaattaaatcgatgaagacagcacacccttcatcaagaatgaacaatttacagattccttgtttttcaatgagagcacattacatatacaccctgatcatgctttaaaatgcactcggttacaatatcaaatttgtcatgcattcattcgctcatgagcaattcaactagtagactcaatgagagtacacaatcttcaaagttcagaaattgtgtcatatgcagcataattctgaggcctctctgttgtcttcaagaggaaaaaatggatgatttactgtgatgtggaagagctactaagtgtagggtctgtttgatagtatacaatatcgccactgtcactgacaaaatggtctttcttcatgcttcttaacaattctccaatgaagtaaattggaagaggactagact

SEQ ID NO: 207109 - DNA, 479 bp, Glycine max
attccaaaggtatgatttggtaatttcttataaatgatgagaactagctgttcaatactgcttacaatcaaaagcataatacagatgcaccggaacaaaaagaaccagggcagtcagtgagctaaaattgctagagacaaacataagagacacaattctattgcaaataacactgtatggtacaaagttagaaaaacaatgacatacgaaccataccggaatccctaacaaatttttttaagtgcctatctcaagttaacttgagatcattccctcccagatgagggcggaggcaaacccggacttcatgctcttttggtcccacgcgatgttttggcaccaggatctcaagcactgatcctggcccatcgtagtatgcttctatgttggcatcttcaggaattcgagttgaaagagggatttctcggacgaactctccaggggggcagtgctctgacgatggatctgtaagcttgaat

SEQ ID NO: 207110 - DNA, 584 bp, Glycine max
  unsure (1)..(584): unsure at all n locations
cgtggctacggctctganacatgtgnnnnnttnnnccnnnnnnnnnnnnnnnnnnnnnnnnnnnnnnnnnnnnnnnnnnnnnntttnnnnnttnnnnnnnnnnnnnnnntnnnnntnggnnttntggggnnttttttgtgtgtgtgtgtgtgcttgttgcctctccatttccaaaacaccaacaccaccctctctcttctctttccgccaccctctttcccattcaacccacgcttccaaaaccaccaccagccctcctccttccttcgaattccagctattcatccctccggggattgaacccgacgaggtcgatgactccacggtccttcccggctccaacatcgccgtcggaccctacgccggccattcccacatcaaggacgtccagttcgtaaagagtagcgcccggttcgtaaagagtagcgcccgcgccagggattgcccaaaagacaaccgacctgaattcgccgttcttggtcgctccaacgtcggaaaatcctccctcatcaattccctcgtccgcaagaaagagattgctctcacttctaagaaaccagggaagacgcagctcatcaatcact

SEQ ID NO: 207111 - DNA, 297 bp, Glycine max
aacagggacatttttttgaattcgaaaggttgggaaatttaatagctctgaaaaaatgcgttaaacaatcataatcaaaccccgatcatggtaaaacaactaaaagcgcttttaatccaactaaaacgggtgccacataagcagctgcttagtatctgactgatttagcaacctcgaaagattgtgccacatttttcttaggcgtacctactttaatgccctgtccagaattcacgatatgtttccccatacctgcttttctcacagtgtcatttatccgatcagtgctgaaccctt

SEQ ID NO: 207112 - DNA, 573 bp, Glycine max
ctattattctatctatctattgtttcgttccatctcacaaaaagaaaagaaaaatgaaaatgaaaatgaaaatgaaaatttcaagttcctgaaagagagagagagaaagttgaggacttaaatagtttcagttcctgaattccattagatctcttgcattttgtaaacagttttcatcggaaagttcgttacttgatcgtagtttgttccctcggatcgttgctcgaatgttgtttttttagtgacaaaagaatctggtgtatttatgcttctggttattggatgagctgtatgttttaactatggtgttgaagaagagggtagattatggatttaatggctttcgagttcctgttatacctaaagctcctagatctgccagaaggagggttgctttcaacaaagcagttgacgatggtcaagtttgcgctattgaactactggcatctttagctggccaattgttgcaagagagtgaaagttctgcttccagcaatgcgtctgaaggatatcatcaacctgccttcagccaaggtgtaattgagcaagatatacaagatgaagttaaaccat

SEQ ID NO: 207113 - DNA, 384 bp, Glycine max
attatcttatatttgcgttactttggggttttttttactatacacacctcaaatgcactttacctatacaagtttgggaactagactactgaatagtctggaagtggaatcgcaacaagcgttgcaacaaatcaaaatgcaaacgatgaaactgcaaaaagaatcatagcgcaaaatgcatatagagggatagaacctaaacctctacttaattgacctgcaagctctttagaatagaactggtataaggaattgataaacaaacctgggtaatccgcacacgcgatcacccaccacatttataaccttgggccaagacttgagcaccacctaactgaaaaaatgcttgacccttcctatctggaaggagaggctaacacattc

SEQ ID NO: 207114 - DNA, 598 bp, Glycine max
  unsure (1)..(598): unsure at all n locations
tgtatatccagttgccttcgactcgtagacatgtgaaaanataaancggaaaaaccacgaaagataggaattagggtggaggagagaacttaaattgcgggttttagtgacacaaatctagggagcactactctaggagctctattagattcttcaaaacatgaccatgcatcgcgagtcttgggcttttgtcttcggcgttatgggcaacatcatctcctttggagtgttccttgctccattgccaaccttttaccaaatctacaagaagaaatccactgaagggttccagtcacttccttatgttgttgcactgttcagtgcaatgctttggatttactatgctttcgtcaaaagggaagctgccctccttctcattaccattaacacatttggaattgctgtggagtcaatttaccttgcaatcttcctactttatgccccaaggaagcctaggcttacaaccatcaagcttcttctcttactgaatgtgtttgggtttggagccatgcttctatcaactctctacctgtcaaagggagcaaagcgtcttgctatcataggatggacttgccttgtttcaacatcagtgtctttg

SEQ ID NO: 207115 - DNA, 571 bp, Glycine max
ctcgcaagcaaaaagaaagaattccaggcgaggagaaagatggaggggaaggagcaggatgtgtcgttgggagcgaacaagttccccgagagacagccgattgggacggcggcgcagagccaagacgacggcaaggactaccaggagccggcgccggcgccgctggttgacccgacggagtttacgtcatggtcgttttacagagcagggatagcagagtttgtggccacttttctgtttctctacatcaccgtcttaaccgttatgggagtcgccggggctaagtctaagtgtagtaccgttgggattcaaggaatcgcttgggccttcggtggcatgatcttcgccctcgtttactgcaccgctggcatctcagggggacacataaacccggcggtgacatttgggctgtttttggcgaggaagttgtcgttgcccagggcgattttctacatcgtgatgcaatgctcgggtgctatttgtggcgctggcgtggtgaaggttttcgaggggaaaacaaatacggtgcgttgatggtgtgccaacttttgtgccctgctacaccagggtg

SEQ ID NO: 207116 - DNA, 456 bp, Glycine max
tcggcggccgcccttttttttttttttttttttttttttttttttttttttttttttttttttatatgactctgggggtatttttgattttgcaaattaaattacacaatcacagccgtacattacacatgagttgggccttttccaacttaaaagcagaggataacattggcccatgacgcgacacatgcaccacctaataatcataattttacatttttacatacaaaatacaaagactttaatttttaaaaagaagaaaagagattaaccgatcattttaatgaaatgaaaccaaaacccacaaacattggcttgatttttggtggtgttgttgttcccaacttgattaagcatgaaccgtttgattgaatcacttggacttgaagggaatggccctgattaccacctggtggtaaaatgctgcaagagctgcaccgatgaatgggcccaccc

SEQ ID NO: 207117 - DNA, 594 bp, Glycine max
  unsure (1)..(594): unsure at all n locations
gtgaagagtgaagagtgaagagtgaagtaacaaaacaaaaagagcggagggaaagtcgtgggaacgaagaagccaacaaagacaaatcaaggtgaaaaggaaaaagcccttatgcttttttgagtttgtttctcaccagcttgagttgtttagaagctcatcttaagcattgtggcagacctgagtgagcattttttgagtggaaaatatgagctacagtggctcctcaatgagttctggtagtggatcttctagaaggacatttgagtttggaaggacccatgtggtcagacctaaagggaaacaccaggcaactatagtttggctacatggccttggtgataatggctcaagctggtcccaactcttggaaactcttcctcttccaaatattaaatggatttgcccaactgctcctacacggcctgtagccttatttggtggatntccttgcactgcttggtttgatgctggggagatttcagaagatgctcctagtgatttggaggggttagatgcttctgcagcacacgtttgccatctttngtcaacagagccttcaaatattcaactggtattgggggcttcagtatg

SEQ ID NO: 207118 - DNA, 536 bp, Glycine max
gttcttagttctggggacccagtttgctggaggagtgtttctgggaactgcaatgatgcattttctcagcgacgctaatgaaaccttcggggacttaactcgcaaggagtaccccttcgcgttcatgctcgcgtgtgcagggtacttgatgaccctgctcgctgatgctgtcatttcctcggttttgaagaatacggggcgtgaccaaccgcgtgatgctgaggatgtccaagttcaaggggctgatgtgagcaaagtaagtaacaacagtgttagatctcagtcacaacaccggagccattctatttctagctctgatcatcatcacttagcaaaccctgcacttggatctgtccgttcgcttggagacaccattttattgattgttgccctttgtgcacattctgtgtttgagggcttagcaattggagttgctgagaccaaagcaaatgcatggaaagccttatggacaatctgtctgcacaagatatttgcagccattgccatgggaattgctctcctcagaatgatttcta

SEQ ID NO: 207119 - DNA, 486 bp, Glycine max
gtactcaattaatgtgtcactcaataaattgattagcattttcacatgaagccgtatatatgaggaatcatagcaatacagtggtttaaggggcattggagctatgatatattcaaagattactatgtaaagattgtagttgagacataacttcctttctgacttgatctctttttattttccctattgtagtgagtggaaatggctttctccatacaataaacatttttggtatcttaaacctgcttaaatgattttctatacagtattgctgaatattctttctagataggagaaactcttcatttgaagcagacaactgctctgaccattgccaattttctcttagttggatacatgctgctaccatctctgtcaggtgagcatctgggattcccacaacaacaacacttgcaatccctggatgttgctgtagaattgcctcaacctcttcagggtaaatgttctccccaccactcttgattc

SEQ ID NO: 207120 - DNA, 542 bp, Glycine max
aaaacatctcaatgggttcttcttttattacaacatcgcccgcaaccatgaccatggctgcgatcgtgctcctgttcacggtctttgccgtttcctccgccctagacatgtcgataatctcgtacgacagcgcccacgcggacaaggccgtcacgttgcgcaccgaggaggagctgatgtccatgtacgagcagtggctcgtgaagcacgggaaggtgtacaacgcgctcggcgagaaggagaagcgcttccagatcttcaaggacaacctgcgattcatcgacgaccacaactccgcggaggaccgaacctacaagctcggactgaaccggttcgctgatctcaccaacgaggaatacagggccaagtacttgggaaccaagatcgatcccaaccggaggctcggaaagaccccgagcaaccgctacgcgccacgtgtcggcgacaaattgcctgattccgttgattggaggaaggaaggtgctgttcctactgtcaaagaccaaggaggctgcgggagctgttgagcattctcagcaatc

SEQ ID NO: 207121 - DNA, 490 bp, Glycine max
gaattccacattgtaagcaaattaaaatagcatgtgaatatgggacaaatccaaatattgctgctgcattgtcacataatctacagaaccttgaaaactaacagcaatcaaatatgttcgccatttggaatttgaatacaaatacagtgcatcgataatataaccctatgtacagagccaatgtctgactgaaatttgatacagaacattatctattttgtatcataataaaatggtaaagatctttatgttacgtgcagcattatgtgaagaagggggaagtgcatccagctggtgctttagcccttcgacttcccttttacttcatcattggctccttctgcacgttcacatttccttaaactgcttaagcactgctgaccttgttcttacgtccgaaggtccaatggggtttcgctggagtacgccttaatgccttcactcccaaggggttgttcttgctcctgagacaagttccagcgtaagtgtt

SEQ ID NO: 207122 - DNA, 703 bp, Glycine max
  unsure (1)..(703): unsure at all n locations
tgccatttctacatgatcatgcgtctgatgcagtatagcatattaanntggtttaanancataaanaagcataaaaaatataaatttaatatattatatatacttatacttattttttttcttttttttatttttttatctactattttggggtacctggttttcctcaaccaccatgggagattctaatcggatttcggttcaccgtgttctcggcgaaggcttagttgctgatgtggtgttgtggaagaattggcgtggagcggttgcggtgctcgtatctgccaccacattgtggtacctcttcgagcgtgccggttacaatttcttgtccttcgtcgccaatgtcgtgttgcttctcgtcgctattctctttttctgggccaaagctgctaaccttctcaatagacctattactcctgttcccgatctggccatgtcggaggaaactattgccagggttgctgatgcactgcatatttggttgaatcgagccttgtctgttgcacatgacatagcgattgagaggaatctgctgctttgcctccaggttgatggtgtattgtgggtaatatcttacattggcagtttgctcaactttttgactttgatctatatctgtgttcttcttagcttgtctttccctgtattgtatgacaaataccaggaccaatttgatggcctgctaagtgtgatacatggg

SEQ ID NO: 207123 - DNA, 640 bp, Glycine max
caaaaggccttcgttgaggaggtcatggagcttgtggagctcactccgttaagtggagcacttagtgggtgataccatgagaaatgcatggactgacgactgagcaacacacaaagattgactatagctgttgaataggtcgcccaatccttttatagtctttatggatgaacccacttctggattggatgcccgggctgcagcaattgtgatgagaactgtgaggaatatagtgaatactgggcgaacaattgtgtgcacgatccatcagcctagcatagacatatttgaatcctttgatgagcttctgttcatgaaaaggggaggagagctcatttatgctggtccacttggccgtaaaccttgcgaacttattagttatttcgaggcaatcgaaggagttccaaagatcaggtccggatataaccctgatacgtggatgctggaggctacttcttcagttgagaaaacagactgtgagtggactttgcagaaatttaccgaaaatcaagtttatatcaatataacctacagtggttgaaggttgagcagccttgtggaattcacaagaatgctttttccacaagtatgccggcatctttgagcagtactacttgttatggagcaaatctttgtactg

SEQ ID NO: 207124 - DNA, 541 bp, Glycine max
ctcgcaagcaaaattaaagaatttcaggcgaggagaaagatggaggggaaggagcaggatgtgtcgttgggagcgaacaagttccccgagagacagccgattgggacggcggcgcagagccaagacgacggcaaggactaccaggagccggcgccggcgccgctggttgacccgacggagtttacgtcatggtcgttttacagagcagggatagcagagtttgtggccacttttctgtttctctacatcaccgtcttaaccgttatgggagtcgccggggctaagtctaagtgtagtaccgttgggattcaaggaatcgcttgggccttcggtggcatgatcttcgccctcgtttactgcaccgctggcatctcagggggacacataaacccggcggtgacatttgggctgtttttggcgaggaagttgtcgttgcccagggcgattttctacatcgtgatgcaatgcttgggtgctatttgtggcgctggcgtggtgaacggtttcgaggggaaaacatatacggtgcgttgaatggtgg

SEQ ID NO: 207125 - DNA, 419 bp, Glycine max
aaatgactctggggttatttttgattttgcaaattaaattacacaatcacagccgtacattacacatgagttgggccttttccaacttaaaagccgaggataacattggcccatgacgcgacacatgccccacctaataatcataattttacatctttacatacaaaatacaaagacttttttttttaaaaagaagaaaagagataaaccgatcattttaatgaaatgaaaccaaaacccacaaacattggcttgatttttggtggtggtgttggccccaacttgattaaacatgaaccgtttgattgaatcacttggacttgaagggaatggccctgattacaacctggtggtaaagtgctgcaagaactgcaccgatgaatggtcccacccaaaagatccagtgttcatcccaacca

SEQ ID NO: 207126 - DNA, 518 bp, Glycine max
ctcgcaagcaaaattaaagaattccaggcgaggagaaagatggaggggaaggagcaggatgtgtcgttgggagcgaacaagttccccgagagacagccgattgggacggcggcgcagagccaagacgacggcaaggactaccaggagccggcgccggcgccgctggttgacccgacggagtttacgtcatggtcgttttacagagcagggatagcagagtttgtggccacttttctgtttctctacatcaccgtcttaaccgttatgggagtcgccggggctaagtctaagtgtagtaccgttgggattcaaggaatcgcttgggccttcggtggcatgatcttcgccctcgtttactgcaccgctggcatctcagggggacacataaacccggcggtgacatttgggctgtttttggcgaggaagttgtcgttgcccagggcgattttctacatcgtgatgcaatgcttgggtgctatatgtggcgctggcgtggtgaagggtttcgaggggaaaac

SEQ ID NO: 207127 - DNA, 393 bp, Glycine max
atatgactctggggttatttttgattttgcaaattaaattacacaatcacagccgtacattacacatgagttgggccttttccaacttaaaagccgaggataacattggcccatgacgcgacacatgcaccacctaataatcataattttacatttttacatacaaaatacaaagactttaatttttaaaaagaagaaaagagataaacagatcatcttaatgaaatgaaaccaaaacccacaaacattggcttgatttttgttggtgttgttgttcccaacttgattaagcatgaaccgtttgattgaatcacttggacttgaagggaatggccctgattaccacctggtggtaaagtgctgcaagagctgcaccgatgaatggtcccaccc

SEQ ID NO: 207128 - DNA, 576 bp, Glycine max
  unsure (1)..(576): unsure at all n locations
cacaattcctacacatttctactctttagtttctccaattttctttctcaattctgaacaatggccactacaacacaacttcacttaccccctggattcagattccatccaacagatgaagaactcgtcatccactacctttgtcgcaaatgcgcttcgcaacatatcgcggttcccataatcgccgaaattgatctgtacaagtacgacccttgggaccttccaggaatggctttgtacggagagaaagagtggtattttttcacgccgagggaccgcaagtacccgaacggttcgcggccgaaccggtccgcgggaaccgggtactggaaggcaaccggagcggataaaccagttggtaaaccgaaaccggttgggatcaagaaagcgttggtttttacgctgganaagcgcccaagggagagaaaactaactggatcatgcacgagtatcgtcttgcagacgtggatcgttccgttcgcaaaaagaacagcttaaggctggatgactgggtgctgtgccgaatttacaacatgaaaggtgcaatttgaaaagcaacaacctaccaccaccgag

SEQ ID NO: 207129 - DNA, 544 bp, Glycine max
agaagcaataagatgaaaatgatagtgcttgttttgtttgttgctacagttttggtagcatatgaatgccatggctcagactaccagaagttccctctccaaatgaaaactgggtttggtgggcaatacagcaatgaggtggcatgtgccagttggaggcttggcgtggaagcaaacaacgtagtcaagtggcaaactgttcctgcagcttgcggagagtacatagctgactacgttctaggagaccaatatagatcagattccaaaacagttaaccaacaagcttatttctatgctaaatccctcaaactcaccaacaaagatgtctttgtcttggacgttgacgacactactctctctaatctccagtattttgctaaccatggatttggtgtggaaccacacaatacgacggcgtttaagaactgggttcttgatggcgaggcattcgcactgccagagactcttaaaatgtacaacaaactgttggctctcggcatcaagattgtattcttatcagaaagaccactgagtctaggggatg

SEQ ID NO: 207130 - DNA, 506 bp, Glycine max
  unsure (1)..(506): unsure at all n locations
aatggaacaagagctcataattcatgaaagcctcgaaaagggaaaacaacattgttcagtgcccctacatgactaagtaataatactcaggatcttatttcatagaaattaaggagcaacttagaggcttgatttgagagcttaatcatagtacaagggattaggcagcttaaaagtcctagtccctttgttgcttcccaggaggtcactccattggtctccaacgtttccaatgattctgtatccctccttctccagcttctctctctcagctgatttgtattcaaatgataacttaccagagtactcagatggatccctgagaattaacttctcccatgtgttgaatccaacctcctttaagttcttggctgttacatcccctagactcagtggtctttctgataagaatacaatcttgatgccgagagccaacagtttgttgtacattntaagagtctctggcagtgcgaatgcctcgccatcaagaacccagntcttaaacg

SEQ ID NO: 207131 - DNA, 550 bp, Glycine max
agcagaagaaggcaaagatagtggcagagctccaagctgtgaagcacaacagtggcaagtcctacaatcagttagcggaggagactggactcaccaacgtctatgttgctcagcttctcaggagacaggctcagctcaatccccaaactgcccctctacttcgggcagcgctgcccgacctgccccaagaccttgtttctgagatgatgagaccccctttgaggtcttatgaccctaatctcatccaagaccccactgtctataggttgaatgaagctgttatgcattttggggagagcatcaaagaaataatcaatgaggagtttggtgatgggatcatgtcagcaatagatttctactgctcggttgataaaattaaaggagtagatgggaaggatcgtgtggtattgacatttgatgggaaatatttgccacattcagaacagaaatctgagcacatggtttcaagaacaaggccactgggaaaacagtgagtatcttcattggaggaccaactacgcaatcttcaacaccagtctacctgcacatg

SEQ ID NO: 207132 - DNA, 542 bp, Glycine max
acaatacaagcttctccatcttataattaactggcattaaaatacatggtgcaagtgtcatgaaatatccaaagccataaaacattgtataaatatgcatggccaactactttttattatttataaatcttaaacacttttatttttctcttccaatgtttttctatagacaacacaaaatagcactgatcaaatacaacttgtggttgttacagatcaatgataattcatgtgcaggtagactggtgttgaagattgcgtagttggtcctccaatgaagatactcactgttttcccagtggccttgttcttgaaaccatgtgctcagatttctgttctgaatgtggcaaatatttcccatcaaatgtcaataccacacgatccttcccatctactcctttaattttatcaaccgagcagtagaaatctattgctgacatgatcccatcaccaaactcctcattgattatttctttgatgctctccccaaaatgcataacagcttcattcaacctatagacagtggggtcttggatgaaata

SEQ ID NO: 207133 - DNA, 665 bp, Glycine max
  unsure (1)..(665): unsure at all n locations
tgttactctgcgcagtcagatcagtatacagttatngnntnnnncnnnnnnccnnnnnnnnnnnnnnnngnnnnnnnnngnnnnnnnnnntttnnnnnttgacacctgatttcagttctttttcttctcaataattattatttgtatttgtaaacacacactatcaaagcaaatggggtgctcattctccgggttgaacgcactttacgactccgtgaacggcggaggtgatgtttggatcaacgagaaccgtttccgcatcgtgcgccagctcggagaaggtggcttcgcctacgtctacctcgtcaaggaggctcccgacgactccgccgccgctggcctcgccaagaagctcaaaggctcctctcatctctccgatgatggaacttatgctatgaaaaaggtcctcattcagaacaatgaacagctggagttggtcagggaggagatccgtgtttcatcactgttcaatcatcccaatctgctcccgcttcttgagcatgcaatcatttctgtcaagcctacccatgaaacatcttggaaccatgaagcatatttattggttccagttcatttggatggaacattgctagacaattgccaaataatgaaagccaagaaagaattctattccaccctagatgtgcttcaaatatttcgtcagc

SEQ ID NO: 207134 - DNA, 567 bp, Glycine max
aaataaatgatattccatttatgctgataaattctgaagacacagggagattggccatttcataaattacaagaaacaaaattatgtagaaatgacaaacaatactttaaagccaacgcccgactacctagactaccaccaaaatcgaagatacatataaatatatggttaactccgtcaggcgaggaattgctattgcttttctatccattaacatataactggacggcaaatgcacacgaatttttttaaacgactgcaacataaaaatctcaagccccacttctcacttccatagtaactcattgagagaacttcgcaactaacttgtcaacatggataatgatatcatctatcctgggccgcatggaagccgttggctgaagcatccatgacacgaactgatgaagagcttctggatatggaggcttgggtcctgctggccatttgacctgtgcatttacaatagccaattgcaggcttccaccagactctccaagtgcatattcaaatggagataccccatacattattgcatataatgtgcatcctagcgaccaaatgtca

SEQ ID NO: 207135 - DNA, 556 bp, Glycine max
  unsure (1)..(556): unsure at all n locations
cttttgaagattgtattacatgggctaggctaaagtttgaagattattttgctaaccgagtaaagcaattaatttatacttttcccgaagatgctgcaactagtactggagctcctttctggtctgcaccaaaacggttcccctcatccactgcaattctcatcctctgatctgggtcatcttctgtttttgatggcagcttctatattacgagcagaaacatttggtattcctattcctgactgggtgaagcatcctaagaagttggctgaagctgttgatagagtgatagtacctgactttcagcctaagaaagatgcgaaaatagtgacagatgaaaaggccaccagtctctcatctgcgtctatagatgatgcagctgtgattaatgatttaatcgtcaagttagaggggtgccggacaaagctgcaaccagagttcaggatgaaaccagttcagtttgagaaggatgatgatacaaactaccatatggacctgatagctgggcttgcaacatganggcacggtactacagcattcctgaagtgacaagctg

SEQ ID NO: 207136 - DNA, 347 bp, Glycine max
aacaaacaaggaacgaaagttgcttttcaattcatatatgaaaggggatatgggcaacaggggccccttgggggtaccccttttgaatatgaagctgggagggccaacattttttggtttttaaactaaaaataagtctcggccccccctggtggggcgaccaccacccccttaacggaaatagggggttttttgggggatggcaatggcattatcctcatcatcctcacaggcaacaacaacatccaagtgaccacggtaagaaggtttttccaccttggcccctttcctaaccaaaaccaccatttttttggccatgcgttttctgtgcctagggaacatgcttt

SEQ ID NO: 207137 - DNA, 634 bp, Glycine max
  unsure (1)..(634): unsure at all n locations
tcttatacagccttctcaatcagtaaacaataangggtannggcgaaagaccaaaagaagaaaaagaagaaaaagaaaaaaaaaaaaaaaatttttaaaatttaagtatattaaatattattaaaaattgggtaatttgattttattattaaaatattataatatataatatatatatataatatatctaaatcagatgacattaatataaaaaaatttggcggaggtgcagatataacacaggctttgacaaaagcttgggaagaggcatgcgcagcaacaagtgcaagcaaaattgtgattcctggtgggtcatacaagatggaagcagttgatttaaaaggtccttgcatggctcccattgaaattcagtttgatggcacacttcaagcaccggctgacccgaatgcactcgacggggctgatgaatggctcaaagtacaacatgttaacttttttaccttatcaggtaaaagtgtttttgatggtcaacgtgcaactgcttggaaacaaaatgattgtggaactaacaagaattgcaagaaacgttccaagaattttngtttcaatttccctgacaattctatggtctcggacataacttctaaagatgcaaaaactttcatgtaaatgt

SEQ ID NO: 207138 - DNA, 366 bp, Glycine max
aggaaaaaaaaagggaatcttatatatgctcttgcacaagggtttcgtattgaataaatgcccttaaacattgacaacgtaagtatatacaaatgcttattcactatagacttcaaataggcctcattctcaccttacatatttacaaaaaaaaaatctggtcaaggagaatgtgtcaacccaagtcttttaagctggacatgggcaagcaggagcttttcctgtaactatgggcttgacattagcacatttagcaactattggagctccattgaatgtaaaaacaacgttatttaattccacatcctcacatgggacacccttgctacatataaaagacactccttccttggtttttgaagggcc

SEQ ID NO: 207139 - DNA, 622 bp, Glycine max
  unsure (1)..(622): unsure at all n locations
tgtctttttctggtgggtcacgtcgnagagcagtgaannnntnnnncnnaanaacaaaaaaaaanaaaaaaaaaaaaaaaaaaaaaaaaaaatanaaaatttannaaaaaaaaaaaaaaataaaaanaaatagganaanaattaatgttttattcttattgctagctatttctagtacaactcaatcggttgacattaatataaaaaaatttggcggaggtgcagatataacacaggctttgacaaaagcttgggaagaggcatgcgcagcaacaagtgcaagcaaaattgtgattcctggtgggtcatacaagatggaagcagttgatttaaaaggtccttgcatggctcccattgaaattcagtttgatggcacacttcaagcaccggctgacccgaatgcactcgacggggctgatgaatggctcaaagtacaacatgttaacttttttaccttatcaggtaaaggtgtttttgatggtcaaggtgcaactgcttggaaacaaaatgattgtggaactaacaagaattgcaaganacgttccaagaattttggtttcaatttcctggacaattctatggttcgggacataacttctaaggattagcaaaactttcatgt

SEQ ID NO: 207140 - DNA, 409 bp, Glycine max
agtaaatagaaaggcaatcttatatatgctcttgcacaaggctttcgtattgaataaatgcccttaaacattgacaacgtaagtatatacaaatgcttattcactatagacttcaaatagtcctcatcctcaccttacatatctacaaaagaaaaatctggtcaaggagaatgtgtcaacccaagtcttttaagctgtacatgtgcaagcaggagcttttcctggaactatgggcttgacattagcacatttagcaactattggagctccattgaatgtaagagcaacgttatttagttccacattctcacatggtacacccttgctacatataagagtcactccttccttgggttttgaagtgccctgaatattcttgaaggtaaccttgcttatctttatttttgat

SEQ ID NO: 207141 - DNA, 376 bp, Glycine max
gattttcgtggagtggaacagaggggaacttgagagtttcttgattgaaattaccgccgatatttttaaagtgaaagatgaagatggtgaagggtttttggtggataagattttggataagactgggatgaaggggaccgggaaatggacggtgcagcaggcggcagagctttcgatagccgcgcccacgattgcggcgtcgttggattgccggtacttgagtgggttgaaggaggagagggagagtgccgcggcggtgctgaaggaagcggggttgagtgatgaattggggagggtaaatgtgagtggggtggatcagaagaaagttgattgaatggggcgatcaaaggtgcagaatggctctgcttatcatctt

SEQ ID NO: 207142 - DNA, 586 bp, Glycine max
  unsure (1)..(586): unsure at all n locations
cccggcagcagagcctgggaaagctgattgggaattggcattggtagagactgctagcaatttgtcaaagcagaaggcagctttaggtggtgggttggatcctctattgttgactggtatgtatgatcaaggaatggtgaagcagcatgtcagcactacccaactgagtggtgggagtgcaagcagtgtggcattgccgggaccagggaagactccggttttggctctccccgccccagatggatctgtgcagccggttaatcaggatccatttgctgcatcgctgagtgttccaccaccatcctatgtgcaaatggctgatatggagaagaagcagcacttgcttgtgcaggagcagcaggtgtggcatcagtatgcaagggatgggatgcaaggtcaatctagcttggccaaactgaatggcgctggatactatgccggaggtcctatgcccatgatgccttatgggatgcccccagttaatggaatgggaccttcaaccgggtattatcacactccttactgataccccttttcacttttttctttgngtcatatctataggtcgtttcgtttattttttact

SEQ ID NO: 207143 - DNA, 523 bp, Glycine max
  unsure (1)..(523): unsure at all n locations
gtggagaccagcttgttccatattatgctgacattcttggagccattttgccttgtatagcagataaagaagagaaaattagagttgttgctcgtgaaaccaatgaagagctacgtgccctcaaggcagatccagctgaagcgtttgatgtaggagcaatcctctccattgccaggaggcaattatctagtgaattggaggctactcgaattgaagctttgcactggatatccacccttttaaacaattatcgtactgaggttttgcaatttctgaatgacatatttgacactctgctcaaggcactttcagatccatctgatgaggttgttcttgtagttcttgatgttcatgcatgcattgcaaaagactctcagcactttcggcaacttgttgtcttcctggtgcacaatttccgggtagacaattcccttttggagaagcgtggtcctttgataattcgtcgactntgtgtgcttttgaatgctgagagagtctaccgtgaactttctacaatactgga

SEQ ID NO: 207144 - DNA, 560 bp, Glycine max
  unsure (1)..(560): unsure at all n locations
gccagctaccgganccgtctcgattattcccggtcgacgcgctcacctagtcgcggccgccctttttttttttttttttttttttttttttttttcttttttttttttttttgggttttttttgggttttttattttttttttttaaaaaaaacccaaaacccccatataaaaaaaaaaaaccacccaaaaccccaccggcaaaaacaccaaccacagccgcccaaaaaaaaaaaaaagccccaccaaaaaaaaaaaaccccccccccccccccggggaacaaaaaaaaaaaaaacccccccggggggggggtgtctcttccccccccaaaaaaaaaaacccccccccccccccccccgtgggggggcaaaaaacccccccccccccccccccgcgcgaaaaaaaaaaacaataaacccaaaaaatcccccccccaaaaggggggggcccacaaaaaaaacccccccgggggggggaaaaaaaaaaaacttccccccccccccccctccagaaaaagaaagggccaccaacaacaacccccccccccacagggggggggg

SEQ ID NO: 207145 - DNA, 477 bp, Glycine max
gcgaaatcaggtctacgaaaattacctttttgacacctgattccagttctttttcttctcaataattattatttgcattagtcaacacacactatcaaagcaaacggggtgctcattctccgggttgaacgcactctacgactccgtgaacggctgaggtgatgtctggatcaacgagaaccgtttccgcatcgtgcgccagctcggagaaggtggcttcgcctacgtctacctcgtcaaggaggctcccgacgactccagcgccgctggcctcgtcatgaagctcaaatgctcctctcatctctccgatgatggaactgatgctatgaaacaggtcctcattcagaacactgaacagctggagttggtcacggaggagatccgcgtgacatcactgctcaatcatcccaatctgctcccgcttcttgagcatgcaatcatttctgtcaagcctacccatgaaacatcttggaacca

SEQ ID NO: 207146 - DNA, 530 bp, Glycine max
  unsure (1)..(530): unsure at all n locations
aaataaatgatattccatttatgctgataaattctgaagacacagggagattggccatttcataaattacaagaaacaaaattatgtaaaaatgacaaacaatactttaaagccaacgcccgactacctagactaccaccaaaatcgaagatccatataaatatatggttaactccgtcaggcgaggaattgctattgcttttctatccattaacatataactggacggcaaatgcacacgaatttttttaaacgactgcaacataaaaatctcaagccccacttctcacttgcatagtaactcattgagagaacttcgcaactaacttgtcaacatggataatgatatcatctatcctgggccgcatggaagccgttggctgaagcatccatgacacgaactgatgaagagcttctggatatggaggcttgggtcctgctggccatttgacctgtgcatttacaatagccaattgcaggcttccaccagactctncaagtgcatattcaaatggagataccccatacat

SEQ ID NO: 207147 - DNA, 633 bp, Glycine max
  unsure (1)..(633): unsure at all n locations
tgtattacatgtgtagtcagtcagcataccaatgaanaataaaccaaaaaaccnanaaaaaaaaaaaaaaaaaaaaaaaaaaaaaaaaattttaaaaatttaaaanntnaaatnaanattctattattatatatggcttcttcaccttcctcagaaaacaaaaacctagagggagtagctggtggtgccggagagaaacccattccacttggtgagaacgttctgcagaagcatgctgcattctttgacttgaataaagatggtgtcatctacccatgggagacttttaaagggttgcgtgaaatcgggactggggttttgctgtccgttggaggtgctattttcatcaatgtgtttctcagtcagagtactcgtcccggaaagtttccatctatactttttccaattgaaattaaaaatatccaacgcggcaaacacggcagtgacactggagtctacgatactgaaggaaggtttgtaccttcaaaatttgaagaaatttttaacaagcatgcacatacacatccaaatgctttgacatatgatgagttaacggagatgataaaggcaaatagagagcctaaagatttctcaggaaagattggtagtgtggttgaaatgaaaattctttac

SEQ ID NO: 207148 - DNA, 500 bp, Glycine max
ataaaattgtattctttattttactgtatacgtgcttttcggatgaattcaaacatgatagatgacacataagtttgacttgacatatacattattgatgaacataaaaataaacagacactttgaatattgtgactaacttactagcatataaattcataaaaataaccaattttgctgagatcgacaagtaacttcttcttttcacatacgtgtctgaaaaatattactacttctctttgcctgaagagtgttgttttttcagttgttcaaataaacttccatcgtaaacacctcggattgtttctttctgcagtaatccactcttatctttagcaagtttgtaaagaattttccattcaaccacactaccaatccttcctgagaaatctttaggctctctatttgcctttatcatctccgttaactcatcatatgtcaaagcatttggatgtgtatgtgcatgcttgttaaaaatttcttaaattttgaggtacaaa

SEQ ID NO: 207149 - DNA, 601 bp, Glycine max
  unsure (1)..(601): unsure at all n locations
atgcgtgcgtcagatcagaanatcagatacnnggtntaaaanccanattgnaagctnatgnacgataaagtgtgnagattaattattggtattgtgttatatgttttttatgatttcttatgtatgtatttttttattatatagggtgttatggaattttttttaattattgtttgggtttgtgaggagagcttgggtgctgctctgaacgcaaattttcaagatagctatgggtgttgtatatttttttgtgaagaagaattagtgagcataatgttttctgaaagattgggggcagacgaatctcattgtcaagatttacagagtttgagtgtgtcaaagcgacttgtgaggagtgttagccagaagtggaggaagaagagtaacaggaattctggggaagaagctgacgatgtaaatggagtttctttaagatgcttaaatctgtatggacgaagtgggggctgcaaggtaggtgctgacactggtgatgattttggcgattcaagcagtagaaggagatctagtgccagtgacgaaggaaagggatataagccgatttgtggcccagacgaaactgctgtggattgcttttcatatg

SEQ ID NO: 207150 - DNA, 507 bp, Glycine max
ttttttttttttttttttttttttttttttttttttttttttttttttttttggttttttttttttttttttattttttttttttttttttttttttttgatttgttatatttttttttggggaaaaaaaattttatggggggggggaaaaatgtaaaaaaagaggggcgtgaaaaaaaaaaaactgcgaaactggcttcaaaaaaatcccccttccaaattatttggggaaaaaaaaaaagggggtttcccgggtgggggggccccaaaaaaaaggggggggacactaaaatttttggtggaaacacccccccccgaagggtctctgggggggcgaccccccccagatttggtatcacacaaaaaaacccccctcgaaaaaaaaaaaagaccccggaaaaaatgaggcccggggggctcttttcccccccgaaaaaagggggaaaacccccactcccggccatcttttttgtccaatccccccccaaaaaattgtgttttttttac

SEQ ID NO: 207151 - DNA, 618 bp, Glycine max
  unsure (1)..(618): unsure at all n locations
tggtcataatcgaagactttaanggtaaaacaaaaagcnannaaaaaaggaaaaaagaggnaagaaaaaaaattttaaaattttaaaaaaangaaaagaataaaaatgggaatttttgttatttttatttaatattaacatgatgacccttagatcacagccaccatggagtgattctccggttacacaatccacgaacctcactcttcactttccgttgatgctcaggctctgcagaaccagatagatgagcttgcagcgttttctgactctcctgctccatcagtaacaagggtcttgtatactgacaaggatgttttaggtcgcaggtatgtaaaaacccagatggaacttgctggtctatctgtgagagaggatgctgttggtaacatatttggtcgttgggatggcgttgaacctgagcttgctgcagttgcaacaggttcgcacattgatgctataccttactctggaaaatatgatggagttattggtgttttaggtgctattgaagccatcagagtcccgaaaaggtctggttttaaacctagaagatcattgcacgtcatattattcacatcagaagaaccaacacgctttggaatangtagcttggga

SEQ ID NO: 207152 - DNA, 552 bp, Glycine max
gaacgatttgatggtttggaatgcatttcccaagcaacgagtcttcggttcgaaaccagcagagagagagagaacttcaactgagggtgagagtgacacaaatctagggagcactactctaaaagttctattagattcttcaaaacatgaccatgcatcgcgagtcttgggcttttgtcttcggcgttatgggcaacatcatctcctttggagtgttccttgctccattgccaaccttttaccaaatctacaagaagaaatccactgaagggttccagtcacttccttatgttgttgcactgttcagtgcaatgctttggatttactatgctttcgtcaaaagggaagctgccctccttctcattaccattaacacatttggaattgttgtggagtcaatttaccttgcaatcttcctactttatgccccaaggaagcctaggcttacaaccatcaagcttcttctcttactgaatgtgtttgggtttggagccatgcttctatcaactctctacctgtcaaagggagcacagcgtcttgctatcataggat

SEQ ID NO: 207153 - DNA, 507 bp, Glycine max
gtcattgatcccttgtttctccacattcatataatctcaatggtgatattcaaactttgccaacagcaccagcagtagctgcgtgattcggttccattgttcccatcttcccaacgtcaatgatgtggccattcaattcttgagccttcactggctcctctagtgccactggggtggcgtttctgtacatcaaatacatccccatctgaattatgccgaagacaaacccaagtgtgtttggaagagcaacgtaataatccctgaggagaaggccatagaagaaccacataacagcattgatggttaaaaacattgacaaagtaaatggcatgtattccacgctcctcgtctttatgacacgcctaataatgaagagaggcgcagcaaagacactgatgttgaaaacaaggcaaatccatcctatgatagcaagacgctttgctccctttgacaggtagagagttgatagaagcatggctccaaacccaaacacattcagtaagagaa

SEQ ID NO: 207154 - DNA, 587 bp, Glycine max
  unsure (1)..(587): unsure at all n locations
gcctgttactctggttataatcaagtagattccgtcatcatgaaccaatcgtcaatagaccgtggattctttcggtctctgtttttccgttcatatagagatgaagagaagaagatgggaaccctggtcaaagaagattttggccgtcctgatagagctaacaccatgggaatgagacatggttcttatgataagctggatgatgatggtcttgccccaccaggcacacgagtatctggtgaggatgttatcattggaaagaccaccccaatatctcaggaggaggcacagggacaagctntacgttacacaaggcgtgatcacagcataagcttacgtcacagtgaaactggaattgttgatcaagttttgctgaccacaaatgctgatggattgagatttgtgaaagtaagagtgagatctgttcgtataccacagattggtgataaattcagtagtagacatggtcagaaggggacagttggtatgacctatacacaagaagacatgccctggactgtggaagggcatacccctgatattattgcaatccacatgctattccttctcgaatgacaattggtcag

SEQ ID NO: 207155 - DNA, 552 bp, Glycine max
atttgagggtggtgttgatgcaggagagcatgcctccattgagcttgcattgttgaacatgggtcttctacacagagctgtaaagagaaactgtaggcctatggtagaactactgttaagatttgttccagttaaaacctcagatggtgcagacagtgaaatgaagcaagttgccgaagcccctgacagattcttatttagacctgatactgtcgggccagctgggttgactcctcttcatgttgcagcaagtatgagtggctcagagaatgtgttggatgcattaaccaatgatccacgaatggtgggaattgaagcatggaaaagtgcccgggacagtacaggtttgacccctaacgaccatgcttgccttaggggctattactcttacattcaactagtccagaacaagaccaacaaaaaaggtgaaagacaacatttggttgatatccctggaactgttgtagatagtaacacaacgcagaagcaatcagatggaaataggacatgtagagtttcaagcttaaagactgagaagattgaaccacagca

SEQ ID NO: 207156 - DNA, 362 bp, Glycine max
cttgcacatcgtttctttgttgcccagggatctaaacttcaatgagcatacaagttgtatcgactggccagagcatcaaagagccacgcctatcactatagatacaggctgatatcattcaaagaaatctggcgtgcactgggctaaagataagagatccgttacatcatcgatcaagctattcacagggtctgcatgggttgtcctgacaaactcatctgctgagactcatgtttgggatactgataatccttctagaactctccttatgtattacacaaattttctttcatcccctgagggacacatacatacagacattggaaaacataaggtctatcataacacaaccattaatcatg

SEQ ID NO: 207157 - DNA, 359 bp, Glycine max
cattgttgtaagttgttgattactatggcctgtataattcgatattctaacctcatgagcggaatgagatcggccgtgtatgagcgatcttggctggtataggcatgggtgctgtcatcgaatgcatgttgacaactactgcctcttgcgatgatgagcggcaacacgatcgtgtcgagatcatggtcaacgatgcagatctacagaactactccatcctacgtggctctgaccgtcacactactgatgatcggtagatacggcgacataaccgactcgatatgaaccctgccaacaccgtaatgaatgctatgctgtaagactggaaggcgtattctcgtagcatcagtacacggtga

SEQ ID NO: 207158 - DNA, 525 bp, Glycine max
  unsure (1)..(525): unsure at all n locations
ctcaccctcctcttcacacattttctgtgcgctctaacaaacattctcgttcacactttcagattgtgtgaagatgggggcgggtggccgaactgatgttcctcctgccaacaggaagtcagaggttgaccctttgaagcgggtgccatttgaaaaacctccatttagtctcagccaaatcaagaaggtcattccacctcactgtttccagcgttctgttttccgctcattctcctatgttgtttacgacctcaccatagccttctgcctctattatgttgccacccattacttccacctccttcccagccctctctctttcttggcatggccaatctactgggctgtccaaggttgcatccttactggagtttgggtcattgcccatgagtgtggccaccatgcattcagtgactaccagttgcttgatgatattgttggcctagtcctacactccggtctcctagtcccatacttttcatggaaatacagtcatcgncgttaccacttcaacactgtttctct

SEQ ID NO: 207159 - DNA, 426 bp, Glycine max
ctaggatgctgtgatttttggcctctcaagatgagaatgactggccggtgattgatcccttgccatcttatggcagagggagggacacactaagcggaaagaggagctatctaataattggatccatcctcactgatgtactcatatctgaggacaatggcacattagatggacaaggtgatctgtggtggcaaaaattccgcaagggggagctcacagatacccggccttacctgacggaaatcatgtactcagataatgtacaaatatccaatctcactttggttaattatacatcgtggaatgtacatactatatacagcagcaaccttgatagtcaaggaatcacaattcttgctcctgtgacatccccaaatacagatggaatcaaccctgactcttgcacaaacacacgaattgaggact

SEQ ID NO: 207160 - DNA, 480 bp, Glycine max
cttggacccagatcttcttctcttctccctctataaacaaaacatgggttttccccctctacaatcccaaaacagatcaaccgttctcttctctcagcaatgcctggaagcttaaggaatctgtcactttctcccaaaatcttctccttcaccttgcttctctcattaaactcccttctctttttcccatgttgctactcccttgatgagcaaggccaagctcttatagcatggaaaaacagtttaaacatcacttcagatgtgttagcatcatggaacccttcagcctcaagcccatgcaactggtttggggtgtattgcaactcacaaggagaagtgatagagataagcctgaagtcagtgaacttgcaaggctcattgccttcaaattttcaacctctaaggtccttgaagattcttgtcctctcatcaaccaacctcacaggaagtataccaaaagagattggagactatgtagag

SEQ ID NO: 207161 - DNA, 535 bp, Glycine max
  unsure (1)..(535): unsure at all n locations
gcagtgtggtctctctcactccaactccaaccacagagacaacaaatacaacaacgttgtttccatgacaatggaatctgcgcttacagcttctaactggaaccgttctttgattcggattcgccacactaagccacgcttcggtgcaattcgccccacagcaatacggtgctccatcaactcgtatcgcttgtccaacctcactccctctgagcttcagagcctcaagagccgaccccgcatcgatttctcttccattttcggtgttgttaatcctattgtcgatgatgttcacaaaagaggggatgctgcggttaaagaatacacttcaaagtttgataaagttgaattggataagatagttgaggttgtctcggagctccctgaccctgtgcttgaaccgcctattaaggaaagctttgatgtcgcctatgataatanttatgcatttcatgctgctcagaagtcattcgagaaaaagtgtgagaacatgaaaggagtccaatgcatgagagttgcatgaagtattaactct

SEQ ID NO: 207162 - DNA, 512 bp, Glycine max
gtgatttcagtgagtgatcggtgttcacttgatctcatcataatcgtcagcgtcaattgaagaagatgccgatcagaaacatcgccgtcggaaggcctgaagaggcgactcaccccgacacgttgaaggcggctttggctgagttcatctcaaccttcatcttcgtgttcgccggctcaggctccggcatcgcctacaacaagctcaccgacaacggcgctgccacccctgccggcctcatctccgcctccatcgcccatgcattcgccctcttcgtcgccgtctccgtcggcgcctacatctccggcggccacgtcaaccccgccgtcaccttcggcgccttcgtcggcggcaacatcaccttcctccgcggcatcgtctacgtcatcgcccagctcctcggctccatcgtcgccttccttctcctggccttcgtcaaccgcttcactggttcagctttcggactctccgctggagttggagttggcaacgccttggtgttggagatcgtg

SEQ ID NO: 207163 - DNA, 495 bp, Glycine max
gtaaaaaggaaaggggaaggaagcaaggcaaggaaggagagtggatcgattcctcagcagcaccagacatttataaaagctctttcccttccctcaaatcgctcatactcttccaatcttttttttttttttttttttacctttctccctcgctcaataattcaaaacaaaaaagaagaagaagaaggttttcgcgatggcatcgaaacggatcttgaaggaactcaaggatctccagaaggatcctcctacctcttgcagcgccggccctgttgctgaagacatgtttcactggcaagcaacaattatgggtcctccagacagtccttatgctggaggtgttttcctagtcactattcatttcccttcagattatcccttcaagccacccaaggttgcattcagaacaaagggatttcacccaaatataaattgcaatggaagcatttgccttgacatattgaaggagccgtggagccctgcgctaactatttc

SEQ ID NO: 207164 - DNA, 585 bp, Glycine max
gttatcgagagaatcttgccgctgctagcatgtgtaggactaccaccttcttgggggggggggggggggggggggggggggggggggggggggggggggggggggggggcggggggggggggggggggggggggggggggggaaatataaagggaataactttggtagaaatattagggcccacacccattttaagctttttaaaaatttttcccaaaactcccggggaaaacttcaaaaaaaaaaacccaggggacctttaataacccctgaaaccgcaaattaagttttttggagaaccccccctaaacccaagttttgttgggaaaaaaaaaaatttttcccccccccaaattccccaaaaaatgcccttttcctttttagggttaatttagcccccccttctttaatgcccccccccccctttgaaaaaaaaaaacttaccccccccaaaatttttcctcccccccaataaaaacttgggtaaaattggggaaagccccccttgtggggccttttcaaaaaaatagcgggttttattccctttggaatttaaaccccccgcccctttttttgcgacccccc

SEQ ID NO: 207165 - DNA, 298 bp, Glycine max
gcactctacttcacccagctaatcttaccctcctacatgtctagcactccctccttcttacccccccccccccccccccccgggcacccaccccccccccccccccccccccccccccccctccgccccccctgcccctttttataatactctatcaaatatcctttattcttaaccctccccccctcaccctctaccctcccctctcctctccaacccccccaccccccccacccctcccccccctacccccctcattcccccccaaaatccccctctccccacccccccctccccc

SEQ ID NO: 207166 - DNA, 573 bp, Glycine max
ggtgtttccatctcacagtgactagtctgtgctttgtagtggttgtggttggagtgcttccactctccttagatgcacaactagatccctcgttttacagagacacgtgtcccaaggttcactccattgttcgcgaagtggtgaggaacgtttccaagaaagatccccgcatgcttgccagtctcattagacttcactttcatgactgttttgttcaaggatgtgacgcatcagttttgttgaacaacactgccaccatagagagtgagcaacaagctctgccaaacaacaactctctaagaggtttggatgttgtgaacgacatcaagactgcagttgaacaggcttgccccggcgtggtttcttgtgctgatattcttacccttgcatctgaaatatcttctattctgggtggtggtcctgattggaaagttccattgggaagaagagatagtttaacagctatatcgaacccttgccaatcaaaaccttcctgctcctttcttcaaccttactcaaactaaagctgcccttgctgttcaaggtcttgacactactgaactagttgacttc

SEQ ID NO: 207167 - DNA, 298 bp, Glycine max
cataaatttccctttaagcacttatgagaaggaacttgaagagatgaagcacatgaccaggctagaatttgtcgccaatttaagaaggaagagcagcggattttcaagaggggcatctgtgtatagaggtgtgacatgacaccatcaacatggaaggtggcaggcccgaataggaagggttgcaggaaacaagacacaccctttaggagagacccacaacatatcaatcccgcatgattatatgactatgatacaccttcagaggggtgaaaaaagaaatggaaaatataaataaata

SEQ ID NO: 207168 - DNA, 430 bp, Glycine max
cattgttgtaggttgttgattactatagcctgtaaaattcgatattctaacctcgtgaggggaatgagatcggccgtgtgtgagcgagcttggctggtaaaggcatgggtcctgtcatcgaatgcaagttgacaactactgcctattgcgttgccgtgcggcatcacgatcgtgtcgagatcatggtcaacgatcagggtaacagatctaccccatcctacgtggctctgaccgtcacactacggatgatccgtgatgcggcgccaaaccaagtcgatatgtaccctgccaacaccgttatgaatgctatgcggttgattggaaggcgtatttccattgcatcagtacactgtgacttgacattgtagacgttcaaggtgattccagcccctgctgcaaaacctaggatcgtggcgaactacaggggggc

SEQ ID NO: 207169 - DNA, 554 bp, Glycine max
cactagacttaacaccaatttaccctttacacgctgcctacttgggggggggggggggggccatgggggggggggggggggggggggggggggggggggggggggggcgggggggggggggggggggggggggaagggagggggggggggattccaaacaaacccccaaaacccaaaaacccccccccaaaaaaaatccctttaaatccccctttaaaaaaaaaaaaattttttttttccctttatagaaaaaaaaaaacccccaaaatttttttccccaaaaacccccaccccaaaataaatccaaaaaattttctcccttttttttttttccccccctttaacccccaaaaaaaaattaaaacataacccccaaaaaaaccccccggaaaataattttattttcccttttatagccccccccccagtacccccccccccttttagcccaaattttttcttgggaaaaatttcccccaatttgtttttccccccgaaatttccctttaaaaaaaaacccccccttttttacaagaaccccccacccctttttt

SEQ ID NO: 207170 - DNA, 547 bp, Glycine max
  unsure (1)..(547): unsure at all n locations
attaaacccctccaactcatcctcccctttctcacagaacctcctcctcacagctccaaagccacaagcctcctccgacctccccgaaggcaccaactggcgctacagcgagttcttgaacgccgtcaagaagggtaaagtcgagcgagtcaggttcagcaaagacggttccgccctccagctaaccgccattgacggccgtcgcgcctccgttattgtccccaatgacccggacctcatcgacatcctcgccatgaacggcgtcgacatttccgtcgccgagggcgaatcccccaacagcttgttcaacatcataggcaacttgctcttccccttactcgcattcgcgggcctgttcttcctcttccgcagagcccaaggcgggcccggcgggcctggcgggctgggagggcccatggacttcgggcggaacatgtccaagttccaggatgtccccgagaccggcgtgagcttcgctgacgtggcangcgcggaccaagcgaagcttgaattacatgaggctgctgatttcttgaagaatcccgat

SEQ ID NO: 207171 - DNA, 529 bp, Glycine max
gtcaacgtggttggagttgttggaccaggaaaggaaacaataactcgtaaggtttatgaggtaattgccccaagttttcctgctcattgctttcttcctgatgtgggagaaaaaattagggaacatgggccggaatatctccaaaacatgcttgggccttatatgcttggaaattcccaggaaggagtgccatttataaggcatgagaaggttcttgcagttttggattgcattgactctctggattcgttgaaagctgctcttggacttactcctcgctttgctcctggaagtcaagtcttcattatagctccagatataactttgcttgaaaataatggaattgaaaaggtatatgaagtaaaggggttagacaagacatcggcttatcaagtgctttgcctagaggctttcagttccatgaatatgagtttcaaatacatggacatcataagccgtgctgaaacttgtgctgatggcaatccttgtgctttgaaagctattggctccagttttcgtggaaaaacaa

SEQ ID NO: 207172 - DNA, 482 bp, Glycine max
gaacggcaattaatttacaatggccgtcacgaaaagcctctcaatcttcctcttcatcgcaatgagctgcgtcgccgcagctcaggcagcgaacttcaacatcacaaataactgcacctacacggtgtgggccgctgccgtgcccggcggcggcgcaaggcttaaccctggcgaatcgtggaacatcagcgtgacgaacggcacaacaggaggacgcatctggggtcgaacaaactgcaccttcgacaacgcgggacgcgggaagtgcctcaccggcgactgcgagggtgttctggagtgcaacaaaacaggtacacccccgaacacggtcgttgatttcgcgttgaaccagtataacaacctcgacttctacgacatctccctcgtcgacggtttcaacgttcccctacagctgaccccgacctacaactgcagttccgttaaatgcgccgtcgacatcatcggagagtgccccactcagc

SEQ ID NO: 207173 - DNA, 418 bp, Glycine max
gtgagaacacagaggatagtggtgttcaacgagatggagctaattatgcacaaaacagttgatgtgaatggcataaaaatgcatgttgcatagaatggagagggcccagtggtgttgctcctccacggcttacctgatctctggtactcatggcgccatcagattctctctctgagctgcctcggataccgcgccgtcgttaccgatctccgtggctacggtgacaccgaagcaccaccttctatcagcagctacaactgcttccacatagtgggtgatctcgatgcgcttattgactctctgggtgtccaacaagtgttccttgtgactcatgactggggagccatcataggttggtatctatgcatgtttcgccctgactaagttaaggcctatgtctgcctcagtgtacctctcc

SEQ ID NO: 207174 - DNA, 526 bp, Glycine max
cagctcgcgttgccaggagatttaccctgctacatgtgtgcacgtccaccttctttgggggtggggggggggggggggggggggggggggggggggggggggggggcgggggggggggggggggggggggggggggaaaataaagtaaagtttgggcccaccaaccaaagcccggtgagttttatcgggttaacccccattttcccaaatttttttttcaaccctttaactggcgtttgcggtatggacatttgttttcaaaaaaaaaacaacccccccaaaaaagtttttacccccattttggaagggggaacaaaaaatttttttttcccccccaggggtagaattttgggccaataagggaaccctttttttacccctgtaaaccctttgccaaacctagggcccgtaggttgcaattgcacccgcgaacccctgctataccctttgccgataacccccggtttaaaaaaaaatccccccccttttaggggctacccgcctgaaagggaaagccctttgatgg

SEQ ID NO: 207175 - DNA, 540 bp, Glycine max
aatctctgacctcttcttcacatcttcctccattaatacccttccctctctctcccatggagttgatctacctactctatctggttccaacgttgtacgcgtgtttcctcatatggaagatgttggacgagagaagggacagggagtgttacatcttaaactaccaatgctacaagccccccaacgacagaatgctcggcaccgagttctgtggcaagcttatcagacgcaccgaaaacctgggccccagcgagtaccgcttcctcctcaaagccatcgtcagctccggcatcggcgaacaaacgtacgccccaagaaacatcttcgagggccgcgaggccactcccacgttgcgcgacagcatcggagaaatggaggagttctttcacgacagcattggaaaactcctcgcgaaatctaacgtctccccctacgagatcgacgtcctcgtcgtcaacatctgcatgctcgccaccgtcccttgcctctcctgtcgaatcatcaaccactacataatgcgccacgatgtcaaggtctaca

SEQ ID NO: 207176 - DNA, 318 bp, Glycine max
ctatgatgtccgtgcacgaccttttctagttgagagtacatctgggagtcgtgatgtacagatggcgaaaattggacttcgagttcttactcgcccgttgcccaaccaattacctacggtttatcggacccttggagagaattataatgaaagggttttaccttcaatcatacatgatactttgaaagccgtggctgcccagttcattgccattctggtcattactcagcgagaggctgccagtcttgaaatccggaagattttgactgaaagggctgctaacttcaatattgccatagatgatgtgacatttactag

SEQ ID NO: 207177 - DNA, 166 bp, Glycine max
gttttgagttcacccaaaaagttatccttgcttgccttagctgctcatgcatctggtccatcttaagctgatcgactaagacatctcgcctcacctgctggaaaggatgaatattcagagtgggtgatatgcctctcagagaagtcctcttgtggtcatggctgaa

SEQ ID NO: 207178 - DNA, 569 bp, Glycine max
ggcatcttaccggtgaattcgagaaaaaatacgaaccgaccattggagtggaggttcacccattggatttcttcacaaactgcggaaagattcgcttctactgttgggatactgctggacaagagaagtttggtggcctcagagatggatattatatccatgggcaatgtgcgattataatgtttgatgttactgcccgtctaacatacaaaaatgtccctacctggcaccgggatctttgccgggtctgtgaaaacatcccaattgttctttgtggtaacaaggttgatgtcaagatcaggcaagtgaaggcaaagcatgttaccttccacaggaagaagaatttgcagtattatgagatttcagcgaagagcaactacaatttcgagaagcctttcctctatttggccaggaaacttgcatgtgatcctaacttgcactttgtggaatcttctgcattggctccaccagaagttcaaattgatttagctgcacagcaacaacacgaagctgagcttcttgcaactgctagtcagtccctttctgacgatgatgatgaatcttttgag

SEQ ID NO: 207179 - DNA, 413 bp, Glycine max
aaactcaaacgaatacgttttctctttctcttcaatttcacccttattagcatagcatattcatttccctttcttgaatcgttcttaactgcgagaggggatatcagagaagttgatcggcctcccattaataacagatctgaatgatctgatggagtctaaaggcgggaagaagaagtcgtctagtagtaagtcctttttgcacgaagctcctctcgattacatcattgaagacgttcgaccacacggcggaatcaagaagttcagatctgctgcttactccaactgcatccgcaagccatcctgagattgcctaagtcgagggaagacgtagcccccttagtcctgcatctgctatatgtttctagtctcttctcttctcctttttcttgttcgcttccttgcccttttgg

SEQ ID NO: 207180 - DNA, 497 bp, Glycine max
gcacaaagcgggttactgtctgttcaagctaccatctctctctctctttcttagtgcctccttgccagaagttaaaatggcccaagaaactttcctattcacatctgaatcagtgaacgaggggcaccctgacaagctctgtgaccagatctccgatgctgcgctcgatgcatgcttggagcaggaccctgacagcaaggttgcctgtgaaacctgcaccaagaccaacatggtgatggttttcggagagatcacaaccaaggccaacgtggactatgagaagattgtgcgtgacacatgcaggaacattggttttgtctctgatgatgctggtcttgatgctgacaactgcaaggtcctcgtcaacattgagcaacagagtcctgatattgctcaaggtgtgcacggccacctcacaaagaggcctgatgagattggtgctggtgaccaaggtcatatgttcggctatgccactgacgagactcccgagctcatgc

SEQ ID NO: 207181 - DNA, 538 bp, Glycine max
tctatgctttcaagtagtaccattaggcactttgttttgtgtcttcaatttttttttcctttcaaccttatcaaattaaccccctacacatttatttagctagctagccaatttattaattaggcacataatgggaagcccagaatccaatttgccacccggttttaggttccacccaaccgatgaggagctcattcttcactaccttagtaaaaaggtagcatccatacccttgaccgtttccattattgctgaggttgatatctacaagttagatccatgggacttaccagctaaggccacctttggggagaaagaatggtatttcttcagtcctagagaccgaaagtacccaaatggtgcaaggccaaacagggcagctgcttcagggtattggaaggccactggcactgataagaccatagtgacatcattgcaaggaggagcacaagagagcgctggtgtgaagaaggctttggtgttttacaaaggatgaccccctagggtgtcaagaccaattggatcatgcatgaatatc

SEQ ID NO: 207182 - DNA, 491 bp, Glycine max
gaaaactctgcaaacatgttggtttatcatgacctccttacaggcgatgagcttgtgtcggactccttccgttacactgaaattgagaatggaacgctgtgggaagttgaggggaagtggatagttcagggagcacttgatgtcgacattggcgcaaacccttatgctgatggtggagaagatgagggagtcgatgacgcagctgccaaggttgctgacattgcagatacaatcagacttgacgagcaacctgcttttgataagaaacagcatgttaccttcatgaagaggcctatcaagaacttgactcccaagctcgatgcagagaatctagagttgcataagaagctcattgagggatcaaccataaacctgctatctaagactaatgatttccagctactcgttggggagagcatgaatgatgatgcttgctaggtccttgcatactacaaagatggtgctgctgatccaaatacttatactttgca

SEQ ID NO: 207183 - DNA, 522 bp, Glycine max
  unsure (1)..(522): unsure at all n locations
acaagaagaaagaatctgaacaataatactgatacacacaacactaacactaacaagaagggaggaagaagctgaaaaccctaatctgcagagatgagatgagatgaaaatgaaaaggcgtggaatcagcgcggcaaggaacatcgtagatgcttgtcttgggagtgtgggatctcaaatggctcctccaattcgtattctccgcgttcgtcttggcgattggactgcacgcgctgctcaagaacaccgcctccaagtacttcgagattgaagccactttccacgctatgcctggccctctcaccgaccattctctctgcgccgtttgtcgcaaccccgccaacaagaaatgttcgcgatgcatatccgttcgatactgttcacaagcatgtcagcaggcgcactggaaatccgagcataagatgagatgcaaggagtttcanggcagcgccagtgtgatgaatctggatcatactgaagtaactaatcgtgttttcaaagcttctgctgctgtgaatacaa

SEQ ID NO: 207184 - DNA, 484 bp, Glycine max
ctctaattctcgaagtcataccttaccacggctccatccacttcgtatgcaactgctgggtttacaattcaaaaaactacaagactgatcgcattttctttgccaacaatacatatcttccaagcgagactccagctccacctttgaagtacagagaagaagaattgaagaatgtacgaggggatggaactggagagcgcatggaatgggataggatctatgattatgatgcctacaatgacttgggcaacccggataacggtgataaatatgcacgccccgttcttggtggttcaaccttaccttacccttgcagaggaagaaccggtagaagaaaaactagaaaagatcccaaccgtgagaaaccgagcgattttgtttacctctcaagagatgaaacatttggtcacttgaagtcatcaaactttctcgcttatggaatcatatcggtatcccaagatgtcttgccctgcttgactgatgc

SEQ ID NO: 207185 - DNA, 459 bp, Glycine max
caagcatgctggcgccttctggcgaggccctgattatcggggactcaactgggataacaagcttgctggtgctcaggttcttctgaatcacccgaggcagggcctgagtgctgggcatccatatcaacaaactctgaggaccttgcacaatcagacatgcgtaatcatgcgctgctatctaccaggcttcacatgctgcaacagtaccaaaggtggctggattgaattaatccatgggaagcctcagcctgtacatatgcggccaatgcagccttgttggctgccctatatagtgattatccggacgctggtgatacacccgtatgggatcgtggaccgtaactcttttcaaccgacatgctgcgctgctttgccatggcccagatggagtacatacttggaaataacccaaggacaatgagctatgtcctacgttttggcatcattacccagatcacg

SEQ ID NO: 207186 - DNA, 620 bp, Glycine max
gtggctgtcagggatttgccgctgctacatcgttggagtgccgccttgcttgggggggggggggggcgtgttgcgttttaggtgttgtttgggtttgctgttgagtgggggtgctagtttggtgagattgtgtatcctgttgggtatcggttgggttttggggcgcggtttatgtaagtgtgggattttgctgacgggttgtggcgggtggggtgtgcgctaacgtgtgagttatagtgtgagtttgatgttgagtgtgagtttgccttgtgtcaggcgcagagtgccgatgcgaggtttggtgagtagtgattatatgcttagcattagctgtttggttatcgatttgtatgtgggttgtagtagccctagacgtacactcttggtgtggccaagcactagaggtagtgagcagatgatcacactcacattgcgtgtgacgagcattaaggcagtggcagtcatggtgagagtgattagcacaaccacaatggctgcataggtgagaggggtttttggtatgggtacaccagcaaggttgaggcgaagcgctgggttgtataggacttgttacgcgggtagtagtaaacgtgttggagaccggtgtaagatgggaaaag

SEQ ID NO: 207187 - DNA, 527 bp, Glycine max
acatgaagaaagaatctgaacattaatactgatacacacaacactaacactaacaagaagggaggaagaagctgaaaaccctaatctgcagagatgagatgagatgaaaatgaaaaggcgtggaatcagcgcggcaaggaacatcgtagatgcttgtcttgggagtgtgggatctcaaatggctcctccaattcgtattctccgcgttcgtcttggcgattggactgcactcgctgctcaagaacaccggctccaagtacttcgagattgaagccactttccacgctatgcctggccctctcaccgaccattctctctgcaccatttgtcgcaaccccgccaacaagaaatgttcgcgatgcatattcgttcgatactgttcacaagcatgttaacaagcgcactggaaatccgagcataagatgagatgcaaggagtttcagggcagcgccagtgtgatgaactttgatcaaactgaagtaactaatcgtgttttcaaagcttctgctgctgtgaatacaagttca

SEQ ID NO: 207188 - DNA, 556 bp, Glycine max
ctcagtttctgttgtattttctcaattacttcatcgtattctgcaaattcaaaccgggtcttggttttctgaaagatgggaggtggcaaggacaagcatcatgatgaatctgacaaaggaattttttcacaccttgctcatggggtagctggcgcagcacatggtggacatgggtacccacctggggcttacccaccaccacctggggcataccctccacaacaaggatatcctccagctgggtatcctccacaacaagggtatcctccagctgggtaccctccacatcaaggctatcctcctgctggttaccccccagctggttatcctggttcatcacatgcaccatgttctcatgggcactgcggtatgggagcaatgctcgctgggggtgctgctgctgctgctgctgcttatggtgctcaccatgtctctcatggctcccatggctcctatggccaatatgcacatggtgctcacatgccacatggaaaattcaagcagcacgggcacggtaagttcatgcatggatagcatggcaagttcggcaagcatg

SEQ ID NO: 207189 - DNA, 611 bp, Glycine max
ttgtcaggaatttgccctgctacatgtgtagcagtgccgccttcttggggggggggggggggggggggggggggggggggggggggggggggggggggggggggggggggggggggggggggggggggggtttttccccaaccctggcggccggggcccccccctttccccccctttggcaaaaattccccctggggggggccttgggggccgggtttttctttggccaaaaaagggaccccttttttttaaaaaaatcccggaagaggcccctttgcctttttccccaagtttccggtaacccccccccgggaaaaaattttccccccaaccccaaggggcttttaaaggaattttaattttgggggttttaaaccctttttaaggcccgggggaaaataaaagggtgggggattgggtttaaaaccccccaaaaaccctttttccccccggccaaaaattacccccccaattttaattaccctgggggcccccccttcccggaaaaaatttccgtattaggggggggcccccaaaataaaatccccccgcccgcttaaattttggtttggccccttgaggaaaaaaaataataccctttgggggggggg

SEQ ID NO: 207190 - DNA, 531 bp, Glycine max
actcacatgacttgaccagcagatttaccctactagcatgtgtgcacgtcctccttcttggggggggggggggggggggggggggggggggggggggggggggggggggggggggggggggggggggggggggggggggggggggggggacccaaaaaacccagtttttattttaggggaaaaccctttaaggccctggccagggttttaataaaagttcccccgaaagggttaattttaagaaggggtttcctttagcggggcaaaatttttttttaaaaaaaattttcccccttaagataaattttcccccaccccggaaaaaattttcaaaaaccccctttcccaaagacccccttaaaaaaaccccaaaatttaacccccccgtttaaaaagttcccaaattggccccttttttatcccctaaagttcccaattggcaaacttgggtttgagagagagagcccttaaattaactgggtccccatagggccgttccccaaaaaccttttccggggattcccgtttttt

SEQ ID NO: 207191 - DNA, 721 bp, Glycine max
  unsure (1)..(721): unsure at all n locations
cctactatattcctcgtagtctaggggtccagtccatggagtcagcgggtcctcataaggagcagctagtgtagctgtctgacaaagtgatatctccatctcgttagcattgctccccgtttcaacaacncaaaccccccaccccaaccacaccaaaacaacacacacacaatcacacacaccacacccccaccattacccaatacacaccacccacaccacccgggaacaagccccaacaaacccaaactccccaccatgcctcaacaaaaaaaaaagcaactttttttttccttctctttctctcctcttatcgaaagcttaatcacaaaactaaaatcacggacattatttataaaactcaagtgcgacaaactccaaatgagaaagaaaaagccggttcctccatttctttatccaactctttatcctcagtttactcagcagcaaggggcacagactcagccaatttgcggtacttgagagcatagaacatctcgagatagcggcggctctcacggcggtcaaggttagacacatgcttccagaagccatagacaccggtgagagtgagaagcctctgagagtaaatttgccatgtgtacttctcttcaatacgctggagaccagcctttgagatcttgtcccagtgagttgggtcaagcttgcacttctcaaagaagtcaacaaggagatcagcagcacggtcaccatggtaagg

SEQ ID NO: 207192 - DNA, 510 bp, Glycine max
acaaaacgcacaaaggattattatagcaatggcagaacaaaaccaaaaccagacaactgaagctggaaggcaccaagaggttggccacaagagccttctccagagtgatgctctttaccagtatattctggagaccagtgtctacccaagagaacctgaatccatgaaagaactgagagagttgacagcaaaacacccatggaacatcatgacaacctctgcagacgaagggcaattcttgaacatgctccttaagctcatcaatgccaagaacaccatggaaattggtgtctacactggatattcacttcttgccaccgctctcgctcttcctgaagatggaaagatcttggccatggatattaacagggagaattatgaattgggtttgccagtaattaagacagctggtgttgaccacaaaattgaattcagagaaggtcctgctcttccagttcttgatgaaatggctaaagatgagatgaccatgggagctatgacttcatcttt

SEQ ID NO: 207193 - DNA, 571 bp, Glycine max
  unsure (1)..(571): unsure at all n locations
tccaaatcaaccttaatttctccctttaacccatacaatacaaaatacccgaaagccaaaccatgtctaatgtatcatcatcatcacttccggttttcgccctggatgccaaacccaactcgaacatcactcgacacactgcaacttttcatcctaccatatggggggattatttcctttcctatgatcctagttctgcggtgtatttttcaaattcaaggaccaaactggaaagttcaatgaaaggctagcaaatgatatacaaggaacgttgagcttgtatgaagcagcccaactaagatttcatggagaagagatacttgaagaagcacatgatctcactctcacccaggtaactaagtcaccaaccacccaattaagccatttccttgctgcacaagtgaaacatagcttatggcaatcacttcgcaagggaatgcctagattggagacaagatatgatatgtctttctaccaagatgatccctcacataatgaaagctcgttaacccttgcaaaactagattntaatatgttgcaaaagctacatcaaatagaagtcagtagtatg

SEQ ID NO: 207194 - DNA, 497 bp, Glycine max
gttgagatggaggatataatcgttgaagagactgttttggacattgatacctgtgatgcaaacaaccctcttgcagtcgtagactatattgaagatctttatgcccactacagaaaattggagggtactagctgtgtctcgtcggattatatggcacaacaatctgacattaatgaaaggatgagggctatactgattgactggcttattgaggtgcacgacaaatttgacctcttgcacgagacattgtttctcacagtcaatcttatagatcgatttttggcaaagcagacagtggcaagaaagaagcttcagttggttggtctagttgccatgcctttggcatgcaagtatgaagaagtttctgtacctgtggtgggggatctaattctcatatcagacaaagcatacacaaggaaggaagttctggaaatggagaagttgatggtgaacacattgcagttcaacatgtctgtgccatcagcatacgtttttat

SEQ ID NO: 207195 - DNA, 497 bp, Glycine max
caaggatgctgtgatttttggcctctcaggatgagaatgactggccggtgattgatcccttgccatcttatggtagagggagggacacacaaggtggaaggtttagcagcctaatttttggaaccaacctcactgatgtaatcataactggggacaatggcacaatagatggacaaggtgatctgtggtggcaaaaattccgcaagggggagctcaagtatacccggccttacctgatggaaatcatgtactcagataatgttcaaatatccaatctcactttggttaattctccatcgtggaatgtacatcctatatacagcagcaaccttgttgctcaaggaatcacaattcttgctcctgtgacatccccaaatacagatggaatcaaccctgactcttgcacaaacacgcgaattgaggactgttacattgtctctggtgatgactgtgtggctgtgatgagcggttgggatgagtatggcatagcttatgga

SEQ ID NO: 207196 - DNA, 589 bp, Glycine max
  unsure (1)..(589): unsure at all n locations
gcactacatgtgcgatcgatcagnanatcattgnnnnnntnnnnnnnannncnnnnnnnnnnnnnnnnnnnnnnnnnnnnnnnnnnnnnnnnnnnnnnttnnnnnnnnnnnnnnnnnnnnnnttgtggnnggggaccttatanntnnnnngaaaantanatgacttcttgtccttgatcagtctttgtgaccagcgtaatacaacctaaaaacttttggaagataaacaggcaacaaaaatccaaacaaattgaagcaccagaaggccatgttagctacagcaagtactctcccaacaaagatcctcctatcagacccactgtgctcttcattaaccttgttgatctcactcctaagccaatccacaatggtgaaaatcctccttgagttgtaaaagacaggcacaaaagctctcattggagttgagaacatgccagagaatgccaccccttccatgaagacttggctagacaagagaaaaacatggggtgcagctgctttgatcccttccttgtcaccctcaaatattccctccaagatataagctattggggcataaagtccaatgatggcccctataaacacatag

SEQ ID NO: 207197 - DNA, 513 bp, Glycine max
aatacatgataagttatatttcatttcaatagcacaacactaattaaactagtctttttcaaattatcaaaacatggtataagtatctcaattgacagtgaaaaaatctaaagcaatcataacttccaactaattgccttttccaagcattaacaagcttagacattggagttttccgatccaagagggctagtgtcttcaaggtactagttaagcttcagccatgcacctttgatattttattagcaaatattgctaccttgacataaatattgtctgatagattgttcaagaacttgaaataggcatgtctccaagaaagcttgaataagattgagccaaacaccacccaaaagcttataacaaatccaaatgccatactcatgtaaaattcacgactgaaaagtgaaaattcgtcctcttgaacttcaacatttggtttttgtgtaggtctcccatcaatacaaaatttctcaagtggctgtccacaaagatcaagattatcttcataac

SEQ ID NO: 207198 - DNA, 497 bp, Glycine max
agttgcaggtattctcttgttgattctgttagtactgtgctgcttcttgctgtgttgtttgatcagaagaagagctgcttcaagcagaaagagtagcaagactgctaaggctgcagcatctgccaggggtgttgagaaaggtgcctcagctggtggtgaagttgaatcaggaggtgaagctggtgggaaactagttcactttgatggcccttttgcgtctactgctgatgatcttttgtgtgcaactgcggagataatgggaaaaagcgcatttgggacagcatacaaagcaacactagaagatggtaaccaagttgctgtgaagaggttgagggaaaagaccactaaagggcagaaggagtttgaaactgaagttgctgcacttggcaaaatcagacacccaaatctcttggcacttagagcctactatctaagaccaaaaggagagaagccttttgtgtctgattacatgaccaaaggaagcccagcatcattcc

SEQ ID NO: 207199 - DNA, 563 bp, Glycine max
caggtaaaaacaaaagcatcatcatttcataagatgaagaacttgtttaacaaatattgaaaacatacattatttctccaagttaaaaagaatacatagtgtaaaacaaaatccttgctcgtatatatacataaactcaatgaacaaataaataaagaattaaaacacatatcctttctctagtaattaaagtaaatgaataaaaataatctccttccttaacacacacacacacacactcagaatcaattctctttactcagtttcttgggccttagctccatcatcatcccctgaagctaagtctggtttaatctcctccaattgctgtagaacttgatgaacttcaggcctagcagcaggagaaggatccacacaatgcaatgctaacttcaatgtgttaagcaattcatctcctatggctggtgcatccctcatgagctccaaatcaaacacttcattagtccactcttccttcactatggatgccacccattgtggcaagtccatgccattggttggctcccccggcggtttcccagtcaggagctccagcatgatga

SEQ ID NO: 207200 - DNA, 520 bp, Glycine max
ggtgggagggagaaggctcctgctgctttttgtcgcaagacacttacttccaaagaccgatttgagatgtggggagatggattgcaaacaagatccttcaccttcattgatgagtgtgttgaaggtgtactgagattgactaaatcagacttccgggagccggtgaatattggaagtgatgaaatggtcagcatgaatgagatggctgagattgctcttagctttgaggataagaatataccaatataccatattcctggccctgaaggtgttcggggtcgtaattcagacaatacattaatcaaagagaaacttggctgggctccaactatgaagttgaaggatgggctgagaattacatacttttggatcaaagagcagcttgagaaagagaaggcagaaggtgttgatttatcaggctatggatcatccaaagtggttcagactcaagccccagttcaacttggttcccttcgggctgcagatggcaaagaatgaagcctctagttcggcagttgct

SEQ ID NO: 207201 - DNA, 546 bp, Glycine max
attttgtgtcccttctctctttctcttgctcgatattttccaaccaaaataattattaaaaccaaacgtagctaggcaccactgctaggaatggcaagtgagatatttcttgcccttctgatcacaacctttgtggttgcagcctctgctggtaacttcaaccaagactttgagataacatggggtgatggtcgtgccaaaatcctcaatagtggggaacttctcaccttgtccctagacaagacctctggctctggatttcgttctaggaatgagtacttgtttggaaaaattgacatgcaactaaaactcgtgcctggtaactctgcaggcacagtcacagcttattatctatcttctcttggggatactcatgatgaaattgattttgaatttctgggtaacttgagtggtgatccttatattcttcatacaaacgtattcacacaagggaaaggtaacagggaacagcagttctatctgtggttcgaccccacccaggactttcacacatattccattctctggaatcctcagagcatcata

SEQ ID NO: 207202 - DNA, 475 bp, Glycine max
aagcgcacaattctttttattttgtaatttataactctccaacaaatttattaaaaaccaaaattacaacgaatctcatttgcacactatttcacagacaatagatgcatataaagtataaaccgaggagccctattgtggtcttattaatttacacaagacaagaaaaaaaaaatgaattcatgaggtatgagaggtttataatatgaaatagttttggtttcatgcgattgtgcactcaggaggaaggccctgtgggaaacgcttagtgtcagtgcagtagttgtaaatcatgtagttcttttggacccactgaatcctagcttgccctgttgaatccagtgattgtttcaaccatgcttggtttgatgatggattgttggaggagcaagatgagcctgaagaagaagtccaaacacatgcttgggcattgaactttctgtaagaggctgtgaatggggcttggctccaatca

SEQ ID NO: 207203 - DNA, 552 bp, Glycine max
ttctcttttcacgtcattatcctaaacttgcagattttcacatcccaagcaacatgaaggggaggttcatgtttctgtcggtgctcctttgtgccacctttcatgtctccttctccattactgacggcttagtagcaaacggcaacttcgagctgggtccgaagccctccgccctgaaaggaactgtggtgattggtggcagccactcgatcccagaatgggagatctctggcttcgtggagtacataaagtccggccagaagcagggcgacatgctgctcgtggtccccgagggggcctacgcggtgcgcctcgggaacgaggcctccatcaagcagaggatcaaggtgatcaagggcatgtactactccatcaccttcatggtggcccgcacctgcgcgcaggaagagaggctcaacatatccgtcactccagactgtggcgtcattcctattcagactctgtataccagcagtggatgggacccgattgcattcggttcaggcggagaatgagacagtagagatgctgattcataaccctggcaaagag

SEQ ID NO: 207204 - DNA, 573 bp, Glycine max
gtgaataatctatatttgtttcgcaccatttattcaaagtacatgaaaggagttatagaaacacgccaccgtatatatactatacgtctatagatgatacttgttatacacacttatttttttcatatttaaatgaaatcaaactcgttacctctcaagcctctaaagaaaaaaaatagaaaataagaagcattcttaattattctcctaactatatataaaatcaaaggctcagaacccatatatataatactttgattcattagcctcacaccctagcaagcccaaattccctcatcatggtttacgcaggctcaccaacttgacatcatcaatcacaggcccacagagtgaagaaaagtcatcacttctcatggtgtagaatgtgctaaggaacatgattcttgttctaggggtaacagccacaaacttgagtgctgcacgtttgaaccctcctttgcctttggactcatagggcaccttgatggtgtcttttcctgcaaaggctttcacaatcatggacccttcacatgagttgcttgcattcccacagagaatgagagcacataggtt

SEQ ID NO: 207205 - DNA, 566 bp, Glycine max
ctaatcttcccgttgcttctcaaatcgattcaattggggcgttttcagggcatcaatggagtgaaacaggagagagagagtccgtgttagatcagaaagaagagacagagacggcgccaccaatggcgggagcagataaagaattggaagagcaacttcttgaagccggtaacaagcttgtagatcctccttcgtcggtggaggacctcctcgcactcctagaacaagttgagagttgcctatcaagggttgaacagtccccgaccgactctatgcaaaatgcactctctccatcattgaaagcattgattgcagacaaacttttaaggcactcagatgatgatgtcaaaattgcagttgcatcttgcatcagtgaaataacaagaatcactgcacctgaagctccttatgatgatgatcaaatgaaggaggtatttcaattaatagtgtcatcatttgaaaatctacatgataagttaagccgatcatattcaaagatgatctcaattctcgacactggtgctaaagtcagatcatgtgtggtaatgctggaccttgatgtgatg

SEQ ID NO: 207206 - DNA, 575 bp, Glycine max
  unsure (1)..(575): unsure at all n locations
agaagagcaaagagagtgagaaatgaaggaagaagaagaagaagagatggcaaatgaactacccgtcaaagcttttggttgggctgctttagacacttctggcacccttgccccttttcatttctccagaagggaaaatggcgtcgatgacgtcactctcaagattctcttctgcggggtttgccactctgatctccacactctcaaaaacgactggggtttcaccacctaccctgtcgttcctgggcatgaaattgttggtgttgtgacagaagttggaaacaatgtgaaaaacttcaaagtgggtgataaagttggagttggtgtgatagtggagtcttgcaaggaatgtgaaaattgccaacaggatctggagaattactgtccccgccctgtgtttacctataactctccttattatgatgggacacgaacccaaggtggttattctaacattgtggtcgtgcaccaacgttatgtgcttccggtttctgagaacttgcccctngatgcttgtgcttctctgctgcgtggctggataactgngtatagcccaattgaatattatgggatga

SEQ ID NO: 207207 - DNA, 566 bp, Glycine max
aatgtaaattcaaaacccaaagtattattaattgaagagcggatgctctcatctttaaagttcaacatcttatagactagttaataccaccaatcttaactacttcaaaaatactgacacatgatgcaaagagttggagaatcacagtggattctaaaaacttgagaaagagctcgccacatcaatcacaaagcgatatttcacatcagctctgctaagcctttccatggctgtgttgatctgatccatcttaatcagctcaatatctgcagttatgttgtgctttccgcagaaatcaagcatttcctgagtttctttcagccctccaaagttgctcccccctataagctttcgtcctgcaactaaaggaaagataggaagctcaaggggtttgttaggcaaccctacagtaactagcttcccattcagcttcagcagaccaagcagtggaatcaaggaatgaacagcagaaattgtgtctatgatatagtccatggttcccaaagcagccttcatttttgcagggtctgatgaaacaagggaaaaatcagccccgagtcggtcaa

SEQ ID NO: 207208 - DNA, 493 bp, Glycine max
cacaactccactcttagctgccattggtttttcttcttccatttctcttcctttctaagcttttttcgattacccatttggagattctgtcctaatggctcttgctccttccaaagtttcctccttttccgggttttctcccaaacccagtgttggggatgctctgaaaaacccaacttgctctgtttctctgagctttgcgaatgtgaaacttggaagcagaaaccttagggtttgcgcctcaactgtgcctctctcaggggtgattttcgaacccttcgaggaggttaagaagggtgaacttgctgttccaacggctccccaagtctcgcttgctcgtcagaactacgctgatgagtgcgaatctgccattaatgagcagatgaatgtggaatacaatgcttactatgcgtaccactccttgtttgcatactttgacagggacaacgtggctctcaagggatttgccaagttcttcaaggaatctagtgag

SEQ ID NO: 207209 - DNA, 566 bp, Glycine max
cgttgaaaagcatatatcaaatgttattgcataataggcttgcagccttttacatgtgctactagcaattacattactccgagttcctaaatcccagtacataggaaaaacatttaaatactattttaaaaatagaaaacaacccagaacttcagaaaagaccaaaggtaaacgaagactactaataaggtaattcaagattaagcagcatcttcctaatcaagaagtctttgatcaaagtgccaaacaccgtgaccctttccaacccttctcaactgagccacatactctgaaattttcttaattgattcaacctgttcagacaaaaactcgctttcaatgaagtctgccaattgagggtcattgttgcgatctgccacactgtgcacattcagaagtttctcattcactaacttctccaaagacaaagctaattccattgcatacaatgcatcccccttttccacatgctcaaattctgaggggacattcttgatggcgtgaagaacaacccttccaccgcgagtattctgatatttcatgaagcttttagcgtgctctctttc

SEQ ID NO: 207210 - DNA, 548 bp, Glycine max
cgttgaaaagcatatatcaaatgttattgcataataggcttgcagccttttacatgtgctactagcaattacattactccgagttcctaaatcccagtacataggaaaaacatttaaatactattttaaaatagaaatcaacccagaacttcagaaaagaccaaaggtaaacgaagactactaataaggtaattcaagattaagcagcatcttcctaatcaagaagtctttgatcaaagtgccaaacaccgtgaccctttccaacccttctcaactgagccacatactctgaaattttcttaattgattcaacctgttcagacaaaaactcgctttcaatgaagtctgccaattgagggtcattgttgcgatctgccacactgtgcacattcagaagtttctcattcactaacttctccaaagacaaagctaattccattgcatacaatgcatcccccttttcacatgctcaaattctgaggggacattcttgatggcgcgaaaaacaaccctttcaccgcgagtattctgatatttcatgagctttt

SEQ ID NO: 207211 - DNA, 382 bp, Glycine max
gcaaacttgagtggtgcactcccatcagctcacaggcacctgctcagttgcgattgcgctctttccagatctggtagattccgcacatggctcaaccgctcgcgaagaaggactatgaccgccacgaccaagctgagtgtcctccctttttgagaatcgaagcgggagctgttcttcaagaggccatagtttttaatgacccacaactagatgctaggagatgttcacaggttatcacacaacttttatatctactgaatcagggacgagacatttacaaagaccgaagctcacataatggtcgcttttctgcatctaagcttctccagtctcgggatctagcgttaacgagactggtctacctgagcatagaggagctttc

SEQ ID NO: 207212 - DNA, 488 bp, Glycine max
ggcgagtaatggataccatgcttgtttcccgtgttagaatcttgcatataagatctttgcttgctagatccacagagttgcaatccattaaggtattgtcagttgagtgctttcttgaaaaggccaacgctggacccagtagaagttctagccgagcaagcagtcctggaagatcttctatgcaatatgttgatgagcagatccagggatttaaagtgagtctaaagccagaaaagaaatccaaattttcatctgttgtgttgaagatacgtgggattgatgaggaaacctggagacagcaagtaactgggggaaagcttagggaaattagtgaggaagcaaaaaattttgcaattggaaacaaggctcttgctgcactatttgtacataccccagcaggagaactgcagcgccaaattagatcctggcttgcagagaagtttgattttctatcctgtatgggaaatgatgcaccaggggggaccact

SEQ ID NO: 207213 - DNA, 548 bp, Glycine max
cacaactccactcttagctgccattggtttttcttcttccatttctcttcctttctaagcttttttcgattacccatttggagattctgtcctaatggctcttgctccttccaaagtttcctccttttccgggttttctcccaaacccagtgttggggatgctctgaaaaacccaacttgctctgtttctctgagctttgcgaatgtgaaacttggaagcagaaaccttagggtttgtgcctcaactgtgcctctctcaggggtgattttcgaacccttcgaggaggttaagaagggtgaacttgctgttccaacggctccccaagtctcgcttgctcgtcagaactacgctgatgagtgtgaatctgccattaatgagcagataaatgtggaatacaatgcttcctatgcgtaccactccttgtttgcatactttgacagggacaacgtggctctcaagggatctgcccagttcttcaaggaatctagtgaggaagaaagagagcacgcttgaaagctcatgacatatcagaatactcgcggtggaa

SEQ ID NO: 207214 - DNA, 526 bp, Glycine max
caaaaattcgatccgaatgtattagatctcaaatcatttctactgaaaactacagccatcgaattccctgcaattaacataagcataacccctttccaacctttctcctcttcagatcggatcagatcagatccaccgccatggatttcatgaaggtcttcgatcaaaccgttcgagaaataaagagagaggtgaatctgaaggtgctcaagattccggaaatcgaacagaaggtgctggatgctactgataatgaaccttggggtcctcatggtactgtgctggcagagatttcacaggctaccaaaaaatttactgaatgtcaaatagtcatgaatgtcctttggacaagactgggtgaaactggaaaagattggcgctatgtatacaaggcattagctgtcatagaatatttggtagcacatggatctgaacgtgcagttgatgacattatagaacatacttttcagatctctgcactttctagctttgaatatgttgaacctagtgcgaaggatgtgggact

SEQ ID NO: 207215 - DNA, 102 bp, Glycine max
tttttttttttttttttttttttttttttttttttttttttttttttttttttttttttttttttttttttttttttttttttttattttttttttattttt

SEQ ID NO: 207216 - DNA, 442 bp, Glycine max
cttcaaaacactcataacacaaagcacaatgcaaagctcatccttgagttaaaaaatggcagcagcttcttccatggctctctcatccccatccttggctggcaaggccgtgaagctgggcccatcagccccagaagtgggaagggtgagcatgaggaagaccgtcaccaagcaggtctcctcaggaagcccatggtacggcccagaccgagtcaagtacttgggcccattctctggcgagcccccgtcctacctaaccggtgagttcccaggcgactacggctgggacactgctgggctttccgcagacccagaaaccttcgccaagaaccgcgaactcgaagtgatccactccaggtgggccatgctcggagccttgggctgcgtcttcccagagctgctgtcccgcaacggggtgaagttcggagaagccgtgtggttc

SEQ ID NO: 207217 - DNA, 342 bp, Glycine max
gtactgctctgccctatcttgaagacactctacaaaattttgatatcaagggaacagtcatcacaagttattctgaaagccttgacggatgaaaatctgaatgatcctcgagaacgaattgagattgcacaaagccatgttttctacaagccttcacttcttggacaaccctgattgttttctcattggcaaaagccaaatgtggatgcaactatatatggaagcatttgtcaactcaaagagaatatttaaatgagcatgaatgtattgttttgtgatggattttgtattacattgttgtatgtatatatgtcaaaatataagccactaagcaattggact

SEQ ID NO: 207218 - DNA, 532 bp, Glycine max
acaatcaaataccaatttctataatactttgaatagtttattggtcaaattggcaaattagcgtcattctcagtttgagttggattccaagatccatatgaaaacagtatgttgatatcagaactttttgcatgagagttaattttacttcctttcactcccaagatacaagacatgagactaggagagaaaaaaagcattagcttaaggatccagcaaaagtgcatcaatatttcgttttcctccagggcctttggtataccatgatgatacatagtctccataaacaacatcacggtatttagctagtgagtcgtttatcagttcagaagcaggggaaatcttgactgtcttagcagggtcatgaaatgttgccacagagagccttgctctatcaggattagtgattgccctatgctcacagctcctgtactttccattggttataatctcagtttggtcagcccatagaacaaggatagcatctgacagaggctgaacagtgacccacttgtaccacccttgagaacct

SEQ ID NO: 207219 - DNA, 535 bp, Glycine max
caaaacactcataacacaaagcacaaagcaaagctcatccttgagttaaaaaatggcagcagcttcttccatggctctctcatccccatccttggctggcaaggccgtgaagctgggcccatcagccccagaagtgggaagggtgagcatgaggaagaccgtcaccaagcaggtctcctcaggaagcccatggtacggcccagaccgagtcaagtacttgggcccattctctggcgagcccccgtcctacctaaccggtgagttcccaggcgactacggctgggacactgctgggctttccgcagacccagaaaccttcgccaagaaccgtgaactcgaagtgatccactccaggtgggccatgctcggagccttgggctgcgtcttcccggagttgctgtcccgcacggggtgaagttcggagaagccgtgtggctcaaggccgggtcccagatcttcagcgagggtgggctcgactacttgggcaacccaagcctgattcacgcccagagcatcctcgccatctgggccacac

SEQ ID NO: 207220 - DNA, 432 bp, Glycine max
gtaaaaagcaagtaacattaagttggattcggattcccaagataattcacattatctgaagtacttcaccaaacacaaatctaaaaactctcaaaagtcatttcgttctttgacgctcactttccggggaccaagttggtggcataggcccatgcgttgttgttgacagggtcagcaaggtgatcggcgaggttctccaatggaccctttccggtgacaatggcctgaacaaagaagccaaacattgagaacatggccaatcgtccgttcttgagttccttcaccttaagctcagcaaaagcctctgggtcatgagcaaggcccaatgggtcgaagctgccacctgggtagattgggtcagtgacctcaccgagggggccaccagcaatacggtaacctttaacggcacccattaggataacttgtgtggcc

SEQ ID NO: 207221 - DNA, 500 bp, Glycine max
gaggaaacaagggtcacaagataaaggggaacttggtgattatgcgaaagaatgtgctggatatcaacagcattaccagtgttaagggtgtcatcggaaccggcattaacatcattggaggagtcgtcgacaccgttactgctttggcgtcccacatctccatccagctcattagtgccaccaaggctgatggacatgggaaaggaaaagttggaaaggctacaaatttaagaggacaagtgtcgttaccaaccttgggagctggcgaagatgcatacgatgttcattttgaatgggacagtgacttcggaattcccggtgcattttacattaagaacttcatgcaagttgagttctatctcaagtctctaactctcgaagacattccaaaccacggaaccattcacttcgtatgcaactcctgcgtttacaactcaaaatcctaccattctgatcgcatgttctttgccaacaatacatatcttccaagcgagacaccg

SEQ ID NO: 207222 - DNA, 523 bp, Glycine max
aaaaataccatttatcacgtactatcttgcatcagcttagagacttttcttttttattgcatgtgagactaaactgttttagttgactatattttcttggatgttcctaaaattacaaatctacttttgcttattagaaggaatcatcttcagaaaattgggaagtgttattgaagaaacatgtctgtctacgcacaagtagcttcaactgctaaactttttgccactcctctacaagggtttccgaatgtctcacttgatactccaacactacaactgcttgatccaatgcaggccttctgcacaatagaaagagccttgttgctgctgcagcgtccgtggtagaagttaccacaggttccaaggggtgttccatagctagcaaatttaatggaagagatgacttggttatcatgagggcaagtgagtgatagcacaggacctacttttcttcctgattctgtatctgagttccacaagtctacgggtggtgggtgagaatcggatacatgtgcacacaaac

SEQ ID NO: 207223 - DNA, 493 bp, Glycine max
atatcacctccctgaagatgctcagcattactaattgccataagctttctgcattgcctcaacaatttggaaacttggagaatttgaaacttctaaggctaagttcctgtactgatttgcaagagataccaaattctattggaagactttcgaatctaagacatatggacatctcaaactgcattaaccttccaaatttaccagaggactttggtaatctttgtaatctaagaaatctgtacatgacaagttgtccaaggtgtgaattgccacccttaatcatcaatcttgagaatttaaaagaggtggtatgtgatgaagagacggctgcttcatgggaagcttttaaacctatgcttcccaatctaaagatagatgttcctcaacttgatgttaacttaaattggcttcatgaaattcgctcctaagtcctaatacctgtttcatgctaatgtcattgtgttagtggctttccggtttgattagcaatctt

SEQ ID NO: 207224 - DNA, 434 bp, Glycine max
cttccttcccccgttctacccaacaagcaccatttataccattgaggagtttacacaagtgaacataggcagcaatgattacatgggcaattacttccttcccccgttctacccaacaagcaccatttataccattgaggagtttacacaagttctgattgaagagttatctctgaatttacaggctttacatgacattggagcaagaaagtatgccttggctgggttgggccttataggatgcaccccaggtatggcgagtgctcatgggacaaatggatcatgtgctgaagagcaaaatctcgctgcattcaatttcaataacaagcttaaagctcgagtggatcaattcaacaatgatttctattatgctaattccaaattcatctttataaacactcaagcattggccattgagcttcgcgataaatatg

SEQ ID NO: 207225 - DNA, 535 bp, Glycine max
tagggctcgagaaacaattctattataattctggcaggctcgtgagttgtatatgacatgtttctctgtgcacccattgttcttgtctcaaagtaaaagtgtgtgtatataaaagaggtccctcttctcagttctttgaaaacctcaacaactcaacacgttgcctctactctctgcagcttttaatttgtttgcaggcacacaaccatggctgctctctccaacggccacgacgcttccttcttcaagatgccctccatcaagttcaccaagctcttcatcaatggagaatttgttgattccctttcagggaaggagtttgaaacaatagatcccaggacaggagaagtgattacaagaatcgcagaatgagcaaaagatgacattgatgttgctgtcaaagcggcacgtgacgctttcgactatggtccatggccccgtatgcccggtgctgaaagagcaaatatcatgatgaaatgggcagacttaattgatcagaacatccaggacatagcagcattggatgccattgatg

SEQ ID NO: 207226 - DNA, 566 bp, Glycine max
gactaaaaatgtatttaaacacttattaatttgatgaagtatacgtttaaggaagctcttctatagttcaccattgtttatatccacacaacacaaaaaaaaataaaaaaaatcaaagccagggagaattgtaaatgggagttacaacagatttaacttgaagatacttgtgtagggcttccattccaaaatctcttccaaatccactcatcttgtaccccccataaggaatgtcatccccaaaggcaaaataacagttgatccaaacaatgcctgcactaatggaccttgacacactgtagtgtgtgtccaaactctttgtcacaatgcctgatgctaggccataccttgtattattggcaatcttaattgcatgatgaacactcttaaacttcatcaaagccattacagggccaaatatttcatcttgtactataagcatgtcctccttaacattggagaaaattgtaggctcaatgtagtaacccttgttgcccactcttttgccccctgtcaaaagggttgcaccttctttctttccatgctcgattaggaaagaatctttt

SEQ ID NO: 207227 - DNA, 547 bp, Glycine max
aataaaactccaacaattttattaatgaaaatactttacaatttcagcacatatacactgccatgaatataattttgcacgctataattatctttcgccacaaacaatggagtagtgctcaacaaagcacaaaccaacaataataacagttttagttgcattaatttacacaagaaagtaaattaacgtaataggcaacacatgtgtgtcacgttcatgaggatcattttataatgatatgcaacattgaattaaatattctcatgcaatggagcattctggaggaaggccttgagggaaacgtctgatatcagtgcaataattgtaaatcatgtaattcttttgcacccaacggatctttgcctgccccgtggcgtccagtgattggccagtggaggaagaagtttgggaattgaagtttctgtatgaggctgtgaatggggccttgctccaatccgtttttacaagcccaccccttgtggcccaatcctcagcgttccaaagactagagtatattctcatgggttggctctttgggaatggaacc

SEQ ID NO: 207228 - DNA, 534 bp, Glycine max
ttcccttttcagctttcattggtgtggcctagctgttttctcaatgagaaagccttcatctctgcaaagcgcacttttgcgctttggggttcccttgttgcttgttatcaccttctgttatgctacttctactgctgcagcaacaactcaagtttcagggaatgaagagctgccaaagacaaacctaaatgggcatgatgaagaagcaaaattcggattttttcatcataaaccaatattcaagaaacatattccaattccagtatataaacctgtaccaaagccatttccagtgtataaacctataccaaagccagttccagttccagtgtacaagcctattccaaagccagtgtataagcctattccaaagccagttccagtgtacaagcctataccaaagccagttccagttccagtgtataagcctattccaaagccagtgtacaagcctattccgaagccagtgtataagcctattccaaagccagttccagtgtacaagcctataccaaaagccagttcagtttcagt

SEQ ID NO: 207229 - DNA, 543 bp, Glycine max
ctcgaggtgaggatatcacttggttagaggagcattgccaaggacagatctccaacaggaaatgcttgctagatcggttattgaaatcggcttcagtgacaaaagaacttcaagaaaaggattttgaacaaaatgctcttgacaaacttgtgatgatggcttatgagaaatacatggctagccggggtcctagctcatcaggtgggaaaaatgcaagcaacaaaatcgccaagcaagctgcattgggatttgttaaacgaacattggaacgatgccaacaatttgaagatacaggcaagagctgcttcaatgagcctttgtataaggatatgttccttgctgcttcttcccagctaagtattgttcggcaattagatggcatagaggctgaatccacaaaaccttgtgcttccttttctctggaagcaagaactgcttccatgggttcacagcagaacccttcacaattaagtcagatatgaaaaatcatgatctcgaatcatcagatattctttctgctattaatggttcatctgaacaaac

SEQ ID NO: 207230 - DNA, 587 bp, Glycine max
tacagccgcaccttgattcagagcagagcgaccttgaagagctatggctgtcggaaagaataagaggatttccaagggaaagaagggtggcaagaagaaagccgctgatccctttgccaagaaggactggtacgatatcaaggccccttccgtctttcaggtcaagaatgttggcaaaaccctcgtctctcgtacccagggaaccaagattgcttctgaaggactcaaacatagagtgtttgaggtctcattggctgatctccaaggagatgaagaccatgccttcaagaagattcgtttgagagctgaggatgttcaagggaaaaatgttctgacaaacttttggggaatggatttcacaactgataagttgaagtccttggtgcggaaatggcaaactttaattgaagctcatgtggatgtcaagaccactgataattatacgttgaggatgttctgcattggctttaccaagaggcgttagtatcaggtgaagaggaccttgtatgcacaatcaaagccagtcagacagatcgcatgaagatgagagagataatggtaaacccagcagctgcctgtgatttgaa

SEQ ID NO: 207231 - DNA, 459 bp, Glycine max
gaaaaggcaactcccaagccaataaaaaaattcccccttttaaaccgttcttgggtttgggggttgcccaataaacctttggcaaaaaaaccgattttgatttgcaaaaacaaaggggtttctaaagggcaaaacaaaactgaaaaataaatttttggaaaagccccggggattttaaacaacccaaaatgccttttcagccggatcaagccccaactccttaagggggttccttagccaagggtttattaaaggggctttcccccttgggcccaacattttttggggaatccccatgaacccccatcagttttcccagatcaaacttgggggctttaaaaatcttaactttacgaataaacccattttggagggggtatttgccaaagggggcctctttaaacccctttccaatcatttcaggggtgaacttggcccccaatttttttaaaatacagg

SEQ ID NO: 207232 - DNA, 489 bp, Glycine max
cgcggttccggagcttccgggggagatcaccatcaccaagatgcagctcccccaggcaccgaaacacgacgaggttttcacaaagcttctagacgaggtcaacgcttcggagctcaagagccacggcgtgatcgccaatagcttctacgagctcgagccggtttacgccgatttttaccggaaggagctcgggagaagagcgtggcatttgggaccggtttgtttgagcaatagggacgccgaggaaaaagcatgcagaggaagagaagctgctattgatgaacacgagtgtctgaagtggctcgactcaaaggaaccaaattcagttgtgtatttgtgtttcggcagcatgacagcgttcttcgacgcgcaactcaaagaaatcgctttaggtatggaggcttcagggcagaatttcatatgggctgtcaaataagggttgaatgaaaaattggaatggttaccagaagggtttgaggagagaatttt

SEQ ID NO: 207233 - DNA, 552 bp, Glycine max
tttcgtttttttttttttttttttttaagcaacttccgcgggtattattagcaaatcggtcatcagcaatttcccacaaaccggcctaagtttacatgcatacatgacacaacaatcatcaacaggcacgcgacctcaaattcctctatcaatgagccgaaatcgttgtaagaagatcctccttcctacacagcacgctttgccattcgagcaagctcttttgctctggtcctcatttcctctggctgctcttcaaccatgatccttctcacagcctttttaaccggttccttcttcacagggtccctttccatcatcccaatgcacgtttgaacgcctacacttaccccaatcttaactatgtccgtcaaaaacttagcattgtaaaatagctctgtcgacattggccatgtcaccattggcacccctgcacacaccctcttcaatactgagttccacccacaatgtgtcacaaaccctccaacggattcatggtccaaaatcattacttggggtgcccaaccttgtatgatcaaacccttttcttgacct

SEQ ID NO: 207234 - DNA, 547 bp, Glycine max
gggagaggaagaagaaggtgcgagacaacaagagtctcatgttgatgttagtttgtttgagacaaaagaagcaagattccgaggagtttacaaggtatttgcatctacaatatttgcagcaatatgtttgatttgggtgtaccgagtggcaaacatccccacagttgcaagtgggagatggacttggattagtgttatggtgtcagagttatgttttggaatatactggatcatcactcaatctgttcgttggaaaatcgtatatcaaacgcctttcaaacacaggctcttacaaagatatgatgaggagagtttaccagcagtggacatttttgtgtgcacggctgacccaacacttgagccaccatgcatggtgatgaatacggtattatcagcaatggcgtacaattatcctgcgaataaattgagtgtgtatctctctgacgatggaagctcagagctcacattctatgctctcttaaaagcctccatttctccaaacattggttacctttctgtagaggatcaatgttgacctaagtcacca

SEQ ID NO: 207235 - DNA, 527 bp, Glycine max
aatccacatttatatatagtcccgagctacaccaaacctcaatctaaacaaaacatacatcaatgtgaagaagggcgttacatactccctggccctcgtctcttctctgaactatttaatccaagtccataaaatggagcaaatcaatactagctttcaatttagaatcaaacattgaaactaaattgacattgaaaaataacctactcgtttctttcaatataagatatggcacaaccatgaataaacactaggcatgtacgtaaccgctaagaaatgtggagcagcttatgtatgggaggcacattcaaccttgtgagattcaaggacatgccttgtggcttccatggctacctgtccactgacatagtgctggcgacacacaggcatgtagacatcaacaccaccaatcagctcaatctgcttatcctgtgtcttcctcagggtaaagcaagcacgctttccacagatttcacatctggcagttaacttggttactgaatcacgcaggggaattatattcagga

SEQ ID NO: 207236 - DNA, 520 bp, Glycine max
gatccacaaatcggaaagaatcagagcgccgtcaaaaaccgccgtccacggcggtgaaactcgccttcgaatccagagcctctctcggttcctcactcttctcacatcgagcgcaacgccaaaaaatcgaatttcacgatggaagagttggagcagtggaaggaacaactttctcacttcgctaacctagctttggatcgtcttctcgaggttcctccgaatcagctctacgcagctgctgcaatcgtgattttcacaacgctgcttcttctctcaattcggttgttcaagcgtgcgaagtcaaacactgttgtgttggccgggctcagcgggagtggaaaaactgttatcttctatcagcttagggatggctctactcatcagggtactgttacatcaatggagcctaatgaaggcacttttattcttcacaacgagaaaacaaggaagggcaagataaaacctgttcatgttggtgatgttcctgggcattctcggcttcgacccaaactggatgagt

SEQ ID NO: 207237 - DNA, 592 bp, Glycine max
ccccttccacgccatgaagtcccttctcaacccaaagttctcagctttatctcccaaagcttctccttttgctctgttctcacttccttcttctcgattctccttccgcagcaacccgcgtcgaatccccaatcgtcttcttcgcctcaacccatcaccctgttcgtccaataatttctgttgcaccattcaaaatcgaagtttgcaaacggagccctcgccgcctccctccggcgagattcacgtcattgtggggcccatgttcgccggaaaaaccacatcgctccttcgtcggattcagtcggaaaccaccaacggcagaaatgtagcaataattaaatcaagcaaggatacaagatatggattagactcaattgttacacacgatggtgcagaattaccatgttgggcactggaaaacttatcttcattcaagcagaagtttggaattgatgcttatgagaagctggatgtgattggtattgatgaagctcaattctctgatgacccttatgaaatctggcttcagctgctgatcatgatggaaaaacagtaatagttgctggactagatggctactatttgaagagga

SEQ ID NO: 207238 - DNA, 167 bp, Glycine max
cgtatggccatcaagcttaatttctctttccttcaggagattctctaggttctctgtctcagctctaaccttttgtgccagttcacgcaatttctgacattcctcaaaattgtgtttattttcttccctgagctgcatgttactctcacgaagtaagttcatttctc

SEQ ID NO: 207239 - DNA, 456 bp, Glycine max
tttttttttttttttttttttttttttttttttttttttttttttttttttttttttttttttgtttttttttttttttttttttttttttttttttttttgggcccctaaaaaaaaacccttttttaaaaaccctttgggccccaaaaaaaaaggggggtaaaaaaaatttggggggaaaaaaaaaaaaaagggcccaaacggggaaaaacgggggcaaaaaccggggaaaaaaatttaaccccaaaccttggaaaaaagaagggcccaaaagggggggattattttgggcctccttcccccccaaaaaaggggttaaaaaaggcctttaaagggggggcctttccccacaaatttgggggccgggagggtaaagacacccccctcggggggggggggggaaaaagggccctgggaaacccccgggcgccccaaaaaaattgggggtgtttcccc

SEQ ID NO: 207240 - DNA, 494 bp, Glycine max
tgaatttatggctaataatagagaggctgaaaaagaagcttttgaagaagcagaaggagaaagaagggctcgggaagaagaggaggcacagagagcaagagaagagggtgaaagaaggcggaaggagagggatcataaatatggaaataggaggcatcgtcgaaggccggatccccgtgatatggatgattaccatgatgaactttgaagactgcactaagggtaggtggcaggtgcgtaattacaacactaaaatgcatctttgaagttgcgaattgtaggaccaaagctgcaattgcactgaccatgccgagctgtactgaactgtaacatctgaaatattagcgtcagtcattatgtgtaacttcatttcttttcgattattatgcaacagctggtctgcttctgctactgctactgtattcaaaggatggaagttatactttctctattctgttaccgaaaggggggataagaaagaaattatcctttag

SEQ ID NO: 207241 - DNA, 497 bp, Glycine max
gtactaaaaaataatttctttcttttcccccctttcggtaacagaatagagaaagtttaaattccatcctttgaatacagtagcagtagcagaagcagaccagctgttacctaataatcgaaaagaaatgaagttaaacataatgactgacgctaatatttcagatgttacagttcagtacagctcggcatggtcagtgcaattgcagctttggtcctacaattcacaacttcaaagatgcattttagtgttgtaattacgcacctgccacctacccttagtgcagtcttcaaagttcatcatggtaatcatccatatcacggggatccggccttcgacgatgccttctatttccatatttatgatccctctgcttgctacttctttcaccctcttctcttgctctctgtgcctcctcttcttaccgagcccttttttctttttctgcttcttcaaaagcttctttttcagcctctctattattagccataaattca

SEQ ID NO: 207242 - DNA, 545 bp, Glycine max
caaaaataatggtaatttatatgattcttcacttttagctaataataacatggagcttttctctgagcctgggcatgctaaggtgtttggtcatgttcgtaagctttcaaatgagagtgttgaaagcgatggaagctcaatacgaggtagtgacatgtctaattttgggattccaagttcatctggtgatggctctcatgaccttcctggatctgctttggtttcaagagagacagatattatgggccacacaaagtcgaagtctactggtgatactcaattagtccttccactagatcaacgcaataaattgaacaggattctttcaaccatgcagcgaacgctaggcactgcaaaaactgatatggaggaccttatagttagattaaatcaagaaatagctgcaaaggattttctcgcaacaaagcttaaggatttggaagtagaacttgaaactaccaaacagaaaaataaggagaactcgcagcaggctattctaattgagagagaaaggtttacccaaatgcagtgtgatatggaggaac

SEQ ID NO: 207243 - DNA, 526 bp, Glycine max
ccacattcaaatccatatggccctttacattacactaataattggcctcctagtaaacaccctagtactctataaatagcatttgcatgcaccttagtcttcaccaaaatactcctcttggcatcttgtgttgtgtccctcttttaagctatttccttctcttaacacaattggttgtgccaattgccatagtcaccaaccaattaacaaaggtatatatatcatcatatcatcaccaaatgaaaaatattgggttgttttttcttgtggtggtggctacttttgtggtggcagccacagctggtagcttttaccaagactttgaaataacgtggggtggtgagcgtgccaaaatctatgagaatggaaaccttctcacactctcccttgacagagcctctggctctggctttcgttccaaaaaagagtacttgttcggaaaaattgacatgcagctcaagcttgtgcctggcaactctgctggaacaagtactgcctatttattatcttctctgggcctactcat

SEQ ID NO: 207244 - DNA, 577 bp, Glycine max
gaaaaagcatatggtctcccgtcacagatccaagaagtggtttcaaccgggaatccagaactttccacagcctcaagccccctctccgtctccctccccccaacgccgccgtctccgcagccgccttcgccctcttcctccgccgcaactcgcagttcccggactcctccaccgcctttatcgactctgccaccggccaccgcctctcctacggcgagctcctccaccgcgccaaaaccctagcctcgaatctcgccacaatcctcaaactcaccaaaggcgacacagcgctcgttctctcaccaaatattctccaagttccgatcctctgcttcgcgcttctttctctcggcgtggtcgtctcccccgcgaaccctctctccacgcgctccgagctcacgcgcttcttcaacatcagcaacccctcaattgtcttcacagtaacctacggtcgtgaaaaaacacgcgagtttcaagtgaaaaccgtgctcctggactctcccgagttcgacacgctcacgaagtctcagattcacacaaaatacatccaagagtgtgattctcatcagaggggact

SEQ ID NO: 207245 - DNA, 585 bp, Glycine max
gagaagttactatactacatcatttgataaagttcaagatctattttacaaaagaaggtctttcattacatataaattcttaaactgaacacacgcattgcttcttctttttttttttcatttggagcaaaagactaaatcaaacaccacttataaaacgaaaatgaagcatattacaacctagagagcgccagttttaagtccttcctcagtatctttcccgcagcattcttgggtatggaattaacaaatgctacacgccttattttcttgtacggtgaaacctgtttggcaacaaaatcaataacttctgctgcgccaagggaactttgaggttgtctcaccacaaacgccatgggcacttggcctgctacttcatcagggtatggaataactgcagcatcatttatctctgaatgagataggagtaactcttctagctctgccggagcaacctggtagcccttgtatttaatcaactctttcaacctatctacaacatacaagaaacctttgctatcaaaattacagatgtccccagtccttaaccacccatccaccaaagttgctgaagtgcttttgggt

SEQ ID NO: 207246 - DNA, 464 bp, Glycine max
cggtgagttcccaggcgactactgctgggacactgctgggctttccgcagacccagaaaccttcgccaagaaccgtgaactcgaagtgatccactccaggtgggccatgctcggagccttgggctgcgtcttcccggagttgctgtcccgcaacggggtgaagttcggagaagccgtgtggttcaaggccgggtcccagatcttcagcgagggtgggctcgactacttgggcaacccaagcctgatccacgcccagagcatcctcgccatctgggccacacacgttatcctaatgggtgccgttgaaggttaccgtattgctggtggccccctctgtgaggtcactgacccaatctacccaggtggcagcttggacccattgggccttgctgatgacccagaggcttttgctgagcttaaggtgaaagaactcacgaacggacgattggccatgttctctatgt

SEQ ID NO: 207247 - DNA, 360 bp, Glycine max
ggaaaaagcaagtaacattaagttggattcggattcccaagataattcacattttctgaaggacttcaccaaacccaaattttaaaaaccctcaaaagtcatttcgttctttgacgctcactttccggggaccaaattgggggcattagcccaggcgttgttgttgacagggtcagcaaggggatcggcgaggttctccaatggaccctttccggggacaatggcctgaacaaagaagccaaaccttgagaacatggccaatcgtccgttcttgaggtcccttaccttaagctcagcaaaagcctttggggcatcaacaaggcccaatgggtcgaaactgccacctgggtaaattgggtc

SEQ ID NO: 207248 - DNA, 356 bp, Glycine max
acgtaaaacggcggttcattctaggtggcacttggccatgccggctatgattgttgaaacatgcgcgagaacacttaacagcaagttttacaagcgaaatttgcttctttaacacgtaactgcagacgctgaacctttcaactgccccaaattcataacttaaccattcctaggtggatcaaggaatcataatgcttctattaagctttattggaaaccagggaaaggtctgtgccaaccattgagcccctaaatggggataccgttgggaattcctctgaaagggaatccctcctcactagaagggtaaagccaagggtcaggcattttagcccggccactgggggtcttcaacg

SEQ ID NO: 207249 - DNA, 327 bp, Glycine max
gtagatgtccaatccgttttccttttgaacaacttgggaaccgtctttcaaactgaaaaaaactcacaactttcttcagtctcaacccccctggtatgttggagccacttaaagtctagcactccctgggccctgggggaccccaaggcggatatattcccgggagccataaggcacggctggggcattcaatggatcctcccatacctggtagcccaggtttggatacacatctgcatcataccgaccaagatccgaaccgaggtaatgttctgtgcccttaaacgcagtatcaggggcgaagcattacgacgaacccgtgaatac

SEQ ID NO: 207250 - DNA, 494 bp, Glycine max
aggagaagttcaagcaggagatccagagcctccttgatggcaacttcggcagccacgcgcgccaccgcaccttcgtctcctggcgccgcttcatccaccacgaccgcggcagcgccggagtcaccgtcgccaaactcccggcgactatccggtcgccgctcttctaccgctcctggctcgacttccggaaggtcctccacgactggttccggaagcgacgattccaacccggtatcatgtccgggttgactcggtcaattaagcttccaattgattcacacaacaacaacaacaaactacaaaccaataacaaaaacaaatactcttcctgtgccgtagttggaaacagcggaattttgttgaatagagactatggtagtgaaattgattcccatgagtttgtgataaggttgaacaatgctagagttgatcactctgagaccaaggttggaaaaaaaactagcatttcattcatgaatagtaacatcttgcat

SEQ ID NO: 207251 - DNA, 478 bp, Glycine max
ggccctgatggccaccaagcagtggctgctagagtgcaggcggatcgtgcagtgtttgccaactgtcggttcgagggctaccaagacactctatacacccaagcccacagacaattctacaggagctgcatcgttacaggaacaatcgatttcatctttggcgacgcagctgtcgtgttccagaactgcatcatggtagttaggaagccattggaaaaccagcagaacatggtgactgctcaagggagagtcgacaagcaacaagtcactggaattgtgctgcagaaatgcacaatcaaggctgatgattcactggttccagagaaggacaagatcaggagctaccttgggaggccgtggaaggagttctcgagaacaattgtgatggaatcggaaataggtgacttcattcaccccgatggatggacagcttgggagggagactttgctctcaagacattgtactatgctgagtatg

SEQ ID NO: 207252 - DNA, 511 bp, Glycine max
accttatgtaagaaatatcaaatatataaggaaaaaatgtcaattctatacaaaaacaaaatgtcaaatagttatgggaaaaaaatgtttttctagatagtacataacccaagcgtgaactgagccgtcacttgtcacataaattcggctatttcttcattaagaaacctacaaacaatacgctggaaacgtccaggagatagaacttgttaggatcttgtattctgctatatgtgtgaccctttaatgtcaaaactattgtatagaataagctcgtatcacttccaccactggtgcttgacacattggacactttcttctactttggagcaaatcattagcacattttgaacatgtgcacatgtgcccacatctgtacaacaaagaatcaatattgctttcgcagcatatacagcaaagtcctttcctcacacattcccatttagatttatctctgttgaaacaccgtcatgtattcctgatgaaccagttgagcgatttagggctgcag

SEQ ID NO: 207253 - DNA, 167 bp, Glycine max
gagaaatgaacttacttcgtgagagtaacatgcagctcagggaagaaaataaacacaattttgaggaatgtcagaaattgcgtgaactggcacaaaaggttagagctgagacagagaacctagagaatctcctgaaggaaagagaaattaagcttgatggccatacg

SEQ ID NO: 207254 - DNA, 518 bp, Glycine max
gcgcacctttattgcttgatattcagagtctttcactgatggcaacttcggcagccacgcgcgccaccgcaccttcgtctcctggcgccgcttcatccaccacgaccgcggcagcgccggagtcaccgccgccaaactaccggggactattcggtcgccgctcttctaccgctcctggctcgacttccggaaggtcctccacgactggttccggaagcgacgattccaacccggtatcatgtccgggttgactcggtcaattaagcttccaattgattcacacaacaacaacaacaaactacataccaataacaaaaacaaatactcttcctgtgccgtagttggaaacagcggaattccgttgaatagagactatggtagtgaaattgagtcccatgagtttgtgactaggtcgaacaatgctagagttgatcactttgagaccaatgttggaaaaaaaactagcatttcattcatgaatagttacatcttgcatttgtgtgctagcaggggagggt

SEQ ID NO: 207255 - DNA, 513 bp, Glycine max
cttttccctcgttgaaatgaaaatgggttcttctttgtggactttgtgtctaattttggcttcactagcctcttctgcattctgtgcctttccacggaggccagtggatgttccattcggcagaaactacgttcccacttgggcttttgatcacatcaaatacttcaatggaggttctgagattcaacttcatcttgacaagtacactggtactggcttccagtccaaagggtcatacttgtttggtcacttcagcatgaacataacgatggttcctggcgattcagctggcacagtcactgctttctatgtatcttctcaaaatgcggagcacgatgagatagattttgagttcttggggaacagaacaggacaaccttacattttgcagacaaatgtgttcaccggatgcaagggtgacagatagcaaagaatctttctctggtctgatccaacaaaagcctaccacagatactctgtgcttgtgcacatgtatcaaattgtgttcctaga

SEQ ID NO: 207256 - DNA, 547 bp, Glycine max
  unsure (1)..(547): unsure at all n locations
aaagtagaattacacaacatatataattttattatagaggctctgctctgtattcaaacctcactcatcaattacacagctcaaacaatacaatgataataaataatggtaggaataaagtatatggtaaatgatgaatcaataatacaataagaaacttatggtagcaaccataaacatagtactacatgtgaatttaaatgtcacggtttcttctacattcaggtggaagctgagggtagcggcttctgtcagtgcagtagttgtagatggtgtatttcctgcgcacccacctgagccatctccattgagaagcatcaagatcatgatactgtgcttgatcccaccacctcttgccttgtgtagcacagaactttgcattcactgaagcttcacacccatcaacgtggaaccctttgtattctgctatgaagggtgctttggaccaatctgttttctccaaaccaccccttgtggcccagtcatcagcattccacaagctgtngtacacccttcatgggttggtcaaaggggaacttcactccca

SEQ ID NO: 207257 - DNA, 518 bp, Glycine max
agagcgtgaagatgacactggcgctggtgcgagtggaggtgttgctattgcagcagcttcttcacaaacgcaaacacaagagattgaaagtgctggcggcgacaggaggaggagatacaggggagtgaggcagaggccgtgggggaaatgggcggcagagattcgcgatcctcacaaagcggcgagagtgtggcttgggacattcgacactgccgaggctgcggccagagcctacgatgaagccgcattgaggttcagaggtaacagagcaaaacttaatttccccgaaaacgttgtaccggttccacctccttctccggttcccgatttaccggcaagtgcggtagccggttccgattccatttccggttccggttcagtggtggcaggtttttcgccgacgctgatgcatggaggcgccgttcagggctcctctgcttttctgagagattattgggggtattctcagctgctgaggagtacaggggacttccatggactcaccagtggttctttga

SEQ ID NO: 207258 - DNA, 544 bp, Glycine max
  unsure (1)..(544): unsure at all n locations
taaggaaaatgattctgaggactggcttgacatagttgcaacagtagcgtggcaggctgctaactttgtgagaccagataccagcaaaggtggcagtatggatccaggtgattatgtgaaggtcaaatgtgtggcatctggaagcccaagtgagagcacccttgtcaaaggagtagtttgcacaaaaaatattaagcacaagcgcatgacctctcaatacagaaagcctagactactccttttaggtggagctctggaatatcagaaagttccaaatcaattggcttcttttgatacattgttacagcaggaaaatgatcatctgaagatgattatttcgaaaattgaggctcttcgaccaaatgttttgctggtagaaaaaagtgtagcttcatgtgcgcaggaatatttgctggcaaaggaaatcttcttggtgttgaaatgttaaaggcctttgctggagcgtatagctcggtgcactggcgctcttggcactccataagtggattggttatctaaagcacgattggngcactgtgagttg

SEQ ID NO: 207259 - DNA, 524 bp, Glycine max
gcgaagaaagagtgagttgcagttagagtctccaatccaatccatgtcgttgctgctactccctcaacctccgacacccctctcaacggtcaccttctccgccgccgcacgcgcacccttcgccgccgtcacgcctccgcgcccgagaacgctaactccgaaacccgcactctccctctctgccccaataacaacaacagcacccaataatgcaatccctccgaagaaggtcctggttcccatcggattgggcaccgaagaaatggaagccgttatcatgattcacgtcctgcgccgcgccggcgccgacgtcaccgttgcctccgtggagccgcagctccaagtagaagccgtcggaggcaccaaactggtcgccgataccgacattttcgcgtggtccgatcaagttttcgatctcgctgctttgccctgacagggagggatgcctggctctgctagactacgggattgcgatgtgctgcggaaaatcacgtgcagacaagctgagggaaacaggctctatg

SEQ ID NO: 207260 - DNA, 503 bp, Glycine max
tgaacacattgttgctggtgcatgagagcttcatcttgagatctgtttgaaggacttgcaggatgatttcatgggtggagctgagattatcaaatctgaccctgttgtgtcattcagggagactgttttggagagatcatgccgcaccgtgatgagcaaatcacccaacaagcacaaccgtctgtacatggaagcaagaccattggaggaaggtcttgctgaggccattgatgatggcaagattggaccaagggatgaccccaaggttcgttccaagatcttgtctgaagagttcggttgggacaaggatcttgccaagaaaatctggtgctttggccctgagacccttggacccaacatggtggttgatatgtgcaagggagtccagtatttgaatgaaatcaaggattctgtggttgctggattccagtgggcattaaaagaaggtgctttggctgaagataacatgagagccatctgcttttgagtatgtgatgttgtgc

SEQ ID NO: 207261 - DNA, 543 bp, Glycine max
gaaaatactatctttcaagcaaaattcgcaaaataataatttgaaccaacaccgatgcaaaatcctattagagcaaaaatacatcgatgcaaggaccaaataacagcattacaacattcacgggcaaaaccacaaacaaaactaacagaaattaaatctaaagtagcattgttcacaagagaaaataaattcgactaagttcaaagtaaaataattcatgaaacaaatttaaagcttgtcttcaaactcggagagaggagtcatctgttccttcaagcccttcctcttgcgaatgtcagtgacaagctgtgcagcttgtgatccagcctccaatgggtcagaagacatcatgtcccagtgatcaaacacacattgtgggaaggcctggcctgatgttgcagccctcaatgtgctcgagaaaccaaaggactcgatgacagggaggtatgccttgatgttgtatagtggggtacctggcctctgcatttcctcgaacacgtgtccacgcttctggttaagaacactgtagattccaccaagagc

SEQ ID NO: 207262 - DNA, 534 bp, Glycine max
gtgtgtaaccaattcttctcttttgctttctctctccaaattcatcacaacttctctcgtacctctgcagagaagttaacatataggagtgagagggagggagagagaaggaaagcttggtagcgatggggaaggagcaagttcaggtgctgaatgccctggacgtggcaaagacacaatggtatcatttcacagcaatcatcattgctggaatgggcttcttcactgatgcttatgatctgttctgtatatcactagtcacaaagctacttggtcgcatttactaccacgttgatggggctgcaaagcctggttcattgcctcccaatgtgtcagctgcagctaatggtgtagcttatgctggaacactttcagggcaactcttctttggctggctcggcgacaaaatgggccgaaaaaaggtctatggcatgacccttgcgcttatgggtatagccttcattgctttcggtctatccttcggacacgatgccaagactgtgatgacacctttatgctactttcgcttctggc

SEQ ID NO: 207263 - DNA, 592 bp, Glycine max
  unsure (1)..(592): unsure at all n locations
ataggaagaactacacattccaatatctattttctcaaaattcaaagaacaagcagtacctcaggtccctatcattacaacaagatagagcagaaccaaatagaaaaagaaataatcaaacgggaaaggaaagctttggcaacaattccctagccgaattaaggcacggctttattctagtaacagatcactaataaactagagaaagacactgaattattctgttgccattatttttacaccttggtctcctcttcttgctctcccgaaatctcctccaaggatctacccttggcctcaggcaccaagaaagtgaacatgaagcctaaaatgttaatcacacccaacacaagcagtgaattcctcacaccaatacctgcagggtaccctgcatctgctttgctcgggtcctgattctgtgccaaatataaaaacccgaatgcaccaaccatagccccgagctttccagatgctgaagatattccatggcaagtggatctaaatctagctgggaaaatctccgtccgcacaacatatgtggtggcattaggcccaaagttngcaaagaagaatgtgagagagtaaatgacca

SEQ ID NO: 207264 - DNA, 508 bp, Glycine max
ctgaaaatacagtacatttatttgatcttcttgatttgccttacaacaaggttgaggatttatacctcatttttcttgtaaataactcaataccactaagtctcccgtgttaaaaatgaaagtccttcattcataggctccttttttttcaacagatgcttttattggtgtcaacattggttcagatatatctgacatgcccggtccaacagagattgttgctcttctgaaggctcaaagtatccaacatgtcagactctatgatgctgaccaagccttacttcttgcacttgccaacacaggaattcgtgtaactgtttctgttcccaatgaccagctacttggcattggtcagtccaatgccactgcagcaaactgggttactcgaaatgtcatagctcatgtccctgctaccaacatcactgccatatgtgttggatctgaggtcctaactaccctcccaaatgcagcccctattctagtctctgccataaatttcattcactct

SEQ ID NO: 207265 - DNA, 554 bp, Glycine max
ctcgagccgaatcggctcgaggaatcctataccttgcgcggtggaccgagttgacggtgataacctcctcccttctcctccgccagatctcatcctcgccgccgccgccgccgccgccgctgccgccgaatttctcctcgtcgttttgtctccacctctcactctcgctgaagcttattaaggaccgacagcatgtgccggcaaaattctccggtacaccatgccggtgaagaagaaattgcagctgatgagagtcttttaatttattgcaagcctgttgaactgtacaatattctctaccgccgcgctcttcaaaatccttcttttcttaggagatgtttgctttataaaataagagcaaggcgtaaaaggaagttgagagcaggaattgtgattttcaattatagggatcactacaacattcttcggaaaactgaagtgaccgaagacttttcttgtccgttttgcttgatgcagtgtggcagctttaggttactggagattaccaagcagtgaatgtctccgtgaaaattaatatattgagatcagagaat

SEQ ID NO: 207266 - DNA, 425 bp, Glycine max
aacaaacacacgatcttgttcatattaaattattcttggacaacaggatgctacgataaatccacaagtgaaactagtaataatcacaaactttccctggtatttccgagggttccttattgatcactcttaattcactagtcaccgcatcagcatgatttatccctccaagggaacactgtgaagaacaacggtctcaacggttagacccggcccgaatccgaatagcaccccccactctaacccttctccagtggtactcttcccttcctccttagacttattcctcattttatccagaatgaacaaaacacacgcgcttgacatgttttcgaactcactcagtacatgccgggtggactggagtttcttcggcttgagccggagcttctcctagacttgatcgatgatcgctggaccaccgg

SEQ ID NO: 207267 - DNA, 450 bp, Glycine max
gttaaaagcaagtaacattaagttggattcggatacacaagataattcacattatctgaagtacttcaccaaacacaaatctaaaaactctcaaaagtcatttcggtctttgacgctcactttccggggacgaagttggtggcataggcccaggcgttgttgttgacagggtcagcatggtgatcggtgaggctctccaatggaccctttccggagacaatggcctgaacaaagaagccaaacatagagaacatggccaatcgttcgttcttgagttccttcaccttaagctcagcaaaagcctctgggtcatcagcaaggcccaatgggtcgaagctgccacctgggtagattgggtcagtgacctcaccgagggggccaccagcaatacggtaaccttcaacggcacccattaggataacttgtgtggcccaaatggcgaggatgctc

SEQ ID NO: 207268 - DNA, 448 bp, Glycine max
caccaaacataatgcaggtttatagatacaagttatggtgctaacaacaaatgagttgggtagtatgacgtctatatatgtgcaagtacatgtacaaaattcataagaattctgttcataaataaatcaggtaggaggagacacagaagttgatttcaaagcttgagatttgcatatggggcaaacattttttaccaccaaccatgttcttaagcaatctgcatgatattcatgctcacattgaagaactccaatcttctcttggctcttgaattcatcctgacatattatacaagaaaatgtgccctgatcatgacaaacttgctactccatattaatactagtagcacccgttaaataagtccttggcttcaattgagttgtaattgtttgctacgataaccagtgtttacattgccaattctctcaccctaagcaatgagatcct

SEQ ID NO: 207269 - DNA, 565 bp, Glycine max
atgatgatggagatggcgaagctaaacgctgtcgttgcggcactcgcggcgttggtgctactcgcggcgagtgtggcggtggatgctcaggagaactcggacgtgaagacgctggtgaagtacaagcacgggaagaagtactgcgacataggatgggaatgtaagggctggtcaatttactgttgtaacctcaccattaccgattatttccagacctaccagttcgagaatctgttctccaagcggaactcgccggtggcgcacgcggtcggattttgggactaccactccttcatcgccgccgacgcgctttttgagccggaagggttcggcaccaccgggaacaagacgatgcagatgatggagatcgtcggcttcttcggacacgtcggcagcaagacctcttgtggttatggagtggccactggaggacctttggcctggggtctttgctacaatcatgaaatgagtcctatgcagtcatactgtgatgactacttcaaactcacatagccctgtacttctggtgctgactactatggacgctgagccattccattttttg

SEQ ID NO: 207270 - DNA, 407 bp, Glycine max
cccacccagcatatctctctatttctatttattagcacccctcacattaccttgtgtcaccaagtactttgactcctttaccataccattacaataattatcaaacctaaccagtaaaaatggtgaccgtggaggaaatccgcaacgctcagcgttcccatggacccgccaccatcttggccttctgcaccgtcacgccgtccaactgcgtctcccaagccgattaccctgactactacttccgcattaccaacagcgaacacatgactgatctcaaagaaaagttcaagcgcatgtgtgaaaagtccatgataaagaagcgatacatgcacctgacggaggagtttctgaaagagaacccgaacatgtgcgagtacatggcgccatcgctggacgtgagacaagac

SEQ ID NO: 207271 - DNA, 512 bp, Glycine max
agtgacatcttttgcactaaacaattgttatttttaacaaatatccaaatcattgaaaaaacaaatatttatgcaaatccccaaaattcgtattacagttgctacaaataaaagaagtataatcatcaccattgaagtttactccaacaaacccaacgtaatactggcaagtattgttgctcgtctaacaaagcatgcaatgggcgaccaataaattgcatatactaagtgtacagttttgcaattctttttacacacggctatctatgaggctgctaaactccaatctcagtaacaaaaagaaaggccgagttgagccaacatttcttgacaaagtgcactagccggtagccacaatctcatggatggtatcgctaacagtttcatactcggatctgacagcaagtttcatcgcaacatactttggaccatcaagtccaaaagacaaccgtacaagaaccttcacatttcctatgaatacacctgacaacaagcatgtgtgtgacctttga

SEQ ID NO: 207272 - DNA, 415 bp, Glycine max
gcaataactgagacataagctgtggcctgatttttcctgaacagtttgaaacaaccccacatcagcgatgtgcataaagagttgcttatcttgctccattattacgaccacccatttccttggatttgctacttggatctgtgaagcattcatacagaaattacatgctacataaaccacatggtctaaaccgccacctgagcctatgctgagattattatacccgtgccgaatgatcaagttcacaccatcaatagataaaccaactcctcttagttcagggtcacgtgacaaccacactgaagcatctgttcaaattaaatggctggatggatatatagcagatacaggcgagaccatgggatgtaatccacacacattttgacctttgcagatcttgaaaaatccattcttt

SEQ ID NO: 207273 - DNA, 627 bp, Glycine max
  unsure (1)..(627): unsure at all n locations
tctaccctaacataataaaaaataaattcacttaattttataaatcataacagaaattaaacaataaattaatatacattttattctatataatatacttcatttatanatataataaactccgttcacttgaanccccnnannnnttttngnnaaattccntntttttcctttattttaacaaatattataaaattacttaaatataattttcataactcattataaataacaatatatactccgtagaaaatattatcgtttgacattaatcttaagttcaactcatacaagtactggcaaacccttatgaattctactgaaatattccctaaggccttcccacatgattacaaaagcattgatgttcttgagggtgatggcaagtctcctggttctatccgccacataagttatggtgaaggttcaccacttgtgaaatcatcctttgagaagattgaggctgttgatgaggaaaagaaggtagtgtcgtacactatcattgatggggaactcctccagcactacaaaacattcaagggagacaattcagtgactccaattggcgatggatgcgaggtgaagtggagtgctgtgtacgaaaaggttaaccatgatatttctgat

SEQ ID NO: 207274 - DNA, 568 bp, Glycine max
  unsure (1)..(568): unsure at all n locations
ggaaaacgcgcggtcgtttcgagaccagctttgantttncatgcacccntccctgagcttngnatttttttcgtgagcttgatgagaaggaaataaattttttaccaatgcctggacaagttgatttcattgggggtggttctccatgccagggtttctctgggatgaataggtttaaccagagctgttggagtaaagtccagtgcgagatgatattggcattcttatcctttgctgattatttccggccaaggtatttcttgttggagaatgtgaggaactttgtgtctttcagtaaaggacagacatttcgtttaactttggcttcacttcttgagatgggttatcaggtgaggtttggtattcttgaggctggagcatttggggtttcttactcaagagacagggcattcatatgggctgcttctcctgaggatgtgctgcctgaatggccagaaccagtgcacgtcttttcggcccctgagttgaagatcacattatcagaaaatgtccagtgtgctgctgtgcgcactactgcaaatggtgctactttacgtgcaataactgt

SEQ ID NO: 207275 - DNA, 482 bp, Glycine max
gcaataacaaatattcataacaggttaaaaaaaattggtctcaattttcaactacacattgggaggtaatcaattcccaaccatttctttcataaacagccaaaataccatctaatcaagaaaatcctagttgatagaaaatgagcatcatccattcaattccttggttgaggaaagttaaacaaggaattagcctcaacaaatgaccaatggatatcactatatacaagggtttctagtttttggaacccggaatgatgatttgcaatatcttggtgactgttatgaatacaataagcatgacctaatgtagaaggcccatcttctaagtggagctcttactgtccactgcttccttgagctttctccccaatgctgatgctagaggaggaggcacagcattaccaatctgccggtgcttgtgtatgatattgccagcaaattcatagctatctgggaagccttgagaccgagcacattca

SEQ ID NO: 207276 - DNA, 377 bp, Glycine max
agaaacaatgattcgcataatttgaaataaatattatctatgtaaactgataaaagaatgcaaggtagcatcctcttagaaagaaagtttaattgaagaaattcactaaattacagtcaaacaccatgcaaatctaaactacagtcttcagtgacagaaagcacacgcattgaataaaaggctcacaaagccttatggtgattgtgctagagaccaattccatgttctattacaacatcctaatggtcaactatcaagagagagactagccttttcgtatgcactccacaaaatccttggccaatacctgctatgcatagttacctccagcagctcgggcagaatccaccttttgtacctctccatcttcagggatg

SEQ ID NO: 207277 - DNA, 473 bp, Glycine max
  unsure (1)..(473): unsure at all n locations
gannccgcgtgatcttcgancccatttgatttnncagccacccccccngnnnnnaaaaannacgggcaaggaaaagaaaaccaccaactttcatggacaacaccaaagaaagctaaaacggggttaccattactagcgttgccaacaagccccacgctatgaaaaaatggtggaagcattgaataatgaggcgaagctaaacgtgtaattgacggtagaggagcggaacctactgtctgttgggtacaagaacttggtgggtgctccttgggcttcgtggaggattctttcctcgattgaacagaaagagaaatctaaagggaacgaagatagcgtgaacaggatagaaggcacgtatgctgaacgcggaatcacgagtaagaccaatatgtgcaatgcatgcacgactgtgatggatgaacaccttatggcctatagctcatctgatgaacctaccgtcgatttttacaaaa

SEQ ID NO: 207278 - DNA, 424 bp, Glycine max
ataaacaatgattcgcataatttgaaataaatattatctatgtaaactgataaaagaatgcaaggttgcatcctcttagaaagaaagtcaaaatgaagaaattcactaaattacagtcaaacaccatgcaaatctcaactccagtctccagtaacagaaagcacacgcatagaataaaaggctcacaaagccttatggagattttctagagaccaattccatgttctattacaacatcctaatggtaaactatcaagagagagactagccttctcgtatgcactccacaaattccttggccaatacctgctatgcatcgtcacctccagcagctcgggcagaatccaccttttgttcctctccatcttcagggatgtcagaagtccacaaggtgagaatgtccctcaaaagctgcgtaattagg

SEQ ID NO: 207279 - DNA, 672 bp, Glycine max
  unsure (1)..(672): unsure at all n locations
aaaaagaaaaaaaaaaaaaaagaaagaagaaaaaaaaaagaacaaaaaaaaaaagagaaaaaaaaaaaaaaaagaaaaaaaaaacaactacctctgannncagagagaacgtnngaacacaaaannaaanaaaaanaaaaaannnaaaaaannaaaaaaanaaannaaaaaaaaaaaaaaaaagaaaaaaaaannaaaaacaaaaaagaaaaaagagaaaaaaaagggagaaaagaaaaaaaaaaagagaaaaaaaggaagagaaaaagaaaaaaaaagaaaaaaaaaaaaagacanagaaaaaacgaaaaaaaaacaangaaaaaaaaaaaaaggaaaagaaaaaccacaagaaaacaacaaaaacaaaaaaaaaaaagagaagggggggaaaaaagaaaaaaaggagacgaaaacaaaaaaaaaaggaaaaaaagaaaaagaaaaaaaaaaagaggaancaaaaaaagaaaaggaagaaacagaacgaaagaacaaaacgaaagaaaaaacaaagaaaaaaaaaatgaaaaagaaaaaaaaaagacagaaaaagaaaatgaggggacaaaacaagaaaagcaaagaaagaaaaaagaataaaagaagaaaaaaaatgaaaaaaaaacccangaaaagaaaaaaaaaaaaaaaaaaaaggggagagacagc

SEQ ID NO: 207280 - DNA, 579 bp, Glycine max
  unsure (1)..(579): unsure at all n locations
ggataaggcagagagagaaaaacaaacaaacaaagcggcttccaatggccactctgcaattcaccttcaccgactcaaccacattgttcaggccttctctaccttccacgcgaaccttctctcgaaaccgaagcctcattgtcaaagcctcttcttcttcttctgacgacttctccaaaagcaggcgacgcttcatcgccgaaaccgccgcactctcggtctcgctccctcagttagcggcgcgtgccgaagacgcgctttcggagtgggagagagtatacctccctatcgaccccggcgtcgtgcttctcgacatcgcttttgtccccgacgatcccaaccacggttttcttctcgggacgaggcaaaccattctggagacgaaagatggaggaaacacttgggctccgcgttcgattccttctgctgaagacgaagatttcaactatcgcttcaattccatcagcttcaaagggaaggaagggtggattgtcggaaaacctgcgattctgttgtacacttncgatgccggagacaagtgggagaggatacctcttagtgctgaactttcaggggata

SEQ ID NO: 207281 - DNA, 601 bp, Glycine max
  unsure (1)..(601): unsure at all n locations
ggaatttggcagaaccaaaggactctatatacttattggataattgccctcatgattggcttttcttgcgttgcaaggctgtggctagccaattacatggtagtttgtcttgggtgtggccccgcatcttacaatgtgagcatcgaaggttcatcacggaggtgctggcacaacagctgcggggctcaaagctgcttgcccaacaaccatagttccttttttcggcgatcaaccattttggggtgagagagtacatgctagaggagttggtcctccacctatcccagttgatgagttttcacttcccaagttggttgatgcaataaaacttatgctggatcccaaggtaaaggaacgtgcaatcgaacttgcaaaggccatggaaaatgaggatggagtgacaggagctgtgaaagcattttttaagcagcttcctcaaaaaaaatcagagtctgatgcagatccgcaaccaactggttntttctctgtaagaagatgttttggntgttcctgattcaaatgcagtntattaaacccccactctttggtaattaatagtgtaaatcacaaatagttactgcatctataggatgtgctggac

SEQ ID NO: 207282 - DNA, 495 bp, Glycine max
  unsure (1)..(495): unsure at all n locations
tttttttttttttttttttttaaaatcaacagtaaatttacatacaaactgaatctcaagttaaatagtacaaatacaagcatgcatgaaattatacaatcacatgacagggtgacaagtccagcacattctatagatgcagtaactatttgtgatttacactattaattaccaaaaagtggggtttaataaactgcatttgaatcaggaacaaccaaaacattttcttacagagaaaaaaccagttggttgcggatctgcatcagactctgattttttttgaggaagctgcttaaaaaatgctttcacagctcctgtcactccatcctcattttccatggcctttgcaagttcgattgcacgttcctttaccttgggatccagcataagttttattgcatcaaccaacttgggaagtgaaaactcatcaactgggataggtggaggaccaactcctntagcatgtactctattaccccaaatggttgatcgccg

SEQ ID NO: 207283 - DNA, 405 bp, Glycine max
gtagatttagcagagtagagatagtgtgaggctagtacctggagagaaaagaggagactataatacatggggaagcagggtctaaacacggaggagcaacaatctgaggcaccgactgcatccaagtttccgtagatctttagggaagccacagaggcttcaacggaggcgctggttttagcagagggtcttctcggagagtacctcaccatgcccgattccgattacagcttgcttaaactccctcgtaccctagaagaccttcaactcctacgagatgaccttgagagctatacaagtgactacactgcacaagtctaggaggggtactgcgtggtttatattttcatgcagactttcatgattccagagactgtgttcatgtcattgcttgctggagcactc

SEQ ID NO: 207284 - DNA, 329 bp, Glycine max
ccaaaaaatatccaaagcatatattggattttattcattataaaatgggcttcacaaccccttgcaagcgcagcaggttgcaaaccaaaaggcattcatgggatatcattcaacgacagagacaaaagcagtgccatacaactgtttaaaaccaaagtaattaatatttcataaacaatccaaacgaaaaaaaaggggattgacacttcgtttttcttatgggacaaaatgcgcggaaacttggcttccgttgttttccttgggcaattgcgaagggcattttcctgctataacaacgttttttattggcttatattcttcaaaaataa

SEQ ID NO: 207285 - DNA, 534 bp, Glycine max
gataataagcaaacatttctctattattataaaatggtttacaaacgagtttatctgaaatttctcaagatctaaaatacatagagcacagtttttttttttccaaactaaagaaaaacagcaaacttttgaatcactttcacgatgtgtagttgtacttgtacacaataataatttctaacaacataaataatgacgagtctttatgtgacaagagatatgccttgtagaattaatgcatcagctagaacttggttagcagcttgtgaaggatggacactgtcccaaaacacatactgtgtggcattagaacaagttcctggtgattttggattacacaacaaggatgttgtctctacagtcccggtaccacagcatcctctgtttgcctccacaaaaccagattttgaaggggattgaacaaggtcatagagaggcttgtaaatgtcgaaaaccgcaatcttaagaccaggaagttgcttttgaagactcgttgcagctgagttgagcttcttgttaaatccttgagcatca

SEQ ID NO: 207286 - DNA, 509 bp, Glycine max
  unsure (1)..(509): unsure at all n locations
aagagtctgacttcaagagaggagaatagttgagagaaagccttgacatgtcagagtaggactcgcctgagttggccttggattgcattcttgagaggcttcccccctcttcgctgagtcgaatcgccgccgtgtgccgcaccttgtgggagaggagtgagagtgatcaccttagggagatgcacatgaggaagaagaggggtagagttattggccctgctgcttatagggagaggaaatggcatgtagcttccaaaaggaaagtagggggtcttaaacatggcaggcaaaagagggagatgagatttatgtctcttcattggcctttccaaaggattagaccaaaggttgaagcaaattataataacccaaagctgaggagctctctgcctgtagactcagacatgaactaggatcttgctctagagtctggcaatttttggttccctgctcaagtctattaccgagagaatggncatgttggattcatgctatcttgctatgatgct

SEQ ID NO: 207287 - DNA, 714 bp, Glycine max
  unsure (1)..(714): unsure at all n locations
ggggnnnnaacgacgctgactcacttnggtaannccccnnnnnnnnnnttttnnnnnnnnnnnnnccnnnnnnnnnnnnnnnnnnnnnnnnnnnnnnnnnnnnnnnnnnnnnnnnnnnnntttttttntttnttnttttttttttttttntggtggtttttntttttttntntttttnnttttttnnttttntttttttttngtttgtttctnttttttattattaacagaaccatacaatattattgcagattaaagaaatggaggtgcagcggatgagggagttattgaaactttggtcaacgttgcaaattaaccgcgttgccctagtgggtggaaaccacaccgccgccagattttgcactcgttaagtccccgtttgcctcttcccctctctttgtccctcccacaatatcttttttcttcttctacctacacagaaaccaaacaagtcattacttataatataatccacaatcacaaaacaaatttctttctattctctttctaattatccaacatgatgaaaacacgttatcgcttgccgcttttggcattcttcgcattcgcttccttcatattcataacgagatcatccctgcttgaaaaaatctcttccaccatgcctgaatattccttcaacaccgaccaggttctgtcaattctatttcgcgaatgaccaacaaccaagagaaaatgttttcctcgcaacaa

SEQ ID NO: 207288 - DNA, 685 bp, Glycine max
  unsure (1)..(685): unsure at all n locations
aggggnnanaacggcgctcgtcagctcntgnannnccccnnnnnnnnnnnntntttnnnntnnnantnnccnccnntnnnnnnnnnnnnnnnnnnnnnnnnnnnnctnnnttntnttnnttttntttttnnntttttctttttttttttttttnntttttttnttttnttttttttttttttttggggtgttttttttttgtgtttggttttcttgttttttctttggttttgtttttttttttgttttctctttttttctctcttttcttttttgggaacaatgactatcttcccacccttttcaaggctgattaccctccttatgggagggactttgttaaccaccaacctactgggaggttttgcaatggcaaattagctactgatttcactgctgacacattgggtttcaagacctatgctccagcatatcttagcccacatgcatcagggaaaaacctccttattggagcaaactttgcttcagctgcatctggttatgatgaaaatgctgctactttgaatcacgcgattccgttgtcccaacagttgagttatttcaaggaataccaaggcaagcttgcccatgtagcttgccagtaaaaaagcagcctcatcataaagattcgttgtatgtgctcagtgctggaagcagtgactttgtgcaaaattattatgtcaat

SEQ ID NO: 207289 - DNA, 675 bp, Glycine max
  unsure (1)..(675): unsure at all n locations
ccaacctctaaaaaattatatactgtaagttattgaagtcaaaaagttttattaaaatattagattattataacccaaccaaancnaagnnnccggctgagtcgaaacaattnnntttnnnnnnnncccnnnnnnnnntnntnnntnnnntttttttttnttttttttttttttttttttnttttttttttttgggggttgttgatattgtttgaattttaaaacggggaaaaggagaagagaatcttttggacattttcccccctacaaaaagatctaatgaagccttctctgagcatttcaccaaggaaggactggtggccttggtggagtataatgaaaagaaaaattttgaggtgaaacttaaggaaatgaagtcttctttaacagcacagttaacagacgaggctgatacatctgaagtcattgagactgtgaagctgcgagttagagatgctaaattgccggacattgaggtggtgcggatcttgtgggatgttttaatggatgctgttcagtggtctggaaaaaatcagcaacagaatgccaatgcagcccttcgtcaggtaaaaacttgggcagaattgttgaatacattctgcaccactgggaaacttgagctggaactgatgtacaaagtacagatgcaatgctatgaggatgctaaactgatga

SEQ ID NO: 207290 - DNA, 599 bp, Glycine max
  unsure (1)..(599): unsure at all n locations
agaaaataaactgtctctcttgccttttgaganccccntgnnnnnnnnntnntnnnnnnnnnnnnnnncncnnnnnnnnnnnnnnnnnnnnnnnnnnnnnnnnnnnnnnnnnnnnnnnnnnnnnnnnnnnnnnnnnnntntntttnnnnnnnnnnnntntnnnnnnnnntnnnnntnnttnggtggggttttttttttgttttnnttnttttttttttnnttttttttnttgttttttttttttcttgttgttttcagcaacaaaacaaagggtgctgtggaacttccaccaaatgtctcggttccagcagtgttggtatttggagattcgatcatggacactggcaacaacaacaacaacttgataacatcagctcggtgcaacttctcaccatatggccaagattttatgggagggatccctactggccgattttgcaatggaaaggttccatcagacattctagttgaagaattaggcataaaagagtttctacccgcatacttggatccaaatctgcagcttagtgaattagcccaccgtgtgtgctttgcatcgggtggttccggatacgatcctttgacatcacanaccgcga

SEQ ID NO: 207291 - DNA, 488 bp, Glycine max
aaaagcaaaaaactgaaacttcttattattgatattagaaattaccatagtcatgttcaacattgaagcatgaatatgtacagaacaatggaaccaaacgagaaaaactacataacccaaaagagctgaagcctaaaagcagagtcagcaccatcatattaagttgtgtactcttaaccacttagaaaagggttttaaaaaaaagttgggctatgattaaatcagtcaagtttgttagctccatgtggcccaattagcttcacttccaacacgaggcatcacttggatctttgtctgagagtcaacattgaagttagccccacacataaatccctcgctgtcaatcctaggcattgctttcatcttctttgttggatgttcaatgctcatgagaccatgctcactatgaaacatacacccattcggaaatggtgcaaatgatttagcacagcttgcttttataagctccagattttcagaaataacta

SEQ ID NO: 207292 - DNA, 604 bp, Glycine max
  unsure (1)..(604): unsure at all n locations
cggcnctaatgcccctctctgttngaannnccnnnnnnnnnnntttnnnnnnnnnnnnncncnnnnnnnnnnnnnnnnnnnnnnnnnnnnnnnnnnnnnnnnnnnnnnnnnnnnnnnnnnnntnttttttnnntnnntnttnnttttttttttttttttgggggggttgttttttttttttttntttttttttttttttttntttttgttttttttacattgaaggatccccggtcaaaagatgcatctcaaaggtatcatgctcatcaatatactaatggcaccgtatgtgatcttacaaataagccacgagagaccgaggtgaggtttgtatgctctgaaccgagagcaatgattagttcaatcacagagatttccacttgcaagtatgcacttacagtgcaatgtccgcagctatgcaagcacccattatttcaagaggagagaccagtatggcataccatcgactgtaatgtgcttccaaaagatcacgtggatgccaaagtgagacgacaaaacgaaaatacggagattgttatagtgaaagacttcgaaaatagtgacttagagtcagaacaatgatgtcaatatacataatgagaat

SEQ ID NO: 207293 - DNA, 535 bp, Glycine max
  unsure (1)..(535): unsure at all n locations
gaaaaaactgcgctgtccgttgatnccatnnannnntttnnnnnnnnnnccnnnnnnnnnnnnnnnnnnnnnnnnnnnnnnnnnnnnnnnnnnnnnnnttttttttnntttttntttntttttttttttgggggttttttttttttttttttttttttttntnttttttntgaaaaataaggttggctagaaagggccaatggccacccctattggaaaagggcatcgatcgttaaatcttactctgaaaaaagagctcaatttgtatgccaatgttcgaccttgctacagtcttccaggctacaaaactcgatatgataatgtcaatctaattacaattcgagaaaatacggaaggcgagtacagtggacttgaacatcacgttgtgagatgtgttgtaaaaagtctcaaaatcattacacgtcaatcaagtttaacggtagctgagtatgcttttcactatgccaaggctcatgtaagagagagggtttctgccatacacaaagccaatcttatgcacaagactgattgactt

SEQ ID NO: 207294 - DNA, 529 bp, Glycine max
cacttcttaactaaattgtatttcatggtaacctcaaatttcgttcatggtgattaatgtacagagtacagaaaaacatagataacgctggtaagtaatgaacatgccaagaaatttatggcgattatggaacaaatttttgaaatggaaaccatccaggacggttgatacaaaaattggttgagcatctaacaatctgacaatgtttcaattaaggcaagctccaacacatgcaagcctcacattattgaaggcaaaaagtatatcacacttcagcaggaatccaggtcacggcagggaggaggcttgggctcacttaacaaagtagtgttccctccttcaggtccactcttaattcggcggggattttgggtgccgtgcggtggcttctcaccctttctcagcttttctactatctcaactactttctctggggttacatcttcaaagtaattataagtatatccctctgatccatttgaataatcagccactgtaatcataggagcattcacacagcatcccatgc

SEQ ID NO: 207295 - DNA, 482 bp, Glycine max
cgaataaatgttcacaacttcacataaagctccaaaagtaccggaacaaggcaagttccacgaaaagaactaccatacacagagcacgaggaaaaaaaaaacaacacagacaaagtaacataacagtgcaaacttctaatcaataatcttctccttcatcaccatcttcttcagttgcctctgcaccgacttcctcataatctttctccagggcagcaagatcttcacgagcctcagagaactctccctcttccataccctcaccaacataccaatgaacaaaagccctcttggcatacatgaggtcaaatttgtggtcgatgcgagagaagacctcaacaccactggtggaattggagatcatgcacacagccctctgaaccttggcaagatcaccgccaggaacaacagttggaggctggtaattgattccacacttgaaaccagtggggcaccagtcaacaaattgaatagtgcgcttg

SEQ ID NO: 207296 - DNA, 469 bp, Glycine max
atcagaatcattttggaccaactttcctaattgctttaaagcatattatttctgcaaacttgtacatattcttattaagacttgaattttcataagaacatcaatgcctctcatcccttttggatgctattcctttaaaaggaaaatcatgtagttacattacatctaacaaataatgaatcaaatttatttttttcaatttaagctttcagctgtctatcttagtagtccttcagtgtaaggtatatctgtgtcaggaagccaagtatttcccaatgtaaaattaaggactgtgaagttccaagcttgagtagcattcaacagagagtaaccaggccatgttactctattgctagtgttagaaccaggtccatagttgttgaattcaccataaaagagagtgtctaatccaactgttccattccactctagccacccagcaggttgaattacatttccatgtatgact

SEQ ID NO: 207297 - DNA, 625 bp, Glycine max
  unsure (1)..(625): unsure at all n locations
gananccgcgctgtgcttcgataccaatattanntttatgcacacntcccntannntnnnaatattnnttnagtttttatttctttccaatttattaatttttttnttataanaaactttctaacccaatgagggagataaaagtgcagaagctcgccctcaatatctctgttggcgagagtggagatcgtctcaccagagcctccaaggtgttggaacaacttagtggccaaaccccagtgttttccaaagcaaggtacactgttcgttcctttgggattagaagaaatgagaagattgcatgctatgtcactgtcagaggtgacaaggcaatgcaacttttggagagtggtttgaaggtgaaggaatatgaacttctcagaaggaacttcagtgatactggttgcttcggctttggtattcaggagcatattgatttgggaatcaagtatgatccttcaactggtatttatggaatggatttctttgttgttctggagcgacctggctatcgtgttggacgtcgccgaagatgcaagtcccgtgttggaattcagcaccgagtcacaaaggaggatgctatgaagtggttccaggtgaaggacgagggagtgatccttaacaa

SEQ ID NO: 207298 - DNA, 543 bp, Glycine max
  unsure (1)..(543): unsure at all n locations
cgcgtcgtctcctgaanccaataaaanatttaanagaaaaancncaaaantnnanaaaattattttatattattctatccaatttctattttttttattcattttacacatctttattaacccgggggacttttttcttaaataaaccaaaaacccttgtgctattctcattctctggaattattatggcacataagagattcatcattgaggtcgagagagcgaatgaggccactgatggaaggccttccagaggacctgtctatcgtagcctattcgccaaggatggattccctgctcccattcaaggtctagaatgttgctgggacctttttcgattgtctgttgagaaatatccatcaaatccaatgcttggtcgacaggaaattgaggatgggaagccaggcaagtacaagtggctaacatacaaagaagtatatgaccaggtgatgaacgatgggaattctatccgcagctgtggttatggaaaaggtgtaaaaagtggtatttatggcgccaattctgcagaatggattatgagca

SEQ ID NO: 207299 - DNA, 615 bp, Glycine max
  unsure (1)..(615): unsure at all n locations
gaanaaactgcatcatactttngatgcccnttgnnnnnttnttnnnnnnananncnccnnnnnnnnnnnnnnnnnnnnntnnnnnnnnnnnnnntnnnnnnnnnntttttttttttnntnnttttntnnntttttttttggtggtttttttttttttttnttcctttttttcttttttttttttttttttttttatgatgacacataaacccggcgaccgagaaagaagaaaccgacttcaaggttcccgaaacgattacgctttgcgttaacaactgcggcgtcaccggaaaccctgctacgaataacatgtgtcagaagtgcttcaccgccttcaccacctctaccgccaccacgtccggcgccggaggtgccggaatagcttctccggctaccagatccggcatctccgcgcgtccactgaagagatcttttcccgaggagccctcgccgccggcggatcctccgtcttcagaccagacgaccccgtcggaggcgaagcgcgtggtgaaccgctgctccggctgcaggaggaaggtcggactcaccggatttcggtgccgatgcggcgagctcttctgcgccgagcaccggtactccgaccgccacgactgc

SEQ ID NO: 207300 - DNA, 650 bp, Glycine max
  unsure (1)..(650): unsure at all n locations
cctaaaaagacaaatatatatagtaataatataaataagcgagccaaaaaccaacaaaaaatatataatacaaaaaactatcaataaaatacctacaaaattntaatagnnnnntcgcnggaaggtaagantnccaaaannnnttnnnnnnnnnnccnnnnnnnnnnnnnaaaaaaaanaanaaaaaaaaaaaanaaanaaaaattattaaaaaaaaaaaaattaaaaaaaantataaggggtaaaaaaataccggcggggatacacctccgagccggagccggagcgcaaggtggccgatataggtgccggcggcgggatcgggcaacccctctcccttctcatgaagctcaaccccctcgtgtccagcctctccctctacgatatagccggaactaccggtgtcgccgccgatgtcagccacatcaacaccggatctgaggtagtggggtaccaaggtgacgaagagctcggaaaagctttggagggtgcaaatgatgatataattcctgctggtgtgcccagaaagcctggaatgactcgtgatgatctttttaacatcaatgctggcatagataagacactgtgtactgctattgctaagtactgccctcatgcccttgttaacatgataagcaatcctgtgaact

SEQ ID NO: 207301 - DNA, 511 bp, Glycine max
gaagggtacaacaccctgcaattacattacgtgaaaccatacacagttaaaagggaccattattaatggaatggccaaaacctaaacccggttataagatcgttgaatctctttagcaacaaaaagctctcagacttaaattattaaatcatggcgtatacctactctaaataaaacaacaaagtcgccacaccactgccggcaacaatacaacaatggttctgagattgcaaaatttgatttggttcttgaaggaataacattaacattagcctaccagacacgtatgtgataacatgttcaattactggttggcaaatttgattcccttctcaattgatgatttgagttcaggcttaaggctttcgaggccttgttgctcaaaatctgagagaggtcctaagcccaaaacttcctccactccattcttcccaagcctcaccttggaagcaaagtagggaagttcagtaacagtggattgcacgaatgagcactccacaacatctgggac

SEQ ID NO: 207302 - DNA, 678 bp, Glycine max
  unsure (1)..(678): unsure at all n locations
actaacacaataaaagaataataaaaaacgatactatgtaagagaaaagaatagaaagacataacaaaacagaaaaactgagagaagatacaaaaatacaaaaagaaaagctcttaaataaaaaaannaagggcgaatggtagatnncanaaannanntttnnnggacncnnnccnnannnnnnngaaanannnnnnagagaaaaagangggaaaaaaataggatttagaatggggaaaagaaaatggtaaataggtaggaagtggtgttgtttttgtgttagtgctatgggaaggcaaccctgctgtgacaaacttggggtgaagaagggtccatggactgctgaggaagacaagaagctcatcaacttcattctcaccaatggacaatgctgttggcgcgccgtgccaaagctcgctggcctcaagcgctgtggcaagagttgtcgccttcgtaggacgaattatcttcgtccagacttgaagagagggctactcacagaggcagaggagcaacttgttattgatctacatgcccgtcttggcaacaggtggaccaagattgctgccaggttacccggaagaacagacaatgagattaaaaatcattggaacacccatatcaagaaaaaactccttaagataggtattgatcccgtactcatgagcctatcaaaaa

SEQ ID NO: 207303 - DNA, 590 bp, Glycine max
  unsure (1)..(590): unsure at all n locations
aggaaaaactgcctgcatctctgtancccacttnnnnttntnnnngnnnnnncnncnnnnnnnnnnnnnnntnnnnnnnnnnnnnnnnnnnnnnnnnnnnntnnnnntttttttntttttnntttttnttttnnttttttttttggggggtttttttttntctttttttncccttgtgttttttctttttgtttttttagttttgtattttgtttaggtgatcctttgacaacccacacatttcctacacactgagaccacaggccttttggatgcttcacaccgtgacttgagaagagccagggctgcagcactgaacattgtcccaaccagcactggagctgccaaggctgtgtctctagtgttgccacagctgaagggcaagcttaatggaatagcgctccgtgtgcctacacccaatgtttcagttgttgaccttgttgtgaatgttcagaagaagggtcttactgctgaagatgtcaatgcagcattcagacaggcatctgatggtccacttgaaagtgtgttggacgtgtgtgatgtttcacttgtgtctatcgacttccgctgctttgatgtttcctctacta

SEQ ID NO: 207304 - DNA, 385 bp, Glycine max
ccatccgaatccattttatttatatataaaaattatatccaaaggaaataaaaggattttaaaagatcctatttttaaaaatttgaaggggaaattataaagtttttaaaggattaaccaatttttttctccccggcccgggagaaaaaagagtcccatctgttcttgaaaagcttccttaaaaaggacttttgtttccccagggaatgttttggtaaaaaaaataatttttttgaatggggggttattcgggtttaagtaagcccgtacctcaacaagaaatttccttacctggccaatttttaaggaatcaagaaaccccttcgttccagtaaaaaaagttattatctggtcttccccggaaaaaggagctgattgggattgt

SEQ ID NO: 207305 - DNA, 506 bp, Glycine max
aaaatccaaaagatttgtttaaacaaacataattgttgaaaatattagtccaatacaaccatctaaatgtatttagcactttatttaaatcattacatcattagaagggggtcactatcatccatattattcatctgaagtccatcaacgttggttacagtgggcttctgcactcgtcttgggctataagagaacgcgatcttgtttgtcccagggcagcagaccctcgtgggacgaatggcgccattcaaatgacaatatcagtctgaactgggtaccaactatcacccaaacgattaatgccttgcccttgcaggcgcagcaaaccatgctggttataatggacctccttcacattaagaaacactccaggttgggaatccattatgtggatattgcagtgatatgccgcagatgccggaattagctcccttagctcaaacatttcggctggagccataaggagtggctgcttattagctgaaccaaccaatggctctgggata

SEQ ID NO: 207306 - DNA, 582 bp, Glycine max
  unsure (1)..(582): unsure at all n locations
accccctccacctcctcccccccttctcatcttcccttacacccctcccccacttctcccttccccctccacctccccaaaaannnccgccccctccaaccannnnnttnnnnnnnnnnnnnnnnnnnnnnnnnnnnnnnnnnnnnnnnnnnnnnnttttntttttttttttttttaatttatattggggactttctatgaggaaaaagatgtcaagagctcaagatggaatactgaagtacatgctgaaaatgatggaggtttgcaaggcacaagggtttgtttatgggataattcctgagaaggggaagccagtgactggagcatcagacaatcttcgtgaatggtggaaggacaaggtcaggttcgatcgaaatggtcctgctgccatagtgaagtatcaagctgataatgcaatccctggaaagaatgatggatgcaattccattggtccaactccacacaccttgcaagagttacaggatacaaccttgggttctctcttgtcagcacttatgcagcactgtgatccccctcagaggagattcccattagagaagggtgttcctccaccatggtggc

SEQ ID NO: 207307 - DNA, 396 bp, Glycine max
catgcacacaaagtaaaggacaaaaaaccatgcaactcatcatctcatgatcctgaagtgagaaagggaccatggaccatggaagaagacttgatcttgataaactatattgcaaatcacggagaaggagttaggaactccttagccaaagcttctggtctcaaacgaacgggaaagagttgtcgactccgttggctaaactaccttcgtcctgatgttagaagaggaaacattacacccgaggaacagcttttgatcatagaacttcatgcaaagaggggcaataggaggtccaaaattgcaaagcatcttccaggaagaatctgccatgagattaagaacttctggagaacaaggatccaaaagcacattaagcaagctgagacttcacaacaa

SEQ ID NO: 207308 - DNA, 417 bp, Glycine max
ggcaagacattaattaataaaaattataactcatcagtagcaaaaacaggtcaaaacaaaattacgatgccaatttgggaaggactaacaggataatttgcactaatcgatgtcctggggctcaaaacatcaccttaaatgggtcccgccacacataaaagcaactaaagccctataaaaatttggaaaacactaaaatcaagcagccccctttcccttttttttttggaggtttttcatgtaaaactccaactccttaccttccagaatgtggccatcagctctgccacattgaccaggtcttgaggaaatgcaagcaagcaaacgcccaccaccaaactggtcctcaatgggagcatcaagctttcgatctttctggcgcttctccaattttctctgacatgggtactctttttg

SEQ ID NO: 207309 - DNA, 410 bp, Glycine max
aaccctcaagataccatcaatgtgactctccatttatagcaggatttctctacttatcaatcaatgaactatactattaatatctataaagaatgaagaccgagaggtatgtttcaagtgttggtgtggaagttgttctgccaccaatagatagaaaagccccattactccggtgtgctcacggctgctgctgtaattagactctagagttaaagtttcaccatcaattatatttacagaaccaggtcgaggataacatgtgctcattcctacaatgtagtctgcttcatttcctgcttcttttccctttccataacttggtatcgaagaacatataactcttccatcctgtccatatagagttgatccagttccacctgaatgttgatgagcaacaccatagatgacat

SEQ ID NO: 207310 - DNA, 331 bp, Glycine max
catgaaggaagataattcttatgactagtcgtagggaacacaggcaacggaaatagtcttgaatataaaacaaacaagtatatagcataggcaaatctacaagagagatctttgataaacaaacaagcatagcataaatccacatggcagatctttgattcagattttttgagattaacaaaatcattcaaatgcccattggttttcccgacgaacttgctcttcctcctcaggggtgaagccattcttaatgttaacagggcttgcgaatttcctctggagccttccccttgatcatgtcggctacagttagacatgtaaggtccagcag

SEQ ID NO: 207311 - DNA, 671 bp, Glycine max
  unsure (1)..(671): unsure at all n locations
tgggtttctcatgctcccttgaanccntnnnnnnttttnnnnnnnnnccccnnnnnnnnnnnnnnnnnnnnnnnntnnnnnnnnnnnnnnnnnnnnnnnttttttnnntttttttttttttnttttntttttggtggtttttttttttttnttttttttttttttttttttttnttttttttcttntgattgggttgtggtgattatatccaccgaacccttttgtgattgctttctggtttgtgatcagagaatcttggatccgattttgcgttgtttgcttgcctctcgtcaattgaatttctcccatttgtgatcaatatgtatcgctctgtttatattattatttttttaataagaatttgtaagttgaagatttatgttttctatttgacccgtcaataatttgaatatgattgtcatatttgatcatttgatattataattctcttgttatttgctttttacgtacactcactgatttcatctttgaattggtgcattatgtctgtttgtgttgctttgttgggtgttctgttctaactagactnttaggattgatgatttggtgagatcatcccttgttagataaattctagattgtgaatgaaatgttttatgaccgcgaaatctctcgattgttcaggttcagtgctgtgatagttgtaaaa

SEQ ID NO: 207312 - DNA, 628 bp, Glycine max
  unsure (1)..(628): unsure at all n locations
gggatgccgtcgtcgatccannnnnnnttntgnnccnccccnnnnnnnnnnnnnnnnnnngncnnnnnnnnnnnnnnnnnnntnnnttttnnnncccctcttccanacagggaagtgctgggggaactgactatggtgcatacacttatgagaatcttgagagagagccttactggccatcagagaagcttaagatttccatcactggtgctgggggttttatcgcgtcacacatagctcggcgcctcaagacagaggggcattacattattgcttctgattggaagaaaaatgagcacatgactgaggacatgttctgtgatgaattccatcttgttgatctcagggtcatgaataactgcctcaaggttacagagggggttgatcatgttttcaatcttgccgcagacatgggtgggatgggttttattcagtctaaccactctgtcattatgtacaacaacacaatgattagcttcaacatgattgaggctgccaggattaacggcattaagaggtttttttatgcctctagtgcttgtatctaccctgaattcaaacagttggaaactaatgttagcttgaaggagtctgatgcatggncagctgagccacaagatgcatatgg

SEQ ID NO: 207313 - DNA, 375 bp, Glycine max
agataaactgtttcatcaattattttttaatagcgaacataaggcagaaatttgctacgttgtcatcaatgccaataattattacatctaaaatttcttcaatcaagggtcattaatctgtgttgtaagtcaaatcaatgacctgtacacagttatctaatttcttgagtgtcaaaaatgagaaacacgggcataacatggacatctgacactgtcattccatacagatacttgtggaaaatgagtatgaaacattaacaagcaaagtcaattcatggctcaggttgcattttctcgcattcttcccgtattgactggaaaagaatagttgacaaatatctttcaccaaagcttgggaagacaaccccaataagc

SEQ ID NO: 207314 - DNA, 656 bp, Glycine max
  unsure (1)..(656): unsure at all n locations
ggaaaaacgcgcgatactccgatnccaanttnanantttatgcaccccctccttaaattatatatttnntttaacccccttctttgtttaactttttttcttttctacccaccaaccaataaccatgcacatggttttctctgcataacttcttccgcccctgccaacatgacttgcatgcatgtgtgtgttaactcttcttcacttttacatgcatgcttgaggttttgaggtttcaacattagatgggcttataaagtcatcatatacacactcacatatatatatatatggttaatataaatatttgttctcaagaaggatttagttgattccattgaagattgaatgcactaccaccagcacctttaagtggaaggttaatttctggtgtaaatatatcaacgagctttatctacataaattaatgtcgaccaaggtgaaaggcatccttaaaggacttagatacatatcccaaatattcgaagagaaagaagaagaatttcaaattgggttgccaactgatgtaaagcatgtagcacatattggatcagatgatccatcagcaaatgcaccaagctggatgaccgatttaaaggaggaaaagaaccctcatcaggaaaccctactcaaacagttgaagaacgtgagaaaaa

SEQ ID NO: 207315 - DNA, 536 bp, Glycine max
  unsure (1)..(536): unsure at all n locations
gaanacctgctctctctgtaaccacnnnnnnntttncgnaaancccntnnnnnnnnntnnnntnnttnnnnnnntttntttttttnttttttttttttntatttttnnttttttttttttttttgggggtttttttttatgtttnttccccttttccttcactttccttcttcttcctctcctttgttccatgaaacaaaactcaaagtgttggataggagggtgaggataacagagctggtgttaaggtgtgtgaaccttggtctaagagctgctgcaattgctcttgtggtgactgattcccaagccaaggaatttttctcctttcacaagaaagctaaatttacagacatgacggctttagtgttcctggcaaaatgccaacggactaactgttccgtactccataatccaaagattgcgctttgttgtgagtatcattagaggaaatgtactcttcaacaagccctttgcttggctcatacactctgatgatcacgtgatggcatatgtgactgtcgctgcagcgatggctt

SEQ ID NO: 207316 - DNA, 548 bp, Glycine max
gatcatcagctaggttctatatatagtggaatgaatattctacatttgtgcttaaatgaacaatttacaatgagggaaaccacatgaatatgcataaattttttcatgaaaaaatgtgacaaaaaagagaagaaaatcgggttggcctaaatatctgaactgaagtccacttcaggttgtatattgccatgtataatccagaaccagtcaatgcttcagtttctgaaacaaagcttctatattgaaatcatgctaagttgtagagaatttgatcagatccagtgctagtgcctactaatccaagacttcagatggccaaaggcatttccaagtggcaatctcagcctcgctggtaatctttcttattccgccataaaatccatcagcctcgttcccctcctccctatgatctttcctactgacagtggtcagcctccatcgtgagcaggagtgtaatgattgaactctagcaccacagtgtcactactatgacatcggcaataattttcactcccattgcatgactccaagtggcctacaacaccata

SEQ ID NO: 207317 - DNA, 469 bp, Glycine max
  unsure (1)..(469): unsure at all n locations
atagcaatcaaattagttcattctctttgcgcagntccctacctctcctttcaagaagcagatcttcgtcaagaccctcaccggaaagaccatcacccttgaggaggaaagctctgacaccatcgacaacgtcaaggccaagatccaggacaaggaaggaattcccccggatcagcaacgtctcatcttcgccggaaagcagctcgaggacggccagaccctcgccgactacaacatccagaaagagtcaacccttcaccttgtccttcgtctccgaggaggcatgcagatcttcgncaagactctcactggcaaaaccataaccctagaagtcgaaagctctgacaccattgacaacgtcaaggccaagatccaggacaaggagggaatccccccagaccagcaacgtctcatcttcgccggaaatgcactagaggacgggcgcaccctcgccgactacaacatgcag

SEQ ID NO: 207318 - DNA, 485 bp, Glycine max
  unsure (1)..(485): unsure at all n locations
ttaagatcaaaggacttccttattaggaggctcatgcagaaccttacatgaagaatttagtaacacgcgatgttgtttccggtccattgataacgttttctggcatcgaaaaggtagcaaatatattgcaagctttgaatactactggacataaagggtttcctgtcattgatgaaccacctttctctgattcaccagagttatgaggacttgtactgaggtctcatttactagagttactgaaggagaagattttttcaagggataggggttttagcaaatcaaaggatcttccaaagaatttctactttggattttggaaaagcgggatctggaaatgggatcaaactagaggatcttgatatccaagaagaagagatggatatgtatgtagatctccatcccataactaangcatctccttacactgaggntgagacaatgtcactagccaaagctgctattcttttccgacaacatggact

SEQ ID NO: 207319 - DNA, 493 bp, Glycine max
aaatgatagtgcacactttcataaatcttagaattgttcttgacattttatacaatgcagctgtgtgctatattctttctttcataagcacttgataacaatacattatccatgaacatgctgaaacttattaaaacaaagtgacttagggaagaaagcaatttagaacactttggaacaaatttaattattgctgggctttgaagggctgatatttcttgagatcttgagcgaggccttggatggagccagcagctgagataatagaaacgatcaagcaagcccagctcaatatcttgagccatgtccaagtgaaggaaaacttttgcatctttgactgcttaatgtacatctctatggggaagtaaaccgctaatggccaaaatgacagtgaaccaatcaggcctaagaagtcattgaagaatggaaacatcataactatcaaagcagtgatgatgacatatggttgttctcataccaccctgaaaaagtt

SEQ ID NO: 207320 - DNA, 584 bp, Glycine max
  unsure (1)..(584): unsure at all n locations
cgcttgtcggtcgatacaaatttaannttnnggcncnncccnannnnnnnaattnnatnaaggaaaaaannatttnaaccctaatttttgtntntgtttgttggaagagctcatctctggtgtcttcgtcatcttccccaaccagagatgcgccccacaacagatacttactaaagctttcaactttccaacaccctttcagatgttagccaaggcccataacaaaggggatggatctaagtccctggctaagatactggcaaaatggaaagaatataatgcccagattgattccagcagtgatgcagataagccaattcgcaaagttcctgccaaaggatcgaagaaggggtgcatgaaaggtaaaggggggccagagaactcacggtgtaactaccgaggtgtcaggcaaaggacttggggaaagtgggttgctgaaattcgagagccaaacagaggcaataggctttggctaggtactttacccactgccattggagctgcccttgcatatgatgaagcggccagggcaatgtacggttcctgtgcccgtctcaactttcccaatgtttcagtttccagtt

SEQ ID NO: 207321 - DNA, 364 bp, Glycine max
ggaaaaaaaaatatcagccccccaaattggtaacaaacaggggtaacattaaggggacaatagggttcaacccaaaccaaacttatttttaaagggtattacagacccattacacataaaatttttttttaaaagggtggggaaaatccaacattgaacattacacaaaaattagctccagcttaaaaccccccccgaagacccaacaccaagggcggaggtgactccttttggagggtggaatcaggggggggccttccatcctctagctggtggccagcaaaaaaaaacctttggtggtccggggggaatccttccttggccgggaacttcgccttcacattggcaagggggggggagctct

SEQ ID NO: 207322 - DNA, 579 bp, Glycine max
  unsure (1)..(579): unsure at all n locations
gattaggacgttgcacgtctgcagatgcattttatttgtacctaagaattaaagatacactcgagcacacagccatttcagtcttgagcacttgaaaagttaagtccacataattcattaaagacattggaaacggcaaaagagtatcagcaactgaggctatccgaagccagagatccaaaattacaaaaggcaaaacgataaatacggaatgaatatgcaataaaattctatcatatgatgaatcaaaattcaaaatcagtctacccgttgatcaactcctgcatatgtgggaaacgagatgcaataaaattctactaccatgagatgaatcaaaatccaaaatcagtctactgggttgatcaacttctgcatatgcagtttcaaggtgcgcttgctctgcttcttgtacctccttctcagttttcctgccctttttganttgtagtatacactcataaaggtcccaacagctccatacttcctcctagtatgctcatataaaccagcatcaaacatccttcagaagtttttcttcgacagctctgacacagcatactgtggctgaaaccatgattt

SEQ ID NO: 207323 - DNA, 637 bp, Glycine max
  unsure (1)..(637): unsure at all n locations
tgaaaacacggcctgctcgctcgtannccccnnnnnnnnntttnnngnnnannccnccnnnnnnnnnnnnnnnnnnnnnnnnnnnnnnnnnnnnnnnnnnnnnnnnnnnnnnnntttttnnnnnnnnnnnnnnnnnnnnnnnnntctggggggnttttttttttttttttcccccttttttttttttttttttttttttattgtgttcgtgtctaacaatttatctcttggagaacgtcaaattgctgcacagtttcaagaaattccattagatcttcgtatggtggaagctgagcgaattggatttgatatgctgaaggcaactgcagttgacaaaattccctcagatttagaagggatggaagcatcaatgcaacatctgctagtcttgattgatgacatctacaaatatgttgacgatgttgtggaaggacgagtggcaccagacaacaaaatcgggagatttatatcagaagctgtaggttcccttcccaaattgtccccatcagtttttgataagcttgtgaatgacagtttgcaagatcacttgcttttgctgtatttatctagtatcacaagaacgcagcttagcttggctgaaaaattgaacacagctgctcagattctgtgattcttt

SEQ ID NO: 207324 - DNA, 490 bp, Glycine max
agataatggagagaaagctttttgctcattttctttcaaatacagattacatgaaaaataacaagtgaacgctacactgcataccttggacaataagtgaacttacctagcaaagaccagcacaaaacataaataaaaaataagcgaagtaaaagtgaagtataaaacgctgacattccacgtttctggaaataagacaagaaaagaaactcagaaaaatttgacttcggcgataaacaagcggaagaatcacagaatctgagcagctgtgttcaatttttcagccaagctaagctgcgttcttgtgatactagataaatacagcaaaagcaagtgatcctgcaaactgtcattcacaagcttatcaaaaactgatggggacaatttgggaagggaacctacagcttctgatataaatctcccgattttgttgtctggtgccactcgtgctttcacaacatcgtcaacatatttgtagatgtcatcaatc

SEQ ID NO: 207325 - DNA, 599 bp, Glycine max
  unsure (1)..(599): unsure at all n locations
aaagaaaaaaaagaataaattaaaaaaaaaaaaataataattaaataataaaataaataataaagatattaaaaaattaatataaaaaaataatttctaaaaaaaaagnnnnaaggggaaagggtagaanncaaannnnnntttnnnngnnnnnncccnnnnnnnnnnnnnnnnnnnnnnnnnnnnnnnnnnnnnnnnnnnnnnnnnnntttatnnnntttttttttgttgtttcaatttggggggtataagaatgaaatggttcaaaataacaaaagttccctattcaaaagaaaactgggtttggtgggcaatacagaaatgaggtggcatgtgccaaatggaggcttggcgtggaagcaaacaacgtagtcaagtggcaaactgttacagcagattgcagaaagtacatagatgacatacgttctaggagaccaatatagatcagattccaaaacagttaaccaacaagcttatttctatgctaaatcactgaaactcaccaacaaagatgtctttgtcttggacgatgacgacactactctctctaaaatccaagtattatgctaaaaatggatttggtgtggaaccacacaata

SEQ ID NO: 207326 - DNA, 536 bp, Glycine max
aacttggaacggacaatttcttaatggaacaagagctcataattcatgaaagcctcgaaaagggaaaacaacattgttcagtgcccctacatgactaagtaataatactcaggatcttatttcatagaaattaaggagcaacttagaggcttgatttgagagcttaatcatagtacaagggattaggcagcttaaaagtcctagtccctttgttgcttcccaggaggtcactccattggtctccaacgtttccaatgattctgtatccctccttctccagcttctctctctcagctgatttgtattcaaatgataacttaccagagtactcagatggatccctgagaattaacttctcccatgtgttgaatccaacctcctttaagttcttggctgttacatcccctagactcagtggtctttctgataagaatacaatcttgatgccgagagccaacagtttgttgtacattataagagtctctggcagtgcgaatgcctcgccatcaagaacccagttcttaaacgccgtcgta

SEQ ID NO: 207327 - DNA, 357 bp, Glycine max
  unsure (1)..(357): unsure at all n locations
gagactttgggtagggtttcgtctcaactcaacaaacgtcgtcgttctcccatttccaatctttctccaaaggcttcttctgcttccttaatcaactcgttgacttgctcttcgcctgcacccactcagcactgtttcgccttcacccgcaccaccgncaccgntaccgncacgtnactgagacaattcaacagccaccgtccgcccccactcaccacgaggatctcctcgtcgccttccaccgtagtctgcaaagctgtctccgttaagccccaaaccgaaaccgaaggtctcaacattgctgacgatgtcacacagctcatagggaaaacgccgatggtttacctcaacaatatc

SEQ ID NO: 207328 - DNA, 526 bp, Glycine max
  unsure (1)..(526): unsure at all n locations
ganccctccctctatcgaaccctttnnnnttttttcggtaanncccnngggggnnnnnntnanntntggntattttcttttntnattttttttttntcttccngccnttttcttttctcttgggggtatttttattaaaattcccccctattctccacctccaaccaaatctttacatttaatgtttccctggatcaaacatacatctcaaaggtatcatgctcatcaatatactaatggcaccgtatgtgatcttacaaataagccactagacaccgacgtcagcatcagtctactctaaaccgatagcaatgattaactcaatcacatacatttccacttgcaagtatgcactcacaattcaatgtccgcagctatgcaagcacccattattctatgaagaaagaccattatgccataccaacgactgtcatgtgctttcaaaacatcactttgaatccaaagtgagaccacaaaacgaaaatactgatattgttatagtcaaagacttcccaaatactgactt

SEQ ID NO: 207329 - DNA, 525 bp, Glycine max
  unsure (1)..(525): unsure at all n locations
cggcccacccctctctttnnnnnccnnnnnnnnttttnnnnntntnccctttttttnnttttttttttntttttttttttttttttttttttttttttnnntttttttttttttnnnntttttttntttttnttttttttttttgggggtgtttttttttttttttttttcttttttttttttnnttttttgttttttttcttaagtattttatcaagcaaagaactctgtggctctccatgaaacttatctccatcactgcgttcttgcaagatactatcaacctaaatatgttaaaacacacacaaactattatctccatagaatacttcataactctcatttcatatttgagaagaacaacttcttatgccacataaatactctattacagcactttgcccttggatccgatacacgagacacaactactgatgttccaaatccttttgacatagctctatcggatcctccacaaattcctgaagggtatgaacaaaactagatgttcaatatccatgccat

SEQ ID NO: 207330 - DNA, 548 bp, Glycine max
aaaaccataatgcataatagagatcaattcataaataagtattcagcaagcaatttatggatacaaaagacggctccgataaaatttaatgttactaagcaaacaaaggaaaaaagtagcagagtgggttttccacgagataagagatacgcaagtcgataagtatcataaaagattacagaagaaaaggaacagactcttctcaactatatcctatttgctgctgttgttgaggagcttggtaaccaggatatcccggataactgccatacatgttgggatcctgtccagcaggagcataaccataattttcatatccttgagcagcatacccataatatccaccaccagaaccagcaccagcagcaccattccactggtttggatctgcctgagcctgtttgtttgaaggactgcgaccccatgaaagacgcacattttgtccacccaacagggtcccattcaacacccgaagggcctcttcagcacagctcctgtctgcaaattggacaaacccacatcggttgcctgctggaatcttcacatga

SEQ ID NO: 207331 - DNA, 393 bp, Glycine max
aatatatggtacaacaaccatattatttacgataataggagaatgcacatgtagtatataagttactatatatttcaatccataactaaattaattcttaactcacatcatgcattacaaacaccaaacttagactactcatataaacagacctaatgatgttattaagcctgaacacactctacaagagcttaggtttatatatcatcatatatatgatttatataggcatgcatatagctaggtttaatctccattgagtaattgcatagacgaccagatatcctcgatgctccaatagttgttgttgtcgttggtggtggtacaacaacttgattgatcagtgattgtagggaattgaggttggaatggctcaaaagttccttggtatga

SEQ ID NO: 207332 - DNA, 672 bp, Glycine max
  unsure (1)..(672): unsure at all n locations
aaagagaaaaattaaaaaaagaagaaaaaaaagaataaatatataaaagagggtaggaaaaagaagaaaagaaggaaaaaaaaaaaanaagnnaaggggaaggtagaaacaaaannnnntntnnnnnnnnnncccnnnnnnnnnnnnnnnnnnnnnnnnnnnnnnnnnnnnnnnnnnnnttatntnnntnnntttntttntttttnnttaacagggttttgtttggtntttaaataagagcaagagacagccagttcttcagcaaagtcacccattaagacaaaaacagtgtcaaagagacagaacttcccaacaaagaagcaccagaagggaacaagccagagcaacaaccacctttcattccggagactgaaaacagctatggcctatatggtcatcatgatgagtataaccaagtcccttccaccaccaccaaccccacttcttaccacccctacaagaccgagtttgagaactccaacaacaagtattacaacaatgatgcctataacacaaggttatacgaaaccgggtacaacaacaacaaggattcttatgagggtaaccaatatgagttaagtgacacaaagtacacagaagaagaaaacaacaacaacaacaacaagtatcacaactcctatcagaacaacaaccagaagtactacaacaacg

SEQ ID NO: 207333 - DNA, 575 bp, Glycine max
  unsure (1)..(575): unsure at all n locations
gaaaanaatctgccctctcacctttgatnnccccttnnnnnnntnttttnttnntatnnnnnctcnctnnnnnnnnnnnntnnntnttnntttttttnntttttttttttttnttntttnntttttttttttttttttntntntntnncnnnnntnnttnntnnttnttttttttntggtgggtttnnttttttttttttttttttcttttntttttttttttttttttttaattttttcttttnntttgttggactccagtccaaatatgtcgaagaaaatttgaggaacaagagtgaactgcttctcaaatccaacccagttcacaagaaggttccagtgtttattcacaatgagaagcccataacatagtctcttgtgattgctgaatacattgatgagacatggaagaacaaccccatcttgccttctgatccttaccaaagagccttggctcgtttctggaccaaattcattgatgataaagtttttggtgctgcatggaaatccgctttcacagctgatgacaaagagcgtgagaagaatgttgaggaagcaattgacgctctgcagtt

SEQ ID NO: 207334 - DNA, 581 bp, Glycine max
  unsure (1)..(581): unsure at all n locations
gtaacctcctctatcgacccccnnntttntnnnnncccnnnnnntnnntnnnnnnnnnnnnnnnnntnnntttttttttnttntttttttttttttttgtgggtnttttttttttttttttccttttttttttttttttttttttcttttacttttgtcttttgctgtattatgtacccaaacttgagctacactgagtcaaccaccaccgagaccttggtcatgggagtggcacctgttaaggctcaatttgagggtgctgaaatgggtgtgcccgctgagaacgatggctgcaaatgtggaccaaactgctcctgcaacccctgcacttgcaagtgaggtgttgggagagcaagcttcaagcagagatagcccttaattaagaataatgataaactattaatgtgtaactaaaaacttatgtattatgtctgtgatggttctcgtgcactctggtgttttgtgttaaacaaacatccttagaataaagtggtcatgtcttgcctttcagcaagttcaagtgttttggacttgtgatgggtgtgaaaagctcatggttgcttcttttttttttttttaat

SEQ ID NO: 207335 - DNA, 456 bp, Glycine max
atataacacccacaaaatttgatattttcaataaattttaaccaagagaaaatacatttaaaaagtggaaaatactcctccatttagtggaattttccagtaggagatatgaacacattgtgtctacatcagtaaatggggaggagtattttccaccgtattgaggtatatttagctagttctggccctcgcaagtaaaatgttttgcacatgcttctcttatttggttgcaaagaaaactaagtaaattgcccaacatcattgcataacgcggggttcaggagttctttgcaataaaagtgccgtttaaacagggctaatccatacccttcatcacgaaactgaaatgacaaacattgattcaaaacctgccttaaaattaacataatatcacagaaagatcgagctatagttgacaaaactgataacacactcctaaagtgaactcaatctaac

SEQ ID NO: 207336 - DNA, 430 bp, Glycine max
gagtgtaatgtaataatttaatatggtacacacacctacacgacaagtttcgtgagctgcagaattagaaaataagcaatacagacaatgaacaaggaaactaagaaataatatatgcaaaactagagattttctttgtgtggttgcatggatatatcaagcatcaagttgaagcctccccattcaagcgtattctcttaggacctttttcttcaccttggttgcaggctgttccgatcctgttttcattggcctctaccgaacatcttttgtaaggtttaaaccctgttggacgagtctttagctttcctggtccaagacctatgattagcagtccctcctcctcattgttatctttgacaaatagcagatttttctgcaccccatcacaattagaactgcatttcttgctttcaaggtcttcatcttt

SEQ ID NO: 207337 - DNA, 412 bp, Glycine max
ctctctccaagttcatggattcttcaaactccaaaggagcatcacagaggctccaggacttggctcaacggctccgcctgtacaaacccccaccattccctgaagacatcttggatcagatcatggaagagaagggagataaggtcgtctcagaagtgagttacacgaaatcagccaccccaattgctcaaaacacagcaaaaatcggatacaagagagctgctgtttcgatctgcatctttgaaggggatgctggggatctgagagtgatactcactaagcgctcttccaagctttccacttactctgggcaagaggccttgcctggagggaaagcggaggagggggatccggatgacggggacacttgaaaaagagaggcaatggaggagattgggttggatcctgaact

SEQ ID NO: 207338 - DNA, 448 bp, Glycine max
aatttctctctgcttcatttcttttcattctctaagggaattcaaactcaacatagagtgcaaccatgccaccctctctggccacaggtgtcatcatgagctcgaaactgcaaggatcaaaggatagctgggtaatattgatgcaaacactggtgatcctcaagtaggaagggacactgatcagtttcttgtagatattcaagaagcgacactgattatgctcagtgagatcagaaaaggagagacttgcacccggaggattcaacttcgatgcgaaattgcggagtgagagcacagatgttgaagacttggtcatagcccacattgttggaatggataccctggcccgaggcctgaagaaagctgccaagttgattgaggaaggttctcttgctgagcttgtgcgcaagcggtatcagagttttgacactgaaataggggctcaaat

SEQ ID NO: 207339 - DNA, 582 bp, Glycine max
  unsure (1)..(582): unsure at all n locations
gaanaaacggcctgtgctcngataccnttgnnnntttttnnnnnaanncccnnnnnnnnnnnnnnnnnnnnnnnnnnnnnnnnnntnnnntnnttttttttttttntttttttttttttggggtttttttttttttcttttttttttttttttttttttgttttttatgaggacacataaacccggcggtgacattcgggttgttcctaggacgcaaggtgtcgttgataagggcgttgttgtacatggtggcacagtgtgccggtgctatctgtggtactggattggccaaggggttccaaaaagcatactacaacaggtatggaggtggtgccaactctgttgctgatggctacaacaatggtactgctttgggtgctgagattattggtaccttcgttcttgtctacactgtcttctctgccactgaccctaagaggaacgctagggattcccatgttcctgtactggcgccacttcctattggatttgccgtgttcatggttcacttggctacaatcccaattactggtactggcattaacccagcaaggagtttcggagcagctgtaatctacaacg

SEQ ID NO: 207340 - DNA, 446 bp, Glycine max
gcatggaaaaaacatggcaaagcaactaccatcattcaataagtaaatgttttacacaaatcaactcatgaacaatgtacataactaattcagccaaacgtcgtttcttgccactggcacagatccgaccaatcatatgcttgtcttgaactactgcagcattttgcaataaatctattagcagagaatcacaatgcaattctttttttcttcttcctttttttgttttggagatctgtacaaatactgagctgtcaggagaatatgggcttcattcacaaaggttcttggcttctgaaattctataattcgttcttgcttattagtggtgggtgtgactgaaactacaccaatgaggaacaatgtagcaattgagttgaaatcataaagatcacccacagattgtaactctccaagagccaacccagccttgacagtgacataag

SEQ ID NO: 207341 - DNA, 629 bp, Glycine max
  unsure (1)..(629): unsure at all n locations
tgggaanacctgcgcggtcggtccgannccntttnnnnnnttnnnnnnnnnnnnncnnnnnnnnnnnnnnnnnnnnnnnnnnnnnnnnnnnnnnnnnnnnnnnnnntttttntntnnntnnnnnnntntntnntttttttggggttttttttttgttttgtggcctatctncttgtttgataagaggttcacgaggaattgaagaagccttattgaaacacttgggagtgaagcgcaatgaagtaacaccagatggtttgttttctgttggagaaatggaatgcatgggatgctgtgtgaatgctcctatgattacagtggctgattattcaaatggatcagagggatatacttataattactttgaagatgtaaccccagagaaagtagttgagatagtagaaaagctgagaaagggtgagaagccaccgcacggcacccaaaatccccgccgaattaagagtggacctgaaggagggaacactactttgttaagtgagcccaagcctcctccctgccgtgacctggattcctgctgaagtgtgatatactttttgccttcaataatgtgaggcttgcatgtgttggagcttgtcttaattgaaacattgtcagattgtttgatgctc

SEQ ID NO: 207342 - DNA, 540 bp, Glycine max
ggtacatataactgtatattgctgatttcattctttcttttcatgtaaagattcgtaatacacaagcctgcttcagaagtagcaggaagtttggacaaaagattcaaaaaggaaaagtaatacacaaagtgtgcaaaatatatttcaaaagaaatacaaaatctttaatcacattcgcagggtggagagaattctaggacagcctcagtgccatttcatgaagaagagctcgcttttgtgaagcattaattacattatgtgtttcagcattctcaagcacttcagcaattattgcagatgcagggccaaggggttcctcagccaccctcttcaacatgaaagcctggccatgatgggttatgttaattgtgcagggttgctgaaaccaaggctctccatcaatttgaacaggaaacatggcaaacaattgtatcttaattgactgtccttgtgcaagtcttcgagctcgagaaagcccgactgaaagtttccgaggtgccatgttccagatatgctcacaacttcaagtatcttatcatg

SEQ ID NO: 207343 - DNA, 145 bp, Glycine max
  unsure (1)..(145): unsure at all n locations
agaagaacgtaaaaaaatagaaagaaaaagaataataaaaaaaaaaaaaaaaaatgataaaagtaaaaaggaaaaaaaaaaaaaaaaaataaataaaaaaaattaatattataataaaagannaaagaaagaatcattagaagac

SEQ ID NO: 207344 - DNA, 428 bp, Glycine max
acaccggttctaggaaatgagaagatatacatcggatacaaacatctttcaaccaacaagtgacttttagcagtttttatccatcagaacttcttctaccaatcataacactgatcaatgattacagaagccccaaactctcgacaaaacacattgcaaatatagttacttagttacacacacgatacctgtgcagagcacaaaggcacatatcctgtcctacatgagacgctatacaattgggttgtcagttaccatctctaaaccacacagtacgcttttgcacaagctcattgagaaaatcatcaggtttctcaagggcgacatttggcattaccacaacatgtgcaacgtctgcttggcacgcatgctgccacttgtgcacaaacccttcatcgtgaggcctctcaaacacaacggtgctgctg

SEQ ID NO: 207345 - DNA, 571 bp, Glycine max
  unsure (1)..(571): unsure at all n locations
aataataataatataattttaatataataaaagtgaaatatataaagtaaatatatgaatataaataattttaaaatatttatatcaaatatataataattataattacaggantagggtgtagagttgaaacacnnnnnnnttnnnannnnccccnnnnnnnannnntnnnnnnntnncnacnncaactaancaaaacatttattttaaatttaaatttataataaggaagggaaatagaataaaaggaaacataaaatttaaggggataaaatttaaccttttgttattgcatgcgatgaatacttgtttaaatatgggagagtataattaatgttagtagaaacctataaaaaaatatatacgcagtaaaaagaaaaaaggagtgcattgaaaatgaaggacattgatatttatagtagagtgtttcatatctcaggttgatcaggtgatgcctgccgatgttactccttataattgctgatacttgagaaatttagttaagagatgtaagataaccttaatttatgtagaaaataatgagatgaaaatatgaatacaacctttaacg

SEQ ID NO: 207346 - DNA, 308 bp, Glycine max
ccttaagcgacaatgactaatagggttgaggagatgttgaccccggacgagcgtgccgcccgagatgctcaggatttattgatcgagcgctgggacccagttataaaccacgtataggcggagatcaacgaagtctgtaacaaagaagaaagaatgactatttgtgccggagtacgtgttgaaggctctaggggtttcttgaatttggcgagtacattgaggaagtctatgcggcatttgaacaacacaaggttggtgacaatgcatgacttcttttaaagggtggcaagtggggcaacaaatctgat

SEQ ID NO: 207347 - DNA, 509 bp, Glycine max
  unsure (1)..(509): unsure at all n locations
cgcnaacactccctctcctttganaccccntnnnnntnttnnnnnnnnnnnccnnnnnnnnnnnnnnnnnnnnnnnnnnnnnnnnnnnnnnnnnnnnnnnnnttttttttttnnttnntttnntttttttttttttggtgtttttttttttttttttntttnttttttttntttttttttttcttntcccttgcttcgtgggtggaggaggcggctaacccgatactaatggtgtctggcgtggaggcggaggtggttcgggtgatcggcgagtgccggcgtgcgttgaagtttgctaggttcgtgagcaggttcggtaagagttaccaaagcgaggaaaagatgaaggagaggtacgagatattctcgcagaatctcaggttcatccgctcccacaacaagaagcgtttgccctatactctctctgttaatcattttgctgattggacttgggaggagttcaaaagacacagactatgagcttgccaaaattgctcttgcactcttaa

SEQ ID NO: 207348 - DNA, 465 bp, Glycine max
gcaaagacaatgctatcttataactgatatttgaagcgggagcatcaatacaatacaatatgtaactatgaactatcaatatatgatcgttattatgtctgtgatacacacaattaaggccataatatacttatgtgatttacaacaacttctagcttattttatacatcatgccaacccaactaggagcaattttcatcatacaattacacttatctttaatcatcattcatcaatactggcatcagcaatacgctctaaactctgaagcatgacaaggtggtagtcaccagggaccatattgttatgcaatttatgccacaattggataagatgcacaagttgcaacacacacatgttcttccccaattccatcttgaagtagccattttcaccccagctttctccccatgaattttttatgagccaatatgggacaccattttcaactccatatccaacagc

SEQ ID NO: 207349 - DNA, 529 bp, Glycine max
  unsure (1)..(529): unsure at all n locations
tgtacctggcgtcgtcgataccannnnnnntttttnnngcacccccccctacccccnannnnnnnntcngannanccccnncacccccttaaatttttttccaatctcctttaaatttctaataatggggaaagacgttgagcaggtcacagagcaaggtgaatactccgcgaaggactaccatgaccctcctccggcaccgttgatcgacccagatgagctcacaaagtggtccttgtacagagccgccatagctgagttcatagcaacactcctttttctttacatcaccgtgttgaccattattggctacaagagacagagtgacaccaaaatccccggtaacaccgaatgtgacggcgttggcattttgggcatcgctagggccttcggcggcatgatcttcatccttgtttactgcactgccggaatctgtgggggacacatcaaccctgccgtgacattcgggttgttccttggacgcaaggtgtctttggtgagggcgatgttgtacatgatagcacagtgt

SEQ ID NO: 207350 - DNA, 470 bp, Glycine max
aagcttatattaataagtaaaggcgaataatgtcttcttcaagaagcgccccagaagaaatcttatgtgtcaaacctgagtacactctatcaagcacacggggatcagcacagaaaatagttggtttctagttccccagcatcatcaattaacaatttgacatccccacggcagaaacctattgaagcaccatgccatatgaatatctcctcaatgaccctatcaaaagaatgtgcgagtggaaggtatgatatgtatacatccttctcagtcaattgttcatttacactctccaacaatcgcttaaccccagctaagagagtaataatactctcatttgatatcaacactcccttggggtcaccggtagttccactagtatacattattgtacagatgtcactccttttcttaataggaagatcaaagctctgagtttgacccactagtaaaaattcatcccatgaata

SEQ ID NO: 207351 - DNA, 449 bp, Glycine max
  unsure (1)..(449): unsure at all n locations
ataagagagcccgtcattttgaagttgatttgtctgctttccggaaagtacttgagatcgacaaagaacggatgattgcaagagttgagcccctagtcaacatgggtcagatcagcagggtgactgtacccatgaatctttcccttgctgtagttgcagagcttgatgatctaactgtcggaggtctcattaacggctatggtatagaaggaagctcccacaaatatggtttgttcgctgatactagtagaggcctatgaaattattttggctgatggcactcttgggagagccaccaaagacaatgagtactctgatctatactatgccattccgagggctcagggaacactcggccttcttgttgctgctgagatcaagcttatacccgntaaggagtacatgaagctaacctataaacctgttggtggcaccctgcaagatcttgc

SEQ ID NO: 207352 - DNA, 528 bp, Glycine max
  unsure (1)..(528): unsure at all n locations
ggggnncccccatctcccttgaaacccctgnnnnnttttnnnnnnnncccnnnnnnnnnnnnnnnnnnnnnnnnnnnnnnnnnnnnnnnttttttttnnttttnttttttttttttttggggttttttttgtttttttctttttttcttttttttttttttttttttgtgtattcaacaactatggacctggttctaacactagcaatagagtaacatggcctggttactctctgttgaatgctactcaagcttggaacttcacagtccttaattttacattgggaaatacttggcttcctgacacagatataccttacactgaaggactactaagatagacagctgaaagcttaaattgaaaaaaataaatttgattcattatttgttagatgtaatgtaactacatgattttccttttaaaggaatagcatccaaaagggatgagaggcattgatgttcttatgaaaattcaagtcttaataagaatatgtacaagtttgcagaaataatatgctttaaagcaatt

SEQ ID NO: 207353 - DNA, 499 bp, Glycine max
gcagaaataggccatgcaacgccactctttattatatctgtcatcatatttacatacagaaaatcaaggtgaactccacacaatattaatattttcactttacagaaagtgcagtaatatataaacacgtagaccattgtattgcatccatcataccggaatgaaggaaatttacacactactaaattttccggatgacttgaaaaaactaatcatagggtcataaagatcttgttttgcttgcaagcttaaaatgaagtcaacatgaccatagttttcaagataaaccacttccggtgtggatggcaattccttgagtgtgtgctggaaatcagttatatctgccaaagcatcatttccaccataggccatccacagaggcaatgatttgggtatgcgactaaggtcgaactttggtggattgaacttgccgtactctatcagattttttagctttccataatcatacttggagtaagtacctttgcggatcatctgg

SEQ ID NO: 207354 - DNA, 535 bp, Glycine max
gcagaaataggccatgcaacgccactctttattatatctgtcatcatatttacatacagaaaatcaaggtgaactccacacaatattaatattttcactttacagaaagtgcagtaatatataaacacgtagaccattgtattgcatccatcataccggaatgaaggaaatttacacactactaaattttccggatgacttgaaaaaactaatcatagggtcataaagatcttgttttgcttgcaagcttaaaatgaagtcaacatgaccatagttttcaagataaaccacttccggtgtggatggcaattccttgagtgtgtgctggaaatcagttatatctgccaaagcatcatttccaccataggccatccacagaggcaatgatttgggtatgcgactaaggtcgaattttggtggattgaacttgccgtactctatcagattttttagctttccataatcatacttggagtaggtacctctgcggatcatctggaaaaggtgtttcaagtttttggaggatgatgggtga

SEQ ID NO: 207355 - DNA, 695 bp, Glycine max
  unsure (1)..(695): unsure at all n locations
caaaaaaaaaacataaaaaatataacataaaaaaacaaacaaaaaatacaaaaaaacaaaaataaaaaacaaaataatccaaaaataataagannnccgggcgaaagtagaaaccaaannannnttnnnnnnnccnccccccnncccnnnnnncncccccccaaaaacaaaacaaacaacccattttcaaaacaaaaaaaaaccacaaacggggagaattcaaattcttcaccaccaccatacaagtacccatcaccaccacccccagtttacaaatacaagtctcctcctcctcctgtacattcaccacctcccacagtttacatctatgcatcccctcctcctccatatcactactaggttatttctgaagaatataagccaataaaaaacgttgttgatagcaggaagaagcacttcgcaattgcacaaggaaaacaacggaagccaagttaacgcgcattttgtcacataagaaaaacgaagtgacaatccctttcttcttcggatgtattgttcatgaattattaattactttggtactagacagttgaatggcactgcttatgactctgtcgttgaatgatatcacatgaatgcattttggaatgcaacctgctgaacatgcaaggtgttgcgaagccaattttataatgaataaaatcaaatatatgctttgtataantattgaaaaa

SEQ ID NO: 207356 - DNA, 454 bp, Glycine max
aataaaacgacatggtattggcaagaaaacgcgaaaaccacgaccacaggatactaacgcacatgtacgtaacacttaaaaatacatacacaaattaacatgggcatgtctgttgagatggacgtcaccacaaatatagtaaacataaattaaataaacatagtgacgaggatatacagattattccaatccaccatgtataagcaaattaattaagaacacaattaaatgaagcatgtctctcgtagctcaaatagcttggccagaattacaggtttgaggagctcctgaaagaccctagagcctttgctgcttgggccctcaacacggactggtggtagaatgcagcaagagcagcaccgatgaagggtccaacccagaagatccactggtcatcccaagccttctcgttgttgaatatgacagcaggcccaaggcttctagctgggttgat

SEQ ID NO: 207357 - DNA, 615 bp, Glycine max
  unsure (1)..(615): unsure at all n locations
gaaaacgccgtgtcganccatnnnnttnnnnnnnccnnnnnnnnnnnnnnnnnnnnnnnnnnnnnnnnnnnnnntttttnntnnttttttttttttttttttttgggggttttttggttttgcctatgataatactgttggtggaggtgatgatgctttcaacaccttcttcagtgaaactggggctggaaagcacgtgcctcgtgcgatttttgtagatctcgagcctactgtgattgatgaagttaggactgggacataccgccaactatttcatcctgagcagctcattagcggaaaggaggatgctgcaaacaactttgcccgtggccactataccattggaaaggagattgttgaactttgcttggatcgcatcagaaagcttgctgacaactgcactggtctccaaggttttctggttttcaatgctgtgggtgggggcactggctctggtcttggttcccttttgctggaacgtctttcagtggactatggcaagaagtccaagctcggtttcactgtctatccttcaccccaagatataacctctgttgttgagccttacaacagtgtcctctccactcattcccttcttgagcacactgatgtggc

SEQ ID NO: 207358 - DNA, 452 bp, Glycine max
aataaaactacatggtattggcaagaaaacgcgaaaaccacgaccacaggatactaacgcacatgtacgtaacacttaaaaatacatacacaaattaacatgggcatgtctgatgagatggacgtcaccacacatttagtgcacataaattaaataagcatcgtgacgaggatatacagattattccgatccaccatgtataagcaaattaattaagaacacggttaaatgaagcatgtctcttgtttcttagatagcttggccataattacaggtttgaggagctcctggaagaccctatagcctttgctgttagggccctcaacacggactggtggtagaatgcaacaagagcaagaccgatgaagggtacaacccagaagatgcactggtcatcccaagccttctcgttcgtgaatatgacagcaggcccaaagcttctagctgggttg

SEQ ID NO: 207359 - DNA, 286 bp, Glycine max
  unsure (1)..(286): unsure at all n locations
acaaccaccaaaatactaacaattaaaaaaaacaacacaaacaactaccataatcaaacaaacaactattaccaaaacttaacaccaacccacaacccacccaacaaacaccttttnacaatccccccccttttaaaaanncnnaanannanaannaaaaaannaaannaanaaaaaaaaaanaaaaaaaaaaaaaaaaaaaaaaaaaaattaaaaaaaaaaaaaaaaaaanaanaaaagggggaaaaaaaaaaaaaaaannacaaaaaaaaaaaaaaaaaaaaca

SEQ ID NO: 207360 - DNA, 556 bp, Glycine max
  unsure (1)..(556): unsure at all n locations
ggaaaaactcctctcgcttgtatccaacgnnnnntttnngggnaaancccnnnnnnnnnnnnnnnnnnnnnggntnnnnntnnnnnnnnnnnnnnnnnntttttttnnnnnnnnnnnnnnnnnnnnnnnntntnggggggtttntttttttatntttnttttccttgttttccctttggttttttntctttgtatntttgataaaatttactaggcccaccccagctgaaacaactgatgtagctaatgcaattcttgatggaacacattgtgtgatgcttaatggtgaaagtgctgctggggcatacccagaacttgctagaaaaatcatggctcgcatttgcattgaagcacaatcatcccttgactatggtgccatcttcaaagagatgataaggtctaccccattgcctatgagtccattggagagccttgcatcatctgctgtccgcacagcaaacaaggccaaagcaaaactcattgtcgtgctgacacgtggcgggtctacagccaagttagttgacaagtataggccagcggttccaatattgtcggt

SEQ ID NO: 207361 - DNA, 531 bp, Glycine max
aatcattaagcttaacaactttattcaaaaaaataacaagcagcgtgtacaagagatcattattaacttactgtggcacctaatttctgtgtttaaaagtgtctatctgattgtatcaagctgacttcatgaaatagagattaacaatccatttgctgcagtcacttcttaagcagcattttttgattcaagtgttctgtgaataataattgcactctactttctataaaaacttcgatcaactaatgaatccaacacttcgacacgtacagaagaaagaatatttttcatggagatccctcatttccatttgtgaggcatgatatcagggtgaagtcccaaaacatgctctggcataaaatcatggcgtgttagaatcccaacaactggaggtctcccttggctctttggaacaacacacatgtgcctgagtccatgttgtcggaaaagaatagcagctttggctagtgacattgtctcaccacagtgtaaggagatgcattagttatgggatggagatcaacatacata

SEQ ID NO: 207362 - DNA, 626 bp, Glycine max
  unsure (1)..(626): unsure at all n locations
tgcccnaactcctactactttgtaaccccnntnnnnnntntttnnnnnnnnnnnccccnnnnnnnnnnnnntnnnnnnnnnntnnnnnntnnnnntntnnntnnnntnnntttttttttttttntnnttnnnttttntttnntttttttttttggggtttttttttnttntttnntttttttttttttnnttttttttttcctaatttactcctcttggcatcttgtgttgtgtccctcttttaagctatttccttctcttaacacaattggttgtgccaattgccatagtcaccaaccaattaacaaaggtatatatatcatcatatcatcaccaaatgaaaaatattgggttgttttttcttgtggtggtggctacttttgtggtggcagccacagctggtagcttttaccaagactttgaaataacgtggggtggtgagcgtgccaaaatctatgagaatggaaaccttctcacactctcccttgacagagcctctggctctggctttcgttccaaaaaagagtacttgttcggaaaaattgacatgcagctcaagcttgtgcctggtaactctgctggaacagtaactgcctattatttatcttctctggggcctactcatg

SEQ ID NO: 207363 - DNA, 419 bp, Glycine max
cgaataataaaactccaacaattttattaatgaaaatactttacaatttcagcacatatacactgccatgaatataattttgcacgctataattatctttcgccacaaacaatggagtagtgctcaacaaagcacaaaccaacaataataacagttttagttgcattaatttacacaagaaagtaaattaacgtaataggcaacacatgtgtgtcacgttcatgaggatcattttataatgatatgcaacattgaattaaatattctcatgcaatggagcattctggaggaaggccttgagggaaacgtctgatatcagtgcaataattgtaaatcatgtaattcttttgcaccaacggatctttgcctgccccgtggcgttcagtgattggccagtggagaagaagtttgggattgaa

SEQ ID NO: 207364 - DNA, 492 bp, Glycine max
ttgagcattttttttcttcgttattttttttaccacagacttcaataaactggccggaagctaacaccaactataggccaaatcaccaataaatattatttcccgttcttttggcgtgttggccacccactgagcacattggcactcacacatagaagcagagagaggccattggttggttttagagatgggaagcatgcacatagaaaccccagaaacttatagctgatggtagcaaaaacttcgatgatgatggacgagctaaaagaactgggactaggatcactgcaagtgctcatatgataacggctgcgattgggtctggagtgctatctgttgcatgggcacttgcacagatgggttgggtagctggtgctgcagcgctctttgacttctgtttgataacatacttcacctacactcttctcgatgactgttaccgctcacctgaccctgtacatggcaagcgaaactacacatattctgaggttg

SEQ ID NO: 207365 - DNA, 562 bp, Glycine max
ctccaccactattcccttcaccccaatcacactttccgctattagtgtagaagatgagtacgctggatgcaacaagggctgaacttggtcttcttgttttatatttgggcaaggctgaagcaagggacaaaatatgcagggcaatacaatatggttccaaatttttgagtaatggggaacctggtactgctcagaatgtagacaaaacaaccagcttggcacgaaaagtcttccgtctctttaagtttgtcaatgacctacatgctttgataagtccaacaccacaggggacacccctccccctagctctgttgggaaagtccaagaatgctctactctccactttcttgtttcttgatcaatttgtgtggcttggcagaacaggcatctaccagaataaagagcgcaccgaactaattggccggatatctctttactgttggttgggatcctcggtgtgtgccaccttggttgagcttggggagcttggaagactctctgcatcaatgaagaagttagagaaagatctcaggaacaagaattaatacgatgatgaagcata

SEQ ID NO: 207366 - DNA, 543 bp, Glycine max
gtcagcttcactgcacaggatttatgtgatcgcaacatgggagtttgtttgagcgcccaaattaaagctgaaagcccatataacactgggttcaattcaaagtatgtgagtacggatggaaatgatttcggcagcacaaacgataaggtttcagcaaactcaattcctcaaactcctcggagtgagggtgagatcttgcggtcatccaatttgaagagctttcccttgtcagaacttaagacggccactagaaatttccgtccagatagcgtgttaggagaaggtggttttggatcagtttttaaggggtggatcgatgagaattcattgactgctaccaaacctggcactggcattgttattgctgataaaagacttaatcaagatggcatccaaggtcacagggagtggttggctgaagtcaactatcttggacagctttctcattctcatctaatgagattgattgtgttttgccctgaagatgaacattgccttctcgtctacgaatttatgccacgtggaagcttggaaaaccatttg

SEQ ID NO: 207367 - DNA, 559 bp, Glycine max
caaaaccctcttttttctctctcttgcaaaacctaattttcatttcttccctcaaatttcaaaatgcgtgagatccttcacatccagggtggccaatgcggcaaccagatcggcgccaagttctgggaggtggtttgcgcggagcacgggatcgaccctaccggaaggtacggtggggactcggagttgcagctcgagaggatcaatgtctactacaacgaggccagttgcggtcggttcgtgccgcgcgcggttctcatggacctcgaaccgggcaccatggacagcgtccggtccgggccgtacgggcagatcttcaggcccgacaactttgtgtttgggcagtccggggcagggaacaactgggccaaggggcattacactgagggtgcggaattgattgattccgttctcgatgttgtgcgcaaggaggctgagaactgcgattgcttgcaagggtttcaagtgtgccattcccttgggggaggaacttggatcaggaatgggaaccttgtgattctaagatcagggaagagtccccagatagaatgatgcctac

SEQ ID NO: 207368 - DNA, 523 bp, Glycine max
  unsure (1)..(523): unsure at all n locations
cagttcaaatcaggtgttcattcacatgaagctctggttacttgtttcacctgcaccactactcttgcgtttgcttttggagccactagaagacgacggattagtatgccaattcctttttctttgatttatgaaccagttatttatctgctttaattgcagccctgtttcctgcaccaaccttgccttgtcctcttctgttggatatggccatttagaatgtgactgccaccaagcttttaaaagggaagtggtgtcgcctggtagctttcccgctcttctctttcgtaaaatttcttctcttatgtccacaatcttgtccttgtaaccctgttttaactcatgcttcagctcctgcctcacacgctccatcaaagatctttcagtttctgtgggaacaagaggaccaaagctgagactatcagctccatccatgcttccttcgaacaagttggcattactctctgcctgatcttcttcatcgncggacattgttgcacccgttccttcaccgggagataca

SEQ ID NO: 207369 - DNA, 480 bp, Glycine max
tgcagattgtactgtaatcacggttgcccacagaataccaactgtgatggattgcactaaggttcttgccattcgtgaaggagaattggtggagtatgatgagccaatgaacttgatgaagagagaaggatcactgtttggacaacttgtcaaggaatattggtctcatttgcagtctgctgaatcacattaaagctagaaatgtttcatttttattgatgtcaatctagtccaaccctgcccatagactaaacggattggaaaagtagactcactttttcaccaattgatttttcaaaatttcttgatatttttattttcttattctttgagtttgttgttatgaattaatatgttgctggatttgtcgtatttatatattctttcttttttaaattagataaataaactcaatcttgtaacggtcgttttaattccctattaattgttattgttgatgacttacaatggcttttgaac

SEQ ID NO: 207370 - DNA, 532 bp, Glycine max
gattcataggcccaagagcaaagaaactaagaagattttgagcacaatggcatccacacaatgcttcttgcaccaccatgccctcaccactccaaccagagcttcatcacagcgcttagttgtgagcaccaaaccaaaccacattgtttgcaaggcacaaaagcaggttgtccaagagggtgaggacactactaacattgtctctcgcaggttggccctcactgttctcattggtgctgctgctgttggctctaaggttgcacctgctgatgctgcctatggagaagctgccaatgtgtttggaaagccaaagacaaacactgacttccttccatacaatggggatggattcaaactctcaattccctcaaagtggaacccaagcaaagaggttgagtacccaggtcaggttcttagatatgaggacaattttgactcaaccagcaatgttgctgtcatggtcactgcaactgacaagaagtccatcactgactatggttcacctgaggagttcctatctcaggtggattac

SEQ ID NO: 207371 - DNA, 430 bp, Glycine max
actcaaagtcctactggggctgtttttccatttctagctgtagttttacatctatgaacgagactaaaaaagtaaaataagttttttgagttctctcatgtttgagtacactgccctctctggtccagttgaaaatgaggatggggaagatattcctgaataagaagccgcctgcagaattagttcgattgaatagggagaaagttctgatacacttaaaaaggagtgcagctagaaatgtgaacttgcactggcacaccaagagagtgcagttaaatggtttagcattaaaggcaacagaacatgtgatgtgtgcaagcaagaagttcagaaccttcctgtcactcttctacgagttttaaatggccaaacactctacttgacaaggagtagaagccaacaatacagggtgtggcaaaatattcccatt

SEQ ID NO: 207372 - DNA, 422 bp, Glycine max
ttcctttattattattattattataaaataaattctttcatcctttattttcctattttgttttgtgtgctgccgatggatcccaagggctcaaagcagcaacagccacaggaggtggtaccataattgctcaacctgccgcaacatcaataccaacaacaagggaattccaacaacaacaacatgggagagaacaaaccatcagaggttaaggatttccagatagtggtagctgctgagaaggacgagagccagatgcagtaacagttggcaccaaagaggagtttcaacaatgacaggcacaccaaggttgacggcaggaggaggaggatcaggatgactgctctctgtgctgtcagaatctttcagttgaccagagaattgggccacatatctgatggggaaaccattcaatggctcct

SEQ ID NO: 207373 - DNA, 426 bp, Glycine max
aagaaaatcctcaattttctgagcagttttacactctctctctgtctctcaaaaattcttagttcgcatagaaaatatgaatcatgtagaggcacgcgcatgtcgacgatcaccttctgtgtgacattgaaggtgaccacctcactcacgctgatatcatcggccaagacggcagcgtttgggctcagagttccgacttacgtaagtcaaacctgaggagataactgccatcatgaatgactttaatgagcctgcatcacttgctccaactggattgtatctgggtggcaccaaatatatggtcatccaaagtgaacccggttctgtcattcgagggaagaaaggtcctggtcgtgttactgggataaagaccggtgccgtcttgatcattggcatttatgatgaaccaatgacttcagggcaatg

SEQ ID NO: 207374 - DNA, 516 bp, Glycine max
  unsure (1)..(516): unsure at all n locations
gataaatatgccaaccattataccatagcattaaaaatttaaaaccagtgtaatgtatacaggtaccccactaaaaaagtacaaagatagagattatagtcatcatttctcaagcatcaaacactttcttcgcaacacgcagatcccgtgacttttcatactcacaagattattacactgcaatcaaagcattccagtccaggtcgatgcaaaaacttgtacagaagccaatgaaatatgcacgataacaagacattaagcaaagattagagaccctgttcaatgagataatcaccaagcctttcaactaccatgttgcattgacctggagtcattggttcatcataaatgccaatgatcaaggccgcaccggtcttcttcacagtaacaccaccaggacccttcttccctcgaatgacagcaccgggttcaccctggatgaccatatattnggtgccaccgagatacaatccagttggagcaagtgatccaggctcattaaagtcattcatgatg

SEQ ID NO: 207375 - DNA, 344 bp, Glycine max
ggatgattatatcatggtcaagggatgctgcgttggtcccaagaaaagggttattacatggcgccaatccctccttaagcagacttctcgtgttgctctggaggagatcaagctcaagtttatcgacacctcttcaaagttcgggcatggtcgcttccagaccacacaggagaagcagaagttctttggacgcctcaaagcataattttgttaattggatggaaatgctggatttctattcggttaccatatcttataaacatattgtagtgtttactgttttgacattatggatcctcgagtagtgagttatttccccccttaagttggccaaacttttgttg

SEQ ID NO: 207376 - DNA, 326 bp, Glycine max
aatgggggaaaaaacttactacttggggatccataatgtcaaaacaaaaaacactacaatatgttaataaaatatggtaaccgaatacaaatccagcattaacatccaattaacaaaattatgctttgaggcgtccaaagaacttctgcttctcctgtgtggcctggaagcgaccatgcccaaacttttaaaaggtgtcgataaacttgagcttgatctcctccaaagcaacacgaaaagtctgcttaaggagggattggctcaatgaaataacccttttcttgggaccaacgcagcatcccttgaccatgatataatcatccctt

SEQ ID NO: 207377 - DNA, 506 bp, Glycine max
attcttcactcctcctcctccctctcttttccaaacacacatcctcaaccatggcagcggcatcttcagagacaaagtcaccatcatcctcgaacacgcagcttccgctgaaaccaatcccaggcagctacggaatgccgatttttggagcaataagcgacagacacaactacttctaccaccaaggacgcgacaagttcttcgcgacgaggattgaaaaacacaactccaccgtgatccgaaccaacatgcctccggggcccttcatctcctcggaccctcgtgtcgtcgcgttgttggacggtgcctccttcccgatcctcttcgacaacgacaaggtcgagaagctcaacgttctcgacggcaccttcatgccttccaccaagttcaccggcgggttccgcgtctgcgcctaccttgacaccaccgaacccaaccatgcactcattaaacagttcttccttaacgtcctagccaagcgaaaagacttcttttgtccctctgtt

SEQ ID NO: 207378 - DNA, 532 bp, Glycine max
  unsure (1)..(532): unsure at all n locations
ctcactacatgaaaggccttgttctcctgctggctcattgtattggggcatgcttttcgtacaaagaacaccctttaataaccaagctgatgnactaacatcacacttaaaccagccactaatgcagttttaagcgcttaattagtaggctttggcctatttcttgtcctttcctgagatgaagaatggtggtatcgatccaaacccaaaatcagattcaaattcaatggattggttattgtttcattctgatcacattgtcatatccataaagaagggggggaaaaaaagttagcactttgcagaagcattgcaattattttaagttgcaatagctagctgttagaaatgaaccactactgtgaaagatgttgaatcatacgtacgtgtgttctatcagagaagctgcttttgatcttgtgttactacggtagatgccaaatgagtggaaattgttcttgtttgaatttgctttagtaagaatccctttttcaatttgcagaatctcttgtatttaatggtgtactatata

SEQ ID NO: 207379 - DNA, 473 bp, Glycine max
ctcttgacatgatctccggtggctccctcgtcggctccgtcgcctccaaggtcccaaggatcggaatcctccctcgtgatgctaaggatgagtcgatgatgaagtggtttgaggtgccggggttcaacatcattcacgcgataaacgcgtgggaggaggacgagggaagaacggtggtgctggtggcgccgaatattctttcgatggagcacgcgctggagagaatggagctagttcacgcgatggtggagaaggttcggatcgagctggacacagggataatcacgcggcaaccggtgtcggcgcggaatctcgatttcgcagttataaaccctgcgttcgtggggaagaagaacaggttcgtttacgcggcggtgggggacccaatgccgaagatctcgggggtggtgaaactcgacgtgtcgaagggggaagagcggacggactgcacggtggggtgcatgatgtacggc

SEQ ID NO: 207380 - DNA, 322 bp, Glycine max
aagagggccaccatagcccgcctcctctctggccgcaccgataacgccatcaagaatcactggaactcaacgcttaaacgcaagtgcgcgtccttcatgaccggcgatgaagcccctcaagatccgacgtgagcgagtccagcgctgctcccggcgaggtctctgtctctgtctctccttcacaagagtttcgccccgagccggttcggccggttgtcgaaacggcgtcgtctcaagacgacgccgatgccgacgccgaggatgctggacctactacctcgctggcgctgtctcttcccggggaggagtcatcggaaatctc

SEQ ID NO: 207381 - DNA, 334 bp, Glycine max
tgacttctaggagcccttatttgggttcttagacaactggggtcaggaaaggtggcccaactgccattttgtaaaaggagaactcgctttaatgttttgactattaggaaccttccctgtgaactctttcatggaggtatggtgaacatcatatgtcatcatcactggtttgatcgctattatgataccattcttaaaagactggctttgcctgagaggctcactgactttttggccatgaacagattacttccccatagagatggacatttagcaatcaaagatacttaagatgtccttctcttggacatggctgaagatcttgagctgggct

SEQ ID NO: 207382 - DNA, 393 bp, Glycine max
caaactaggttttaataggtatagagcgtgccaaggactcgttaattttgagcgttaagtgctgcaactaatcagatcccaagaccttggcctaccttgccatacagaaaaaaaaaaagcaaaaaaaaagccaaggttaggagccaacaaaaataaacacaaagcacaagtcatggaaagaataatggttggaagtgcaacaaaggttgctttcaccctcttggccactttcgccattgtcattccatgccttgaagctggcattgctgagtttgacgattttctcaaagcccaagctgaagaagcccataaaattgctctagattcctatgtcccagagccccacgatgtcgcccatgaactcaatttccatgttcatatggcactggaaaa

SEQ ID NO: 207383 - DNA, 399 bp, Glycine max
gaaaaaacgacattcattcatctatggctacccttattgctcccagcaaccactctccccaagaagacgctgaggctctcagaaaggcttttgaaggatgggggactgatgagaaaactgtcatagtaatattgggtcatagaactgtttatcagaggcagcaaatcagaagagtctatgaggaaattttccaggaggatcttgtgaaacgcctagagtctgagatcaaaggagactttgagaaagccgtgtaccgatggatactagaacctgcagatcgtgatgctgttttggccaatgttgccatcaagaatggcaaaaactacaatgtcattgtggaaatcgccactatcctcttcccggaagagcttttggccgtgagacgtgcttatctcaacc

SEQ ID NO: 207384 - DNA, 440 bp, Glycine max
taggaaattttatgtagtgcaattgggttttttaatagtcctgaatatttggtggggtattgggcttctttgaacaagttgaagtttgatttggggaatttaaggtttggggagaggtttatgtttttggatttgtcttgtaagtgcgtgtttgggaaggttcctaacagtgttgatgggcttgagaagttgaatgtttcctataaccatgtttgtggtcagtcttccaagaataagttttcggcatgtgcttttgttggaaatgattgtctctgtggttttcctttgctcaccctgcaacatagcatttgtgtatttagctttgttgctgatgatttcaagtgtttaatttccctttactgctgagttttgcaactaattatgtcttttaataagttaattgttattttaactttaatatttactatatatattaactt

SEQ ID NO: 207385 - DNA, 590 bp, Glycine max
ctcgagccgattcggctcgaggcacgctcatcacacgaaaagcagatggtgggcctggcttattgtgatagcaggagtttttgttgtacttatattcggctacttgtgctgcatcatctggagaaaatgcaaaatagaagctgacagaaaaaagaagcagaaggaactactattagaaattggagtcagttctgtggcttgcattgtgtatcacaaaacataaagacacagaaaacgtagcaaggtcaactatgaaatgcaaatatttagctttccaatcattgctgctgcaacaggcaacttttcagttgcaaacaagttagggcagggtggttttggaccagtttacaagggagtacttcctgatggacaagaaatagcaataaagagactttctagtagatcggggcaagggttggtggagtttaagaatgaagctgaactggtagcaaaattgcagcatactaatcttggtaagctttcggggctttgcatacaaaatgaagaaacatattaatctacgagtacttgcccaacaaagtttagactttcatttcttgattctaaagaatggaaaatagtttggagaa

SEQ ID NO: 207386 - DNA, 604 bp, Glycine max
  unsure (1)..(604): unsure at all n locations
gcatcaacacagcacttgtttgttcccaactccgaaaaatatcatgctcctaacgtaaaatcctcggtttcaacgttcaaccgcgatctcaaaaaacaaaactatggcatcactctcaggcatttgctcctcttccccgactctcaaaaaattcccaaaccaatccccatcgttgaccgaccctctccgcaaagaccacgtgtccttccccgcacgcctcgccgatcggaccctcagcctcgcgccgctccgtgcggtggctcgggaggtttccgacggagcgttggcggcggcggtgaagaaggggttggagaaggatccgcgcgcgctgtggcggagatacgtgggttggctataccagcacaaggaacttgggatttacttggatgtgagtcgggtcgggttcagtgatgagttcgttaaggagatggaaccccgtttccaagcggcgtttccggcgatggaggagttggagaatggcgcgatcgctaatcccgatgaaagtcgcattgtgggacactatnggctgaaggaccctaacgtgcgcccaactcgttccttaaactcagaatgagacactctcgacgctgttgcaagttcgcta

SEQ ID NO: 207387 - DNA, 472 bp, Glycine max
cacaaacccgtccctcacactctccataccctagcggcactacacactagttctatcgctatctccccaagatgtcgagcgccgatcccgagcacagagaagaggaggaggcacccgccgttggcgacgacgaggacaccggagctcacgtcgctccaatcgtcaagctcgaggaggttgctgtcaccaccggcgaggaggacgaagatgcaatcctggatctcaaatcgaagctttaccggttcgacaaggacgggaaccagtggaaggagcgtggcgccggcactgtgaagttcctgaagcataaggcttccggcaaggttaggcttctcatgaggcaatccaagacgctcaagatctgcgctaatcatctcattttgcctacgatgagtgtgcaagagcacgctgggaacgagaaatcctgcgtttggcatgctagggattttgctgatggtgaactcaaggacgagct

SEQ ID NO: 207388 - DNA, 519 bp, Glycine max
aaaaaagaaacaccaatcatcgggcatttagttggattgaacatttagagctttaaaataatagcagtttcatattgtcttccctacaaacaacaggttacataaaaacggaaacaaacagaaccagttttatagaacagtaatggaaactagatctagccggaacagaaccatcccctcaaaagagacaatcaaccggcaacaggaagttgcggcatgttatacatcttcaagccaccgcaatacattaccaagttcaaaatcacatatcatgttggccatactcctcctcctcctcttcctcctcatactcatcctcatcagcagtggcatcctggtactgttgatactctgacacaagatcgttcatgttgctctcagcctcagtgaactccatctcgtccatgccttccccggtataccaatgcaagaaggccttcctcctgaacatagcagtgaattgctcactcactctacggaacatctcctgaatggaggtagagttgccaatgaatgttg

SEQ ID NO: 207389 - DNA, 361 bp, Glycine max
ctctctcttaatttttctccataggctcttcttctagacaactgtgaaggcattttactctcttaggactcacacaaatcagagcctgctcctttcctcaccaaaacataccaactggtggatgatcccgccacagatcacattgtgtctaggggcgaagacaacaccaccttcgccgctaggcgtcctcctgagttggaaagagaccttgttcctaactacttgaaacacaacaacttctcaagctgagttcgccagctcaacacctatgggtctagaaagatagagccagaccgatgggaggtcgccaacgaattcttccagaaaggagagaaacacttgctgtgccagatccataaaa

SEQ ID NO: 207390 - DNA, 437 bp, Glycine max
  unsure (1)..(437): unsure at all n locations
agaaaagttagggttcacaacttttccttttccttttgcttgcgaatctgaatcaaataatcaatcatccattcattattcatcatgtcgtcggcgaagaaaatcacgctgaagagttcggacggcgaggctttcgaggaggaggaggcggaggcgctggagtcgcagacgataaagcacatgatcgaggacgactgcgccgacagcggcatccctctgccgaacgtgacgagcaagatcctggcgaaggttatcgagtactgcaagaagcacgtcgaggccgcgaatcccgaagacaaaccctncgaggacgatctcaaggcctgggacgctgaattcgtcaaggtcgaccaggccacgctcttcgatctcatcctggctgctaactactagaacatcaagagcctgctggaccttacatgtcaaactgtagccga

SEQ ID NO: 207391 - DNA, 545 bp, Glycine max
ctttttctctctaccctccaacgtgctctcttccctcctccacttcatccaaatctttctcattttctctcccaaatcacactctcaattacaataacacacactcaacttgagaattttccccaaaaatcccaagagctcgcgccatggtttccccggaaaacagcaattggctgttcgattacccgttgatcgacgacgacgttattcccgtcggcgactcctccttcgccgtctccgcttccaccttctcctggcccccacctcccgccaatgtcagtgtcgaaattgatgcttcgcttggggattctgatggcctaaaaaatcctgctttgaagaaaaggactaaatctgattcaagtactgcttctagctccaaagcgtgtcgggagaagttgaggagggataggcttaatgacaagtttgttgaattgggcttcatcttggagcccgggaggcctcccaaaacagacaaagcttacattctgattgatgctgtccgaatggtgacacagcttggggatgaagccctgaatttgaagact

SEQ ID NO: 207392 - DNA, 424 bp, Glycine max
caaaaaatggcttctagttcagaatctcaatctcagtctaaaccgctccaagaccgagttgcaatcgtcaccggctcgtcccgcggaatcggccgagaaatcgcgcttcacctcgcctcactcggcgcgcgactcgtcgtcaactacacctgcaactcggcccaagccgactcagtcgcggcgcagatcaacgccggttccgccaccacgacaccgcgcgccgtcgtggtccaagccgacgtgtccgatccggctcaggtgaagtcgctcttcgactcggccgagcgcgccttcgactcgccgatccacatgcttgtcaactcggcgggcgtgatcgacggcacgtatccctccgtcgccgacaccaccgtggagtccttcgaccgcactctcgcggtgaacgcgcgtggcgccttcgcgtgcg

SEQ ID NO: 207393 - DNA, 499 bp, Glycine max
gccgaagaatcctcccttcaaacctaacccatcacttccgctccttcgaatccgatgatgtctccgacaatctcctcgtgcggcgaggatcctcgccttcggtctcaaacttgtaccaacagcaacaacacacaccaaagctaacgcaacaaaacaagatatcttcactcatacgctcgttcttgaacatcttcacgttcccaacaatgatcccaacatgcaagtggctcacgattccgtcgcagctctccgtgactccttcccttggccgaaaagtcaccggaaccctcttcgggcaccgtcctggacacatctctttcgccgtgcagctccacccccgcgccgatcccgtcctcctactcgagctcgccatgtccacctactcgctcgtcaaggagatgtcctctggccttgtgcgcatcgcgcttgagagccagaaactgtctgcctccactattacgcgtacaatgcgtagcaatagtggcagacagcaacagtg

SEQ ID NO: 207394 - DNA, 536 bp, Glycine max
aagcattccatagcctcccataaaaattaagaatactatcttctctgctctctttctactttgtgccttcaccacctcatacctaccttcaaccaccgcggtggtcgataccgacggtgatattcttcagaatcctggcacatactttatcttgtccgtttttcgacccggcggtggagtagaattcgccgccactggaaacgaaacttgccctctcactgtcgtgcagactctcttcgggaggggctttccagcaatattatcgtcccgggtacgaatccctttcatcggcgaaggacaactcttcagcatcctgttccgtattgtgccatggtgcgccaccactccttctaagtggaccattgtggagggtttaccagaatcacccgcggttaaactcactgggtacgacaacacagtgcctggcgagtttaaaattgagaaagcttacccttttcatacgactatacccttttggtctgccagctggcgaataaagcaatgtgggcatattgggattatttcgatgatgatgg

SEQ ID NO: 207395 - DNA, 490 bp, Glycine max
gccggatttactcggagccattccgatttgggatccgatttttacgggaagagcggtggtggcgcagatgatggatacggagatggggtgtatgcttatgaagggggcaaggtggaaccctacggggcgcgtggcacggcgccaaaatcgtcgacttgggcggcgtttgatgattacgggaggtccatcagtttcccctcgcagaaggaatcttcttctgtggggggtaagattgtgaaagcggtgcccaaggctgatacacaacaagatgtcaaaggtggcggcgtgcaaaagtttcgtgtcaagctgttggccgaaagtgggggtcagagcactatggatgttctctgtcagattggtttggatggaattcgtatgctggatccaaataccagccggacattgagaatttattctcttgagaacataacaagatgtgatagaatcgattcatctaccttgcattttggtcaaagagtcctgttgacat

SEQ ID NO: 207396 - DNA, 580 bp, Glycine max
aaagcgcttataaatggctttccacgaccatctaccgcacgaaatcacgttccagccgtttaccgaggagcagcagttaggtcagagcagggacatgcagcggctgctcccgctctccggcggggcgccgacgtggctgaacaacagcaccgcggcgacgctccgccagcagaatttcctccacctgcagccggaatccgccgcaacgacgcagcaaaacgacgacgttcgcggcggcggcggcagcggcatggatcggaaccggaccgagagcaactctgaaccggatgatttggcagaatacaaagcggacattttaggtcaccctctctacgaccagctcctatcggcgcatgtctcatgcctgagaatcgccacccccgttgaccagcttccaaggatcgacgcgcagcttcagcagtcgcagcgcgtcgtcgacaagtactccggcatcggaaacggaaacggcgtcgtcgacgacaaagagcttgatcaattcatgacgcattatgttatactgctctgtgctttcaaagacaattgcaacaacatgtacgtgttcatgcctatgaagctgtat

SEQ ID NO: 207397 - DNA, 507 bp, Glycine max
tgcaaggttatgcgagacccgactggaatcagcagaggatcaggatttgttgcattttcaactcctgaggaagcaactcgagctcttggtgagatgaatggtaaaatgtttgctggaaaacctctgtatgttgcccttgcacagagaaaagaagagagaagagcaaggttacaggcacaattttcacagatgaggcctgttgcaataacgccttctgttgcgccccgtatgcctctctaccctcctggtgctcctggtcttggacaacaatttttgtatgggcaaggacccccagccatgatgcctccacaagctggatttggttaccagcagcaactagttccgggaatgagacctggtggtggtcccatgccaagcttctttgttcccatggttcagcagggccaacaagggcagcgcccagtgggccgtcgaggaacaggtcctgtgcaacaaccccagcagccaatgccaatgatgcagcagcagatgctttcaggggacgtg

SEQ ID NO: 207398 - DNA, 561 bp, Glycine max
aaagaagttcacacgaacaatataatagaacaatggaggaaaataatccaaaccacaaatgcatatctaataaatccaacaggttatgctaatcctacagcaatccagatacgaaaaaggtgaaaccaaaacaaccaagaacataaacttccttagtactctgactaaaacaaaacatctaagacacctgcaaataaactggtgggtagcgtacgggatagaaataactggtgtacagattcttgtcaaatgactaacggaatctaagacacaagattgtcattgagagagagtgaggctagttgatcagctgggttggtttgctgttgagcaacatttctcaacacatccatggcttcagcaacttttgccttcagagcatctggtgactcaatcagatgtaaaacttcaggctggtccatctccagaagcatgcctgtaacctttgcagcagaatcatgttccagctgatccacaagtgggtataaagcttcaccgagcatagtcctttgctgttctggtggagcatttgcgagggctgtagccaaagcttgaatgggc

SEQ ID NO: 207399 - DNA, 615 bp, Glycine max
gtaaaatacagagggataagattcaagatataataaacaacatacaaaaatcaacgtgtgcgcttttcttctctttccttagttttcagattctgaaatcttagtttctgcccgaaactgaaactgaatcgaaattcaatacaatgagttcctcaactacagtgaggaagttgcaggtggtgtcccctgttcctgcggacatagacattgcaaactccgttgaacccgttcatatctcccagattgccaaagacctcaaccttagtcccaatcactatgacctttacggtaaatacaaggctaaggttttgttgtcggttcttgatgagcttcaaggatcagaagatgggtattatgttgtggtcggaggcattactccgactcctctcggggaaggcaaatctactactacagtggggctctgtcaagctttatgtgcttttcttgataaaaaggtagtcacctgccttcgtcaaccatcgcaaggacctacttttggaattaaaggaggtgcaactggtggtggctatagccaattattcccatggatgaattcaatcttatctaacaggagatattcatgccatactgcagcaacaattttagctgctgaat

SEQ ID NO: 207400 - DNA, 480 bp, Glycine max
tagagaacatcgatcatggcttatatctcctttctatcatctttctccctctccaatttctctggacctcttaccatttccatctgttcctcatcttccgccttcctaacttcccaaataccatgcaaacccaccaaacgtagcataccaaaaggccattatgtttccaaagtgtcatgcaacagtcaccaaaacacctcaacatcaaacccataagaagacaaaccatcgtcatacaacattctaggaaaacatcggagggatgttctccttggcattggaggcctttactgtgcttctgctcttagcaacaccaaccctttagccatggctgcagcttctattctcgagcctgacctagaacattgttgtataactgatgatgtaccacctaaaggggtcatcgatgcacaagtctatcgctgcccaccacaatccttcgtcccctcctatagattccaagttgcctaaaggaacacc

SEQ ID NO: 207401 - DNA, 427 bp, Glycine max
ggaaatttttcgaactgatggcgaacagttcctcaagtatccaccacctaaagtgatgcaggtggataagtctgcatggatgactgatgaagaatttgctagagaaacgattgctggtgtaaatccaaacgtcattaagattcttgaggagttcccaccacgtagcaagctagatacacaagcctacggtgatcatacctgtataataacaaaacaacatttggaacctaacttgggtgggctcactgttgagcaggctatccagagcaagaagctgttcatcttagatcaccatgactatctcattccatatttgaggaaaataaatgcaactaccacaaagacttatgctaccagaaccatattttttcttgaaaagtgatggaactttgacgcctttggtcattgagttaagtaagccgcatcc

SEQ ID NO: 207402 - DNA, 539 bp, Glycine max
gactggggggggtatcactatgcaatctacgccgggaagctcaggatacttggatttgtatccagagcggaagatgtcctttttcaaaaatccttacattctcggactggctgctgtcgccggcatcggtggtctcctcttcggctacgacactggtgtgatatcaggggctcttttatacattaaggatgattttgaggaggttagaaacagcaatcttctccaggaaacaatagtcagcatggctattgccggggcaatcgtgggagcagcattgggtggttggattaatgatgcctatggtcgaaagaaggccaccctctttgccgatgttatctttaccgccggagcaataatcatggcttctgctccagatccttatgttctcattttgggacgccttctggttggtttgggtgtgggcatagcttctgtcactgctcccgtttatattgcagaagcttcaccttccgaaataaggtgttcattagtcagcacaaatgtcctcatgataaccggtggacagtttctttcctatc

SEQ ID NO: 207403 - DNA, 517 bp, Glycine max
ggaaacaccaagaccgaacaactcttgattcatttttttcagcataccccacaacaggatccttttcaaggtcagctgtaaatcatgaaagtggtgcaaaatctggtgtatctgggattgtttcaggaattataatgacctgtgcacttttgtttctaacaccattatttgagtacatacctcagtgtacccttgctgccattgtgatctctgctgagataggtctggtagattatgatgaggccatttttttgtggcgtgtagataagaaagattttcttctttggaccattactagcactacaacattgttccttggtattgagattggggtccttgttggggttggggtttcacttgcgtttgtcattcatgagtcagcaaatccacatattgctgatttgggtcgtttgccagggacaactgtctataggaatgataaacagtatcctgaagcatatacatacaatggaattgtaattcgtcgtgttgatgctccaatttattttgcaaacac

SEQ ID NO: 207404 - DNA, 479 bp, Glycine max
aggcagcgaaaggaacaattttattaattatatttacccactggattctccatttggttacacgtagttccaattcagaacaccaaaacactttcaagaatttgtcttaacagaaatttccactttcgttaatgatggagattcaacattgaaaccaaattattgcaggcaacttctcttctgttggtccgtgtattcaaacacaattgcaacattaccaaaacatgaattctggtagtcgtctaactcatgcatacaacccatcaatgttacattccccaagaaaaaccttgatgctgcgtggtgaaccacagctgccttcgacaatcaatgctctgtcattggcagccatgtgtgcgataatcttgtaaatcatttcgatatcttcaggagcatggcaacggtctgctacttcttcgagggtcaatggttctacaggttctttgcagcttgcctcatttagcactgccaacactcgc

SEQ ID NO: 207405 - DNA, 410 bp, Glycine max
  unsure (1)..(410): unsure at all n locations
gcggctgttcaagctgcaatcttaagaggagagggcaatgagaaggttcaagatcttctcctcctaggaagtcacccctctgtctctaggtttggagactgccggnggagagatgactgtcctgatccctaagaacactacaattccaacaaagaaggaacaagttttctcaacatactctgacaaccagcctggagagcttatccaggtctttgagggagaatgagcaaggaccagagataacaatttgttgggcaaatttgagctatctggcattcctcctgcacccaggggtgttcctcagattacagagagctttgacattgatgccaatggtatcttgaatgtctctgccgaagataaaaccactggccagaaaaataagatcactatcaccaatgacaagggta

SEQ ID NO: 207406 - DNA, 512 bp, Glycine max
gttgaatttcttgaaggattttgaaacaatagctcggcatcaagatcacatgttctcaggaaactgaaccattgggaacagcaggtcctctggctcttgccagggataagctgatagatgactctggagaacccttttttgttctcaacagtgatgttatcagtgagtatccactcaaagaaatgattgaattccataaaaaccatggaggagaggcttccataatggtaaccaaggttgacgagccatcaaagtacggcgtggttgagatggaagagagcacagggcaggttgataaatttgttgaaaaaccgaaattgtttgttggtaacaaaatcaatgctggaatttacctgctgaacccctctgttttggatcgaattgaactgaggcccacttctatcgagaaagaggtgtttccaaagattgcttccgagaaaaagctatatgccatggtcctgccaggattttggatggacattggacaatcgaggattttattgctggcctga

SEQ ID NO: 207407 - DNA, 514 bp, Glycine max
ggctagaaacaactaaacaataatggatttctatacgcactgaaaatacacaacgaccacactgaaaatacatcaatgcaatggcgtcactcattctaatccaaaaactgacttatagaaaggaaagaaatgccatgaagtaaaaaggaaaaccaaatgaaacggacaaacatattccagactcaataatttttctacctcctcaccacatggtaccaatttgaacatcattgacctcactcacatgacaatctccggcttcagaatatttgacttgatctccttgtgcggcaaaacaacaccaccattgctgtaaatttcatcacatacatggacatcttctccaaggatggtcatattatccactcgagcccattgcccaacagttgaatgccacccaacaatactgctggatacacaagcatgcttcttaactcggacttcacgcattattgtgcagcttttgagtctaacaccttgctcaataacgcagccaggaccaattgcaacatta

SEQ ID NO: 207408 - DNA, 471 bp, Glycine max
ggatgatgctggattggaagccgcgccgccccgacatgctcattgacccctttgggattgggaagatcgtgcaggacgggctcgtgttcaggcagaacttccccataaggtcttacgaaattggcgcatacaaaactgcgtcaatagagaccttaatgaatcatttgcaggagactgcacttaatcatgttaagaccgctgggcttctaggtgatggatttggttccacgcctgaaatgtgtaagaagaacctgatatgggtggtgactaagatgcaggttgtggttgataaatatcctacatggggtgatgttgttcaagtagacacgtgggtttctgcatcagggaagaatggtatgcgtcgtgattggcttgtgcgtgacgccaaaactggtgaaaacttgacaagagcctccagtgtttgggtcatgatgaattaaggtgccagaagactgtcttaaatttcccgaa

SEQ ID NO: 207409 - DNA, 388 bp, Glycine max
  unsure (1)..(388): unsure at all n locations
caaattccaatccttcaattcaataatttctttttaatgttgncttctctgctgaacccttgggtgaccttttcccttccaatcccctcaattttaatccctaataaccggcgagcctccaccgtagtatcatgcacctcctcacacctcaccaccaacaaccactcccaagtttcttcgccgccgaacatcaagagacgaggcccgccgccgccccgcggcggataacgacttcacggcgaagtacgtccccttcaacgccggcttcgactcgccggaaacctactcgctcgacgaaatcgngtaccgcagccgatccggcggactccttgacgtgcagcatgacatggtggctttatggcgcttcgacggcgcgttctggcgcgcg

SEQ ID NO: 207410 - DNA, 452 bp, Glycine max
aatatataaaaatatttatatagcattgctcagaaattaaattatttgcaatggaaggaatgagctttctctggatacatcagctagaaaaggaaagcaacaaacagcaaagaaaacaaacagaacagaagaagaaaaagaaactaagaactctatgtaagagatgcaacccatacataatctggcataaaaaggaataagggttgtttgttctatttagtctggcaattaaaaatttatttattacaaccaaaccattcatttagtcttacacttgtctctcactcactcactgacagagagcacatgatgttttttaagggccagtgatgcctcatccggtgctgatgatccaaatttctgaaactgaacccttaatatattctcctcagacaccaccaaacgcctgtttccatcatcatcgaaatgaatcccaatatgcccacatttgc

SEQ ID NO: 207411 - DNA, 562 bp, Glycine max
tgctcaaagaagtgacatatttgcccatattcttatctggcatttgcagggtgagactgtacctgagacaggaaaagacccaaacagtgggaagaatggttcatttctagaactgctgccagcggtaaggcagcgtataattgatggttttaatccaaaggcacttgacatatttaaaagagagtttgatttctttgacaaagttacatccatctctggtgtactatttccactccctaaagaagaacgccgagctggtatccggagggagttggagaaaattgaaatggatggtgaggacctttatttaccgacagcttctaacaagcttgttaggggtattcgagtagatagtggtattcccttacaatcaggtgctaaagtcccaatcatgataacttttaatgtaattgatcgatatggggatgagaatgatgttaagtcacatgcttgcattttcaaggttggagatgactgtagacaagatgttcttgtccttaagttatagcactacttagagatttatttgagccgttgcttaaaactttatctatttcttatg

SEQ ID NO: 207412 - DNA, 570 bp, Glycine max
ttttcatgtgaagtatatccctagggaaaaataatttcttcacatttacaatgaagcaatccactctattcctgttcctattcctattccccctcgttcatgctctttcttacgaagctgcttatattagagatggcctcaaatcctattcccagcttgatctccctcactccgtttttggttctgaaagtgtagccttcgattgccatgggaaaggaccatatgttggagtgtctgatggtagaattctcaagtggcaagagacaaagagagagtggattgactttgcagttacctcgccacacaggaacaagaaattatgcgacgggttacaaaatgacaagatggaatcaatgtgtggaagacccttaggcctcaaattcaacactgtaacttgtgaactgtacattgccgatgcatactctgggcttctggtggtaggaccaagtggtggtgtggcaaagcaattagccacttctgctgaaggggtcccatttaggttcacaaatgccttggacatcgacaccaaaactggtgaagtatttttacagatagcagcatcttgttcca

SEQ ID NO: 207413 - DNA, 567 bp, Glycine max
ctcttgttgattttgctaacaagcggtttgggaacactgagtgtcaatggcctcaaccttgttccaaagcctcttgttgattttgctaacaagcccatgattcttcatcagatagaggctctcaaggccattggcgtcaatgaagtggtgctagctatcaattaccaaccagaggtcatgttgaatttcttgaaagagtttgagacaaagcttggtatcaaaatcacttgttctcaagaaactgaaccgctaggtactgcaggccccttggctcttgcgagggataagctaataagtgactctggagagccattttttgttctcaacagtgatgttatcagtgagtacccacttaaagaaatgattcaattccacaaaacacacggaggagaggctaccataatggtgacaaaggtcgatgagccatcaaaatatggtgtggttgtgatggacgagactaccgggcatgttgagagatttgtagagaaaccaaagttgtttggttgcaacacaatcaatgcttgaatctacctattgaacccctcagttttggatccgattgaactg

SEQ ID NO: 207414 - DNA, 509 bp, Glycine max
gtgccagcaaagctgttgaggatattgactgggatgctctaactgtgaagggtacttgccaggaaattgaaaagcgttacctgcgcctaacttctgcacctgatcctgccactgtaagacctgaagaggttcttgaaaaagcactattgatgattcaaaattcccagaagaattacctctataaatgcgaccagttaaagtctattcgtcaagacctaactgttcaacgaatacgcaatcaattaacagtcaaggtgtatgaaacacatgcccgattggcactggaatttggggacctgtttgagtataatcagtgtcaatctcagttacaaactctttatgccgaaggcattgaggggtccgatatggaatttgctgcttacaacttgctttgtgtcataatgcattcaaataataacagagatcttgtatcatcaatggccagtgtatcttacgaagcaagaaggatgaagctgtaaacatgcccttgccgttcgtgctgctgtaac

SEQ ID NO: 207415 - DNA, 494 bp, Glycine max
acattgcaaccaaggaatgtatatataaaaataacaaaatcgcccataacgtacatatataccagatacaaatttttcacgacatatgatattacaaatgactaaaacttctagataacaacgaacaaaagctatataatgaattcccacactaccacgcagttcaaaattattgcataccaataatttcaagaacccttattaactttcactttcaaagggattggtacaacaatatcatatgctaataaatataatcttaagatgaagaagcaggtttggaagatgggttgaaaggaacctgctcagcgcatgtaaggatttcatggggcccagcctgttctcgaccaacacctagaaggtcaagataatactggtaatgggaaacgatattgttcatcgagtccacatcaccttgtccacaaacaccatccccatagagaatgttcattgtagtgccaaatccaggaagacgattctccatagtatcattc

SEQ ID NO: 207416 - DNA, 553 bp, Glycine max
ggcttccaaggagttctctggtctttgctccttggctccttcactatctgagagcattttgtgcactactgggttgaaaatgtatatgctggagagcaaaggaggtgccatagcatgcatgttcttgtctcttttcttcttggggacatggcctgctcttttgactatgttagagaggcgtggtcgtcttcctcagcatacctaccttgattactcaatcaccaatttcttggctgctttactcattgcttttacacttggtgggataggcaagggcacacatgatcagccaaatttcttagttcaacttgctcaggataactggccctccgttcttttcgcaatggggggtggtttgttccttagccttgggaatctgtcctgccaatatgcatttgcttttgttgggctatcggttactgaagtgatcacggcaagcataactgttgtcataagcacaaccttgaattactttttggatgacacaatcaacaaagctgagatccttttcccaggagttggttgctttctgattgcaagttttctaggttct

SEQ ID NO: 207417 - DNA, 162 bp, Glycine max
atctctctctctccaatggccaaagacctcttaacggagattcaaagagggttgcctcacatggactaccacgacccaccccccgccccattctacgaccccgccgagctccgaatgtggtccttcttccgagccctcatcgccgagtttggcgcctccctc

SEQ ID NO: 207418 - DNA, 499 bp, Glycine max
ttttttttttttttttttttttttttttttttttttttttttttttttttagtatggttattttaatttaatttttaaaagtaaaaaattctcaataattgtgtaaaaaaaaattgcgatatttgtgactttccggggggagaaaaaaagagggtgcccaaaaaaaggaaaaaaaaaaaaaaacaaagggttacaaaaaaaaaaaaaagaaaaaaaccaaaaaaaaaaaaaaaaaaaaggggggggaaaaaaaagggcgaaaaaaaaaaaaaaaaaaaggtgttaaaaaaaaaaaaaaaaaaccccaaaaaaaaagggggggggagcgggaaaggccaaaaaaaaaaaaaaaccctgacccgggtaaagaaagaaaaaggggggggggggaaaaaaaaaaaaaaccccccaaaaggggggggggggcaagggccaaaaacggggggggaaacgaaaaaaaaggagaaccccggccaaagaaaaaacaatgtatcgggag

SEQ ID NO: 207419 - DNA, 486 bp, Glycine max
gttgttgtgtaatgatactcattgtcaccaccaacacgctttcactttactgaacaacgacttcatcttcactcttccttcaaatttccaacaagaaagtttgttcaactgtccctttattggcgttagctatgctacctactggagcaaaagagacccaattacgtgagaacaacagccagaaggtccatcctcaaccaatggaagaggccatgaatcataatccagaagcaatggaaaccctaatatctaaagtttttacaaatatctcttccttgaagtcagcttatatccagcttcaagctgctcatactccctacgaccctgataaaatccacactgctgataaacttgatattagtgagctgaaaaatctgtctgaactcaagcatttctacagggagaacaaccccgaaccagtgtgtgtttcttcccaagactcacgtttagcttgcagaattcaagatcaacagagccctcttaaaa

SEQ ID NO: 207420 - DNA, 540 bp, Glycine max
aagtgaaaatgcatcacttgttgattagtttagtgccctcaactgtggaaaactcatacaccagaacattgcttctccccaaagcattgaaactcctaaattaaggaacatttgttatataccttcctattcccctctcccacaaacactagaattcaagtgcaggatattttcacaatacaagaggggccttgaatgtaaacaagcttaaagggctcatttactcttacaaccactaaaaaggatattaaaaattacagacaacagcattatcttacaagataaagaaacaacaattcaaacaaaccacatacaatcaactatgcattttctgaagtcttgagtgtgttcaggaatcattcagccaccttcataccagagagatagactttactctgaatcacacttcccccaatccaaaatccaggcataaccatcaaaccaactttaggtttttcatcattgtcatccattatcaaattcttgaccacactttccatataaacatcagagaactcactcccttcttaacctgaaata

SEQ ID NO: 207421 - DNA, 616 bp, Glycine max
ggtcggtagagtggcgtggcgttttacttacaacatcatcaaaattatcaaattcacctggttcggcaacctcaatttctgctccctaaatcatgcttgcgtttcgatcgaagccttgttgcagttacaaggaaacagcgtccctcgcacttgcacacttcacgcacttggtgctcaactacgcacgcgccgggagctcttggtgccctacacgcgccggcttcggggttcggagaggctacatcgtcgttgcctcgttgggggacccacccgaagtctggtccggcggcgggattgtcgttcgccccgggaattccaatttcgaagtcgccggcggcggtggcgccccgaactccggcgattcaaaagaggggtgctggggtggctccaatttggggaacagtttcccaacgccaaacgaaatttgcaaggcgctcgacaaattcgttattggacaagagagggccaagaatgtgctatctgtagcgggttattaacacttatagacgatatttaatgaaaacctttttgaccaagtggcctgcatgagaatcagtatatagtgggatagttgatgctgctgatgatgattgaagtgaacttgacataagcacat

SEQ ID NO: 207422 - DNA, 530 bp, Glycine max
tgaattagctatgaacaatgatgagcttcatgtggttatgttcccattccttgcattgggccacattagtccatttgttcagctctccaacatgttgttctctcatggtgttcatgtcactttcttgtcagctgcattcaacattcccagaatcagatcaactcttaatctcaatccagccatcaatgttatctcactaaagttcccaaatggtataaccaacactgctgaattgccacctcacttagctggaaatctcatacacgcccttgacctcactcaagatcaggtgaagtcccttttgttggaactcaaaccccactatgttttctttgactttgcacaacattggctcccaaaattagcttctgaagttggcatcaagtctgatcatttctcagtctactctgccctttctgatgcttacattaccgtgccttctagatttgctgatgttgaaggaagaaacatcacttttgaagatcttaaaaagccttcacctgcgtatcctcaaaactctaatatttccc

SEQ ID NO: 207423 - DNA, 484 bp, Glycine max
caattattcaattttaaagggatatcaagtgtgctaatatactggttgatgtaagtgggcaagtcaagcttgcagattttgggttggcaaaggcaacgaaatttaatgatgttaaatcaagcaaaggttctccatactggatggcccctgaggtttctccctgctcttgtatcatttgcttggagtaattcctgcaaaggaatgaaatcatatggctgtctaatttagttttagtctgtagtacatattccaaatgttgctgtaagaacataaagtataaccatccataaattagtttactgcagtatatgcttccattgatttcttgtgatggagtgcagattcagaatcttgaaactttagtttttccacccacttgtgatttatgagagttgttttagtaaactggcaaatgaatttttatacttgtgagctttttattgcgactgcgttaactttgaattgctggttataggttgttaac

SEQ ID NO: 207424 - DNA, 142 bp, Glycine max
gagataccaataccgagcattattcgccctttcatagagaagctcctgcttttgtagagcatgaaaccggacagcagatacttgctacaggaatcaaagcagtagacctgcttgcaccatatcacagaggaggaaagattgg

SEQ ID NO: 207425 - DNA, 456 bp, Glycine max
atcgcaacgaatcagaggcccctttcaacgaatcacatggcagaaccgtcgtccaccggcggcaccatcgctaccgctgatcctccggttccagcgaccaaaagctgggccgacgaagcggacgaagaaaccaacgcctccaccgccgaggcagaaacctcctccgttaacctggaagcgttaaccatcgacgacaaagaaaagaactcttcaaaactcttggacgaccccgacgattctaatattcaagcggttacttctggcgatacgccgtacacgtcggcagcgaggttcgaggacctaagcctctcgccagagcttttgaaggggctctatgtggagatgaagttagagaagccgagcaagatccaggctatcagtgagccgatgatccttagcccgcccaatcgggacctgattgcgcaggcacacaatggctctggcaagacgacttgc

SEQ ID NO: 207426 - DNA, 371 bp, Glycine max
gggggccagtctcttggtttccttatgagatacccgcctatgtagcaacgacatgctttcatccataacaggtaagaagagttgcttcaacgagtcacgagtggagttttatcttgagcaagaacctcacccatcatcctccaaaaactagaaacaccttttcctgatgatccgcagaggtacctactccatgtatgattatggaaagctataaaatctgatagagtacggcatgttcaatccaccaaagtgcgaccttaggcgcatacccaaatcattgcctctgaggatggcctatggtggaaatgatgcttaggcagatataactgatttccagcacacactcaaagaattgccatccacaccggaag

SEQ ID NO: 207427 - DNA, 393 bp, Glycine max
aaattaagggtattggtattcaagaatgaaaatgacatgggacgtagggcctacagttgaagttggggatttgataaacaagccttttaatgaaaatgccagataaaaagagacctgagattttgaactagaatagctcatcctcctggggggtctgaataacaacatttggggggggataagcaacacaggggagaacaaatccgttaccgatttgggtatcatcaagggaactaccattagattgggcgactttgccagaaacaactttgccggcacaggaagagcaagccccagccttgcatgaatagggaagggcaatgccaaattcctcagccttttcaagaatgaaaaccttatttgggcattcaaattcttgggctcctttggggg

SEQ ID NO: 207428 - DNA, 571 bp, Glycine max
ctcccagaaacgaagccctcgaacgctatctcgaccccgatttcaagcgtttcctcctgagaccctcctgttgtcccacatcgtccccaaaagaatcaccaaacccgaattcaaaaccgggtcgacccgacacagaactttagcgtctcaccaccacctcactctccaagccctgaatttgactcactggaatgttgagtcttcccgggttattaacccgaattcggtaacccgacccgacggagtgatccacggcatcgacactctcctcatccctcgctcagtccaagacgaattcaaccgtcgccggaatctgatctccatcgccgcggtaaaacccgtaccatccccggaggtcgacccgcgaacccaccggttaaagaaaccggcgccggcatcgccggcgggggccccgccggcgctcccgatctacgacgcgatggcgccggggccatcgcttgcaccggcgccagcgccgggtccgggtgggtctcacaagcacttcaatggggaaaagcaagtaaaagatttcatcgagacgttactccactacggtggctacaacgagatg

SEQ ID NO: 207429 - DNA, 493 bp, Glycine max
attagtttctttgtatctgtctcagttacttccattctccaagcctgcttcatccttgggggggatcatgggtttcaaatcccttcttaacatgaagaagaagaaacttctgaagacgatgcctctttcgttctcattgccccacgcgcctccggaatggctgcattcatcacgcgcctacgggatggaggactctgagtctgccttctaaaagatcgactcatacggccacagactgatactcggtgccgaactcgtctgcatgatgcatagcctgggccagcccccgaccgatgaagagctagagaccctgcttcccgaggtcgcttgcgtctgtgacgcgcccatggacttggaggagttcaccgagatgaataccagggacgtggaccccgacgaggatttggagaatcgtgaggacgctttgtgcatcgttgatcttgacggcaacggttgcatcaccgcggaggagcttaaaatggtgatgggaagc

SEQ ID NO: 207430 - DNA, 361 bp, Glycine max
agtggttattttttttgttttgttactgaaacatcatgtgaccacaacaacaacacaaaaaaaggaaagaactcgagcaaccaaaaatcgacaacacgaacaaaaccgagagtaagagaaataaaaaacaaatagaaagaaccagaaacaaaaccaaaacaacaaacaacaaaaacataaaccagcactacagaaaactgaagaacagggaccagaaatacagaaaacacaaagggaaacaagagaaggaaaagccaaacatagcagcagggaacacgccaccgaagacatacactggggaggcaggacaccaagacgacacccgcgaacgaaaattcgaaagagggaatggaaaacaccg

SEQ ID NO: 207431 - DNA, 596 bp, Glycine max
atcggaagaaggattagggtttgtggagatgcaagggcaaggcgttgatgaagtgagcatagaagagttggcgtcgaatctttccctctacaaagatcaactgaaccaggttagagaactcttaaacgatgaccctgcaaattctgaatatgttgacatggagagggaactttccgaggtcattgccttgaccgaggaactccttgcaactgcaaagcagaatgaaatctctgctcctcctaataatgctgctgcatctccaaccttgtccatacataacgagaatcaattgctagatagtagttctgatcatcaagagaaacttgctgttggcaccaaagttcaggcagtttggagtgaagatggggagtggtatgatgcgacaattgaggcttatactccaaatggttattatgtaagctatgacaattggggtaataaagaagaggttgatcctgccaatgtaaggtcaattcaagaaggttctgttgatgctttattagaagctgagcgagttgctgaagcaacaaaacaggccatcaaacgaaaaattgcacaagctgcatctatcgatttacagtctcggagtctaccta

SEQ ID NO: 207432 - DNA, 489 bp, Glycine max
  unsure (1)..(489): unsure at all n locations
agtgaaagaaaaaaaaatatatatatgtggggcgaaagctacaatctagaacagttctgaagtctcgacacatttcagtagataacattgtttggtttgccatcagtgaacctctacagagaatggttgtttgagcatgttacatacaattgaaagggcatctagccgagtcggtgcataacctaatcatcattttcaacagtaccatctttgaggtgaaaatgtttttctctcttctggaactctgtcaaacctttcccacttcccgtcacaccaacctttccctgaggatcatcaggagatttaaaaatactctcccgttttcttccagagaagaaaccaatcttctttgcctttcttttggttgactgaaactgctgccaagcattttgccgcttttnntgtgtgacttcaagttgctccatccgcatctntgacttaaagcatgtatttcttggcgtttgaagctttacatctcaggatcatcag

SEQ ID NO: 207433 - DNA, 511 bp, Glycine max
  unsure (1)..(511): unsure at all n locations
cacaagtgttcttcctctgtaaacacacaaactctgttcctatttcagagtactgtccctttacctcgtacacatcaaacaatggaaggagatgggtattgcgggagtttctttcagaggtgcaagccttacatagccatgatttctctgcaattcgggtttgcgggtatgaacataatcaccaaggtttccctcaaccgtgggatgagccactatgtgcttgtggtttatagacacgcctttgctactgcagctattgctccttttgctattgttctagagaggaaagtgaggcccaagattacatttctcatgttcatgcaaatattcgtgttgggtctccttgggcctgtgattgatcagaacttatattatgcggggttgaaatttacttcccctacctactcatgtgcgataagcaacatgctccctgctatgacatttgtgatggctgctattttcaggatggagaaagtnaacgtgagatacagtagatgccaagcaaaggtga

SEQ ID NO: 207434 - DNA, 582 bp, Glycine max
cgcacattctcctcaaagacaacaatggcaccaacagccaagactctgacttacctggcccaggagaaaaccctagaatcgagcttcgttcgggacgaggaggagcgtcccaaggttgcctacaacgaattcagcgacgagatcccagtgatttctcttgccggaatcgacgaggtggatggacgcagaagagagatttgtgagaagatcgtggaggcttgcgagaattggggtatattccaggttgttgatcacggtgtggatcaacaactcgtggccgagatgacccgtctcgccaaagagttctttgctttgccaccggacgagaagcttcgttttgatatgtccggcgccaaaaagggtggattcattgtctccagccatctccaaggggaatcggcgcaggactggagagaaatagtgacatacttttcgtacccaaaaagagagagggactattcaaggcggccagacacgccagaagggtggagatccgtgactgacgaatacagcgaccaagtaatggggtctagcttgcatgctcatggaggtgttgtccgaagcaatggcgtagagaaagag

SEQ ID NO: 207435 - DNA, 515 bp, Glycine max
  unsure (1)..(515): unsure at all n locations
gcagccaataataaagacagtgccacttattttcatttataatagaggcaaatataaggtatacatagatgagccagctagctaataagacataggcaactgaacacaacacatgatatccccacaaaggataaatcataagacgtacaaaagcacaaaggtaaggactattattaattcatggcccttaaaaaatactaaaaacaccaagggggcatgcaaatgatacatatgtaattattattaattaagcaagaatctccttcaaaggcttggcctcaagttttgccttctgatcaagttcttgcaaatgcttttcattctcaaggtcctgcaaatgcttttccttagccagcttcttcatccttgcaatctcaatgtccttgctcatcttcctcctgtacatttcagcaaaagtgattggttcctccatcacaggcttctctccttctcttatcttcagagggtaaacagttgcatttggtgctgggttntgaaaagtggctatggacaaa

SEQ ID NO: 207436 - DNA, 532 bp, Glycine max
tgaagacagtgttaatgcttgcggatcaattgattaacagagttgaatatatgcattcaagaggtttccttcaccgtgacataaagccggacaattttctaatgggtctaggacgaaaggcaaatcaagtgtatgccattgactatggccttgcaaaaaaatatagggatcttcagactcataggcacataccatacagggaaaacaagaaccttacaggcacagcacgctacgcaagtgtcaacactcatcttggaattgaacaaagcagaagggatgatctggaatctcttggttatgtgctcatgtatttcttaaaaggaagtcttccctggcaaggactgaaagctggcaccaaaaaacaaaaatatgataaaatcagtgagacaaaggtgtcaactcccatagaggtgctctgcaaatcatattcgtctgagtttgcatcatacttgcgctattgccgatcactgcagtgtgaggacaagccagattattcgtatttaacgagacttttccgagacctatttattcg

SEQ ID NO: 207437 - DNA, 542 bp, Glycine max
gaagaaacataccgaatgagagcatcaaactcttcttcttcgatttccattgcgaagcgttactttttcttcttctttctcttcattttcttcgctcttcgatcttcgtccggggactgctccgaataccaccaccaccactcgccgatggccacgatcggaggcttacacgactcccaaggctctcaaaacagcgtcgaaaccgaagccctcgctcgattcgccgtagacgaacacaacaagaagcagaattcgcttctggagtttgctagggtggttagggcacaggaacaggttgttgctggtaccctgcatcaccttactcttgaggctattgaagctggtgagaagaagctctatgaagcccaggtgtgggtgaaaccatggcttgattttaaagaacttccagagttcaagcctgctggtgatgcaccatcgtttacctctgctgatcttggtgtcaaaaaggatggtcaccaaccaggatggcaatctgtgccaacacatgaccctcaagttcaagatgcagcatatcatgcgat

SEQ ID NO: 207438 - DNA, 573 bp, Glycine max
  unsure (1)..(573): unsure at all n locations
aaatacaaatggtcaacatccgcattttttatgatactaaagtaatatttacgttacaaagttactaatgtaacatcaccggtagcttcccagttaataaagggatacacacattgtaaaactacttatttgccaaggcacagagaaaggggtaagcactagacatagataagaacaatattgctagggtgaccaaacttcagatcagaattaggaatgatcttgttccatctgatttagatggaaccccccttggttattcttgtgtacctctaccttaaacttctcttccttctgtcccctcttgactttgagaagcagattaaacttagcaaaatcatcaatgacctcagcctttgcatcagcaacctcatgaagctcatagggtactagtgaattagacctttgctggatggtcttgatcgcatgatttgctgcatcctgaacttgagggtcatgtgttggcacagattgccatcctggttggtgaccatcctttntgacaccaagatcagcagaggtaaacgatggtgcatcaccagcaggcttgaactcttggagttcttgaaattc

SEQ ID NO: 207439 - DNA, 499 bp, Glycine max
catgggtggagctgagatcattaaatctgaccctgatgtacattcagggagactgtgctggagagatcatgccgctctgtgatgagcaaatcacaccaacaatgcacatatcgtgtgtacatggaagcaagaccattggaggaaggtctcgccgaggccattgtcgatggcaagattggaccaagggatgacccaaagagtcgctccaatatcttcggagaagagtttggctggtacaaggatctcgccacgaaaatcttgttctttggccctgagacccttggacccaacatgttgagggatatgttgtcagaagtccagtccttgaatgaaatcaatgattctgaggttgctctagttcagtgggcatcaaaagaatgagctctggccgaatataacatgtgagccatttgctttgaagcatgtgatgtagttatgcacgctgatgctatccacataggaggaggtcgaatcatccctactgccaggagagtattct

SEQ ID NO: 207440 - DNA, 450 bp, Glycine max
  unsure (1)..(450): unsure at all n locations
aatcagaattcagtaatcacttaagctcaatatcaatagccattgttggggggtaaagttcaaactcccattgagaaactttactacatctaattaaagatgaaattgattaaaacataacttaatttcaactcacagcctacaaaattacaaattaaaccatgaaattcaaaacagaaaatcctatgacataatgaaaatgcaaatccacaaaatctggtgctgaacaatgaaagcaaagcaagctgctccttttgtagtttgtgcactatccatgactcaaagcatgcaatcagttcttgcaggcagcctcctgaagaaattcagaggcaccgaaggaangcttgtggcggaacctggggtgtctcaacacatagattccagtgaaaagtgcgacaatttggaaaggagtgacatagagtacaatggcagcaaccagacagaaaatca

SEQ ID NO: 207441 - DNA, 624 bp, Glycine max
gtaatccaggaaatttttgtaagtgagcttattctcttgggttatttagcagtaatatataaggattagatacttcaattaggaaacattgtttatgtcctcaggtggtgaagaaaaatcagattcaaatcagatgaagagtgaatattttagaattaaaactagcattatattcctgtactgaaataatacgataaagtcatgattacatctagctacttctctgtatccatattaatgtcatttttttgaaattttcatcatttattacattctatatcattttctctcattttaaagataaatggttcatgtcagtaagtctctatgactttatgaatgccacatgatagataaaatgattgtttttgaaagatgggaaatttgagcatattatttagaattttattttatttgttataatctcattaaatgaagtggtggcacatcattcgatgacaatgtaaaaaaccattttatattgacaatgcgtcaaaattaatccattataaatcctgttgactggctttcttactggttttctattttcttagagctataatgggtttgcaattatcatactgctctactgaagagccttatattatatttgcatcattcgca

SEQ ID NO: 207442 - DNA, 516 bp, Glycine max
ctctatcgcttctagctgtagagaatacagattattccaaacctctctctttctctcatcccctttttgctccttcttcttcttcttcttcttcttcttcttcattactcttccttgctccactcctcatattatctttttctgaagaaacacataatcatggaggggtctcacatggggttgttgctcttcttttgttcttccatgctttttgctgccttcgctgctgcctcctccagaaacttgcccataataccctttgatgaaggctacgcgcccttgtttggggacagcaacttggtcatccatagggatggcaaatcggttcatctttcactcgatgagagaacaggttcaggatttgtgtcgcatgatctttaccttcacggatatttcagcgcttctattaagttgccttctgactacactgcaggagttgtggatgccttctatatgtcacatggtgacatgttccagaataaccatgatgaaatcgactttgagtttttggggaac

SEQ ID NO: 207443 - DNA, 420 bp, Glycine max
ttccaaatgtgacgggatcgaacctcctcagcctctcagcttcttgggaactgatgacacactccgaaggagggactttgtatctgactttgtcatagcagtaggagtatgtcatgtgcttcttcctgaaattctccattttgattctttgtgctggtgtaacaccagaagaaggaattgttgtagttgcctcagaactttgaggagcattgtcacacttggccacgtgctgctcaattggatccactgcacaaccgtgcagaacaaggtcagagaattcagcaacatagggtgcatacttgtagttaaccctgtatttgcccccattggtagcccaatcagatgcatcccatattgttgcatacaaagtcattggcttagaagggaaatcccctccatagattctgttcgagtcacttc

SEQ ID NO: 207444 - DNA, 513 bp, Glycine max
  unsure (1)..(513): unsure at all n locations
gaatcctggtctctgtctactcttcaattattcccaacctctcacctcttcatcttggtcttccttacctttgaccagagacagagcagcactcacattcacaacgaaggtttcctattcatcagacatggtgaaggcaatcagagttcacgaactcggtggccctcaagctctgaagtgggaggatgtggaaattggagatccaaaagaaggcgaggtccgtgtgaggaacaaagccattggggttaatttcattgatgtctactttcgcaaaggagttaacaaagccccttcttttcccttcactccaggtatggaagctgctggggttgtgacagctgtgggtgctggactcactggtaggcaggttggagatcttgtagcttatgcaggtcaaccaatgggttcatatgctgaagagcagatacttcctgcanataaagtagtccctgttccttcgtcaattgacccagctgttgcagcatgcatcattctcaagggcatgacaactca

SEQ ID NO: 207445 - DNA, 434 bp, Glycine max
gagggaagtcctttttaaccaaagtcaacagaaaaatcattatttaagtccaatgattcatgggaaacaacatacatttgccctttcaattcttaataaagagttcttttcaagaggaagcaaaccgggacttgggggttaacacatacccaactgagaggcttaggggttcaacacaaccgaacctgacgtatttcaattctccaagtcttcgggggcttttgcacccttaaacaatgggaaagtttgattaacacggacctttaacccaccgtaagcaacgttagcaaacaccttttcagcagccttcaacagcttatcccgaggggcaacattttggattagactaggcctagtcaagaaaagggattttgcaaccagggaagattatggaaccggattaggtgaaccaaatgactgcccaaaacttacca

SEQ ID NO: 207446 - DNA, 530 bp, Glycine max
gaagaaaccgcatacgatcgtgaagagtgcccgatttgctttctgtattatccaagtctaaaccgatcaagatgttgcacaaagagcatttgtacagagtgctttttgcagatgaaagttccaaattcaacccggcctacacaatgtcccttctgcaaaacggcaaattatgctgtggagtatcgtggtgtgaaatctaaagaagagaagggattggaacagattgaagagcaacgtgttatagaggcaaaaattaggatgcggcagcaggaacttcaggatgaagaggaaagaatgcacaaaagactggaaatgagctcctcgaatgtgaatgtggcagttgcagatgttgaatacagttcaaatgcagtgtcttcatcttcagtttctgttgctgaaaatgatgaaattggttcttctcaagactcatgtgccacatcagtggttagagcaaatgcaaccactatgaccaatagagatgatgaatttgacgttgaccttgaggacatcatggtcatggaagcatttgg

SEQ ID NO: 207447 - DNA, 534 bp, Glycine max
atcacttggtgtttacattcacaaatcacaatcccacacttccttcctcattgtcctcttctctcctcacatttcaacgcgccgccactctgcgatccgcgatgaattctcgtgaacagcctcagccacaacagccaccgcaaccacaaccgccaaacatgacggtgggacccaccatgtacccttcgatgttgtcccccgtcaccgccagattcccattcagcagcagcagcaacaacaatcctcctccttcggagcctctcaacaacgacaccaacgacaatgataacagcgcgttcgaggcgttgaagccttgcgcgctggccgcctcggaatcgtcgaagaagaagcggggccgcccaagaaaatactcgcccgatggcaacattgcgttgggcctcggcccaacccatgctcccgcttcctccgccgatccttccgccaaaaaacatcgcggtcgcccccctggttccggcaagaagcagatggacgctcttggaattcctggaactggctttactccccatgttatca

SEQ ID NO: 207448 - DNA, 566 bp, Glycine max
  unsure (1)..(566): unsure at all n locations
gaagcacggcaaaactgagaggttgaattgaaccgacacgacagacaaacagtgccatgaagaggcactggcgcaactggagccacgacgacgaaggcgaaggcctcccagattcggattccgacacgcgctccagccggagattctctctcacgcgcctcatggcaatctttctcttctctctcttcctcttctccctcatcttccttctcccacatcctcccatccaatcagcttcaacagcaaagactctgcaccaattcaagcaaactcaacaaggtaacgttgctgattctgttgagttgcacaaagataaactacttggtggccttatagcagatggatttgatgaacaatcatgtctcagcaggtaccattcggtcacatacagcaaaggactatcgggaaatccttcatcatacctcatttctagattgagaaaatatgaagctctccacaaagaatgtggaccttatactngaacctataatnaaacggtgaaagatctgaggtctggtcatgntagtgagtccccagcattgtaatatgtggtatggatttcatat

SEQ ID NO: 207449 - DNA, 546 bp, Glycine max
ctataggaaacaatgtaaatttaaaatcaataattaattctatcgtacaacaaagtttgcaaaacttgtaagctagttttgacagtcatgatagcattcatgaccatatagctacttattgccaactattactgtctacaagcttaagaccccagctcatatcctcacagtgccttacatgtggaacaagtgcaccagtatcagttcctctcttagccttacaatcatagaagggaggagcatggaagcatggctccatcgacatggcacgttgacaaggaggatcaggagctgttccattctcgggcttgtacagtatccacggtttcaacccttcaagcccctgcgccacgtagccgaaagtagaccacgagctcgtgaccaacatatccatcaagctcaagaggtaaatttctgcccaagctttttggttgtgcatcttcttctctgtttgttgatacccttcatggcttggctggtaaatgccaacaacttctcctgtcacagttgggtgttcccaaaacatgtctctcaccttttcaaaat

SEQ ID NO: 207450 - DNA, 534 bp, Glycine max
  unsure (1)..(534): unsure at all n locations
acaagaactctccaaggatcctccttcccacgagattctttggtgggaaaaatccaagaggtttgaaatttgaaggcagggaagatggattatttcaatgcaccatgaagaaaccatctctttggtccagggccggttaacattccggaccagatcatccggtccatgaacagaaacaatgaggactaccgttctccagcaattccagctatgacaaaaactttgcttgaggatgtcaagaagattttcaagaccactactggaaccccatttctcatccctacaactggtactggtgcttgggagagtgctctcacaaacacactgtctcctggggatcgaattgtatcgttcctgattggccaattcagcttgctttggattgatcagcagcaacgcctgaagttcaatgctgatgttgctgaaagtgaatggagccatggtgcttagcttgatgatctggaatcanagatagcttcagatacttcacacactataaaggcaatttgcattgttcacaatgagactgcaact

SEQ ID NO: 207451 - DNA, 512 bp, Glycine max
acaggacaataaaagaagcaatgcattaaagctgaaagtagaaagtacgttcatcttcaaaggagtgtaaaagagggtaatatatattttacagaatttctgaaagagcagaaaaaaggaagtaaagacaagaatgatttgtgactcaaatcctggaagggatcataggaatagtgttctgtaagtatgcactggcagcagcaactccacttccaagctttacaggataacccacatctttgagtatcatctctacaccagctagacatcccaacagttgcaactcattcaagtggccaagatgtccaattctgaaaaccttcccagcaactttgttcagtccaagacctaagctcaaattgtatctcttccatgccctcctaactatttcagtactatcaatgtaagcaggaacaagaacagcagtcacagtgtcactgtaccactcttccttttgggtgcaattcttcaaaccccatgcctttacagcaagtctggttgctttgcctaaa

SEQ ID NO: 207452 - DNA, 527 bp, Glycine max
aacaaagacaaaaaccgctctcttctccaacgctgtctgtcaccttaaaaaacaaagttccacttcatcagattcaactaaaccacaccattcgcatcaacacagcacttgtttgttcccaactccgaaaaatatcatgctcctaacgtaaaatcctcggtttcaacgttcaaccgcgatctcaaaaaacaaaactatggcatcactctcaggcatttgctcctcttccccgactctcaaaaaattcccaaaccaatccccatcgttgaccgaccctctccgcaaagaccacgtgtccttccccgcacgcctcgccgatcggaccctcagcctcgcgccgctccgtgcggtggctcgggaggtttccgacggaacgttggcggcggcggtgaagaaggggttggagaaggatccgcgcgcgctgtggcggagatacgtgggttggctataccagcacaaggaacttgggatttacttggatgtgagtcgggtcggttcaatgatgagttcgcttaggagatggaccc

SEQ ID NO: 207453 - DNA, 497 bp, Glycine max
aggcagcgaaaggaacaattttattaattatatttacccactggattctccatttggttacacgtagttccaattcagaacaccaaaacactttcaagaatttgtcttaacagaaatttccactttcgttaatgatggagattcaacattgaaaccaaattattgcaggcaacttctcttctgttggtccgtgtattcaaacacaattgcaacattaccaaaacatgaattctggtagtcgtctaactcatgcatacaacccatcaatgttacattccccaagaaaaaccttgatgctgcgtggtgaaccacagctgccttcgacaatcaatgctctgtcattggcagccatgtgtgcgataatcttgtaaatcatttcgatatcttcaggagcatggcaacggtctgctacttcttcgagggtcaatggttctacaggttctttgcagcttgcctcatttagcactgccaacactcgcttctgaagtgctagtact

SEQ ID NO: 207454 - DNA, 521 bp, Glycine max
  unsure (1)..(521): unsure at all n locations
gtagaatagtaatagtggtaacaaaaggcaacagagaacagaagagaaaggaaaagagagggtttggtgagttacccaagagaaaggatgaagagagagcgccagcagcttggttccaacgcaagaacctcaagctgcggttattcaagcggaaaatcgaatctttgggaggaagaaggaggcatggacgagcttcttgcagtggtgggttacaaggtgaggtcatcggacatggcggaagtggcgcagaagctggagcgtcttgaggaagccatgggaaatgtccaagatgacctcacggacctttcaaacgacgccgttcattacaacccttccgacatctccaactggctccaaaccatgctttccaattttgaccctctcccctccgaggagcccgagaaggactccgtctcgtcggactacgatctcaaggctattccggngaaagcaatctatggaggtggtagtgacgcgctaccaaaccctatgcgcgtgagaaccgactagtcaacgcgcgc

SEQ ID NO: 207455 - DNA, 528 bp, Glycine max
aaagattttccttgaccatggggcaaaagcatttagtgacggtgttctgtttatgggctttaacatgttcccttcttccatctttctcctttggaattctgagaattggtttgaagaagagacctctagatcttgatagtattaatgctgctagaaaggcaagagaaggtctaagatctgtaagaccaatgatgggtgcacatgatcagtttattggtaagtcaaaaggtgaagatatagtacctttgaagaattatttggacgctcaatattttggtgagattggaattggcacacccccacagcccttcactgtagtgtttgacactgggagttccaacctttgggttccatcatcaaagtgctactttactcttgcttgctatacccataattggtacacggctaagaaatcaaagacacatgtcaaaaatggaacttcatgtaaaataaactatggaactggatcaatatctggtttcttcagtcaagataatgttaaaggtggcagtgctgttgtcaagcatc

SEQ ID NO: 207456 - DNA, 462 bp, Glycine max
ggctcgaggttttgtttatttgaaattaacatagttgcaaagatgtttggaatcatcggaggaaacaagggtcacaagataaaggggaacttggtgattatgcgaaagaatgtgttggatatcaacagcattaccagtgttaagggtgtcatcggaaccggcattaacatcattggaggagtcgtcgacaccgttactgctttggcgtcccacatctccatccagctcattagtgccaccaaggctgatggacatgggaaaggaaaagttggaaaggctacaaatttaagaggacaagtgtcgttaccaaccttgggagctggcgaagatgcatacgatgttcattttgaatgggacagtgactttggaattcccggtgcattttacattaagaacttcatgcaagttgagttctatctcaagtctttaactctcgaagacattccaaaccacggaaccatt

SEQ ID NO: 207457 - DNA, 455 bp, Glycine max
agaacacttaacagcaatttatacaaacagaatttcttcattaacacttaacagcaaacacgagaacattcaatcaccccaaatacataacttaaccatacataggtagatgaaggaatcatattccttctattcacttttattgaaaaccagggaaagtactgcaacaaccatagagcccctagatggagatactgttgggaattcctctgaaagtcaatccctcctcactagaaggatagagcaaagtgtaaggcattttagccggcccactgcggtttctcaacgtctcgtccttgatcttctgtataagcttttgttcaatctcttgaagcttctttccaaacctcttgaaggcctctagtggaccagcatcagaagtccaatagtcaccaccatctctctccccaaggtagaactcatcagatgtgtgccttgacaagatttttataatt

SEQ ID NO: 207458 - DNA, 556 bp, Glycine max
ctcaaccaaggttgttccttccaccttcgccatgagtttcatctttggaaagcgaaaaacccccgcagagcttctgcgggaaaataagaggatgctggacaaatcaatcagagaaattgagcgtgagcggcaaggattgcaaacacaagaaaagaaattgattgcggagataaagaaaagtgccaaacagggccagatgggagctgttagagttatggcaaaagatcttgttagaacaaggcatcaggttgagaagttttataagctaaaatctcagctccaaggtgtatcactcagaattcagactttgaaatctacacaagcaatgggtgaggctatgaaaggcgtgacaaaggccatggggcaaatgaataggcaaatgaacttgccatctttgcagaaaatcatgcaagaatttgagagacagaatgagaagatggaattgacatctgagatgatgggagatgcaatagatgatgctttggaaggagaagaagatgaagaggaaactgaagatctagttaaccaagtccttgatgagattggaattgacatc

SEQ ID NO: 207459 - DNA, 507 bp, Glycine max
gttacacagcactatttatttattttttttaaaaaaacatcatttttatataattatgagttcatctaatcctggcacaacttcccaattatgctatatatggtacatatgagcatcaatttccccagtaaaactggagtccctgatatcatatagaggatagattacatttttcttaaattgtctaaccttgcctgtaaatcactatctatcccgccatcatcattcccagtcgtttcaacttgaggtacctttgtctttgcagccggggcagcaacagctgatgatggtgcatttacaagctcttggttgatgtcaattccaatctcataaggacttggttactagatctttagtttcctcttcatcttcttctccttccaaagcatcatctattgcatctcccatcatctcagatgtcaattccatcttctcattctgtctctcaaattcttgcatgattttctgcaaagatgggcagttcatttgcctattcatttgccccat

SEQ ID NO: 207460 - DNA, 385 bp, Glycine max
cgctctccgagatggccgccatcgtctccctcatcgcctccgtcgtctacctcatggccttcttcggcattaccttcatcctccacccattccttaattcccgttcttctcctgacgatgacatcgacctcgacattcccaaattacctgtccccactccctgctccgctgcccttcctccaaaactccctcctcccccactccctcaccacgacgaggacatcgtcctcgccgtcgtgtccggctccatcccctgctactcgctggaatcgcggctcggcgattcccaccgagccgcgtcaattcggcgcgaggcggtggagcgtatcaccgggaggtctatccaaggccttcccgcggaaagctttgaatatgactccattct

SEQ ID NO: 207461 - DNA, 527 bp, Glycine max
acaaagaaaacagacaagagactaaaatatcacatccttgatacatgtgctttagatgatgagaccgacacacatcacatacatgtgatgaaaacaagtttttcaacaaaagaccaaaaaaaaaaataaaagagtaacaaaactaagtcttattcatgttctgtacacatcagaaacagacattattaatgaagtactgtaaatgcaggtttatctcccaccaacacgaattaattgtccttctgaagctaataattatacaattgcattgcatcctttgcttttactattgacgatacaaatttgaagttcttgtccagctaggaggcaattttggtgatatccttgctagatctgttgtatttcatgtggctattaacaagttggcctgctgcaattgcagacatgagtgagagttcccctgctaggactgaacctgctactatggttgctagtaacctagaatttgcacctggggactctttgctcgcaccctttactcctaataaattaaggcatgctgactg

SEQ ID NO: 207462 - DNA, 481 bp, Glycine max
acatataaaacattcacgagactataatctcacatccttgatacaggggctttatatgatgagaccgacacacattacatacatgtgatgagcacaagttctacagcaaaagacctaagggtccatttacagattaacctaactagagcctaattcatgtacggtacacattatggtcatacattattaatgaagcactgtaaatgcaggttaatttcctaccaacacgaattaatgggccttttgaagctaatgattttacaaatgcattgcattctttgctattactattgacgatacagatttgcagtatattgtgcagctacgaggcaatactggtgatattcttgctaggatctgatgcattttatgcggctattaacaggttggcctgctgctatggcacacatgagtgagagttcccctgctaggactgaacctgctactacggttgctaggaacctagaatttgtacctgggg

SEQ ID NO: 207463 - DNA, 555 bp, Glycine max
gtggaatttccgccgccattcgaagctacagcgatggccataaccgccaccatttccgttcccttcacatcccccagtcgccgcactctcgcctccgtcaatagcctctctccgcgttctacccgatccactttgcccacaccgcaacgcactttcaaataccctaattcgcgcctcgtcgtgtcttccatgagcaccgaaacagccgtcaaaacttcatccggctccttcctcaaccgcaaggagtccggcttcctccatttcgccaagtaccacggcctcggaaacgacttcgttttgattgacaacagagactcctccgagcccaagatcagtgctgagaaagcggtgcaactgtgtgatcggaacttcggcgttggagctgacggagttatctttgtcttgcctggcatcagtggcaccgattataccatgaggatctttaactctgatggtagtgagcctgagatgtgtggcaatggagtgcgatgctttgccaaatttgtttctcagcttgagaatttacatgggaagcatagctttaccattcatact

SEQ ID NO: 207464 - DNA, 533 bp, Glycine max
aaaaacaagcagaaagtccacctttcatacaaatattattcagcaattcctaattccatattgggtttaacaatgggggcaacatattaaaggggcaaagatccgtaataaactacatcggctgagcctgtcatataaacatgattatcttcctccctccattcaatctgaagaggtcctccaggtagatcaaccgtgcaattcctcccagcacgacccttaagaactgctgcaacaacagtagcacaagctccagttccacaggctagggttgctcctgctccccgctcccagacacacattttcaagtgagaattagacaacacttgtacaaactctgtgttagttcgtgcagggaacacctcatgatgttcaaattttgggccaatttctgctagcttcaattcatcaacaagcaaattctggcttccttctctactgaaagttacacagtgtggatttcccatgctgacacaggtcacatgccagataactccatctacaactagttctgatttaacaacagcattatc

SEQ ID NO: 207465 - DNA, 574 bp, Glycine max
  unsure (1)..(574): unsure at all n locations
ggtgagtaatgtgatcagtaacaagtacaatggtaatattcttcataacaaagagatcaacaacaacaccaacaatgaaagcaacaacacaaatgcaaccgacaaaaggtttaagaccttgcctgctgcggagacactcccgcgcaatgaggtgcttggaggatacatctttgtctgtaacaatgacacaatgcaggaagacttgaaacgtcagctatttggtttgcctccaaggtatcgagattctgttagggctataacacctgggttaccattatttctttataactatactactcatcagctgcatggtatttttgaggcagcaagttttggtggctctaacatagatccaactgcctgggaggataaaaaatgcaaaggcgaatcaaggtttccagctcaggtaagaatccgtgtcaggaagctctgcaaggcattggaagaagattctntcaggccagtattgcatcattatgatgggccaaagtttcgtcttgagctgtcagttccagagactctgggatctgtggacctatgtgaacaagctggttcagcagcataagcaagaatc

SEQ ID NO: 207466 - DNA, 614 bp, Glycine max
  unsure (1)..(614): unsure at all n locations
agtaatacatgaagcttttgacttcaatttttttcttggttcaacagattcatgttttagcagtacaaacagtagtctctttgattgcataccaagtctgtacttttacttaatcatacaaaggtattaaatgttcatgcaaatgctacaaagcacctttaaggggatagataccacaaccatttttattcaccaacaaagggtctctcactctcaacacgctccctttacttccccaagaagatgatgatccactttccaagcttacgcttcacggaaaatctgccaaaaccacacagctggcacaccaaaacctactacctattttgcacattcattccttgtgcgattcttgcttatgctgctgaaccagcttgttcacataggtccaacagatccagagtctctggaactgacagctcaagacgaaactttggcccatcataatgatgcaatactggcctgaaagaatcttcttccaatgccttgcagagcttcctgacacggattcttacctgagctggaaaccttgattcgcctttgcattntttatcctcccaggcagttggatctatgttagagccaccaaaacttgctgcctcaaaaataccatg

SEQ ID NO: 207467 - DNA, 404 bp, Glycine max
aaagtggtggagtttgggaacatgcaaaccagggcagtgtctatcttggtccacacagtcatcttctttggtctcattaccatctttcttgttgctattggctaaatgcttggaaactggcgagccagtggccattaagagagttttactggacaaaagatataagaatcgtgcgctacagttaatgcacttgatggatcatccaaatgtgatctctctgaagcatcgtttcttttccactacaagtgcagatgaactttttcttaatttggtgatggaatatgctccacagtctatgtctcgcgtctcaaagttctatagtaatactaatcagagcatgccacttatttatgtaaaactttacatgcaccagatttttaaggggctggcttatatccacactg

SEQ ID NO: 207468 - DNA, 604 bp, Glycine max
attggttcattctcaagttttgttaaggacttgtatggattgggaggcaggagacttggagtgacttcactcccaccattgggttgcctacctgctgcaaggactatatttggtttccatgagaatggttgtgtctcaagaatcaacactgatgctcaaggatttaacaagaagctcaactcagctgcaacgagtcttcaaaagcaacttcctggtcttaagattgcggctttcgacatttacaagcctctctatgaccttgttcaatccccttcaaaatctggttttgtggaggcaaacagaggatgctgtggtaccgggactgtagagacaacatccttgttgtgtaatccaaaatcaccaggaacttgttctaatgccacacagtatgtgttttgggacagtgtccatccttcacaagctgctaaccaagttctagctgatgcattaattctacaaggcatatctcttgtcacataaagactcgtcattatttatggtgttagacattattattgtgtacaagtacaactacacatcgtgaaagtgattcaaaagtttgctggttttctttagtttggaaaaaaaaaactgtgctctatga

SEQ ID NO: 207469 - DNA, 535 bp, Glycine max
gatgataataagcaaacatttctctattattataaaatggtttacaaacgagtttatctgaaatttctcaagatctaaaatacatagagcacagttttttttttccaaactaaagaaaaacagcaaacttttgaatcactttcacgatgtgtagttgtacttgtacacaataataatttctaacaacataaataatgacgagtctttatgtgacaagagatatgccttgtagaattaatgcatcagctagaacttggttagcagcttgtgaaggatggacactgtcccaaaacacatactgtgtggcattagaacaagttcctggtgattttggattacacaacaaggatgttgtctctacagtcccggtaccacagcatcctctgtttgccttcacaaaaccagattttgaaggggatttgaacaggtcatagagaggcttgtaaatgtcgaaaaccgcaatcttaagaccaggaagttgcttttgaagactcgttgcagctgagttgagcttcttgttaaatccttgagcatc

SEQ ID NO: 207470 - DNA, 581 bp, Glycine max
aaccaagttgggaaagcaatgatgggtattctttacctgttggttttattgaaaggacatctaaccgaggaagagtttgtcagggatggataccacaactagaaatattggcacattcatctattggaggatctttgtttcactctggctggggttctgtcattgaaaaccttcagtttgggaatacacttgttttattaccctttaatatagagcaacctcttaatgcaaggtttttggtggaaaagagattcgccattgaagtgaaaagaaatgaagatggatcattcactagaaatgacattgccgcatcccttagacaagccatggtattggaggaaggaaagaagatcagaaatgatacaagagaagctgctgcatttgtaggaaacttgaagctgcaccaggatcactacgtagctgcatttgtacagtttcttaagaatggaatcaggacaccaatatgatgttgaagaggatcattactgtgtcttaattcatgtttatcatcagtttgttgaataaagtcctactctttaagtcgtggttcaataattgcatctgtcttctatcttgaaggg

SEQ ID NO: 207471 - DNA, 567 bp, Glycine max
  unsure (1)..(567): unsure at all n locations
ctatcattacacaactaatatgttaatctttgttatcgggagtgtaaaaattaactttacaaattctaattacaaaagcaaaattgctgccaaaaaaccagctcatgaaaagaataatgaaattcaggcacaagaatgaggatctgaacctgatgcagtcaaattccagaatcaaaaccaacagtgcaccttagccatatctgcaagcaaccaagaaaacttaaccagggcctccccttggcttcttcacaagatattttggtccaaaataagctcttccagtatgtacagtggcctttcatggattcaaactagcacggctaatgaagtctgtgctataatcttgattaccaaatgccatcctccgaaataatcttatttcttcagattgactgcgcgtcaaacacctcgctttcaccaagtcgcattccattaggtagatcagaacctgctaagctatcaaaagctctaacaacctgttccatgctaggtctctttgcagctgaatgccgnacacaagcagcagcaacttcaatcatgcaatacaattcactctcaacataattc

SEQ ID NO: 207472 - DNA, 479 bp, Glycine max
tttttttttttttttttttttttttttttttttttttttttttttttttttttttttttttgggttaaaattgaatttattttaaaaaaaaaaaaaataaaaaaaaaaaaaaaatttataaacaaaaataactaaaaaagaaaaaaacacaaaaaaaaaaaacaataaaaaaaaaaaataaataaaaaaaaaaaaaaaaaaaagaaaaataaaaaaaaaaaaaaaaaaaaaaaaaaaaaaaaaaaaaaaaaaaaaaaaaaaaaaaaaaaaaaaaaaaaaaagaaaaaaaaaaaacaataaaataaaaaaaaaataaacaaaaaagaaaaaaaaacacgaaaaaaaaaaaaataaagaaaactagaagaaaaaaaaaaaaaaaataacaaaaaaaaaaacaaaaaaaaaataaaaaaaagaaaaaacaaaataaaaaaaaaaaaaaaacaaaaaaaaaaaaaaaaaaaaacacacagaag

SEQ ID NO: 207473 - DNA, 365 bp, Glycine max
agaatggctcccaagggtttaacctttctggctgtgttaatatgcgtttcagcactgtcactgagtccttctgttgcgggggaagggcaaaataatggccttgttatgaacttctacaaggaatcatgccctcaggctgaagacatcatcacagaacaagtcaagcttctctacaagcgccacaagaacactgctttctcctggctcaggaacatcttccatgactgtgctgttcagagttgtgatgcttcactgttgctggactccacaagaaggagcttgtctgagaaggaaacagatagaagctttgggttgagaaatttcaggtacattgagaccatcaaagaagctttggaaggagaatg

SEQ ID NO: 207474 - DNA, 410 bp, Glycine max
agaaagaacaacctagctttatgagtatgaatatcataagcattggcactgccatcataacagcactcacacgcatacataacataatttaacaccttgaacatgcccttttacccaactctaagctacttgcataggactacatatataatatccttattgaaattaaaaaaaaaacaaccgtaacatcggaagattaaaaaacatagcctcttaatcctcccatccccatgaacctgcaggggtctcggttcattgaaccagcccatttaaaggaaaagaccttaattattttttgcataatatattacagattttcttcctcgatcatagacaaggggaggaaaattcaagggtcctgaacatggtgcttgttggcaacattgcactggtttctgacctcacccttt

SEQ ID NO: 207475 - DNA, 252 bp, Glycine max
gttgggtgagggatgatagctaccttttgtatgatgcttctcactgcccttttggtgggggggtttcaattgccttgctaatgggagaaaagatagagattacacaaaatggaggtggaaacctaagaactgtgagattccaaggtttgatgcccgtggaatacttgaacatcttcgagggaaaagggtggtattcgttggcgatctcgctgagtaggacacattgggagctcacgatatgcttgctgatga

SEQ ID NO: 207476 - DNA, 595 bp, Glycine max
  unsure (1)..(595): unsure at all n locations
ctttcttcttcttcttctcttcttcttcaagattgcgacgacgatccaagtgatagacactcgttgcgatggaacttgtagctgaatccgagcgaactctgtacccatacgtgactggatcctctgtagtcgctatcaaatacaaagatgggattctaatggccgctgacatgggaggttcgtatggatctaccctgcggtataagagtgttgagcgtatcaagcctattggaaagcattctcttcttggtgctagcggggagataagtgactttcaggaaattttgcgctaccttgacgagcttatcctttatgacaacatgtgggaggatgggaattctctagggccgaaggaggtgcataattatttaacccgtgtaatgtataatagacgtaacaagttcaatccattgtggaatgcacttgtacttggtggggtgaaaaatgggcagaagtaccttggcatggttaacatgattggcattaattttgaggacaaccatgtagcaaccgggcttggaaatcatcttgctaggccaattctncgtgacgagtggcatgaaaacttgacctttgaagagggcgtcaaattact

SEQ ID NO: 207477 - DNA, 435 bp, Glycine max
gaaaagatcaattcgaaccaccataggaatcttaaaaaaataaatatgaaaacatcaagtctcatttaatatccattaacaccttgaagagtcctgttggaacccatttcatatccatttaaaattctgtttcatttcacattgagtcagctaccatgaaccttcagcgcccactgttggattcttgaaggcagcgaactcccagtacgttttcaacgagaatggtgggaaaacagtggcaccttcatctgtaattttagatatctgaattttgttgacagcagacctatcacggtataaaagcacacgcatgcatttttccagtaatttgacgccctcttcaaaggtcaagttttcatgccactcgtcacggagaattggcctagcaagatgatttccaagccccgttgctacatggttgtcctcaaaattaat

SEQ ID NO: 207478 - DNA, 343 bp, Glycine max
tttttttttttttttttttttttttttttttttttttttttttttttttggtttttggtttttttttttttcccccacttaaaaaagaaattttgatgaaaaaattcccagttttggcaggcagttagatcaagggggcttaaatctttttaaaccataaaaccgggtttaaggggggtatgggggggcagcttcatttattccctattttatggggccagggcatagcggaccgggtatcaaacggggcaaagcgtttgagtcaaaaactgaagggaaaacctttttcccttggaaaccccatacgggttaactggtccaaccccaaaaaattttgcggggg

SEQ ID NO: 207479 - DNA, 615 bp, Glycine max
  unsure (1)..(615): unsure at all n locations
caagaatggcacttcgttgcttggtgatgtccctttctgttctcttcactcttggtcttgcgagagaaagccatgccagagacgaagatttttggcatgctgtttggccaaacactcccattccaagttcattgcgagatcttctaaagcctggccctgcaagtgttgaaatcgatgatcaccctatgcaaattgaagaaacacagtacccgaaaaccttcttctataaagaagaccttcatccaggcaaaacaatgaaagtacaattcagcaagcctccctttcaacaaccatggggtgttggtacatggttaaaggaaattaaagacactactaaagaaggatatagttttgaagagctatgcatcaagaaagaagccattgagggagaagagaagttttgtgcaaaatccttgggaacagtaattggttttgccatttcaaagctgggaaagaacattcaagtactttcaagttcctttgtcaataagcaagaccaatacactgtggaaggagtgcagaatcttggagaccaagcagtgatgtgtcatatgctaaatntcagaactgcagatttntactgccatgaagtccgttgaacaacagctttcatgg

SEQ ID NO: 207480 - DNA, 430 bp, Glycine max
accatatatatatagagagagagaatacgaagcacactgatcacaggatgatgctctctttaagtagggaagcagatcttatcagtacacataggtaggttgaaattctagctctagcaatctagctagagaaggtagtacttgcacaacacacagcacatgataatttattttatacacaatctcattctcatggtgctcaagatgcatggactaattaagcaacaatgttggtctgataggcagtgtccacagataaattgggtacccataaaatggccttgcttccaaggaaatggcaaacagggttagttccaggatcaactcccataagttgatgaagcatttgatgattcattccagaagtatttgagtggcaaatagcaagtgcctgagttttgggtccatcaccagccaccaatggaaccat

SEQ ID NO: 207481 - DNA, 281 bp, Glycine max
gtcaaataaaataaaataatcaaatatggcattcagcgggacccaacagaaatgcaaggcttgcgacaaaactgttcactttgtcgaaggtttatctgccgatggagctgcttatcacaagaactgcttcagatgcagccattgcaatggccttcttgcgataagcaattactcatccaccgaaggagttttgtactgcaaggtgcactttgagcagcttttcaaggaaactggaacctaccccaagaaatcccagtcgtctggaaagcctccactcgagc

SEQ ID NO: 207482 - DNA, 567 bp, Glycine max
gcttcgcgcctactatttgttgtcttaacagtttgtgttagtcatgaggtccaattcaatggaagcaagaaaccaagaggtgaaaataattatttagtggaggaaattattgaggatttacaagcagtatctgaaagccagaaagaaacaaaaaataggaaaatgaagaagcaaggtcctgtagcggcatttgattcctatgttctggctgccgtttgtgctcttgcctgtgagcttcagctgttccctatgatctcacgaggagacaatcactcagtccccaacaatgtacaaaatatagccaagcctgtcaaaatagatggatcttcccatgcattgcagaatggcatagattcagcaatacgccatactcacagaattttagcaattttagaggcgctgttttcattgaagccatcttctgttggtacctcatggagttacagctcacatgaaatagttgcagctgctatggttgctgcacatatttctgaactatttagacggtcaaaagcttgatgcgtgctctgcctgtttgatgcgtacaaatggatgatgaaattactc

SEQ ID NO: 207483 - DNA, 475 bp, Glycine max
agcagaatgagaaggtttacttatttgcaaaccatttaagttcctaaacatagattacatcaaggttttatacaaatcttgagataatatctgtcatgaaaagcttaatttaagttcctaaacataaattactaagatgattacatatggtctcatttcatttcagatagaaatagcaaagcctaagtcatccgcagctgtgttaagatattcaatagacaatccatttgaaagccggctgtgagcttcccatgtcaagcagttttctacgtcagctcgccagtcaatgacatcaaaatttaagtactgatcatggatgccattcttttgcagtggcttaggactcgatccaattgaactagtatgcaaaatgtcacgaataaccgaactgctcagagcacggacatgtgcacttggatgaaaaaggcatctgattgtagctggtaggcgacactttaacaggtttgaaagccca

SEQ ID NO: 207484 - DNA, 444 bp, Glycine max
ggcgaggagaaagatggaggggaaggagcaggatgtgtcgttgggagcgaacaagttccccgagagacagccgattgggactgcggcgcatagccaagacgacggcaaggactaccaggagccggcgccggcgccgctggttgacccgacggagtttacgtcatggtcgctttacagagcagggatagcacagtttgtggccacttttctgacattgtacatcaccgtcttaaccgttatgggagttgccggggctaagtataagtgttgtaccgttgggattcaaggaatcgcttgggccttcggtggcatgatcttcgacctcgatgactgtaccgctggcatctcaggggggcacataaacccggtggagacatttgggctgttattggcgaagaaattgtcgctgccccatgccgatttctacatcgtgatgcaatgctt

SEQ ID NO: 207485 - DNA, 537 bp, Glycine max
ttttttttttttttttttttttttttttttttttttttttttttttttttttttttttttttggttttttttggttttttttttttttttttttttttttttttttaaaaaaaaccggggggaaattataaattaaaaaaaaaaaatcccaaaaaaaagcgctaaaaaaaaaaaaaaaggggccccttaaaaaaaaaaaaaaagggaaaaaaagggcccaaaaacaaaaaaaaaccccccaaaaaaaaaaaaaaataaacaatttaaaaaaaaaaaaaaaaaaccttaaaattaaaaaaaaaaaaaaaaaaaaaaccaaaattttaaaaaaaaaaaaaacaaaaccccaaaaaaaggggggtaatattaggggggggggggcccccaaaagttaaaaaacaaaaccccattaaaaaaaaaacgggcaccaaaaggaaagggcccaaaaaaaaaccggggggaaaaagcccaaaaaaacccccccataaaagggcccccccaaaaaaacccaggtgtaacccaccaaaaggctcttgt

SEQ ID NO: 207486 - DNA, 569 bp, Glycine max
gggaagatgagaagtgtgagcctgagaccagagcttcacattccaatttgttcttcaaaccctccatcatgtgtcaaacccatcaaattagtggtagcatcatcgtatgggaaaaatttgaaaaatccaccttccaaatttgcaatcactcttagagagcacagaacaactttggagcatgcggcgaggttgccattactgaaacatgattccggtattgtggtaatgggagcggtgtgtgtggtggggatattggcggtggttctgagcgaggaaaaggccttggctttgggcccagaaggcccacttgtggaagagttttgggacaacgtgaggagatatggactctacgctctcaccgtcagcacaggtgccctttacaccatcttccgccctatagcagaacttttcaagaatcccatttccgcaattctcatccttgctcttttcggggttcaatcttcattggttctcaagtcctctttgacatggttggtgtttctgaatttcttacaactttggaactagactacctccatcatatatatgcaaaataacctcttatttat

SEQ ID NO: 207487 - DNA, 485 bp, Glycine max
  unsure (1)..(485): unsure at all n locations
gagtacaaggtcaaggacctttcccaggccgacttcggccgcctcgagatcgagctggccgaggttgagatgccgggcctcatggcctgccggaccgagttcggcccatctcagcccttcaagggggcccgcatcaccggctcccttcacatgaccatccagaccgctgtcctcatcgagaccctcaccgctctcggcgccgaggttcgctggtgctcctgcaacatcttctccactcaggaccacgccgccgccgccatcgcccgtgacagcgccgccgtcttcgcctggaagggtgagaccctccaggagtactgggtggtgcaccgagcgcgccctcgactggggccccggcggcggccccgacctcatcgtcgacgacggaggcgacgccacccttctcatccacganggcgtcaaggccgaggagctctatgagaagaccggnggactncccgaccctaacttcactgacaacgccgagt

SEQ ID NO: 207488 - DNA, 502 bp, Glycine max
ttttttttttttttttttttttttttttttttttttttttttttttttttttttttttttttttttttttttttttttttttttttttttttttttttttttttttgggggccaaaaaaaaaagggggaaaaaaatgtccaaaaaattaggggggaaaaaaaaaaaattgggggttggggggggaaaaaaaaaaaaaaaagggggctaaaaaaaaaagcggggaaaaaaaattatttttaacccccccccctggaaaaaaaaaaagggcccaaaaaaaaattttgggggaaaaaaaaaaagggggcctaaaaagggaaaccccttccctttttccccccagggggggggtttggggggacttttggaaggggaaaaccctttaaaaaacctgggggggaaaaaatgggaaaaaacccggggtaaaaggcccccccgggggggggaaaaccgggggcccccaaaaaaaaggggggcccccggaaaaaaacccccccccggggg

SEQ ID NO: 207489 - DNA, 619 bp, Glycine max
gttgatgttaaggaaaggcgcgaatcccatgattttgttcaaaccttcatcagctatgcgattgtctccttgtgcgaacaccacttcaatgagttccggatcgggttcacttttgtggttccggaagggtcttcggatccatgacaaccccgctctcgaagtcgcttcgcgtggagcctctcatctctaccctgtctttgtcatcgacccgcatttcatggaacccgacccgaattcttccgcacccggatcctctcgcgcgggtctgaaccgcatcaagttcttgctggagtgcctcgttgaccttgacctcaacctcaagaaccttggctcaagacttttgattctcaagggtgaccctgctgaagttgtcattcgatgcttgaaggagttgcatgttaaaaagctatgctttgagtacgacactgaaccgtattatcaggctctggatgttaaagttaagaactttgcacttgctgctggaattgaggttttctctcctgtaagtcatacactcttcaatcccacggatatcatagagaagaatggagggaagccgccgcttagttatcaatcgtttgtcaagcttgctggggaaccaccatcttctctctctact

SEQ ID NO: 207490 - DNA, 513 bp, Glycine max
  unsure (1)..(513): unsure at all n locations
acatgaactaaattattaagtatatatgcaaaatataatgtgccatgctgcttccaatttggcgtctatgtctacgaaatatgttacatacatacatgtgtcatacaaatgtcttgataaatgcataaaataaaatatccctaacacgtataaactgcaactcaaagcacggcagttgaaaaaacgagtaaaattttgggtcagccaatcagctgttgcttatatcttttagctccagcctcttgcccttcactctcatctaatttcctcctcaaatttttcagatcatcttcactaaccaaaccatttaattctttattcaatgcatatgcctcgcccattttccttctgcactctttactcgcagaatcatgagaaaccactggcattgggtagtctttgccaattatgccaattgctttggtctgaatgcttntaggagcccgccagggttcataaatgtactccctgagcatatcttttaagactgggagaaaatgcctaatatagtcg

SEQ ID NO: 207491 - DNA, 454 bp, Glycine max
ggctaggagaatgatggaagcgcaggagcactatgtgtagttcggagctaaccaacgcttctatagacagctaatgtgaacgtgagtgcagagagcttacgactgacaggactactcagagagccgacgccggtgccaatggttgacccgactgagtctacgtcatggccgatctacaaagcagggcatactgtagattgaggtcactttcttgagtctctacataaccggcttaaccacactgggagtgatcatggctaagtattaaggagctttccgttgagatgcaaggagagtcgcttgtgccaacagtggcatgatcattgtcctagtatactgcaacgctggcatgtcagggggacacatgaagccatcgatgacattatggctgtttctggcgaggaagctgaacttgcccatagccattcgctgcactagatgcagtgcttgggtg

SEQ ID NO: 207492 - DNA, 481 bp, Glycine max
cttcttcttatgcaatgggttgtgtctgtctttttctaacttgagataatacttcaacttcctcattttttccctctcctgtctcctggactgtaaaatcctagagattcgctcttcccgttctcttctcaatctggtaaactctgcttggcggtgactaaccacccttgcttgatatatctccttattgcccatcatgcgaacaagcctctccttctccttgagatctccctcgtgcctctgtttgctcagttcaacctcttgctgctgctcacgatcatgaagaagtctctcttccactagacgctgttgatatgcagcttcaatcaggggagcagcctcttctctttttgctctttccaaatgatccatggtttttgctaacttctgcagtttcttttccatttcctgtctttcccggagttgttcagtcaaagtcaactccatcaatgtctgcttggtgattttgtccccctctatg

SEQ ID NO: 207493 - DNA, 163 bp, Glycine max
ttttacttcccctatggctcgtcactccttgctcttagccctcctcctgttcgccgccgtggccaccgacgcgatggcggtggccgcgtccgacgccgacgacatcctgatccgtcaggtggtgccagatgttggcgaagccgaagaggaggacaacctgctg

SEQ ID NO: 207494 - DNA, 446 bp, Glycine max
aggaccacacatttccttggatttcccacttggatatgtcaagcatacatacagaaattacatactacataaacaacatgggcttaacagtttcctgatcctatacggagataattttaccagtaccaaatgataaagttcacaacataaatatttatacaaactccccttagtccagtatcacattacaaccacaatcaggcatatctttggatttaaaggctggatggatatatagcagctacagttgagaccatggaatttacttcacacacatttcgacctttgcaaaacttggaatatccattcttttcccagcttttgccccatgaattcttaatgatccagtaagggttggtcttaaaacgaatgggagcatatgcacctttaccataaccaacttgaagaaccccatgatccaaatgctttccacaaatgtatgggca

SEQ ID NO: 207495 - DNA, 303 bp, Glycine max
gcaatgcttatattttgggtggccaagacaaatcacagaactggcatgtctactctgcttctgcagattctgtaactccatgcgacaatgtttacactctagagatgtgcatgactggcctggatagagagaaagcacaggttttctacaaagaacaatctgcttcagctgccattatgactgttaattctggcattagaaaaattcttccagattctgagatttgtgactctgactttgagccatgtggttattcaatgaactctgttgaaggagctgctgtttctaccaattatggtaccc

SEQ ID NO: 207496 - DNA, 457 bp, Glycine max
gcaatgcttatattttgggtggccaagacatatcacagaactggcatgtctactctgcttgtgcagattctgtaactccatgcgacaatgtttacactctagagatgtgcatgactggcctggatagagagaaagcacaggtgttctacaaagaacaatctgcttcaactgccattatgactgttaattctggcattagaaaaattcttccagattctgagattagtgactttgactttgagccatgtggttattcaatgaactctgttgaaggtgctgctgcttctaccattcatgttaccccctaagatggcttcagttatgcaagctttgagactgtcgggtatgacttcaaagcggtgaatctgaacgaaatggttcagaaggtattggcatgttctctaccaactgagttctctgctgcagatcatgtggatggtgcaagcaagtttggttg

SEQ ID NO: 207497 - DNA, 311 bp, Glycine max
ttttttttttttttttttttttttttttttttttttttttttttttttttggtttttttttggttttttttatttttttttaacccacatattattaaaaataaaaaaataaaaaaaaaaaaacaaacaataaaaaaaaaaatcgtacataaaaaaaaaaaaaaaacaaaaagataaaaaaaaacccaacaaaataacaccacaaaacaaaaaacaaaaacaacacccacacaaataaacaacaaggtaaaaaaaaacataaaacaaacccccaaaaaaaaaaattaaaacaaagaaaaaaaacacatttt

SEQ ID NO: 207498 - DNA, 548 bp, Glycine max
atcacttcttcttgtgctggcataacttcaacaacttattctttgttctcgatctcaggatggctcatttggccctgtctcagatggctgtaactgttcctgttggcagcgatttgtctctcagaagatctgcggttaaggcacctaactgtaacttttgggataaatcatgggcaccagtatttactttgtacttgaaggcaaacaactcaagtttaagaagtcgtcatgtggtattcatgtcagtgcaacaagcaagtgtacccaaagttaatgtatcacctttagagttggaagatgctaaagaacctccattgaacttacacaagcctaaagaaccctatacagcaacgattgtttctgttgataggctagcgggaccaaaggctcctggggaaacttgtcatattgtgattgatcatggtggaaatgttccctactgagaaggacagagttatggtgttattccaccgggtgaaaatccaaagaaaccctgggctcctcataatgttcgactatattcaattgcttctacaaggtatggagac

SEQ ID NO: 207499 - DNA, 439 bp, Glycine max
agtgcaaaataaaactataaattgtgataataactttataaacagtcacacatcctccaaccccaccaaactcattttcatatacagtctatacagccctaggttaccaatatatactataacaacttattaaatctaggtacaaaatgggcatccactgagagtcactgtccatggtagtaaatagtaagccaaccattacatatatattaatgcgtatcaaaatgtgggagtgactcccttatttattagtttagtatagttatgtggacacactattgggcacccctctgcatgtaacgccaggttcagagctaggagcaagcaactcatatggcaacacccctgcaccacaacggttccttagagtccgatcaaggttcctgctatcaatgaccttctctatctgtcgaaccttggcggaaaaatcgtagaacgc

SEQ ID NO: 207500 - DNA, 540 bp, Glycine max
gccaaggagaaaagaaaaaaaaaaagaactggactccttcaattagtgcattgtttcttttcttcaaatggtagcaagaagacattgttaatttgagagatggcgagttacgaggctattaagaactttgatgatgatgatgatgatgatgatgatgtggagatggcactcccccatagccagatctctgaatcaagatctgccactgtttcttcccccattggccaaactaccccgcttcacattcacaacattattgaggaacaacgcattatctccaggcaccaacctcaacccaaatctccgcgtctggtttctcttgatgtttttcgtggtctcaccgtcgcgctgatgatacttgttgatgatgctggcggactcattcctgcgctcaaccattccccatggaatggtttaacactagctgattatgtcatgccatctttcctatttaatgatggtgtttcgcttgcactctcatacaagaaactgacttgtggagttgatgcatctagaaaagccagtttacgggctctaaaa

SEQ ID NO: 207501 - DNA, 479 bp, Glycine max
aaaataatagaatttctagggctttagaactctccattttctcttccgatcatccagaatcctcgagaattctttttgttgaactcacttctctcttgttcgccacgcactcttgtctctgcaagttgtctgggttgctcgtagaccaccaggatatgcatttattgagtttgatgatcggagggatgcactcgatgcaattcaggccttggatggaaaaaatggttggcgtgtagagctttctcataattccaagggtggtggccgaggagggcgtgggcgtggaggtgaaggcacacaatgctatgaatgtggtgaacctggacactttgctcggcagtgtcgattgcgcattggatcacgtggccttggaagtggaaggaggcgaagtccaagtccttatcggcgtcgtacaagtccaagttatgggtatgatcgcaggagttacagccctcgtgggagaagatctccaagacgac

SEQ ID NO: 207502 - DNA, 453 bp, Glycine max
aaaataatagaatttctagggctttataactctccattttctcttccgatcatccaggatcctcgagaattctttttggtgaactcacttctgtcttgttcgccacgcactcttgtctctgcaagccgtctgggttgctcgtagaccaccaggatatgcatttattgagtccgatgatcggagggatgcacttgatgcaattcaggccttggatggaaaaaatggttggcgtgtagagctttctcataattccaagggtggcggtcgaggaaggcgtgggcgttgaggtgaaggcacacaatgctatgaatgtggagaacctggacactctgctcgggagtgtcgattgcgcattggatcacgtggccttggaagtggcaggatgcgaagtccaagtccttatcggcagcgtacaagtcccagttatgggtatgatcgcaggagctacagtcc

SEQ ID NO: 207503 - DNA, 541 bp, Glycine max
  unsure (1)..(541): unsure at all n locations
gaaaacatcaacaatcacagcatatcacattaataatcgtacataattgtttccataaacaagggcatccaagatgctaaaatagtaaaacatccccatacactacatagtagttttatttcaattgtacatttattcatacaatacagatacagtgcatgtctggatacgctttctgaatgtacgtatcagcatattttcatgtcaaatttgtaaaggtgacgcaaaagctagttatattaactttgatctcctctgaatggcatccaaacacactatcaaacaccaaccaaatccctgaaaagcaaattaactttcagagctgtaacatgtctctccagcagacaagtcttcctgacgaagtcgcttcatctcctcataggcccattccagtccggggcagtaatgaagccgtgggttaaatctgctattcactgatatcaggtggcatgaaggctccattctctatcaagaatntcacagcattcctcctncttttcttggctgcaatgtggaacggcgtccagccacaagcaccctt

SEQ ID NO: 207504 - DNA, 567 bp, Glycine max
  unsure (1)..(567): unsure at all n locations
ctgtgataatatatgcattaaatgaatatataaggaaatattgaaaataacaaagcaatcagaataggaattgaacatacaagaggaagcaaagctatcttgctttggcttaatttataccatgaatgaatcactgtcaatgtgatcatatgaacatacaagaggaaacattagaaatgtaatacacagacttgaaagaatataatcacacttataaggtcactgtgatgtgcatgcaatacaccaaaacaaataagaaacaacttgagaaaaatactttgactgaagctgattttaattttctttctgtgtgaaacttgacactggtcttaggccatgtttgagtgctgctttccacacaagatcgattctgttaacatctatggccccaacttcgtgatgagaccaaccttaaggctatgtaccactcctnctgcatggcacgcgtgaaccactcccctatcatcgtgtactcacaacacccaagtccttccacgtcttctggaatctcatggcttgcaggtcaccataagtgcaatcttttctaaatgantaaaatggtgggac

SEQ ID NO: 207505 - DNA, 552 bp, Glycine max
gttacactcagagtagtgaacaacatcagcaacaacaacaacaacgttgcagtgtgttgtattgtttcttagtgcacttttttttggcatcaaagaggttaaatccatggattctgattatggtattcccagggaactctcagatcttcaaaagattcggtcgttgtaccagccagagcttcctccttgtctccagggaaccactgtgagggttgaatttggtgatgcaaccaccactgctgaccccactgatgcactcaccattagcagggcgtttcctaacacctatggacaccctttggctcactttctcagggcaactgccaaagtccctgatgctcagatcataactgagttccctcctattagggtggggattgtcttttgtgggagacaatctcctggagggcataatgtcatttggggtctccacaatgctctcaaaattcacaatcccaacagtgttttgcttggaatcttggtggatcagaaggtctgtttgcccaaaaaactctggagataactgatgatattctttcgacatacaaaaat

SEQ ID NO: 207506 - DNA, 524 bp, Glycine max
caaatgcatgggtgtctcacttggcatcattgatattatagccttaattaggcataccaatcaataagagacaagtcaagggttatgaaatcataacagacacgactcgtatttgtgggtctcacaaagcatagcctaatatgtatcatctatgtgacatggtctacatgatattattattacaggttgataaaaaaagaccacataaatatctaatcacaatttacataaaacacaatccatacactatatagttttgaaggatccaaagctaatgcagatcccttcctgatctgctatctggctacatcaactgactgatgggcgaggcaatcttttggcaatttcctttgttagaaaagatgcaatcttggaatttttgttcctattccaagatcatctttagcccctccataggtctatatgagtttgctacaactatcttcaggcagcaagaacatcatggggaaaagttgctagtagcatagtcaacaatgtcctcaaacagttcatttatattatct

SEQ ID NO: 207507 - DNA, 561 bp, Glycine max
gaaaacatcaacaatcacagcatatcacattaataatcgtacataattgtttccataaacaagggcatccaagatgctaaaatagtaaaacatccccatacactacatagtagttttatttcaattgtacatttattcatacaatacagatacagtgcatgtctggatacgctttctgaatgtacgtatcagcatattttcatgtcaaatttgtaaaggtgacgcaaaagctagttatattaactttgatctcctctgaatggcatccaaacacactatcaaacaccaaccaaatccctgaaaagcaaattaactttcagagctgtaacatgtctctccagcagacaagtcttcctgacgaagtcgcttcatctcctcataggcccattccagtccggggcagtaatgaagcggtgggttaaatctgctatcactgatatcaggtggcatgaaggctccattctctatcaagaattttacagcatccctccttcttttcttggctgcaatgtggaacggcgtccagccacaagcacccttagttctggcatcaatgtcagc

SEQ ID NO: 207508 - DNA, 604 bp, Glycine max
cgctctttcagctttgacttttgttggaaactaaggcctaatcaaaatggtgaagttcacagctgaagagctacgtcgtattatggactataagcataatatccgtaatatgtctgtcattgctcatgttgatcacggaaaatcaaccctcactgattctcttgtggctgctgctggtattattgctcaagaagttgccggtgatgtccgtatgactgatacccgtgcagatgaagctgagcgtggtattaccatcaagtctacaggtatctcactctactatgaaatgactgatgaagctctcaagagttttaagggagagcgcaatgggaatgagtatcttatcaatctcattgactcccctgggcacgttgacttctcatctgaggttactgctgcactccgtattactgatggagctctagttgtggtcgattgtgtggaaggagtttgtgtccaaactgaaactgtgctaagacaagcccttggagaaaggattaggcctgtcctgactgtcaataagatggacaggtgcttcctttgactccaggttgatggagaagagggttaccaaacattccagagggctatcgagaatgctaat

SEQ ID NO: 207509 - DNA, 528 bp, Glycine max
attgaaaatactatctttcaagcaaaattcgcaaaataataatttgaaccaacaccgatgcaaaatcctattagagcaaaaatacatcgatgcaaggaccaaataacagcattacaacattcacgggcaaaaccacaaacaaaactaacagaaattaaatctaaagtagcattgttcacaagagaaaataaattcgactaagttcaaagtaaaataattcatgaaacaaatttaaagcttgtcttcaaactcggagagaggagtcatctgttccttcaagcccttcctcttgcgaatgtcagtgacaagctgtgcagcttgtgatccagcctccaatgggtcagaagacatcatgtcccagtgatcaaacacacattgtgggaaggcctggcctgatgttgcagccctcaatgtgctcgagaaaccaaaggactcgatgacagggaggtatgccttgatgttgtatagtggggtacctggcctctgcatttcctcgaacacgtgtccacgcttctggttaagaacact

SEQ ID NO: 207510 - DNA, 440 bp, Glycine max
aacaaaaatctgttaaaatttattcaaagggaatcaacaaggtacaaaatcgatacacagtaagagtttttttgcaactttacattgcataattcaaacaaaagaaggcgtagttcatatatacagcagcaaaagcatacataagaaaacatagtagtaagcattcatattcatatatgatatatatgataatcatcaacacgacggaacgacgccgtatccagccagagggtccgcatcagtgcgtttcgcgaaccttcctttgattcttggcctcgtttcggtatacgcttttctcgatgcgtaacgaatggtcttctcgaactttcggatcttcctcttctgcctgtacctcaacactgtagccttcctatccgccgccgagaactgcgccgtcaccgtcaccggtgccactttgctgtaactgcaagtcgatatct

SEQ ID NO: 207511 - DNA, 606 bp, Glycine max
tgttaagttcactagctttgagtccataagatacctatttatgttcgcggaagagacgcggggagaaaaaaccaccagagcacccttttataatcttttcttttttttcttcattggggctattttaatttggggctctttttctacatgggtttacatatagttctacttgtgggacaacagagacgggtacaaagcatgggctctgaaagaaggcatgaaacgcagctacgtgaagcaatgtgactatgttgccatctttgacgccgattttcaaccggagcctgatttcctctggcgaactgtcccattccttgtcaacaaccctgaacttggtctcgttcaggcacgctggaagtttgtgaatgccaatgaatgtttgatgaccaggatgcaagagatgtcactggattaccatttcactgtggaacaagaagtggggtcttgcacttacgccttctttggcttcaacggaactgctggtgtatggagaatttccgcgttgtatgagtctggatggtggaatcataggaccacagtggaagatatggacctggctgtccgagccagactcataggatggaaatttttgacctacccaatttg

SEQ ID NO: 207512 - DNA, 513 bp, Glycine max
aggcaatgatctactagactactgacacaatagaagacagttcgacgttgctgcacactttcctgggctgggacatcctcttgtgggaattttttctctaaacttctacatttctactccctctggggagatctttcacacccggggacccaactttcaataatggcaacaatgcttcaaaatatgctatctttaaaattggagattagaacatagcctgcgatagaccataaaatttctgacctttcagcaccatttcatgcaatgctaaaggcgtgttccagggaatcactctctgagactatagatttgtctgaaaacaatctcctctacttcaagcatgatggcaaatccgtatcattagctcgacatggaatttacccgatgtccattccaatctttaggcggaaacattagcaattgctaataaagtattgtagccaaagactaaatcaggctcgaaatagaagacttgcatccttagtatcctccagaaaagacgctctggaactc

SEQ ID NO: 207513 - DNA, 567 bp, Glycine max
cacacccttcatttcttaagagttcagagtcatggaccaaactcaaaatgaggggggttggatgcattctatcaaagtgacactaggatctctagatcacagagaggttaagtccttcataagcagcatcccttgtgtttcaagcaagcttagaaaatcaaatgaggaagcttattcaccaaagtttgtcagcattggacccttatacagaggaacaagtagccaccttctggccatggaagagcacaaatggcgttacatgctggctctccttcatagaactcaaaatccagtgtcaaccttggatgaatgtggcactgtcattctaggcttggacgatgcagttcgtgcaagctatggaggtaacatcaaatatgaagctcatgagctagccaaaataatgttacttgatggctccttcttgctagaacttcttcttagatgcgcaccaccaaacatggttcctcaaattccaaaagaagataaccataataatggttcttcttcagatccaatactaggacacatagaggtgttcttatctattctcaccgatttcactctact

SEQ ID NO: 207514 - DNA, 552 bp, Glycine max
ctctacctaaacagtttaatgttcaaatcctcaacagcgggcatcaccagaaacgggttctctcttcaaaagcttctggagagccaccattacttatagcagcctgcattcactgtgccacaagagcagctgttaaagaggcaaggaaacagcttctttcatggagcaaccaagatgaagaagattcaacatttcagttgggggtccctgcaaccatgcctgtggtcaaggaactctgtggactggacattggagaaagatacttgaaatggaaaatggggaaggacatactggtgctcacttaaataattgaaaagaggattttaatacacatctctatgaagaagaaacattataattgtttcacaaatattttttataagacagttcttgatactgtaccgagcaatgttattctatacaaacactatcgccgacgaatatgcatactgtattacgtgatttccttatttcatatggactatgattgtgtattagacccatattaatatgcatatcatgcccgcaaagaggtgtttttatctattctca

SEQ ID NO: 207515 - DNA, 518 bp, Glycine max
ctctcatcagattcgggtcgggttagcgttatcggataacttcgcccataaattctctgtttacggggcgaaaatgacagtattcttagccacgaggctcgtgttgcggagatccccgccgcttctctggcggcgcagcttttctcgggcggcggtagaggccgaaaaggacactgttgccgtgccgtcgcttccgttgttcgattactctccgcctccgtatgcggggcccaccgctgacgagattctggcaaagcgcagggagtatctgagtccttccatcttgcacttctacaagaatcccgtgaacatagtggagggtaagaagcagtacctgtttgacgagaaggggagaaggtacgtggatgcgtttggagggattgctacggtgtgctgcgggcactgtcaccctgatgtggtcgaagccatagtcaaccaaaccaaaaagttgcagcactgcacagttctctaccttaacaacgccatcggcgatttcgctcaagctttgacttccaagc

SEQ ID NO: 207516 - DNA, 214 bp, Glycine max
attcgaattggaaacaaccatctagtttgtaccattccaaagaccattggaaatgtggggggcctaaggtactttgaagcctatgataatgatctttctggcgaggttatgtatgaatttgctgagagttcttatctgacactcctgaagttggcgtcacatcacatgacggacacgattacccaccactttgtacaccttatgaacctggggg

SEQ ID NO: 207517 - DNA, 339 bp, Glycine max
ctaagaatgtcccggaagaagatgactttgatagtgatgctggggacttggcagaagcgggggaacatgagactgacttggacctggcatggaaaatgctcgatattgccagagccattgctgaaaagcaatctgtcaatacaatagaacaggtggacatattatcaacattggcagatgttgcattggaaagagaggattttgaaacttccctctcggattaccagaaggcactaaccatattggaacaactggtggaaccagatgatcgaaatcatgctgacttaaatactatgcatactgcttatgtttggaggatagatctcaagctgctgaagc

SEQ ID NO: 207518 - DNA, 528 bp, Glycine max
tgtcatatttcaaaatttagcttgcattattcaccagaatgggtaattcatatgaaaacggcttcccccctcagaagcaagacactcagcctggcaaagagtacctcatgaatccaccaccccaatacaacagctcccaatacaaagccatcaaataaacttcagggaaagatagctgtagtaaccgggggtgattctggaattggacgagccgtgtgcaacttgttttcattagaaggtgctactgtgatcttcacctacgtgaaggggcaagaggacagggacgcgagtgacacgcttgagattataaaaaaagctaagactgaagatgctaaagatccattggctatacctgttgacgtgggttatgaagagaattgcaagaaagtggtggaccaggttatcaacgcttattgccgcattgacattctggtcaacaatgcagctgagcagtacgagagtgattccctggaagatattgatgatgcaagactcgagagggtcttcagaactaatatattgtcccat

SEQ ID NO: 207519 - DNA, 653 bp, Glycine max
tatcatgcgaagctgcacctggaccttagttcgaatctgtaacatatcaaaattctagtaatatccagatttgtataatttatgtatttatttttttattttttttttttttttaattcaatttgggtttatttattatttatgggggtatctatttaatattattatttcccttaacgttcactaccttttggtagcttatatatctgctccatccctggcattctgcaatgctttttaaatcaggtctcacagacatacacatggcatataattatgggaaagttgcactctttactctggcagctgctacatgaaaagaaaatggcgtggtggctggacttgtgggttgtggtctcattaaatccgtgatctcagtgtcttgcattctgatgcaagatttcaaaactgcacattacacacgtacctctcccagagcaatgttcatatgccaagtaattggcattgcaatgggttgtgtgacagctcctcttaacttcttcctatactacaaggcatttgatgtgggaaacccgcatggggaaatcaaagctccatattcgttaatttacagaaacatggcaatcataagggtcccaggtttctcaacattgcctctgcattgtttaaagctatgctttgggttctttgct

SEQ ID NO: 207520 - DNA, 566 bp, Glycine max
gtggggtggtgagcgtgccaaaatctatgttaatggaaaccttctcacactctcccttgacagagcctctggctctggctttcgttccaaaaaagagtacttgttcggaaaaattgacatgcagctcaagcttgtgcctggtaactctgctggaacagtaactgcctattatttatcttctctggggcctactcatgacgaaatagactttgagtttttgggtaacttgagtggtgatccttacactctccacacgaacgtattcagccaagggaaagggaacagagaacaacagttccatctatggttcgaccccaccaaggacttccacacatactccgtccaatggaatcctgcaagcatcatattctctgtggacgggaccccaataagggagttcaagaatttggagacaaaaggggttccattcccaaagagccaacccatgagaatatactctagtctttggaacgctgaggattgggccacaaggggtgggcttgtgaaaacggattggagcaaggccccattcacagcctcatacagaaacttcaatttccaaactt

SEQ ID NO: 207521 - DNA, 429 bp, Glycine max
ttggatggctcactggagaccgatcctgttctttaccatctctggatttcccgcttgcgggcgttacacttcccccttcattgcctgattttgttgcgcccggaaaaactattattactacactcccaaatggactcaaagtggcctctgaaacatcaccgactcccactgcgtcggttggcttatatgtagattgtggttcaatatacgagactccgataagttttggggctacacatctgctagaacgaatggctttcaagaccactagaaaccggagtcactttcgggttgttcgcgaggtagaggcaattggtggcaatgtgcaggcctccgcttatagagagcagatgggttacacttttgatgccttgaaaacctatgctcctgaaatggtcgagctacttgctgattgtggcaagaaccctg

SEQ ID NO: 207522 - DNA, 596 bp, Glycine max
  unsure (1)..(596): unsure at all n locations
tactttggctcctggtgcagatcngacacttgatgcgnataagtataccaggtcgangttnanngccanggcctggggtgggngttgtggtgtgggttggactttttagtaagcacttagtttatgggaacgactcaggggttcctaatttacggggtgcataacaagtcttatggtgaaagactccatgctacctctggaacaatggatgctgcagtttgcagaatttcatgctactgctcaagttcctgccaaacctaagaaaccttctctaaaagaaagacagcataagttgcttaccttcttgcaagataagtatgaacctgttcatgctaagtggactacagaacgctgtgctgcttgtagatgggttgaagactgggactacaacaaaattatcatttgcaacagatgtcaaatcgcagatcatcaagaatgctatggagcaagaaatgtacgagattttacatcttgggtttgtgaggcttgtgacacacctgacatcaagcggcagtgctgtctttgatctgtaaaaagtggtgctctaaagcctactgatgttgacacattgtgggttcatgtcacttgtgccttgg

SEQ ID NO: 207523 - DNA, 525 bp, Glycine max
cttcgcttgatgaattgccattctctaatccttagttctcttttttcaacgcttccagggtacacagaacccaagggtctctcaagccctaatttcccctcatttccatggccacagaagagcccactgtcgcggtggaacccgctcccgaacctgtctccgtcgatcctcccccggaggagaaggaggagaccaaacctgaagccaaggctaagaaaaccaaggagcccaaacctaaaaaggtttccagacctcgcaaccctcccactcatccttcctacgaagagatggttaaagatgcaattacctcgctgaaggagaaaaccggctcgagccaatacgcgattgcgaagttcatcgaggagaagcacaagcagcttccaccgaacttcaagaagcttcttctctaccatttgaagaagctcgtcgccgccggaaaactcgtcaaagtcaaaagctcgttcaagctcccacctaccagacctgctgcatcttcttcttcttcttcttcggcggcaaaagaat

SEQ ID NO: 207524 - DNA, 326 bp, Glycine max
tagcttgaaagttctccgaaagattcccacttgttagtgtttgtgaggccacatcaatatatggaaggaatatgcaaaaggcttgttgggaaaattagggaagatgctgaagctatttcccttgtaaagggatggaggtccaaatggaaggcccatgcttgatctctagtctcatttctcagcaactgtgaatcaactgttctgtttaatgggcgccaacatagcaaatgagatagctgtggagaagtttagtgaaacaactgttggatacaggctcaatagaagagttgcttggagatgggtcccagatgtttattcacacttat

SEQ ID NO: 207525 - DNA, 406 bp, Glycine max
tctcacccttctttgactgttctccttcactcacacccatgacactcctcctgctccggggggtcctctttcacgcggcggaagccaagggacagtggcagctcctccacaaaaacatcggcattgtcgccatgcacatgcagcttctccacaacgaccgcgtcatcatcttcgaccgcaccgacttcggactctccaacctaaccctccccgacggaagatgccgcaacaacccaaacgagttggtcgtcaaacgcgactgcaccgcgcactccatcgaatacgacgtcgcagccaacacattccgcgctctctttgtccaaaccaatgtctggtgctcctccggttcggtctctcccgactgaacattagtccaaaccggtggcttcaacgacggctaccgtgc

SEQ ID NO: 207526 - DNA, 499 bp, Glycine max
gcggccgtcctttttttttttttttttttttttttttttttttttgggaggaatggtggcattttctcttattttcttttgatatattgaaaagggggacagaaacacataatttagtatttaataaagcaaaagcaaaatgcacacacattccccaaacaaaacatgcttattcaacccaaattggtttcatatcacaaaaaccaacaggatgttttcctccttacccgtcccacccactcgaacagaaattctacggaaattaaaaataaaaaaagctaaacttcttctacctcaaatctgaaaagtctaacaacaaaaattcaaaaaaaggaaaattaaacaatcaatccgattcataaaaccgattttgtctttccctcactttccgttgataatctcaattacttagtacctgtaatgagcaggcttgtatggaccctcaacaggcacactgatgtaatcagcctgggccgggctaagcttggtgagctcaact

SEQ ID NO: 207527 - DNA, 433 bp, Glycine max
gaatattagtggttaaggttgttggaggagctctaacaagagatatggagacgcaaaattggttcgagagattgaagcctttcgcagctgtggtatcaatacagtttggatatgcagctatggatgttctatccaaggctgcaatgaacaaagggatgagcaattatgtgtgggttgtttatcgccatgcttgtgcattctttgttatggcccctttggcatggctttttgacaagaaagtaaggccaaagatgacattctcaattttcatgaagatagcggtgctcatctggatagagccaattattgaccagaatttgtattatttggggatgaagtacacaacaaggacctttgccgttaccatacccaatatgcttcctgccattacctttatcttcgcatgcattcttaggcttgagaagattaaaat

SEQ ID NO: 207528 - DNA, 632 bp, Glycine max
  unsure (1)..(632): unsure at all n locations
gactcgccaggctgcagatagacatagaagcacataggagaacccagtacgaagctgggagaaaggntcgagcggtcctctctcgcttgtgctcaaaaagttgcaagagataaagcaaaaaccaaagtgagagagaaaatgatgaagccatcgatgctcagatctcttcactctgccgccacccgcggcgcctgccacctctcccgccgtggctacgcctgcgagccggtgccggagcgcaaggtggccgttctaggtgccgccggcgggatcgggcaacccctctcccttctcatgaagctcaaccccctcgtttccagcctctccctctacgatatcgccggaactcccggtgtcgacgccgatgtcagccacatcaacaccggatctgaggtagtggggtaccaaggtgacgaagagctcggaaaagctttggagggtgcagatgttgttataattcctgctggtgtgcccagaaagcctggaatgactcgtgatgatctttgtaacatcaatgctggcattgttaagacactgtgtactgctattgctaagtactgccctcatgcccttgataacatgataagcaatcctgtgaactccactgctcctattgctgctgaagttttcaa

SEQ ID NO: 207529 - DNA, 320 bp, Glycine max
gctagaagctttaagatgaaaatgaatttgcttgctttgtttggtgctacagtatctggggcatattaatgccatggctcatcactaccataagttccctctccaaatgaaaactgggtatggtgggcaattcatcattgatgttgcatgtcccagttggatgcttggcctggaagcaaacaatgtattccagcggtacactgttcctgcaacttgcatgatagtacatacctgactacgtcttaagagacccctatatatcagattccaaaacagttcactcacactcttatttctatgctaaatatcttacactcacc

SEQ ID NO: 207530 - DNA, 517 bp, Glycine max
ctctcttctttttgctattccttcctcgtcatggagtcgcgagggctgtcacgcgccggggccttgttctccctccctcacctccgcaagctgccgcgggaggtcggcgccggcccctccctcgtcgccgtgaaggccgtgggctccgtggcggactgcgggaacctgatctgggggaggcaactgcgcccagagctctgctcgccggcgctgaagaaggaggccgttctcctgcggccatgcctcgccggcgtctcctcgccggccgagggcagtgattccgccggagaagcaaaggttgctccggcggggtttttcgagaagtatccggctctggtgaccggattctctttcttcacgtggtacttcttgaacgtgattttcaacatccttaacaagaagatctacaattacttcccctatccatacttcgtatcggttatccatttattcgtgggtgtggcgtacctgttggtgagctgggccctgggactttcctaaaccggctccctataac

SEQ ID NO: 207531 - DNA, 573 bp, Glycine max
attcttcactcctcctcctccctctctcttccaaacacacatcctcaaccatggcagcaccatcttcagagacaaagtcaccatcatcctcgaacacgcagcttccgctgaaaccaatcccaggcagctacggaatgccgttttttggagcaataagcgacagacacaactacttctaccaccaaggacgcgacaagttcttcgcgacgaggattgaaaaacacaactccaccgtgatccgaaccaacatgcctgcggggcccttcatctcctcggaccctcgtgtcgtcgcgttgttggacggtgcctccttcccgatcctcttcgacaacgacaaggtcgagaagctcaacgttctcgacggcaccttcatgccttgcaccaagttcaccggcgggttccgcgtgtgcgcctacctcgacaccaccgaacccaaccacgcactcatcaaacagttcttccttaacgtcctcgccaagcgaaaagactctgttgtccctctgttccgaaactgcctccaggagtcgttcgcggagatggaggaccagttgagtaaaaacaccatagcggact

SEQ ID NO: 207532 - DNA, 557 bp, Glycine max
gcatcttcaaactcccttttggcttttctaagtgctgtgattctttctttcatgtgtgtcttcagatttgattcataaagcaattggcaatgttgtagtaccttaaaatgttgctattaggtaaataggttggtgacatggatgaaggtaggtagttaaaatgattgaaactacatctaccactgtgagttgtacgatgaggtggtatgaagagtcaggtcctaaagcatacttgtgatttcctccattatttcctttgagatttggacagtagttggtcatacacccaattctaaattagagttgggatgtctggaggagtagtttgatacagtgatgcatctccacagatacttgagtaaagctatatgctgtggtgtagatttttactatggagttaaatgcaagttatgacgtcgagcattcacattctacacaaagaatacagcatgagctgtggcctctagatccaattgatccaaagaaggcaaagtttccatgttgtttggtttggaatccacttcctgtggtctcatggctggctcccttcatggtca

SEQ ID NO: 207533 - DNA, 544 bp, Glycine max
gctactactaattggatgtggcagcttgccaaggcccatgtttgctccaatgatgctggggtgcaccaacttgttaaccattggttacgtacacatgccaacttggaaccatttatattggcggctcataggcaattaagtgctatgcatccaattttcaagttgttggacccccacatgaggtacaccttggagatcaatgccttggctagacagagtttgatcaatgctgatggaatcattgaaaattgctttactcctggtcgctatgccatggagattagttctgctgcctacaagaacttttggcgctttgacatggatagcctccctgcagatctcatccgcaggggaatggccgtacctgacccaacacagccacatggtctaaagctcatattggaagactacccttatgcagctgatggaatactaatctggtctgcaatagaagactgggttcgaacctatgtgaaccattactaccctcactcaagccttatatgcaatgacaaagagttacaatcttggtactctgagtcaa

SEQ ID NO: 207534 - DNA, 447 bp, Glycine max
gccgccttaaagtgtctacagcagtggctcctgccaagaatttgtctagcttggatagcattgatcaccttcttaaacgggttgcctcccccaagaaaagggctactcccaggagttctgtgagaagcaggcagtcaaagaaagtagattcaatcagggagtcaaacaatagcttagctaggttatcaaggtatcctgtgagagttgttctttgtgcttatatgatattgggtcatccagatgctgttttcagtggaatgggtgaatgtgagattactctagccaaatctgcacaagagtttgtccaaatgtttgagctgttggtaaagattatactagaggggccaatacgaagttttgatgaagagtctgtctcagcatccatgaagtgttgtactttcagatctcagcttgctgcttttgataaagcttggtgctcatacttga

SEQ ID NO: 207535 - DNA, 634 bp, Glycine max
  unsure (1)..(634): unsure at all n locations
cgctccatggtgcaggatcngacgctagatgtcaggtcaagnaaaccatgtcnnnaatttatgtaacatacttggttgttaattttatttgggtttactgtttttaattgtatcgtgttttaatttgttctaggggtgagttcccctctgggtgttgtgatcttcttgttcgttttggcatatgggagatcttggggtccccttgggtggttggttcccagtgagctctttccattagagataagatcatctgcacagagtattgtggtctgtgtcaacatgatcttcactgcacttgttgctcaattgttcctcatgtcactttgccacctcaaatttgggatcttcttgctctttgcttccttaattatcttcatgagcttctttgtcttcttccttttgcccgaaaccaagaaagttccaattgaggagatttatcttctttctgagaatcattggttctggaggagatttgtcactgaccaagacccagagacatcaaacgggactgctttaaattctcaaccaatagattgaacaagtgttggttttatggttctctttctttattctgagtcaattattcttacttgcagctttgcaaaaagaataatctgtacgacatttttttaaa

SEQ ID NO: 207536 - DNA, 638 bp, Glycine max
  unsure (1)..(638): unsure at all n locations
cggctccactgctagctgnatcnngacaaattgcatggctgnattaagnnanatccattatccnanngtttgtgtatgttatnntcctntggntggttgtattattatttttaggtttttatttttttatntataatttattttattttttataagatatttaggggggttattttactaattgtggtgtgcctatttccatatttaccaaccaattaacaaaggtatatatatcatcatatcatcaccaaatgaaatattgggttgttttttcttgtggtggtggctacttttgtggtggcagccacagctggtagcttttaccaagactttgaaataacgtggggtggtgagcgtgccaaaatctatgagaatggaaaccttctcacactctcccttgacagagcctctggctctggctttcgttccaaaaaagagtacttgttcggaaaaattgacatgcagctcaagcttgtgcctggtaactctgctggaacagtaactgcctattatttatcttctctggggcctactcatgacgaaatagactgtgagtttttgggtcacttgagtggtgatccttacactctccacacgaacgtattcagccaanggaaaaggaacagagaacaacagtt

SEQ ID NO: 207537 - DNA, 508 bp, Glycine max
cattaggtcagacagctgactggtttatgagagcattggctgtggagcctgtcaaggggaacctgcggttgagtggatattctgcgtgtggacaagatggaggtgtgcagcttcctcgtggatatattgaggagggtgtatctgatgccgacttggttcttttggtgactacaagacctacaactggaaatacacttgcctgggcagtggcatgtgaacgagatcaatggggtcgtgctatagctggacatgttaatgttgcgcctcgccatttgactgccgaggcagagactttgcttttagctactctgatacatgaggttatgcatgttcttggttttgatccacatgcctttgctcattttagagatgaaaggaaaagacggcgtaatcaggttactgaacaagttatggatgaaaaacttggaccaatggcaacacgtgtggtgcttcctcgtgttggcatgcattcttgatatcattatgcggctttctcaggaaatttttc

SEQ ID NO: 207538 - DNA, 449 bp, Glycine max
gcacaacgaaccactctgaatctgctcacgttatccacaacactctaaaccctggttgaaccctaactaatccaaccatgggttcttgttccaccttgactggaatgtgcgcctgcaagctctactcctgcgccgacatgttctacttgccctcccgtcgcctgtccaacgccgatgatctgtccaggcgcaaacgctcgcgacagggtctccgccatggccagtgagttgcactgcaacaaagacggcaccggagttgataagctccagagcggtgtgaacaagctcgcggatctggttggggtcacgcttggtcccaagggaagatatgttgttctcgagagcaagtatggctcgccgaaaatcgttaacgacggtgtcactgtcgctaagaggttgagttggaggatccccctgagaatattggtgccaagttggtgagacaagcg

SEQ ID NO: 207539 - DNA, 548 bp, Glycine max
  unsure (1)..(548): unsure at all n locations
atctttttcttcttcttctcttcaaaccctaaatcgtggcctcgtaaattaaccaccgaagtgatcgaactcaataccctaaaagccatggcccaatcccatggatccatcctcactcgatcagtgtggtcctccaatctcgaatcggagttcgacttaatccgatccgtcatcgattcgttccctctcatctcgatggacaccgagttccccggtgtcgtcgtgcgtgccgacgccggcgacccctcctttcgacaccgacaacccgtcgcgcactacgccgtactcaaagccaacgtcgaccgcctccacctgattgagatcggacttaccctttccgacaacgccggaaaccttcccaccctcggtacctccaacgccttcatgtgggaattcaacttcaaagatttcgacgtcgcgcgtgacgcccacgctcactactatgtggagttgctgcgccgccagggcatcgatttcgagaagaatcgcgacttcgggattgactcgttccggttcgcggagctcatgatgtcgtnccgtctggtctg

SEQ ID NO: 207540 - DNA, 526 bp, Glycine max
gatagaaaattttcactctgttgataacttaaaagcattatcctctaattctatatattaacacgctctaagtcaacaaatgcattgcctcctcatacattactatctttcgcaggtgcaaatagaacccaaagaattaatacttcctaatggatattgataagccagagaaaatgtgtaagctttacaatttaaagctgagaaaagaaacctaggccaaattgattactattatttcatatataagaaagctcagaaaacctccaaaccatacaagacaccagcgtactgaacaagtccgtcagccttgtcaaagtaattctctctgatattctgaaacgcgtgcagagtgagcaaactatcagaaccagcctgatgactttttccaataacacgttccaccttcagcgactgacaaacacggtccaatccaccgtgcaggtttgagcagaacctcatcaaatgcttcacatcaaagactctgtctccgaaaaacaccctcaccagacgcagaaactctcttaat

SEQ ID NO: 207541 - DNA, 515 bp, Glycine max
attggggaattaacaaggtcacttgatggaataaatgagtttaacctcataaatgttgacaaaatcctcatgaatttaaaagtttggcttaatggtgcggttacataccaagatacttgcttggatgggtttgagaacaccactagtgatgctggcaaaaagatgaaggatttgttgactataggcatgcatatgagcagcaatgcccttgccattgtaacagatttggctgacactgttaatgattggaatatcacaaaatcatttgggcgtcgcctccttcaagattatgagcttccgtcatgggttgatcaacatagactccttaatgaaaatgcaagtccattcaaacgcaagcctaatgttactgtagccatagatggtagtggagatttcaaaagcatcaatgaggcattgaagcaagtgcctgagaaaaaccgaaagccatttgtgatctacatcaaggaaggcgtttaccaagagtatgttgaagttacaaagaacatgacccatgt

SEQ ID NO: 207542 - DNA, 574 bp, Glycine max
attaacacccgattctgcttaaattggcacaccaccaattttcgtgggaacccgaaccaataaaacaaaaaaagagtccaattttgtgaaaattattaccattcattcttattcatcaacgtccccccttctgtgcccacttccaaatcttctcctctcgctatgggttgtggctcctcccttccagatagggattcaaggcagttgggtcgacccaattccgagaatggtggagggcaggacgccaagaatctaagggtcaagcttgttctcttaggtgattctggtgttggcaaaagctgtattgttctacgatttgttcgtggtcagtttgatccaacatctaaggtaactgttggagcttcttttttgtcacaaacaatagctctgcaagactctacaacagtcaagtttgaaatatgggatactgctggtcaagagaggtacgctgcgttagcaccactctattaccgtggtgcagcagttgcagttattgtttatgatataacaagcccagaatctttcagcatagcacagtactgggtttaggagctacataaacatggaagccctg

SEQ ID NO: 207543 - DNA, 501 bp, Glycine max
cgactctttctcttatctctaagtcaacatggctcaccttgaagattcaagtgcgtggaattcgagtatacctcaccctaagctcaatgaaagaattctgtcttctctgtcacggagaactgttgctgctcacccctggcacgatttagagattgggccaggagctccagctgttttcaactgtgtggttgaaattggcaaaggcagtaaggttaagtatgagctggacaagacaagtggacttataaaggttgatcgtattctttactcatcagttgcctacccacacaactatggttttatcccaagaaccatttgtgaagacagtgatcctatggacgtgctggttctaatgcacgaacccgtgcttcctggttccttccttcgtgctcgtgctattggactaatgcctatgattgaccatggcgagagggatgacccgatcatagcagtttgtgctgatgaccctgagttccggcattacactgacatgaatgagct

SEQ ID NO: 207544 - DNA, 450 bp, Glycine max
gtggggtggtgagcgtgccaaaatttttgtgaatggaaacctcctcacactctacagggggggagtctctggctctggctttcattccaaacacgaggacttgctcggaaatattgacatgcacctcaggcttgtgcctggtgactacgctggaacagacactggctatcatttatcttgtgtggggcctactcatgaccaaatagactttgagctcttggatgacttgattggcgatacttacgctctgcacaccaacgtatatagccaagggaaagggaacagagaacaacagattcatctatgggtcaaccccaccaatgactatcacacatactccgtccaatggaatgctgcagagcatcatattctctgaggacgggacccctatatgggagatcaagagtttggagacataaggggttccattgccaaagagcctacccatga

SEQ ID NO: 207545 - DNA, 664 bp, Glycine max
  unsure (1)..(664): unsure at all n locations
tggtcaagatgcagcatggacgattgcatgcagataacgaagaccagctatgacgttggatgctcgcgttctntgtggtgggtgtttgggttgtgctcacacttttcctactctagtgtctgattcataggccccagagcacagaaactaacaagattttgagcacaatggcatccacacaatgcttcttgcaccaccatgccctcaccactccaaccagagcttcatcacagcgcttagttgtgagcaccaaaccaaaccacattgtttgcaaggcacaaaagcaggttgtccaagagggtgaggacactactaacattgtctctcgcaggttggccctcactgttctcattggtgctgctgctgttggctctaaggttgcacctgctgatgctgcctatggagaagctgccaatgtgtttggaaagccaaagacaaacactgacttccttccatacaatggggatggattcaaactctcaattgcctcaaagtggaacccaagcaaagaggttgagtacccaggtcaggttcttagatatgaggacaattttgactcaaccagcaatgttgctgtcatggtcactgcaactgacaagaagtccatcactgactatggttcacctgaggagttcctatctcaagtggattacttgcttggaaa

SEQ ID NO: 207546 - DNA, 436 bp, Glycine max
cttcctttttctttctttgaccttttaccggttgttgcgttggcgcaaatggcattctgggaagcgtttctgcactttctcgacttcgctctcgcgtgggccaacaatctaatctggcgaattcagttagatggctccaaactccgagctccagtaacactgatctttattctgagttgaaggaactggttccagagtatcaggaacgtgttaagaagctgaagaaagatcatggaagtgttgaattaggaaaaatcactgttgatatggtacttggtggaatgagaggaatgacagctttagtatggctaggctcagctgctgacccggatgaaggaattcgctttaagggcatgtcaattcctgaatgccagaaaaagctttcaggtgcttttcctggtggggagcccttgcctgaagctgtactgtggcttct

SEQ ID NO: 207547 - DNA, 530 bp, Glycine max
aaaccaccaatcaaaaaccatgaatgctaatagagaaaagggagagtgctttgaaaatgggaaagttcagttcaagttacagtacttctgattttgttcactttggagttctacttccctttcttctgttatcacagttgttctttcaacttgcatggtgtggctccatagtaaagtcccttcctggattagagggaccccttgcttttgttcttgaaaccgggtatgtgggagcgggcgaatcagaggatgtgcaagcattctactactttattgagtcagagatcaatccataggaggatcctctcatgctctggctcactggtggccctggttgctcagctgtctctggccttgtcattgacataggcactaccaactctgtttgcaaattttacttgtgctccatacttatgtatgtaccaagtgaccagagccgagacttagaaattgtactctatctgcatgttgcatgtccatttgcatttaataatgaagtatacaatgggagcctgccccaatttgtcttg

SEQ ID NO: 207548 - DNA, 490 bp, Glycine max
ctctttttgctcagctcttgttgatttttctctattacgacacattattctgcatattgtgagcgggttttgggattctgacacatgggaggttgcatggacacacatcatgatgaatgtgacatatgactgttctcaccacttgctcatgaggttgccgttgcatcacatggaggacatgagtacccacctggggcttaccaaccaccacctgggggctactctccacaagatggatatgctccggctggttatcctccacaacaggggtatcctgcagctggataccctgcacatggagggtatcctgctgattgttaccgcccagatggttatcctggctcatcacaagcaccaagatctcatggtcacagcggtataggagcactgctcgctggaggtgctcctgcagctggtgctgattatggagctcaccatgtatatcatggatgccatggatgctatggacgtatgcacatggtgctcacat

SEQ ID NO: 207549 - DNA, 186 bp, Glycine max
ccgcgagcggccgccctttttttttttttttggttatcatcatgaacctaaaacaatgggatgcatttgtgttttttacatgtggttggctaatgctgttactatcttatatcttttgccatgtgattgctattatgaccactatgaattgaatgccatctgcttgggtttgcagaacaagaaaac

SEQ ID NO: 207550 - DNA, 364 bp, Glycine max
atttatattcacatatttctcttcttttcagaaatcagaattgagcacgcgtgggggggtgtaatttgaaggttatcatcatcacccatagatattattattattataagaagttcatcagaaatattcaatggggagccttgaaactgaactgatgaatcttaaggccacagagttgaggttgggactgcccggctgtgatgaaactaatgagaaaagttcatccagcagtggatctgttgttagaagcaacaagagatcttcaccagaacccagtgtggacgagtccaggtgcaactctaatggttcttcacattctaccaccacaagtgatcatgatcaagacagtgcccaacctgaaaag

SEQ ID NO: 207551 - DNA, 594 bp, Glycine max
  unsure (1)..(594): unsure at all n locations
gtaaatcccaatctacactacgacacagcagctgcatangaaaccaatccnagtgtgttgttatnttctggttgggttttttttttgttttttttttttttttttttggtttattattgttttttagggtgctttaacccttggggggacatgactatcctcattgagcaatctgatcactttggggctgaagtacaggcaaagactgaaccagtaaatgacagggaactggtgtcggatggtggatttctgataccacagaccaactcatttgggcacatgtttagggcttataatgatgctgcaagtgagaggcgtgaaggagtggagaacttctacagaaaaaatcacacttaccaatcagttgatttcgtgaagaaaatgagagaggagtatgcaaaattgaacagggtagagatgagcatatgggaatgttgtgaactccttaatgaagtggtggatgagagtgaccctgacttggatgaacctcaaattgagcacttgctccagacagctgaagctataaagagggactacccagatgaagattggctgcacttaactggccttatccatgatctcggcaaggtgctg

SEQ ID NO: 207552 - DNA, 581 bp, Glycine max
  unsure (1)..(581): unsure at all n locations
gctcagccaatgtaccctcgacctagagtcagatangtagaccatgtcctatgtttgnttgtctctttcctttgggtggttgtttttgttggggtttgttttttttttattttttcttttttnttctccgtctggggtcccttttctccctagggtgtctctctactgaatccctatagagagaaaatcataaaccctaattcccctgtcaagctcgtagcacagtcacagccatgtatggcggtgatgaagtatcagctatagtaattgacttgggttcacacacttgtaaagctggttatgccggtgaagatgctcccaaggctgtgtttccctctgttgttggagcaattgatcaaatggatgttgatgaagcagataatggtgaaaagaaccctggctctgctccggaatcaaataataataatgttagaaatgctgattctgacaaggccaagggaaagaggaaattgtatgtaagatcccagtccttggggtaccgcagagaccatatggaggtgctgtcttcatttaaggatggagttgctgctgactgggatattgttgacagcatatgggat

SEQ ID NO: 207553 - DNA, 600 bp, Glycine max
  unsure (1)..(600): unsure at all n locations
tggttctgtttcggttggtcgctcgcatgcagnttacgaaagacaagttattaagtttgctgctcacgtgcattgggttagtatttagcttttgggtattatgtctttcttctttctccatccatttcctccttctgggtcaatatcccttttgggagctgttgcttagcagcatctcaagctcccaccaccaaatcacacccctatatccttcccattaagaaagaccccgcaacaaatttgtactacacttcagttggcattggaactcctaggcacaactttgatttagtcattgatctttctggtgaaaacttatggtacgattgtgacactcattacaactcatcatcctacagacctatagcttgtggctcaaagcaatgccccgaaattggatgtgttggttgcaatggccccttcaaaccaggttgcacaaacaatacatgccctgctaatgtaatcaaccaattagccaaattcatttacagtggtggcttacgtgaggatttcatattcattcgtcaaaacaaagtgtctggtttgctttctagttggattgacaccgatgcatttccatcattcttcgacgatgagtta

SEQ ID NO: 207554 - DNA, 427 bp, Glycine max
caaagagacaattcaacttatgatatctttatggccaccaccggtacccatcctccctggggtatctgttttttccttctgttgttgcttctagcacactttcatttgggcataagccaacttgagctgaattactactctaaaagctgcccaaaagctgaagagatcatcaaggaacaagtcacacaactatataacaagcatggaaacactgccgtttcgtgggtcagaaatctcttccacgattgcgtggttaagtcatgcgatgcatcattactgttagcgacggtgagcgatgtagtgtcggagcagacatcggatagaagttttgggatgagaaacttcaagtacgtaaacactatcaaagcaacggttgagaaagaatgccccttcacagtgtcatgcgctgacattgttgctctttctg

SEQ ID NO: 207555 - DNA, 541 bp, Glycine max
actgctcgtttgcctctaattctgcattcttctgcgcctccggcgccatttttgatactgggtttgtgttcgcatagtgagatatggggaagaaggcgaagaaagctatgaagaagaatttgaaaagggcttcctttaataagaatccatctgaggatgctgatttcttgcccttggaaggtggccctgctcgtaagctcgccggccagcagaagccgccgccgccgccggagaacaccgccacggttttgtacgtcggtcggatcccacatgggttctatgagaaggagatggaaggttattttgggcaatttggaaccattaagaggttgagaatcgcaagaaatacaaagtctggaaaatcaagacattttgggttcatagaatttgaatctcctgaggtagcaaaaattgtggctgatactatgcataattatctcctttttgaacaccttctccaagtttatgtgatacctccagagcatgttcattcaagaatatggagaggattcaattaccattacaagccattggattctgt

SEQ ID NO: 207556 - DNA, 529 bp, Glycine max
cttgtgcctcaagaaataggttagttccgagctgaaacaagatggctggtgataaacaaaaactctttaacagactgaagccattcataggtgtagtgttcttacagtttggatatgctggcatggatattctatgcaaagctgcactgaacaagggaatgagtaactatgtatgtgtcgtgtaccgtcatgtttttgcctttgttgtcatggccccttttgcactgatcttggagaacaatgtagggccgaagatgacattttcaatcttcatgaagacaatgattctcagcttgctagagcctggtattgaccaaaatttgtattgtgcgggcatgaagtacaccacagcaacctttgctgtcttcatgtacaatgtactccctgccattacctttgtcatggcttggattcttaggcttgagaaggctaaactaaaaagtatacgcagtcaagcaaaggtggtagggactttaggcactgatgtaggtgccatggtcatgaccctgataaagggcccaatacttga

SEQ ID NO: 207557 - DNA, 581 bp, Glycine max
  unsure (1)..(581): unsure at all n locations
caacaaagaaagaaaaggaaaatgaaataccaaaacacaaaaagcaccctctccttcctctcctccccctttctttttctctcttcactctcacccttatctcctccattgcagcttctgctttttcttcaaatcaacaaacaaacaaaaccatccccatttcatttcagaagaaacccttttctttcccaagcacaactgtttcttcctacggtggaacattgaccatttgaaatagttgtgcaacagcttccattatttggaaaaaaaaaaaagggtcttttgattctttgaagcgagaagatgcagaggcctccaccagaagattttctgttgaaggagaccaaaccccaccttggagggggaaaagtctctggcgacaagctcactagcacttatgacctagtcgagcaaatgcagtatctctatgtgagggttgtgaaagctaaggacttacctgcaaaggatgtcactggcagttgtgacccttatactgaagtcaagctggggaactacaaaggcaccactncgcacttcgacaagaagtctaatcccgaatggaaccaggtttttgctttctc

SEQ ID NO: 207558 - DNA, 527 bp, Glycine max
gttttcgttctgattctgcaaaatcatggagatggagcgcatcgttgaattccctcacacctacatggatcgacccccaagaaagagagcgcgtttgggctgggacatcgctgaggcccccaaggctcaggtaggattgttttgtggacaagaggttgagaatatctcaagctatgctccttgagaacatccccctagttctatgtttaagggagttgcccgatatggttctcccccatggcgagatgatgacaaagatggccattacatgttcgagcttggagataatttaacttctcgctataagatccatagtaaaatgggcgaaggaacttttgggcaggtcttggagtgctgggacagagaaaggaaggaaatggttgccataaaaattgtccgtgggataaagaagtatcgagaggcagccatgatagaaattgaggtattgcaacagcttgggaaacacgataaaggtagcaatcgttgtgtgcaaatacggaactggcttgactatcgaaatcatatct

SEQ ID NO: 207559 - DNA, 567 bp, Glycine max
  unsure (1)..(567): unsure at all n locations
ggaggaaattcttgggaagaagatgaatgattggttaagatttagtgttgcattttggcgtacattccgtggaacaggtgctgacccatttggtgcacctaccaaatactggctatgggaagatggtaccaattcattaaacatggctaatagacgaatgagagctaactttgagttcataagcaaactcggtgttgacttttggtgtttccacgacagggatatagcccctgatggaaaaactcttgaggaatctaatgcaaacttggatgaagtggttgcccttgctcaagagctccagactaaggctaaaaaaagagtgttatggggaacagctcagttgttcatgcatcctcgttacatgcatggtgctgctactagctctgaattaaaggtctatgcatatgctgctgctcangtgaagaaagccatagaggtgacacattattctgggggagaaaattatgttttctggggtggtcgtgaaggttatcaatctcttttgaacacagatttggagcgagagctttatcatttggctaggtttttngaagctgctgttgcata

SEQ ID NO: 207560 - DNA, 593 bp, Glycine max
  unsure (1)..(593): unsure at all n locations
gctagcctagctccctagtaatcgatcgnttangagtcatgccggttggggggaggaacaggggagggggggaaaaagggaaaggttttgtaatgtaattattttttgtatcttggggattctttcttctgggtatttgttttttccttctgctgttgcttctagcacactttcatttgggcataagccaacttgagctgaattactactctaaaagctgcccaaaagctgaagagatcatcaaggaacaagtcacacaactatataacaagcatggaaacactgccgtttcgtgggtcagaaatctcttccacgattgcgtggttaagtcatgcgatgcatcattactgttagcgacggtgagcgatgtagtgtcggagcagacatcggatagaagttttgggatgagaaacttcaagtacgttaacactatcaaagcagcggttgagaaagaatgccccttcacagtgtcatgcgctgacattgttgctctttctgccagagatgccattgctttgttgggaggaccaagcattgaaatgaagacagggagaaaggaccagcaagaaagctatgcaatggaagtggaagac

SEQ ID NO: 207561 - DNA, 463 bp, Glycine max
ctgatttttttctatgctatatagttttcaaaggcactcagggagttttgcaccgcgggatcattacgagattgcaaaatgaatttcaacattgcaaatcccaccactgggtgccagaagaagctggaaatcgatgacgacctgaagcttcaggcattttgggacaagaggatcttccaggaggtccttggtgacgccctgggtgaggagtttaaaggatatgttttcaaaatcactggtgggtgtgacaaacaaggattcccaatgaaacagggagtgttgacccctggtcgtgttcgactcttgctccatagatgaactccttgtttccgtggatattgaaggcgcaatgtagagcgtaaaatgaaatctgttcgtgggtgcattgccagcccagacctctttgttttgaacttggaaattgtgaaaaagggttagagtgacttgcccggtctcactgatg

SEQ ID NO: 207562 - DNA, 555 bp, Glycine max
gcctcaagttagtaacccttcctctcttcttcttcttattctgtttcaaaaaccatggtttattattttccggatggcgtccggtactgtgaaaccttcttctcggtaccgttcctacgattcacgctcctacactttctctcatttctacgacccttcctgctgccatgaattcaacaatctcaaaaccaaaacctcttcttcttcttctcgcgctctcgtcaaggccaaaccctcaaacaccgtcaaggtggaccccaccttcaccaccatggtcaagaagttcatggacaggaaacccaaatcctcctcctcggccgtcgccaccgccaccaggttgattattccctccgattttctcgcgaaggatttgaagaaggacgcgaagaaagtggcggggttctccgcgctgcagaagaagctcttcggaaagggcgcttcctagaagaaggagaaggtgaaggccttgaccgaggtgaagaacaacaccaggacattggccatggtgctcatgagcgagagggagcttctcagcatcaccaagagcaggagcag

SEQ ID NO: 207563 - DNA, 438 bp, Glycine max
ctcgagccgaatcggctcgagcttatctcaaacctcacctcaataatctttcgtgctagctagcttaatcatattccaattccaacagaaccaaattctgctagctagctagtacgtcaaaggaaataaaataatatggcattcagcgggacccaacagaaatgcaaggcttgcgacaaaactgttcacttggtcgaaggtttatctgtcgatggggctgcttatcacaagaattgcttcagatgcagccattgcaatggccttcttgcgataagcaactactcatccaccgaaggggttttgtactgcaaggtgcactctgagcagctcttcaaggaaactggcgcctaccccaagaaatcccagtcgtctggaaagcctccactcgagctgaatagagcaccaagcaaactttctgccttcttctctgggactcaa

SEQ ID NO: 207564 - DNA, 455 bp, Glycine max
gtcggctgcaagaggatgaagcccgtcatttttttcagcagataatttctggtgtggagtactgtcacaggaatatggtggttcatagagacctgaagcctgagaatttactcttggactcaaaatttaacatcaagattgctgattttgggttgagcaacatcatgcgtgatggtcactttcttaagacaagttgtggaagccctaattatgcggctccagaggttatctctggaaaattgtatgctggaccacaagtatatgtctggagctgtggtgtaattttatatgctgttctctgtggcactcttccttttgatgatgaaaacattcccaatctcttcaaaaaaataaagggtgggatatacactcttgctagtcatctatcacctggtgctagagatttgataccaaggatgcttgtcgcggatcccatgaagaggatgaccatacct

SEQ ID NO: 207565 - DNA, 184 bp, Glycine max
gaaaagtacagtccagttttagtgatctctttaatttatttgttcatagattaatatgatggtgtatgattgcttttctatttattgtggcatttttgtgttgcaccctgttgttgtgtttgcaataagtattagttataacagcagcaatattcaaatttcaaaactaaataccgtggtgagt

SEQ ID NO: 207566 - DNA, 159 bp, Glycine max
gaaattgaatttgctgctttattactaatacttattgcaaacacaacaacagggtacaacacaaaaatgccacaataaatagaaaagcaatcatacaccatcatattaatctatgaacaaataaattaaagagatcactaaaactggactgtacttttc

SEQ ID NO: 207567 - DNA, 533 bp, Glycine max
gccaagagtcttgtgcagcaatggaattttaccacaacctactgaagatcaggttggtgaatgagaaagacatctgtgtttatcagcgcgccgattggttggttgacaagttgggtacaaaagtccattcttatttctggcttgatgagtactcagaaaaagatgattttgcgcgatactggaaaaatgaatggatgagtggtttgacgtcatggcgcaaagcactgaagattccagatactgatgtcataatggaagatggatgtgctaaggtcactgatcaagataaagcttttgttgtctggaatactggttcaatgttgagcatttgtaattgtagttgggcacaagatggcaacctttgtgagcatattctgaaagttcttagtatctgccgaaagagggggtccattttaccatctgtcactttatttcaggatcaccaggcactaaataacatgctgcattgccctccttttgattcctttattcgtgatcacgctgtgtcattggcagtttcagctcagaagcag

SEQ ID NO: 207568 - DNA, 490 bp, Glycine max
caacctcacaattcgaagttcaaaccccaaatcttcaaaaacctcacaccaaacccaaaataaaaaaacaacgtaaaaaccttaataatagcaaaaccaaaaccacacttgcagtcaaatgttcttcctctcttcccccttctcttcatgcttcagagcttcacaacgtaccaaccacgatcccacaaacctcaccacctacatctaccacaccgaatacggcaccgtttcactgacatggtcgcgctccctgctaggccgctccctccacgtgaacctccacaaccgttcctccttccaccttctcctcaagccatggaagaaaaacgggtccaagaagctttctcacaatacggtcttcctctggaacctctccatccgtaggttcgagtctggactcgaacctcgctctagattctacctcgccatcgaggtagaacatggcctcagcctactcattggggacttatccccaggagtagtaaggcca

SEQ ID NO: 207569 - DNA, 412 bp, Glycine max
gacaagaaaagaaaaaaagggagagaagcagaaagagagagagagagaactgaaaaaagaaaagaaaagataagactaattaacgtttttttggtttggttttcttcaacacgcaggagacacgaagtaaagagacaagttacatcagatggttaaaacttgttaaaagagtttgtgtatgtgtgtgaaagtagtttaaggctgtgggggtggttgaagaagttttttagctttggagatagagatgtcaggtggtggaggcagcatagtgaggttcagaagagatctgaggatagaagacaatccaacactgacagcaagagtgagagctgttgctgaggtcgcagttctcgtattggcacctgaagaaaaaggccaatactaccctggcagggtctctagatggtggctc

SEQ ID NO: 207570 - DNA, 525 bp, Glycine max
cttccttctcatcattctcatattattgtcgccacttcgacctcaatcaccctcgcgccctcgctcttcccttcctggtggcgacaatgtcgactcctgctaggaagaggctgatgagagacttcaagaggctgcaacaagacccgcctgcagggatcagcggtgccccccaggataacaacataatgctgcggaatgctgtcatatttggtcctgatgatactccatgggatggaggcacgttcaagttgactctccagtttactgaggattatccaaataaaccaccaactgtgcgatttgtgtctcgcatgtttcatccaaatatttatgctgatggaagtatttgcttggatatactacaaaatcagcggagtcctatatatgatgcggctgctatactcacatctatccagtcattgctttgtgatcccaacccaaattctcctgcgaactctgaagcagctcgaatgtttaacgagaacaagcgtgaatacaatcgaagagtgagggaaatcgtggagc

SEQ ID NO: 207571 - DNA, 482 bp, Glycine max
cagcaaactacaacttctttgttgaatgtttgacaacaatccaaagtaaattgacacgcataattctattttacattaactgacatatgcaatgcaaaagctacaataaattaaagataagatgatgctatcattcatatcagaagagaatatatatttgatgagtttgcacaatcattcttatatataggtgccaccactgcaacctaattcatgccctcaaagcttcctgcatataaggatgaacttagtcggctgtccaactctgctccacgatttccctcactcttcgattgtattcacgcttgttctcgctaaacattcgagctgcttcagagtttgcaggagaatttgggttgggatcacaaagcaatgactggatagatgtgagtatagcagccacatcatatataggactccactgattttgtagtatatccaaacaaatacttccatcagcataaatatttggatgaaacatg

SEQ ID NO: 207572 - DNA, 611 bp, Glycine max
  unsure (1)..(611): unsure at all n locations
gaaccggccatgatgcgctttgacatagcagtcgcatagtagacctataanggntgggtgggattgctggtgtggtgtttttgtttggggtgtttgtttttgttgttattttatttttgagntgattctggtcttgtcaagttggtgggaattaggagctgcttaattcaaagaatggggggagatgcacagaagagaaacgtcatcattggcgtctctactttcttgttggtggccatggtggtagcagtcacagtcaatgtcaacttcaataacaagggatcaagcagtgattcaaaggaagaaagcaaatcccatgtagcttcctcgatgaaggccgtgaaaaccctttgtgcacccaccgattacaagaaggaatgcgaggacaatcttattgaacatgccagtaacatcaccgacccacgggaactcatcaaaatcgcattccacgtgaccatctccaaaatcggcgaaggacttgagaagacacaactcatgcatgaggtcgagaatgaccctataaccaaggaggcactcgacacgtgcaagcaactcatgaacctcttcattcgngagttcacgaggtcactcgacaagttcgccaagtttga

SEQ ID NO: 207573 - DNA, 369 bp, Glycine max
gcaagaaaatgacagttcagacacacttgcatttcagtgcaatgaaattatggaagacaaaagacaaaggtggtacagcacaatcattaataattagttgtttaatttggcaacacgcaggcacatgcgttctctcctaaaaaataatgaatcaacttcagttagtgtgggagacctggccagagtagtaaggaatcctagtgaccctaatccagtcatctccatggaaaaacatggatggcaagaagtttgttattccatctgaatcaagggtcttaactccttcccacttcacacgcttggttttgtctgaaccagggccacggttgttgaactcagcgtagaaacaagtatccattccactaaaac

SEQ ID NO: 207574 - DNA, 634 bp, Glycine max
  unsure (1)..(634): unsure at all n locations
gtctcgccaatgtactgattgagctagagtcgnatangnagaccatgncnnngtttgggnnnngggccgggggnggggggngtaacagggtagngaggtttcgncgnaaacatgtttagcatcgtcaaggagatcctggcgagcccgggcaaatggcggaccaggtttcgaagcttgcggaagaggcccagaatttccgacaggaatgtctggagctgaaatccaaaactgagaagctggcgggcctcctccgccaggccgccaggaatagcaacgacctctacgagcgtcccacgcgccgcatcatcgacgacaccgaacaagtcctcgacaaggccctcgttctcgtcaccaaatgtcgcgccaacagcctcatcaagaagctcttcaccatcatccccgccacagccttccgcaagacctccatgcagctcgagaattccgtcggtgacgtccaatggctcctccgcgtctctgcctccgccgacgagcgcgacgacgagtacctcggcctacctcccatcgccgncaacgagcccatcctctgcctcatctgggaacaggtcgccattcttctctccggcgctttcctcgtctccctcgctcgcgacaacgaccgttacgggaaactcat

SEQ ID NO: 207575 - DNA, 599 bp, Glycine max
caacgttcacataccacgtagaaacagttcaatcattcttagccctaagcagacttcacatgctcatccacttagtggcagtgttgtctctctgttactaccgcatcacccacttcttcctccaacctccaacagcgccatggcttctcatgactgctgcggagcttcttctctcgctgctctggttcttcaaccaagccttccggtggcgaccggtgtcgcggagcgtcatgactgagaagcttccgagtgaggagaagctgccggggcttgacatcttcgtgtgcacgctcgatcccgagaaggagcccaccgtggaggtcattgacaccatcatctccgccgtgtccatggattacccctccgacaagctttccgtctatctctccgacgacggcgggtgcgacgtgactctctatgggatccgagaggctgctgagttcgccaaggagtgggttccgttctgtaaaaagtatggcgtgaagtcaaggtgtcccaaagtcttcttctctccctctggggatgaggatcacgagactcttcgggacgatcaattcagaacacagagagacctcgtcaaggctaaatacgagaaaatg

SEQ ID NO: 207576 - DNA, 532 bp, Glycine max
gccaccgtagccgccgccgaacggatcgacgatgaagacgaccttctgatccgtcaagtggtgccggatgcggaggaccaccacctgctcaacgcggagcaccacttatccgccttcaagacaaagttcggcaagacctacgccacgcaggatgagcacgaccaccggttccgtatcttcaagaacaacttgctccgcgccaagtcacaccagatattggatccctccgacgtgcacggcgtcaccaggttctccgatctcactccggcggagtttcgccgccagttgctcggcctgaagccgctccgacttaactctgacgctcagaaggctccgatcctaccgaccaacgacctccctaccgatttcgatcggcgcgaacatggagccggtactggagtaaaaaatccgggttcgtgcggatcgagttggaccttcaacggcggtggaaccgctgcaggtgctgattggacttatacaggtgagcttctgagccttaacgagcaacaacttgtggattgcgatcatgagt

SEQ ID NO: 207577 - DNA, 399 bp, Glycine max
aaaagcataaacatgtgcttagcagtttcctccttcataacattacatcgggcaaattatttacatacatactatactggggcccctaccacgtttaggcatccatccttatatttaatgggtagaaacatgtttagcagcgacagttgagaccatcgagtccaccccacatacattgggacctttgcagatcttggaatatcccttttttccccagctttccccccatgaattctttatgatccagtaagggttttccttaaaacgaattggagcataagcaccagaaccataccccaccaaaagaaccccgtgatccaaatgcttgccgcagatatatgggcatgagacgccaccaatatatgtctgcataaaaactgcattgataccaactgcaag

SEQ ID NO: 207578 - DNA, 488 bp, Glycine max
gctgagcagacggaggagaactcgactgaagctgcctctgcgacgccgtttcgattcagcctcagacatttccgttgcagtcatggtgcaagaaaatggcaagaggaagaaaccaaacattctggtgactggcacaccggggacaggaaagacaactgcgtgcactgctctagctgaagccacccagctctgccacatcaatgtcggagaattagtcaaagaaaagaacttgcatgatggatgggatgatgagcttgattgttaccttcttaatgaagacttggtttgtgatgaacttgaggatgttatggaagaggggggaaacattgtggactaccatggctgcgatttctttcctgagcgttggtttgattgcgtggttgtacttcaaactgataacaccattttgtatgaccgtttgagtaggacggggtacaaagattcaaagctttcgaacaatattgaatgagaaatcttccaagttctgc

SEQ ID NO: 207579 - DNA, 494 bp, Glycine max
cccttaactatttgaaactcattatcacaacttggtaaaagttacctttcaattgtcaaatttaaaacccatcacataaaatgccacaaatacatgccacaccaaaaatttgcaagagaattcaaccacactgcagatctgcttcaggtagcagttcatcgtgatactttcaccatactcaagcagaaaggtatatacaaagtactcatttttttgttaagaatgtgagggtaaagaccaatttctgacccaatctgtaagagttgccacatttctactaacgtcttctatattatcactcttcattgcaatcactttctcctccgagtaactttctttagcctcctcaagcagaacttggaagatttcacattcaatattgttcgaaagctttgaatctttgtaccccctcctactcaaacggtcatccaaatggtgttatcagtttgaagtacaaccacgcaatcaaaccaacgctcaggaaagaaatcaca

SEQ ID NO: 207580 - DNA, 473 bp, Glycine max
  unsure (1)..(473): unsure at all n locations
caaaaatagtgtgccacaaacaaaaacaaaaacaatatgaagttcactataatcacaatatttttttctttatttctagtcgactttggttttgcacaacaaggggatcttgacatatcaagatttggaggaaaaccgaattcagatataagccaggctttcttaagtgcctggactcaagcatgtgcatcaacatctgctgtcaaaattgtgattccagctggcacatatcaaatgggtgcagttgatgtaaaaggtccttgcaaggctcctattgaggttcaagttgatggaacaattcaagcacctacaaacgtagttaaccttaagggggcagaccaatggttaaaggttcaacatgttaactctttcaccctgtcagggaaaggagtttttgatggtcaaggtccaactgcttggaaacaaaatgattgtacaacaaacaagaactgcaagatgctntgcatgaattt

SEQ ID NO: 207581 - DNA, 456 bp, Glycine max
  unsure (1)..(456): unsure at all n locations
aaataaagaagacgtcctttgttattgaatagttgcgttgaagtatttatttacaagggaatacaattactagctagacatctcctcttttaatggggatggcttgctaactcaagaaaggaaaaaaccataagaacattgttaaaaaaatgggcattattgtagttgctcattctaggctgcacaagtaggagcttttcctgttattacgggcttgacgttagcacatttagctgttgttgcagctccattgaatgtggagatcaacatcagtcatctctacacccttcacatggtgcaacactactacaaataaaaatcactccttctttagttcctgaagtgcccttaatggtttttgaaggaaaccttgcttatcttgatttttgacggattctttttggagcactgngttccatgggacatactcttggtctatgatcacaggttcgaaac

SEQ ID NO: 207582 - DNA, 562 bp, Glycine max
  unsure (1)..(562): unsure at all n locations
ctgcctcatgagtgtctccatcngactacatgatgcagcatanagtaagaccatgtccgaaggtttggtttataataacattgtgtggttttatattatttgttagaatttttttttcaatttgttgtattttttttttttattggggtctcttttttctcggggtaccccttgtctccgtcgtcttcgtcgatcctctacctctccttcaaccaggaccaggcctgcttcgccgacgtcgccgacaacggcttccgcatctacaactgcgaccccttccgcgagctcttccggcgcgagttcgacggcggcggtatcggccacgtggagatgctcttccgctgcaacatcctcgccctcgtcggcggcggtcctaaccctcagtacccgcccaacacggtcatgatctgggacgaccaccagggccgctgcatcggcgagctctcattccgcgccgccgtgcgcggtgttcgcctccgccgcgaccgcatcatcgtcgtcgctgaacagaagatcttggtctacaacttcgcggacctcaagctcgagccgcatactgaga

SEQ ID NO: 207583 - DNA, 595 bp, Glycine max
  unsure (1)..(595): unsure at all n locations
tgatatcgcccaagagcatgcagcatangagactggaggtcgcataaagnanaccaagtnnnnggnttgnggngggaggccggggagggggnnggngngggggggganggtttgggggttggggtgtttttatggattggaggggggacccattcacagggggatacagaaacttcaattcccaaacttcttcctccactggccaatcactggacgccacggggcaggcaaagatccgttgggtgcaaaagaattacatgatttacaattattgcactgatatcagacgtttccctcaaggccttcctccagaatgctccattgcatgagaatatttaattcaatgttgcatatcattataaaatgatcctcatgaacgtgacacacatgtgttgcctattacgttaatttactttcttgtgtaaattaatgcaactaaaactgttattattgttggtttgtgctttgttgagcactactccattgtttgtggcgaaagataattatagcgtgcaaaattatattcatggcagtgtatatgtgctgaaattgtaaagtattttcattaataaaattggtggagttttattattcg

SEQ ID NO: 207584 - DNA, 438 bp, Glycine max
cgaataataaaactccaacaattttattaatgaaaatactttacaatttcagcacatatacactgccatgaatataattttgcacgctataattatctttcgccacaaacaatggagtagtgctcaacaaagcacaaaccaacaataataacagttttagttgcattaatttacacaagaaagtaaattaacgtaataggcaacacatgtgtgtcacgttcatgaggatcattttataatgatatgcaacattgaattaaatattctcatgcaatggagcattctggaggaaggccttgagggaaacgtctgatatcagtgcaataattgtaaatcatgtaattcttttgcacccaacggatctttgcctgccccgtggcgtccagtgattggccagtggaggaagaaagtttgggaattgaagtttctgtatgaggc

SEQ ID NO: 207585 - DNA, 582 bp, Glycine max
caaaatgactcaagcccagattcaaccagttaaacttggaacccaaggctttgaggtttgaaaattgggattcggatgtatgggccttactggagcgtacaatgaccctctccaagaacaggatggcatatctgttatcaagtatgcgttcagtaagggaatcacattttttgatactgcggatgtttatggagccaatgctaatgaacttttggctggaaaggctttgaagcagctgcccagagaaaagattcagatagccacaaaatttggtattgcttcacgaggttttcctgatatgaagatcaagggttcgcctgaatatgtgcgatcatgctgtgaagctagcttgaagcgtcttgatgttgaatacattgatctctattatcagcacagagtggacacatctgtacctatagaggaaacagtgggtgaacttaagaaattggtcgaagagggtaaagtcaaatatattggattatctgaagccagcccagatacaataaggagagcacacgcaattcatcccatcacagctgtgcaaatagagtggtctctgtggactcgtgactttgaagaaga

SEQ ID NO: 207586 - DNA, 382 bp, Glycine max
ttttttttttttttttttttttttttttttttttttttttttttttttttttttttgtttttttttttttttttttttttttttttttttttttttttttttttttttggggcccccccaaaaaaaaaggagggccttaaaaaggggcaaaaaaaaagggggggaaaaaaaaaaaaaaaacgggaaaaaaaaaaaaattaaacccccaaaaatttagggggggccaaaaaaaaaagggggccccattggggatttaaaaaagcccccggaaaaaagccttgggcaccctgggacccccaaaaaaaagaaaaccgggggaaaccccaaaaaaaagggggggggggggccccaagggggaaaatttggaaactggggggggggg

SEQ ID NO: 207587 - DNA, 526 bp, Glycine max
atccctctaatcactctagctgttgcaaatttctactatttttcaatggcttctgcagatgttgagttccgttgctttgctggtgggcttgcttgggtcaccggcaacgatgccctcgagaaagccttttcaatctacggcgacatcgttgaatcgaaggtccgtttgatgcaggcaccgctactgatctcacacgattcggattcagattttttctcgatcctcttctgatctgtgatctctgatctatttgcgttacttgatctatgatatgatacttgcgttactatatgattcttttattactcacgccaataggtacgttcatcttcttcctttcaccaaaggcgaagatcgatcggtttctattcggctctgtcgttagttttcgtgttatgtcttttgctttggatctgatgcatcgcgtttttgtgtgcaggttatcaacgaccgtgagactggaaggtccagaggattcggatttgtgaccttcgtctcagagcagtcaatgaaagatgcgatcgca

SEQ ID NO: 207588 - DNA, 397 bp, Glycine max
tttgttctttttttttttttttttttttttttttttctttttttttttttcttggtatttgtttttttattttctttttttctttttcattttttttaaaggggccccaaaaaaactcccccccccacaccaaccacccccaagaaacccaccaaaaacccaaggaccaaaccaaaacccaaagaaacccaaaaaaaaccccccccccatccccaaaaaaaaacccccccccacacaccccaaaaaaaaggggaaccccccacaaaccccgaaaatacggggacccctccacaatgcccagagatcccaccggccccccccccacaccccccaagaaagaagagaaacccccccaaccccacgccccccccgccgtatccaccgccccactccccac

SEQ ID NO: 207589 - DNA, 574 bp, Glycine max
  unsure (1)..(574): unsure at all n locations
cttccttcctatctctcactaatctaatggaatccgcagcactgtcgcgcataggcctggcgggcctggcggtgatgggccaaaacctagccctaaacatcgcagaaaaggggttcccgatctccgtgtacaaccgcacggcctccaaagtggaccagaccgtagatcgtgcccgcaacgagggctccctccctctcacgggccaatacacccctcgcgacttcgttctctccctccagcgccccagatccgtcatcatcctcgtcaaggccggctccccagtcgaccacaccatcgccgccctctgcgaccacctggaccccggcgactgcatcatcgacggcggcaacgagtggtacgagaacaccgagcgccgcatgaacctcgtcgccgacaaaggcctactctacctcggcatgggcgtctccggcggcgaagacggcgcacgccacggtccctccctcatgcccggtgggtcccaccatgcctactgcaacgtgcaggacatnctccacaaaatcgacgnccaggtcgaggacgggccctgcgttacctacatcggcgagggaggctc

SEQ ID NO: 207590 - DNA, 310 bp, Glycine max
gtaacattacgctagatggaaagggcggatgaccatccttgtatgtaactcgcggatgggatgaaaagtgtcgaagtcaaagctttgcttgagcgccaaaatttgtaatataaggatttatgtattcttgataagctggggttaaagaacatgtcaaaatggagtaactgaagcaacccctaaaagattcacttctcgttttcctttttaaggaacatttgtgggttacagcaaaatatgtagataaacgtgtctgacatcattacatttttcgaatttgattcgtgtattctaatgtttccatcctttg

SEQ ID NO: 207591 - DNA, 310 bp, Glycine max
caaaggatggaaactttagaatacacgaatcaaattcgaaaaatgtaatgatgtcagacacgtttatctacatattttgctgtaacccacaaatgttccttaaaaaggaaaacgagaagtgaatcttttaggggttgcttcagttactccattttgacatgttctttaaccccagcttatcaagaatacataaatccttatattacaaattttggcgctcaagcaaagctttgacttcgacacttttcatcccatccgcgagttacatacaaggatggtcatccgccctttccatctagcgtaatgttac

SEQ ID NO: 207592 - DNA, 545 bp, Glycine max
tgttgaacaagggtttctctgtctgcttcttcactttctctcgtttcaatcgaaaccaaaacaaaaacatgggcagaaaattcttcgtcggtggcaactggaaatgcaatgggaccactgaggaggtaaagaagattgttactactttgaatgaggctaaagtccctggagaagatgtcgcagaagttgttgtgagccctccttttgtgttccttcctgttgcaaaaagtttgctgcgccctgatttccatgtttcggcacaaaactgttgggttcgcaaaggtggcgcttataccggtgaggttagtgctgaaatgcttgttaatttgggaattccttgggttattattggtcactctgaacggaggctgcttttaaatgaatcaaacgagtttgtgggagataaagctgcctatgcactttaacaaggtctaaaagttattgcatgcattggggagactctcgacagcgtgaagctggtacacaacggctggtgtttctgagcaaacataagcaattgcagctaaaatatcaaattgggacaa

SEQ ID NO: 207593 - DNA, 473 bp, Glycine max
aagtacagtcaactaggcgttcaacattatttacccaccaaatgttatggtagttacactatttttgcattcagaaatttaatcaaaatccaattgatcgcctatggatgagatctcaaaggaaagcgtgtttattcagtactaaacagagttcaaaacattggccacaaagcacagatccaaaactcaaaaacagcaatttccgaagcagcttgaaaggcagcattatatcagttcctaactacgaatttcaattcttcttcacagtggcagcatttatgatgttcacgaactccggcttcagggaggcaccaccaaccaaaaatccatcaacatcgggctgtgcggccaattctttgcagtttcctccatttacagaaccttcatagataattcttacagatgcagcaacttcggcactcacattgtcatgaacccatttgctcaaatcagcatggacctcttgagcctga

SEQ ID NO: 207594 - DNA, 559 bp, Glycine max
  unsure (1)..(559): unsure at all n locations
ggaggcgattaggaagagtaggattcttatatttggaggaactggttacatagggaagtatatggtgaaggcaagcgtcacgttaggccatccaacttttgtctacactcgccctcttgatgcacaaactccttcctctaaggcacagctttgcaaggagttcaactctatgggggtcacacttgtccatggagaacttgagcatgaccagattctggcagtgattaaacaagtagacattgcgatatgttctcttccataccctcaagtgatggagcaactcaaaattatagatgctatcaaagttgctggtaatataaagagattccttccatcagattttggggtggaagaagatagagtaaaccctcttcctccgttccaagctttcctcgataagaaaagaaaaattagaagggaaattgaagcagctgggatcccttatacctttgtctctgcaaactgttttggtgcttactntgtcaattatntgcttcgtccttacgaaattactgtctatggcaactgtgatacataagctgtgctaaactatgaagaa

SEQ ID NO: 207595 - DNA, 493 bp, Glycine max
atcccaaacatttatgccttttcatgttattcaacggtaatcgggaggatcacctactttattacaatttataaccaacaagtgcagggtaaaatgtcttcactcaaaaagcagcagaggcaggggctggaggatcaacaagaaatatatcaagaagttcatcaatggatgtgtagttataatcaggatatagctgtgaagcttcaaggtcatcttctcctatctcgaacctcacgaggtcccctctaacaaatacactatgaaggatagaaacgggaatattgtgtgagggggtaagggtctgtgataaggttgacaatctcttcctcagcaacaaaatccttgcgaaaattttgaccacttttttactcccacaatgctatcaactcattttgtgatatgatattcttcgagggtcggtagataacaacacgattgtatgttcttgggatcattcgctactttaatagtgtacatggcgatatcttctcat

SEQ ID NO: 207596 - DNA, 521 bp, Glycine max
gaagataaaaaaagataattgaaaagctaaataatattcaaagatccaatggccagatcatgattgcaccgtcatacgcttagcatcaaacagttgacgcctcttggaaacaagttcaatggatacaagcgcttatcatagacaatatactgataaacaacagttaaattatgttcattctggttggtaattttatgcctgccctcttcagaagttcaactgaagcctgttttgccttcaaaataacttcttcctcgtccacatatataatcttcttgttcttcattatccataatccattgcacatgacggaaaccacattttctgatcgcatacaatacactaagctagaaatgcagtcatgaacaggaaccatagaccaagacgaaggatccactacaacaatgtcagcctttttcccaacctcaagagaacctagttcatcatcccataatactgactttgcaccattgacagtaaccatcctaagaatagtttcagcaggcaatgcaagtggatct

SEQ ID NO: 207597 - DNA, 482 bp, Glycine max
ggttgggacccgaatacgaagtcgacgctgacacagatccctctgctggggacgaaggctggtccacgagacggggcggcatggacgcagaggctgaaggaagagtcaaggctctgatagcgtacactccaatgatcatgtacaacgacatcgattggctccgcatattctgcggcaatccggaaggcactcgctggaccggtaaatgctggcacgtctacaacctgctcaagtactaattggacctacaattcgatgtacccgtcacttaccgcttgactgacccataacttgaactacgtgaatgggatggcataacccaaaagatgtatacgggtagaaagatctgcttgactgtgcacttcaaggctctctgggccaaaaattgccccagatttgggagtgcacatgcactttgcctaggccttgcacacgggcttgcatcagaggttgccatactagtggattctggcatgatcaag

SEQ ID NO: 207598 - DNA, 443 bp, Glycine max
agatcaaaatcgttattagccatgttgcatgtatattaatttgccagaatatgtcaatatctgcggatacacaaggaagatcctgtaaacttgtggtcagacagctcatttatttcctttgaccaatcaggcaacaaaattctacttttacagtttcagtgagacatatgataactaagattcagttgatgtggttgcggtatcatctttgtgcttgatcataccagaatccacgaggatgggaacctctgctgcaagccacggtgcaaggcctaggcaaagtgcatgtgcaattccaaatctggggcaatttttggcccagagaggcttgaagtgcacagtcaagcaagatctttccacccctatacatcttttggggttttgccatccaattgaggggagttcgagttcggggccgtggaaggttaagtgacggggacatc

SEQ ID NO: 207599 - DNA, 474 bp, Glycine max
agcagctattatactctctagagtaattgcggaatctgctagaatcttctaataatggcgaacgacgttgagcaggtcacagagcatggtgaatactccgcgaaggactaccatgaccctcctacggcaccgctgatcgacccagatgagctcacaaagtggcccttgtacagagccgccatagctgagttcatagcaacactcctttttctttacatcaccgcgttgaccattattggctacaagagacagagtgacaccaaaatccccggtgacaccgaatgtgacggcgtaggcattttgggcatcgcttgggccttcggtggcatgatcttcatccttgcttactgcactgccggaatctctgggggacacatcaaccctgcggtgacattcgggttgttccttggacgcatggtgtctttggtgacggcgttggtgtacatgatagctcagtgtgccggtgcaatctgc

SEQ ID NO: 207600 - DNA, 599 bp, Glycine max
  unsure (1)..(599): unsure at all n locations
cgcctctgaagcagattgacatagatgcagcattaggaaaaccattcngagttggggagaagtacggggagggggaagaaaggtgttgttttatttttttgataattacttacaaagatcgatttgaggggtggtgagatggattgcgaacaagatccttcaccttcattgatgagtgtgttgaaggtgtactgagattgactaaatcagacttccgggagccagtgaatattggaagtgatgaaatggtcagtatgaatgagatggcagagattgttcttagctttgaggataagaatataccaatataccatattcctggcccagaaggtgttcggtgccgtaattcagacaatacattaatcaaagagaaacttggctgggctccaactatgaagttgaaggatgggctgagaattacatactttaggatcaaagagcagcttgagaaagagaaggcagaaggtgttgatttatcaggctatggatcatccaaagtggttcagactcaagccccagttcaacttggctcgctacgtgctgcagatggcaaagaatcaagctgctagtgcaagggatgttcggcagttgcagcagat

SEQ ID NO: 207601 - DNA, 610 bp, Glycine max
gtaactttttgattcctagattctctaaaattcgaaattctaatttcgttaggggaaagagattgtttgtgtgtgagtgagtatggctggaaaaggcgagggtcctgctatcggaatcgatttgggaacgacgtactcttgcgtcggcgtgtggcaacacgatcgtgttgaaatcatagccaacgatcagggtaacagaactaccccatcctacgtggctttcaccgacacagaacggttgatcggcgatgcggcgaagaaccaggtcgctatgaacccaaccaacaccgtttttgatgctaagcgtttgattggaaggcgtttttccgatgcatcagtacaaggtgacatgaaattgtggccgttcaaggtgattcctggccctgctgagaaacctatgattgtggtgaactacaagggggaggagaaacagtttttcgcggaagagatatcctccatggttcttatgaagatgaaggagattgcggatgcgtatctaggttccaccataaagaatgcggctgtcactgtgccttgttacttcaacgactcacaacgtctagccacccaaggacgctggtgtcaattctgggctcaacgtgatgcgaat

SEQ ID NO: 207602 - DNA, 455 bp, Glycine max
ggcttgagcggcgcaacgggctgagcctatgcttgagctatagagaggtctgacggtgcggctgatatgtcgagacctcaccatggtatcgtgagctgcaagtgtgccactctcgggatacacaacttgcgatgccgtatgacccgagatgtgcgttacgggtcccaactgctcgctaacctgcacgccactgatggcggggcgcgagtgagaccggagaacggtctgcgcgaggaggatccttgcgtaatgcgtgggctgcagcttacctggcgtcatcaacttaccctgtgaatggatagagctcaagggcgccacctatacccagccgtggtggtccggaccaagccctcatgtgtcagtcggcgcgacagtggctgtaataccctgggcgcgtgccctgacggtgccgtacgctgtgctgatcttggcggcatgtcgtatatattgaaatg

SEQ ID NO: 207603 - DNA, 336 bp, Glycine max
gaatataatttaatttaattttaaatacaatgatatataatattagatattatatgatgatacaatataaatacgtgcggagctcttgaccacggaggacattacggctggctgagcctgactacgcgtgctctgcgtatgcagacagaagcgattactgttcacgagaggccacggcgactgcatatgaactgctaactgaaccgaaagtcgcatacacattggtcgtgaagtggagcccagaggacattgcggtgtacacacgcatggcgcttgcagacgggacacctcacttcctctagaccgactaacccaagtgcaagtgccagctacatg

SEQ ID NO: 207604 - DNA, 486 bp, Glycine max
  unsure (1)..(486): unsure at all n locations
gttactgacccatgagccacaccaatgaattggcaaacatattgacaatcacgccgacatagcaacaacatcacccacgagcacaacaacacgcagcacatgtacctgaatcatcatcgagaacaactcctcgatggccatttcggtgcattactgcattcgccttttcaacaattcccctttctgggtaaaagacgacacaccccaaagggcaaaacatagcatagaagcaagcaaataactaaaatatttcagtcctgaaacaagaattaacaaaaacaactacaaaggaacgacaattggcatgggagtcttggttgtgcttcaagcgagtgtaggattctctgcaggagaagtcctccacacgatatctttaagagctggacgaagcttcttgctacaaaactggttatacctcaaggtgtcaccgctggccttcttaacctncaccgccaaaaacgacgggcgtacggcggacaagttcgc

SEQ ID NO: 207605 - DNA, 522 bp, Glycine max
ggtgtgacatcctctcctgagctgaaagaagaactaatctcacttgcaatttaggccaggatcacatcatgcaggaagcttgttatgcttagtgttgcacagtagtttattttaggtccttaacaggtcttcatcatccagcgacttggttcctttttaccggagtgtgcagtcatttaactctcatttttgcaggttccttcaacaggaaatctgttctttttggcatccattgccaccttttaaatggctgcatatctgagaacatagctaccgggttctggagttaggaatctttgttactggtgttggcacctgatgtttttagctcggctttgcatcggttttgccaccatgtgtgtcttagttttctaagtttttacagctacctgtaccactgtatcagtctttgtttaccaaatgtgtcatgtggttgaactatgttcttcacatgatgtctgggtatcagctttactcgaagggcaggttagaagtttcagtgtcatgtgcttgtattagggt

SEQ ID NO: 207606 - DNA, 535 bp, Glycine max
ggaatgagactgaaaattttatttatttcattacatttcataacatacagaacaaagggcaggtatgaacatcattagacaatataggaggagcagttgccaagttcaaaaaaatgaagccttaaaaaactaggacttggtaaaaataacaacccttcccaaagggacaaaaaggttgtggttatggcagacctatatagcttgctgccacagccaagcccctaaaaacaagacttcataaacaccgaccttgacaactgcaaccaccctaataacagcacatgacactgaaacttctaacctgcccttcgagtaaaactgatacccaaacatcatgtgaagaacatagttcaaccacatgacacatttggtaaacaaagactgatacagtggtacaggtagctgtaaaaacttagaaaactaagacacacatggtggcaaaaccgatgcaaagccgagctaaaaacatcaggtgccaacaccagtaacaaagattcctaacttcagaacccggtagctatgttctcagatatgc

SEQ ID NO: 207607 - DNA, 576 bp, Glycine max
gcagtttgaggacaagccagattattcgtatttaaagagacttttccgagacctatttattcgagaagggtaccagtttgattacatttttgactggactatgttaaagtatccacagatcagtggcagctccagagggaggcatgtcactggcaaggcagctatgcatgcaggtccacatgtacaaaaagcagaaaagatctcagttgggaaagaaattcgagagaaattttctggtgcagttgaagtgttctcctggaggaaccctgcaaatgctagtcctcgtggtgatcacaccaaacatagaagttttgaggatgcaccagtgcaaaaggatttgcactatgcgcaacacaattccactcgatatggcagcagttcaagaagagccatgatctcatcgaacaggccaatatcctcaggtgaccatactggcaggcaaaccataactgggagccgtccatctggtgctcacagagttcaaccagtgtatgacacccaacaagcaacttatacgcatggtggctctataagaggccgtgatgatcctctgcggaactttgagctcctcatatc

SEQ ID NO: 207608 - DNA, 558 bp, Glycine max
ggactaaaaataatccttgtcttattggagaacctggtgttgggaagacagcaattgctgaaggtctcgctcagcggattgcaaatggtgatgtacctgaaaccatagagggaaaaaaggtcataaccctcgacatgggtctgctcgttgctggaactaaataccgtggtgagtttgaggagaggttgaagaaactgatggaagagatcaaacacagtgacgagataatacttttcatcgatgaagtgcacactttgattggagcaggagcagcagaaggggcaattgatgctgctaacatactaaagccagctcttgcaagaggtgaactacagtgtattggagccacaacattagacgagtacaggaagcacattgaaaaagatcctgctttggagagacgattccagccagttaaagtgccagagccaactgtagatgaaaccatacaaatactgaaaggacttatagagcggtatgaaattcaccacaagctccgctatactgatgatgctctcgtagctgctgcacagctggtctaccagtatatcagtgatc

SEQ ID NO: 207609 - DNA, 400 bp, Glycine max
ccattaaaaactttaggtccattgacaagtaaaacatactatgactatggtttaaacaaattaagtccatagtattagcaaattaaccgcattatccaggaagcgtttttggcaaggattcgggggctccgctggtaccattgagcacaatcacattaccatcagaatcaacatccactataacaaagtcgccctccttgatctttttggcaagcattttctaagccatgctgtcctccaaaagtcgcattatggcttttcttaaaggtctagctccataactagggttataaccttcctccaccactttggccctgaatctttctggcacttgaagttcaatatctttcaccttcagtctatcaaacacctttttgagcattatgtaagcaatttcctt

SEQ ID NO: 207610 - DNA, 527 bp, Glycine max
cgccgaacaaggcattgtcgtcgatgatgaaaatgaaattggcgaaaacattactgcttctcctttgtgtgaaactcttctgttatgcagcgattggtgctcctcaaacttgtcctgctaacaatgaggataaatgcggcgattcagatgaatggaaaggggagtttttccctgacattcccaaaattaaatatgagggtccgtcaagtaagaatgcgctttcatttaaatggtataatgcagaggaggaaattcttgggaagaagatgaaggattggttaagacttagtgttgcattttggcatacattccgtggaacaggcgctgacccatttggtgcacctaccaaatactggctatgggaagatggtaccaattcattaaacatggctaaaagacgaatgagagctaactctgagttcataagcaaactcggtgctgacttttggtgtttccacgacagggatatagcccctggtggaaaaactcttgaggaatctaatgccaacttggatgaagtggttgcc

SEQ ID NO: 207611 - DNA, 446 bp, Glycine max
aattaactcaagcatgctcaaagccagggaagctatgcatcacgtagttttatacataagctaacatgcacttcaccaggcttcgtatccacctagcagataacagcttcacacttatattttcccaaggaaaacgaagcaggcataagtcaatcttaatttccttttattagtaaacctaattataccgaattgttcctaatataatagacgaaaaatagccaccacacacggctagattctactttctacagaacagattggaggatcatctcggctagctcctgtttcgcagaagcaacctttggttctccccattccttgaccttcttctaagcagttcaaagtcagccttaccagcctatatttgagccccaatttcagtgtcaaaactctgataacgcttacgaacaagctcagcaagagaaccatgctcaatcaacttg

SEQ ID NO: 207612 - DNA, 304 bp, Glycine max
ggggaaaaaaaaaaattgggaatttaaaggaccacaccggacaaaaaaaaaaaaaaaagggggaaaaaaaaaaaaaaaaaaaccaatgcaaaaaaaaaaaaaacaaaaaaaacccccccataaaggataaaaaccctaaggcccaaaaaaacccttaaaaaggccccaaaaaacaaaaacccccaggggggaaaaaaaaaaggggccaaaaaggaaagcggggcaccctaaaaaaaatgcaacaaccccgccggggacggccacaaaagaatagaaaaatatgcccaacccggtattggaaatg

SEQ ID NO: 207613 - DNA, 561 bp, Glycine max
gacaagaaaagaaaaaaagggagagaagcagaaagagagagagagagaactgaaaaaagaaaagaaaagataagactaattaacgtttttttggtttggttttcttcaacacgcaggagacacgaagtaaagagacaagttacatcagatggttaaaacttgttaaaagagttcgtgtatgtgtgtgaaagtagtttaaggttgtgggggtggtcgaagaagttttttagctttgtagatagagatgtcaggtggtggaggcagcatagcgtggttcaaaagagatctgaggatagaagacaattcagcactgacagcatgagtgagagctggtgctgcggttgcagttttcgtatgggcacctgaagaagaaggtcaatactaccctggcaaggtctctagatggtggctcatgaacagtttggctgatcttcattcctatctgaggaatcttggcactcctgtcatcactgagcgatccactgacactctctgttctcttcttgaggctgttaagtccactggagccactcaactttttttaatcatttgcatgatccc

SEQ ID NO: 207614 - DNA, 486 bp, Glycine max
ttcttccaaataaaaaaaaaaaaaagaaaaaggaaggagataggaaagggttaattgaatccaaaaaaaagaagagaaaaacaaaatgggcagggtttggacttcgatgatagcattgttgctttgcctgatgacatcatcggttcggggcgaggacccttacatttactacacatggaacgtgacctacggcaccattgccccattgggtgtcccccaacagggtatcctcatcaatggtcagtttgccggccccgaaatcaactccaccagcaacaacaacgtggtcatcaatgtcttcaacaacctggatgagcctctcttgttcacatggcatggtgtccaacagaggaagaactcttggcaagatggcacattgggtgcccagtgccctatcgacccagctccaactacacctaccgttttcagggtaaggatcacattggaacttacttctactacccgaccaccggcttgcaactcgca

SEQ ID NO: 207615 - DNA, 525 bp, Glycine max
  unsure (1)..(525): unsure at all n locations
aggaaaaggaaggagactttcatatatatatttatgtgatattgatatagaaaatgaataggaaagggttgtacatcagtgaccacgcaagaaacatgagaaatgaactagagctaattaattaacccctcgtctcaatctcatgatggaacaattttggagctacgacgtggtggcactgatgatgatcgcagaagaaaaatctcttaactggagtaaggtggtggcttaggcatatccttgacgattccgcagacaagctgggtctctgggaggttgtactcatccctaagggacctgttgggagacaagacactcacgtacaattgctgtcccaggtaacgattctctgccatctncgacctcaagttccacatttcagcgttgtcaaaagtcaacatgattgcggcccaagactttgggaacacctggatggtgtgcctgctgacagcatcaagaatgttgtagcacttcctcttctctgggctccactgccccggctcaaccgcgacggcaaagaaagag

SEQ ID NO: 207616 - DNA, 558 bp, Glycine max
tggcaatggcatctccgtccgtaacctctgtaactgtggagaacgtgacattccctgccaccgtgaagcctccctgctcccccaacaccttcttcctcgtcggcgccggcgtcaggggcctacaaactcatcacgctttcggcaaattcactgccatctgcatttacctccaatacgacgccctttacttgctctccgttaagtggaaaaccaagtctgctcaccagataacggaatccgaccaattcttctcagatatcgttaccggtgcattcgagaaatttatgcaggtgacaatgatcaaacccttgacggggcagcaatactcagagaaagtggcagaaaattgcgtggccatctggaggtctctcgggatttatacagattcagaagccgaagctatagacaagcttctttctgatttcaaagacctaacattcccaccaggctcctctatcctttacactgtctcacccaatggatcattaacgataagtctctctagtgatgaaaccattccagaagctacgagtgctgctctagaagataaactactct

SEQ ID NO: 207617 - DNA, 440 bp, Glycine max
aagttatgtaattagttgcttcaattcccaacgaaggatcaaatacaacagttcagtacttagacatggacagtgagaacaacacaataatgatactagaagtttagcacttagaaaaactgtaatttgccctttattgattagtagcacagtgctgaaagtcacagcagagtggttagggattttgatcttgggttgatgatataatgagttcacttatgagattgagggtcacaaaccccaggctatatgaataagtgagataatctggaggccaaactctgttgtgctgcaggggaaacgccattctgacctatcattgactgcgacacagactctgagaggaggttatgctctataacagctctggtcacttctggaatggcatcatgactagagaaacttatcgttaatgatccattgggtgagacagtgaaaag

SEQ ID NO: 207618 - DNA, 496 bp, Glycine max
atttttcttcctcagtagtgtcatttacgcttctcttctctgcagcaactatgcctaaccctaaggtcttcttcgacatgaccatcggcggtcaatctgctggccgcatcgtgatggagctctacgccgacgtcactccccgcaccgacgagaactttcgcgcgctttgcaccggcgagaagggcgtatggcggagcggcaagcccctccactacaagggctcgtccttccaccgcgtgatcccgagtttcatgtgtcagggtggcgacttcaccgccggaaacggatccggcggcgagtcgatatatggcgccaagttcaccgacgagaacttcgtgaagaagcacaccggtcccggcatcctctccatggcgaacgccggtcccggaaccaacggatctcagttcttcatttgcacggagaagacagagtggctcgacggaaagcatgtcgtgttcggacaggtcatcgaaggattgaacgttgacaatgacat

SEQ ID NO: 207619 - DNA, 345 bp, Glycine max
attaggcgaattatagatgtcctaattttattgaaggtagctcatcatgttttttttatgcttctcataacagactccattcactcactctatgaaccccaaccaaccaaccacatgatactgatattgaaaaggaaaggggaagggtttcgaaatgatatccttaacaccacaatcccctaaacgacgacacgagaaagaaaagaagagaaaaaaaaggcaaaaacgacaccgaaagaaataacacagattcagagattaaagccgcgggtcaacgtcgtctaagagagttgaccgcagttggcgatgacaacgggcttggaggtcctgcccgagctggatccg

SEQ ID NO: 207620 - DNA, 510 bp, Glycine max
tggaaaacttctcctcatgcttggcaaaatccagttcaaactccacaaactcattgatcattatcgttctcatatattccagacaattaccattccctcagagtctctcttgaatgaacttcgaattgtcgaggagatgaagcggcaatgcgacgagaaaagagacttgtatgactatatggtaacaagatatagagaaggaggcaggtctaaaggcggcaaaggggagactttttcattgcagcagctgcaaactgctcatgatgaatatgacgaagaggctacattgtttgccttccgattgaaatctctgaagcaaggacaatcgcgtagtcttctaacacaggcagcacgccaccatgctgctcagttatgtttcttcaagaaagcagtcaagtcccttgagacagtagaaccacatgttaaatcagtaactgaacagcaacacattgattaccacttcagtggtcctgaagaggatgatggcgatgaaggtgattatggagatga

SEQ ID NO: 207621 - DNA, 520 bp, Glycine max
gaaagacagagacattactttttggtagtagcaacatgcaacgggaggaaagaaggaaagaaagagagagaatcttcattcatttttttctgctcattttctgtgtacacctttatcgtttctctcactaactttggagtctgctttactccacactccacatcaaagatcgtctgcattccctttcccttctcttttcacccccctttcttttttctctcttcttcttttttctttttctgctgggggcacctcatttgtttttgacttcataatactactacttcttcactcacatacgagatagaaagagaaggaaaaaacaggctattatggcaggaggaggagctccagctaaagcagatgagccacagccacatgcaccacaggatcagctaccaaatatttcttactgtattactagtcctcctccatggcctgaggccatacttcttgggtttcaacattatcttgtgatgcttggcacaactgtgttgatttccactgctcttgttcccca

SEQ ID NO: 207622 - DNA, 382 bp, Glycine max
aaatataataggatggactattcatagagctatggcgtgtaacaagatttaaattaaatattagaactagaccgtggtgaagatgatgagaccacctttatatatttgattgagcttttggacacaattaaacagaggggaagtacttgtttagattgaaaggaagggaatagaactcctcacttcttgggtcacccttgaaggacttgtacttggcccaccaatgtttacctttggccttcctaatagcagcttctctcttaaacaaagggttgtctagaaaatatgccacaacaccagcaacaaatggctttgattggaatgggacgttgattatatcattgaaccattttgcgcctgtgtggactggaccataaccatt

SEQ ID NO: 207623 - DNA, 524 bp, Glycine max
  unsure (1)..(524): unsure at all n locations
ccaaaatataatttttatttctcatatgcattggtaaaaaagacacaatgttcacatgtgaatggcatttataaatataattactaatttttcagtaaatgaaagcatctttttactagtagatctcataccttccattttcaacatttctagtaaaaaatcactccatatgtctattgcccctggtaagcaccaatgaacacaatcattatatagtgtcatgttctcatttggccaatacccatatctattggggtgaccatctggtctcaataacatagcttgcgtcgtgtctagtaacatgaacttcaatcctttctttatgccttctttctttgcaattttgaactcctccaattgaagtcatgtgtaattctaaattatggccttctaactttgnttcgttattcctaaatggcttagttctcacgcaatttccacctttattccataacccatttncaagtgagatggtgaaaatgttctaagaaatgttatacccttaaaattctctaactgatgat

SEQ ID NO: 207624 - DNA, 563 bp, Glycine max
gcttcttctacatcacatccatccttttggtccctcctgaacctgtctgcatccattcccatttcttcttccgtatgcatgttcccaccgtctaaaaaacctagcaaagcaacaaaacggcgtcatgcttgggaagtagcatgcaatggtaaccctagaaataggagggacattctgatcggccttggaggactctatggtgctacaacaagtctcacaagtcacaacactggttctgcatttggtgcttcattgtcgccttcagatccaactaactgcgttcaaccggacccagaaaaagaccctttttgcccaccaccccccttcaaagactacgagctccctccacacgatgacaagacattaccccttcgaattagaccagctgctcatttggtcactgatgattacatagccaagtacgaggaagccgtgaggcgcatgcaagaccttccacctgatgatcctcgcagtttcatgcaacaggccaatgtccaccgtgcctactgcgatggtcgcggctatactcataagggcttcgctgactacaagcttgacgttca

SEQ ID NO: 207625 - DNA, 540 bp, Glycine max
aacaataaaacaaacatttattataacaataacatagtatccctcacagatgaaagggatctattaagttccaaggaaaataactacaacacactaattaagaaacaacaaatgacagatagagtatcccttggaggaacaaaccctagcagtagcacacacataatttagatttattcatcgtccacctcaggataaacacgctttatccttacgtccttaattgtaacaggcttgtccccatatatgggagccagtgtgacagaaatactatcatcgtcttttgttactcccaagtctttcaacttatacgttaatggcaatttgaaagaagctttggtgatgttgttatggttgacatgcggcgagtgaggcaaagtcacaaagcttcccgcaaactctgaatcctggggtccaatctcattgtcgcctgggtcgttgatgaacacatcaaacctcacaccatcagtgctatcgtactcaacatctatcactaacacctcttctacgccttcttcttcttcttattctcgttctgga

SEQ ID NO: 207626 - DNA, 655 bp, Glycine max
  unsure (1)..(655): unsure at all n locations
cgtcagccgagtactcatcgagatagaacacattgcagncatacgagttgggaaaaaaagaggagagaaaaaaaaagaggaagatattttatagtaataatagttctactagtaaacagggtagtactctataaatagcatttgcatgcaccttagtcttcaccaaaatactcctcttggcatcttgtgttgcgtccctcttttaagctatttccttctcttaacacaattggttgtgccaattgccatagtcaccaaccaattaacaaaggtatatatatcatcatatcatcaccaaatgaaaaatattgggttgctttttcttgtggtggtggctacttttgtggtggcagccacagctggtagcttttaccaagactttgaaataacgtggggtggtgagcgtgccaaaatctatgagaatggaaaccttctcacactctcccttgacagagcctctggctctggctttcgttccaaaaaagagtacttgctcggaaaaattgacatgcagctcaagcttgtgcctggtaactctgctggaacagtaactgcctattatttatcttctctggngcctactcatgacgaaatagactatgagtttttgggtaactcgagtggtgatccttacactcttcacacgaacgtattc

SEQ ID NO: 207627 - DNA, 417 bp, Glycine max
gaataataaaactccaacaattttattaatgaaaatactttacaatttcagcacatatacactgccatgaatataattttgcacgctataattatctttcgccacaaacaatggagtagtgctcaacaaagcacaaaccaacaataataacagttttagttgcattaatttacaccagaaagtaaattaacgtaataggcaacacatgtgtgtcacgttcatgaggatcattttataatgatatgcaacattgaattaaatattctcatgcaatggagcattctggaggaaggccttgagggaaacgtttgatatcagtgcaataattgtaaatcatgtaattcttttgcacccacggatctttgcctgccccgtggcgtccaatgattggccagtggaggaaaaagtttggggatt

SEQ ID NO: 207628 - DNA, 625 bp, Glycine max
gaacatccaatctgcagtcgacatagagcacatagaaaccattctagttgatgcaccgttctgaattttggatcagcctatgctaattgtttcaacacaatacccgattaccttcttctatagagaagatcttcatccaggcaaaacaatgaaagtacaattcagcaagcctccctttcaacaaccatggggtgtcggtacatggctaaatggaaattaaagacactactcaagaaggatatagtgtcgaagagctatgcatcaagaaagaagccattgagggagaagagaagttttgtgcaaaatccttgggaacagtaattggttttgccatttcaaagctgggaaagaacattcaagtactttcaagttcctttgtcaataagcaagaccaatacactgtggaaggagtgcagaatcttggagacaaagcagtgatgtgtcataggctaaatttcagaactgcagtattttactgccatgaagtccgtgaaacaacagctttcatggctccattggtggctggtgatggaaccaaaactcatgcacttgctatttgccactcaaatacttctggaatgaatcatcaaatgcttcatcaacttatgggagttgatccctgaac

SEQ ID NO: 207629 - DNA, 378 bp, Glycine max
  unsure (1)..(378): unsure at all n locations
accatatatatatagagagagagaatacgaagcacactgatcacaggatgatgctctctttaagtagggaagcagatcttatcagtacacataggtaggttgaaattctagctctagcaatctagctagagaaggtagtacttgcacaacacacagcacatgataatttattttatacacaatctcattctcatggtgctcaagatgcatggactaattaagcaacaatgttggtctgatagggcagtgtccacagantaaattgggtacccataaaatggccttgcttccaaggaaatggcaacagggttagttccaggatcaactccataagttgatgaagcatttgatgattcattccagaagtatttgagtggc

SEQ ID NO: 207630 - DNA, 522 bp, Glycine max
atggcagggttcaagggcgatgacgagtacgattacctattcaagctggttctgatgggccattctggagaggagaagtccaacctgctctcgcgcttgaccaggaacgagtccaatttggtgtccaagtacaccatatgggttgagttcgacaccaatagcttgaacatcgatgctaaggtcatcaaggctcacattggggacaccggtggccaggaaaggtaccgtgccattactagtgcttactaccgaggagctgtcggcgccttacttgtctatgacgtcacactccgtgctacattcgagaatgctgcacgattgttgaaagaattgagagatcacacagaccccaacatcgcggtcatgcttattggaaataaggccgatcttcgtcaccttgttgctgtcccatccgacgacggataatcttttgccgagcaagaatctctctacttcatggaaacttctgcattataagcaaccaatgttggaaatgcatttactgaagtgctttctcagata

SEQ ID NO: 207631 - DNA, 504 bp, Glycine max
gaagattgtgaacattgctcaaatcaatatgcaagactagccttattctacatggtgtcacgattccagtgtaggcatttacaagatgaaacaggctataaaaaccaactgccatagatgaagcatctagtttgagcagcacccaaatgtcttcaaaacggaggaatcgcctttcacatttattgactgacctttagatgggacagcataagaactggcattcttgccggtctcaacagttctcttgctcactattcacgatatctgagaaagaacctctgtaaatgcattttcaacatcggttgcttgtaatgccgaagtttccatgaagctgagagattccttgtccgtataagattttccatcttctgttgggacagcaacaaggtgtcgaagatccgacttatttccaataagcatgaccacacagctggggtctgtgtgagctgtcaactctttcaaccatgttgcagtattctcaaatgtagcacggcgtgtgacatt

SEQ ID NO: 207632 - DNA, 224 bp, Glycine max
ggggaaaaagccttcgtttttatttaattttaaatggggttcacaaccccttggaaacctagccggttccaacccaaaaggccttcatgggaaatagggccctacaacgggttaaaacccccataataaaaattcataacccatccaacccaaaaaaaaagggggggccccttttttttttttatgggacaaaaggcccggaaactttgcttccgggggttccc

SEQ ID NO: 207633 - DNA, 526 bp, Glycine max
ctacaagtgaagagttggaaacaaaagatggcaggtttgggaatatggatgggtttcgttagcctgtgtcttctgtctgtatcagtatcaggtctgctccaacgcctagagcaccctgtcaaagctgatggctcacttagccttatggtcattggagactggggaaggaaaggaacatacaaccaatctcaagttgccactcagatgggaagggttgctgcaaagttaaatatcgactttgtgatatccactggagacaatttctacgatgatggattgactggcatagatgaccctgcatttgaaatttccttctcaaaaatctacactgccaagagcctccaaaagcaatggtatagtgtgttgggcaaccatgactacaggggtgatgtcgaagctcaatcgaatccaatccttcagaaaatcgatcctagatggatctgccaaagatcattcattgctgatactgaaattgctgagttcttcttcattgattcaacaccttttgtggacaagtattttctta

SEQ ID NO: 207634 - DNA, 414 bp, Glycine max
ttttttttttttttttttttttttttttttttttttttttttttttttttttttttttttttttttttttttttttttttttttttttttttggggcgtaaaaaaggggttcaccccccacattaaaaaataatgggggacctttttaaacccaaaggccccctttcccccccttattaaaaggggaaaaaaccaaggggttaaaaaccaaacggggggtttggtttgggggaaaaataaggggggccaaaacctaaccttggggtccttttgcaacccccggaaccccaaaaccttttttatatggcgaaaaccgaaatccccaaccccctggggcaattccccacagggaaaaatttccccaaaatatgggaaaaaaccaccttggcattgggttcttcccgctccccgggc

SEQ ID NO: 207635 - DNA, 468 bp, Glycine max
gttcaaaagcatataagagatggggttagaagggaaggaaacgccgtcgtttatgagggattctctcgataagtgtggtggctgcgccgttattgacggtggttttgccactgaacttgaaaggcatggggcggacctcaatgacgaactctggagtgccaaatcccttattagctccccacatctctgtcgaagggttcacctagattacctcgatgcatgagcaaacataatattaacagcatcttatcaggccactattgacggcttcgaggccaaagggttctttagagaagtatgtgaaactatgcttacaagaagcggggtgattgcacgtgaggcacgtgaaacttattctgataggtgcaccagagattcttctgactctatgagagatgatagatataggtaaccttccattgtaattgcaacttctgtcgcaagctatggagcgtattgggctgatgg

SEQ ID NO: 207636 - DNA, 464 bp, Glycine max
  unsure (1)..(464): unsure at all n locations
cctccggcaaaaagttagccatttcattcagattattatagtttcttccattacagataaaaacacacttcaacagttatatacatttgtctttaagtttcccatatgttgcctctgctatgcctcttatagtattaggagtagtcctgcagcagccaccaaaaagggaagccccagcatcacgccacttgcctatgtaggagacaaaatcatgctctgctgccccacttgatttcacccattggttgctctcagcgatataagtctccccactgttgggatatacaagtactggtttacttgttgccttcttgataaatgaaatcaatccatgaataaatctaggagcagtacaattaactccaaccgcaacaacttgtctgcatgaatcagctattgaagcgcattcaaagatagagtcaccactaaccacattgctttcatccttacaactaanagaaaac

SEQ ID NO: 207637 - DNA, 523 bp, Glycine max
ctccgtcacttgtgaatctattgaatcaacaatcatgtcggacgaagagcaccatgtcgagtccaaggccgacgccggagcctgcaaaacctaccctgagcaagccggtaccatgcgcaagaacggctacagtagtcatcaaaggccgcccctgcaaggttgcggaagcttcgacttccaaaactggaaagcacggtcacgctaagtgtcactttgtgggaatcgacattatcactgccaagacacttgaggatattgtgccctcttctcacaactgtgatgtttctcatgggaatcgtactgagtaccagctcattgatattgctgacgatggatttttgagtctgcttactgaaaatggatacactaacgatgaccgtaagcgtcccactgatgagagtctgctcactcagataaaggatggatttgctgagggcaaagatcttgttggggctgtcatgtccgctatgggtgaggaacagatatgtgccctcaaggatattgggccaaaagactagctcct

SEQ ID NO: 207638 - DNA, 450 bp, Glycine max
cccacaatagactcctcctttataataaaatcacaggacaacaaagaaaaccagaaaaatgtgataatagtttctgtcaccacatccataaaaaccattgttaagactagtctgactagaatctatacgccaggtcttgaacaaaccaatataaaaggcttacaaaaatatctttgcttaaatagaaaatagaaataacaagcaacaagcaccaaaagctagttctttggcccaatatccttgagggcacaaatctgttcctcacccatagcagacatgacagacacaacaagatccttgccctcagcaaatccatcctttatctgagtgagcagactctcatcagtgggaagcttgaggtcatccttagtgttaccattttcagtaagcagactcaaaaatccatcctcagcaatatcaatgagctggtaatcagtacgattcacatga

SEQ ID NO: 207639 - DNA, 351 bp, Glycine max
gtggtgccttatcgctgcggttatcatcttcttcttgctctttcttagatctcttctttctctacgccgcacgccgaaaccatggccggaaaaggagagggtcctgctatcggaatcgatctccgaaccacctactcttgcgtcggtgtgtggcaacatgaccgcactgaaatcatcgccaactgaccaagggaacagaaccacgccgtcttacgtcggattcactgacaccgatcgtctcatcggtgatgctgccaagaatcaagtcgccatgaaccccagtaacaccgtgttcgatgccaacaggctgattggtcgtagattcagtgattcctctgctcagagtgatat

SEQ ID NO: 207640 - DNA, 413 bp, Glycine max
gatgactaaagacaagatatgtcatttaacaagacagaataattcctacaggtaaagtgcataacaattgagtataccatttaatacatgaaaataacgcaaataacataatgcttaaagcaacgttcatatcacaagggaaaaatagttggaatcccatccaacaaaaatcatgcgattaaaatccaattaaaaaagcataaagtaaaataagtttttaaaacaggtttttggaggaaagccactacatttagtccactttctcaatcttggggccagcaccactttcaccagaaggaggagcagcatactcattctctgctgcaccagtaccacccacgtctggaccagcgccatcttgggacatattggcaatgattggattgcagatgctttccaattccttcattttg

SEQ ID NO: 207641 - DNA, 507 bp, Glycine max
ccaacaattaatcactatttaatttcccccacattattgttttcccttttctatttccactgttacattatgtcatgacaacaacaatagtaataatgaaagcctagaaccaattaagattcctttgtccctaactagcccaaagcatgtttaatcattaatcacttgcacccaccagcaccaaacccaattctcccaccttcaacatcatacacaacctctattgttctctgttgtacgttcccatatatagtaacatcactatcgtcaccatttgcggcaaaagccaaacaaacctgcttggtactcgccacgaagagtataccctgtggaggcagcttcaccgtgacgccgccggcgaacgaaaattctatcgtgggaatggaaaacaccttgtaaccgctgagatcatacacgtgtcgaggatggagagttccccggcggagggtattttgacatgccttgacgaaggcggatcggaggcgccgtagccgttggggggaggcg

SEQ ID NO: 207642 - DNA, 592 bp, Glycine max
  unsure (1)..(592): unsure at all n locations
cgctcatgattcggatcgacatagatgcacatgagaaaaccgancaaaantattaaaaaaaatcaagggaacagagaacanagggaagaaaangttgaaggcaagcgtnacgttaggccatccaacggttgtctacactcgccctcttgatgcacaaactccttcctctaaggcacagctttgcaaggagttcaactctatgggggtcacacttgtccatggagaacttgagcatgaccagattctggcagtgattaaacaagtagacattgtgatatgttctcttccataccctcaagtgatggagcaactcaaaattatagatgctatcaaagttgctggtaatataaagagattccttccatcagattttggggtggaagaagatagagtaaaccctcttcctccgttccaagctttcctcgataagaaaagaaaaattagaagggaaattgaagcagctgggatcccttatacctttgtctctgcaaactgttttggtgcttactttgtcaattatttgcttcgtccttacgaaattactgtctatggcaacggtgatacaaaagctgtgctaaactatgaagaagat

SEQ ID NO: 207643 - DNA, 452 bp, Glycine max
aatataaaatcaaatatttattaagaataaaatcatatttaagtctattaatcatgtatcccaaacatttatgccttttcatggtattcaacggtaatcgggaggatcacctactttattacaatttataaccaacaagtgcagggtaaaatgtcttcactcaaaagcagcagaggcaggggctggaggatcaacaagaaatatatcaagaagttcatcaatggatgtgtagttataatcaggatatagctgggaagcttcaagggcatcttctcctatctcgaacctcacgagggcccctctaacaaatacactatgaaggatagaaacgggaatattgtgtgagggggtaaaggtctgtgaatagggtgacaatctttttctcagcaacaaaatccttgcgaaaattttgccacttttttgctcccacaatgctatcaactcattttggg

SEQ ID NO: 207644 - DNA, 628 bp, Glycine max
  unsure (1)..(628): unsure at all n locations
tgctccgcgcatgcaacgctangacatagatgcanatangaaaacagnncgaagtttggagagagagaccggggagagggagatgagaggggaangaatttggaaaaaaggagaattaatgagaaagtatgggtgtattgaaagcgcgcttntgtgcttttgggatcccttgctgctgcttgctagcttcagctatgctccttctgtttcggccacaactgaaatttcagggaatgaagtgaacacagatgggaaggtgataaatgaagagttagcaaaaccaagtctaaaaggacatgatgaagaagcaaagttcaaaggattttttccaaaaccaattcctatagttaaaccaattccaaagccaattcctattattaaacctattccaattccagtttataagcctattccaaaaccaattcctattgttaagcctattccaaagtcaattccagttgctaagccaattcctaatgaagaagaaaaattcaaaggatttattccaaagccaattcctataattaagcctattccaaagataattcctattgctaaacctattccaaagataattcctatcgttaaacctattcctattccagtttataagcctaaaccaaaacta

SEQ ID NO: 207645 - DNA, 390 bp, Glycine max
tttttttttttttttttttttttttttttttttttttttttttttttttttttttttttttttttttttttttttttttttaggaaaaaccgggcccctttattacaaaaaaaaaaacgatctaaaaacgatccccccggaaactttattgaacaaagagcatgaaccacttattttccattacaggaccccaaagggggcccaaatttattttgaaaaaccaaggagcctggcctaaaaagggctttaaaaaggggacccataaccttataggtgggaaaaaaggtttaaacccttaggggggtggaaatggcttgggaaatgcaaagggggaaaaaagagggttcttgaaatggggagaaaagggaccttaagaaaaaaaggcctttt

SEQ ID NO: 207646 - DNA, 588 bp, Glycine max
tagaagcaataagatgaaaatgaaagtgcttgttttgtttgttgctacagttttggtagcatatgaatgccatggctcagactaccagaagttccctctccaaatgaaaactgggtttggtgggcaatacagcaatgaggtggcatgtgccagttggaggcttggcgtggaagcaaacaacgtagtcaagtggcaaactgttcctgcagcttgcggagagtacatagctgactacgttctaggagaccaatatagatcagattccaaaacagttaaccaacaagcttatttctatgctaaatccctcaaactcaccaacaaagatgtctttgtcttggacgttgacgacactactctctctaatctccagtattttgctaaccatggatttggtgtggaaccacacaatacgacggcgtttaagaactgggttcttgatggcgaagcattcgcactgccagagactcttaaaatgcacaacaaactgttggctctcggcatcaagattgtattcttatcagaaagaccactgagtctaggggatgtaacagccatgaacttaaggagggtgggattcacacatgggag

SEQ ID NO: 207647 - DNA, 428 bp, Glycine max
cttaatggaacaagagctcataattcatgaaagcctcgaaaagggaaaacacctttgttcagggcccctacatgactaagtaataatactcaggatcttatttcatagaaattaaggagcaacttaaaggcttgatttgagagcttaatcatagtccaagggattaggcagcttaaaagtcctagtccctttgttgcttcccaggaggtcactccattggtctccaacgtttccaatgattctgtatccctccttttccagcttttctttctcagctgatttggattcaaatgataacttaccagagtactcagatggatccctgagaattaacttctcccatgtgttgaatccaacctcctttaagttcttggctgttacatcccctaaactcaggggtctttctgataagaatacaatcttgatgc

SEQ ID NO: 207648 - DNA, 599 bp, Glycine max
tcgttttcatactttattcctttaaaaaatgtttaaaaggagcaaacatgagtgaaaatccttttcgactagactgttattaacgtgtaagccaccggcagattttaaaattctctttaataaaattaaagtatctctatttatatgaaaacgattataaaaaaattaacataatggacaaaatagtttaagcagaaattaattcatatctactcacaatgatcctatcaaatttaagaaggattaattttagtgaaagatacttatatataccaaaaacaaaagttcgttcataaaatagaagtaaaatattttaaaattaagtgatgataagtactatcacattataaagaataggttctaccaaaaaaatgaagtataggtccgttcttgcgtcaagtcaactatcctcaatttcatgaaaaaaatatatactaattgagtgtctctaaaatagatatgtgagttatacttattttttaatgtaatttaatgtacatcttgattacagatttttattttctggtatctacaaaattcttttgtcatcataacaatgtataataatcactggtttcgttaataattaacttttatta

SEQ ID NO: 207649 - DNA, 468 bp, Glycine max
ctcctttcttagttgctacttctgcatctccccttcccttctttcattctttgtcacaaaactacaaagtcactgagtttagtgtttcgccaaaaccaatggatgatgatattgtaggactcggttttcgtccaacagaagaagaacttgtggacttttacctcaaacacatgttgctcggcaatgatccccgtgcccacgtcatccctgtcattgatctttgcgatgtggaaccttgggatgtaccagccctgttgatttcaagtattcaagaagtaaaaggtttaacaggacaaccaagtgtggcttctggaaagccactgggaaagaccgtgacattaggacaggggacactaacaccgtcattgggactaagaagactcttgtttactatcaaagccgtgtttcctgtggtgtcaagtccaactgggttattcacgaatatcatgctgttacctttcatgaaag

SEQ ID NO: 207650 - DNA, 483 bp, Glycine max
gaaaggtaggatatcgattgaaggggaaagagtggctctcttgggctatggatcagctgttcagaactgttcggctgcagcttccttagtggaatgtcatggcttgcgcttaacagctgctgatgcacgtttctgcaaaccactggatcggtccctgattcgcagcctggcaaaatcacatgaggctttaatcacagtcgaagaaggatcaattggaggatttggttctcatgttgctcagttcatggcccttgatggccttctagatggcaaattgaagtggcagccaatagttcttccggatcgtcatatcgatcatggatcacctgctgaccaattgtctctagccgggcttacaccatctcacatagcatgcacatgcgctcaatgtactatgacaaacaagagaggcactataggtcatgtcataacaatattcatgggatcaagttttcacttcacacgatgtacaaaggctaacat

SEQ ID NO: 207651 - DNA, 478 bp, Glycine max
  unsure (1)..(478): unsure at all n locations
ataactagtcgttttactatatgacaatctacatcatacacttcaaaatttcacaatattacattactttttcatattacacatggtgaatcatgttatactttgtacatcgtgtgaagtgaaaaattgaaccccttaatatttctatgacatgacctctagtgcctctcttgtttgtcctagtacattgaacactgttgctgctatgtgagatggtgtaagaccggctaaagacaattggtcagcaggtgatccatgatcgatataacgatccggaagaactattggccgccacttcaatttgccatctagaaggccatcaagggccatgaactgagcaacatgagaaccaaatcctccaattgatccttcttcaactgtgattaaaacctcatgtgattttgccaggctgcgaatcagggaccgatccaatggtttgcagaaacgtgcatcagcaactgttaagcgcangccatga

SEQ ID NO: 207652 - DNA, 499 bp, Glycine max
  unsure (1)..(499): unsure at all n locations
tgcacacacaaacacaacaacatatggaggtgctaagggtgcaaaccatagcttccaaatccaaagatgctgccatcccagccatgtttgttagggcagagacagagcaaccaggcatcacaaccgttcaaggggtgaaccttgaggtgccaattattgattttagtgacccagatgaagggaaagtggcgcatgagattttggaggcaagtagggactggggcatgttccaaattgtgaaccatgacatacctagtgatgttataagaaagttgcaaagtgttgggaaaatgttctttgagttgccacaagaggaaaaagagttgattgctaagcctgctgggtctgattctattgaagggtatggcacaaagcttcagaaagaggtgaatggcaagaaagggtgggtggatcatttgttccacattgtgtggcctccttccttcatcaactacagtttctggccccaaaaccccncttcttacaggggaagtaatga

SEQ ID NO: 207653 - DNA, 466 bp, Glycine max
  unsure (1)..(466): unsure at all n locations
aatctacttcccacaagtcacactttcattccataaattaaataacaaaacagagaaaccaacattagtcacagatcttatttaatctacttcccacaagtcacactttcattccataaattaaataacaaaacagagaaaccatgagctataattatctcgtagtgcccacttcattcattgagggatcttattgagcttacaataagcataatccttgtatttcttggttttgtattttggtggattgtcttggttaaccaactttgggtgaggaccaacttcttgttcctttttgggttctatgaacacgggccacgacattcttgtctcatctttgttcactgttgttctgtgaaaaactgccttatattttccattgctcagtatctccatttggtcgccaatgtgaataacgagggcattggggacatacttaacatcgacccatggccatncctacatg

SEQ ID NO: 207654 - DNA, 627 bp, Glycine max
  unsure (1)..(627): unsure at all n locations
cgcctaagagtgcgattangacatcngaagcatattngaaanaccagtatcananatgangnaaaagacccaggagggggaatagagaatatggnaaaagtttttttggactcaggattcaagacgctgatgtggttttttcttttcaagagaaataaaattattgttgatatttgtgttgtggtgatttatttagtctttagaaactgaggttttcactttttcacatgaagtagtgttgtcatttttcaggttggtgtcgatatcaaggcatgagagatggttagagaaaatgctgtaatgggtggtgccagtgaagagcgtggtgttcgggtcactcgagcaatggctagagctgttttgggtggggtctctgcctcttctagaccgtccttcaagaagcaacacaagaacaacaagggtttcggtagggtagcactagcagatgtcactaacataagcaagaaagggtgtgctacatcaaaatctcaggcaagaggaagttacaagaagactaacacaaagggagcttccaatgtctccattcaagttttgtcaactcaagaagatgttagagcaaaattagcaaaagatttaccctcaatatcaatggtacagtcacatgac

SEQ ID NO: 207655 - DNA, 607 bp, Glycine max
  unsure (1)..(607): unsure at all n locations
tgcccaggtgctcatcgcgctagatccagatangcataccatgtcnangttggagcagaagacgagagagggaagggagagaggaaatgcattttgcacatctaggaaatattgctgataatccgagtcgtgtaacgatgagggcatggtttgcctttggccacttgataccatttttcaaactttccatagccttagccaaagctggtgctcatgtctccttcatatccactcccaaaaacattcaaaggcttcccaaaattccttcgactttatctcatttggttcattttgtggaacttcctttaccatcattggacaatgatatcttgccagaaggtgctgaggccaccgtggacattccatttgaaaaacatgagtacttaaaggcagcattagataagctccaagatgctgtgaagcaatttgtggccaatcagttaccagattggataatctgtgatttcaatcctcactgggttgtagacattgcccaagagtttcaggtaaagttaatcttattttctattttatctgctactggaacaacattcatagtaccaccaggtacaaaggcatgtcacttatctccagaaagtctaacagc

SEQ ID NO: 207656 - DNA, 646 bp, Glycine max
  unsure (1)..(646): unsure at all n locations
gccccgcccatggtgcgatagacatagatccgatgggaaaacagttcaaagttgggaganaagatcgagganggtaaagagactgttgttaaagattttacccatgacactccttctgctccttattctggtctttcacgcggcgggggccaatggacagtggcagctcctccacaaaaacatcggcattgtcgccatgcacatgcagcttctgcacaacgaccgcgtcatcatcttcgaccgcaccgacttcggactctccaacctaaccctccccgacggaagatgccgcaacaacccaaacgagttggtcgtcaaacgcgactgcaccgcgcactccatcgaatacgacgtcgcagccaacacattccgcgctctctttgtccaaaccaatgtctggtgctcctccggttcggtctctcccgacggaacattagtccaaaccggtggcttcaacgacggctaccgtgcggtcagaaccttcaccccgtgccgctcgtgcgactgggcagaagttcagcatggactcgcggcgcagagatggtacgccaccaatcacatcttgccagatggacgtcaaataattatcggaggaagaagacaattcaactacgagttttaccccaagacacaagccaagaatact

SEQ ID NO: 207657 - DNA, 496 bp, Glycine max
  unsure (1)..(496): unsure at all n locations
gcaaagaaatatccatgaactataattacaaacttcctagggtattatttacacgccccataggccataaatggctttatttgaattttatcttcccatatcttacagtttaaatactcactcaagaatctgttcactcccagacattcacaacaataaataacttgaataaaaagaacatatacgaacgaagttgtcgagcaggcagagacgagaattcacaatttcacaccatctggacccaaataccgtggcttggaacttcttgatggaccacaaacagcagatagaaacccggtggcgcaagaacagcggaagccggcgcggtaacttaacctcgtgcgttgattctccaaccccactaaatggtgcggcttcagcaccaacagcctctgattcatggagaacgagtgcgtgttaaatggcggncccagcatggtaacagacaccgaatccccaaccaaagtcgcgctcaccttaaaccgaagccttaacg

SEQ ID NO: 207658 - DNA, 678 bp, Glycine max
  unsure (1)..(678): unsure at all n locations
gtacttactgcccaatggtagcctgnctcnngacaaatagcatgtcagcatcaagnagatctaggtcngangttggangcnnanngccctgaggtggaagtaggattggagatgtattttgatatattattgatttttatgtgctgagagacccaatactcttacggggggccatagagggagagagaagggatggttgtagtggtcaatatgatcaaatttgcaatgcacgattacctcgagcacttgatccccactctgctccatcagaagagctttccacttctttgggatacatggtgcaacttctaaatcttgttattcacaacttggctgccccagcacttcataactcaggttttgcgggttcttgctctcggatatggcaacgagattcttattgggatgcacgtccttcctcaaggagcaatgaatatcccctttttatacctggccaaacttattgctctactgacggagaaaactcatggtctgagagaagctcaagcaattttggagttgcttcggtggaatctgagaggaggcatcgcctagattcatctgggagtactagctctaattattctttggcttcttcgcattctgttcaaacacacaaagatttgcagaacggaatttcacttctaaaagacagcgtagtctgcatcacagcttact

SEQ ID NO: 207659 - DNA, 404 bp, Glycine max
aaaagaaataaaatgaatgattatttctcaaaaagtatttagcgaacatacacttatgtgtaaaggtgatattacttactgagcccatatcaatgggtgaattcttgttaactattctgagaagaaaattttgttgaaaggttgcaaattaagatcacttccctttagcatctatgaacatggctcgagtccagtgctcaacatcctcactttgcgatggtgggggaggaaaagtgggatgctcaacaatatcccacccttcaattaggcactcatttttgccgtcagataaatcagcggcataaagaaaactaccagtagaacttggcagataattttcaatcttcggtgtgggcacagaatgtgcactttcagcaaagtagttgatgaaatagccgaattca

SEQ ID NO: 207660 - DNA, 524 bp, Glycine max
aaaattcaaataatatgttataacttaataaattatcgtgcctcaagaatggcatattgtagccaggtacctagcaaaccaatggcgtatgcttcaggtatcggtacaagactgcttacaatgatacaagtcagtgatcgagagcacttcgaattgaaagtgccgggtctagcactgtgcctctggaaataaggtcgtgatttaagaataaaacaataacggatatatcatcatgaaaatggcgtcgaaccttcttgtcaatcttacggaggtctgaatatcgcatttctcgttttcttgctgcttcgtgtagagcagccttgataagtctcttggcactacccgcatgtggattgctgtttacaatatccacggctttctcattactcaagtgctcccataaaccatcagatgcgaatataaggaaggaatcatttggttggagaggatgagaaagaatagtgggattagcactcaagatgggcatgttcattggttcacgaagtctgaattttgcattaagt

SEQ ID NO: 207661 - DNA, 561 bp, Glycine max
  unsure (1)..(561): unsure at all n locations
caaattaaagccaacattaaggtttcatcaactgaaacaggagttatatttggtaacatagtctatgagacatcttctaatgttcttgagagaacagttattgttctaaatgatatccatattgacatcatggactacatttctcctgcatcttgtgctgatgtggcattcagaactatgtgggctgagtttgagtgggaaaacaaggttgctgtaaatacagtattacaagatgagagggacttcctgaaccacattgtcaagtctacaaatatgaagtgcctgactccaccatcggcattggaaggggattgtggattccttgctgcaaacctttatgctaagagtgtttttggggaagatgctttggtgaatgtgagcattgaaaagcaagcagatggtaagttgagtggatacatcagaataagaagtaaaactcagggaattgccctcagtcttggggataagataactttgaaacagaagggagccgcttaataagagcaaatgcccctgtttctcttatgcntccttcgtttgtatgtcttatcaacttcgtgt

SEQ ID NO: 207662 - DNA, 522 bp, Glycine max
acttataaacgaaactggaggtatcatttatcattaatgattattatccgaacatatgtatgcaaggccaaccagaacaattgtcactagattgattctcatatcaatatacggggtccggccccatgtgtagaaaaataaaagatgggtaataaggatttttcttaagcaatatccaaggaaagaatcccgaccaaattgaaaattcaaaaggaaaaaaaaaataatactaacaagcgggctgccaccaaaagccttaaaatttgaagcaataaccaaccttgaagttagcccccaccggaagctaccccaagttgataagacattccaacgaaggaaaccttagagaaaacagggcatttgctcctattaagcggctcccttttgtttcaaagttatcttatccccaagactgagggcaattccctgagttttacttcttattctgatgtatccactcaacttaccatctgcttgcttttcaatgctcacattcaccaaagcatttttcccaaaaacact

SEQ ID NO: 207663 - DNA, 515 bp, Glycine max
gaagaaaactcccaagtatcattgtctgattgacaaattgtatctggaactgtttttatcaaacatttacatgctctgagtagaatgaacatcctatattttctcttttcacacctacggctctcatttatgctaatccagctattatggatggattaggttcgccatcccagtggctgagggagctgagatgggactcccagggcttaaatccaataagccttcttattgactgtgccaaatgtgttgcatctggaagcatcaagaatgcagatattggccttgagtacatatctcagatttcatctcctgatggtaatgcagtgcaaaggatggtcacttatttcagtgaagcacttggttacaggataataaaaaatttgcctggtgtatataaagtctctcaatccatcaaaaacatcattatcttctgaagatatccttgttcagaaatacttctatgaactgtgtccatttttgaagttctcatacctgatcacaaaccatgccattgc

SEQ ID NO: 207664 - DNA, 544 bp, Glycine max
cttaatccctcacaagctgagaaagaagaaggaattattcctcttacggattcattgcccattatttctcagtcctacattacgcattcccttaaagtggaaggtcttcgaggcattgtaactgtgcctgccaagctggagtctacatctctcgtctttgcctatggagttgatctattttttactcagattgctccttctaggacttacgattcactaactgaagatttcagctatgctttgcttcttctaacaattgttgcacttgtagctgcaatatttgtcacttgggtattatcccagaggaaagatctacaagagaaatggagatgatctgtcctccatttttgccttataatttctaattctgaagttctaagtagttatatctctgttttctttgttagttattagttcggattttgaaatcttttgtagcttgaattgcaaaagtaatgcagaattccattaggttgaatggaggatgttttcattttaatgatgtaaattgaggagtacgaaagataatcatgaaattccgatg

SEQ ID NO: 207665 - DNA, 492 bp, Glycine max
  unsure (1)..(492): unsure at all n locations
gtcaaacatcggaatttcatgattatctttcgtactcctcaatttacatcattaaaatgaaaacatcctccattcaacctaatggaattctgcattacttttgcaattcaagctacaaaagatttcaaaatccgaactaataactaacaaagaaaacagagataaaactacttaaaacttcaaaattagaaattataaggcaaaaatggaggacagatcatctccatttctcttgtagatctttcctctgggataatacccaagtgacaaatattgcagctacaagtgcaacaattgttagaagaagcaaagcatagctgaaatcttcagttagtgaatcgtaagtcctagaaggagcaatctgagtaaaaaatagatcaactccataggcaaagacgagagatgtagactccagcttggcaggcacagttacaatgcctcgaagaccttncactttagggaatgcgtaatgtangactgagaaataatggg

SEQ ID NO: 207666 - DNA, 529 bp, Glycine max
ccactttcttcacccaaacctccttcccctcccactctctctccaaaaccttcgatagcccatttcgccccatccccgaaagtcaacgtatttgcgaacttcccggcgaggaggcacgtgggggttcgagtttcgaacgcgctgatcgaaccagacggagggaagctggtggagcttgtggtgagggataattcagaaagagacttgaagaagggtgaggctctttcgttgccgaggatcaagctttcaaggattgacctggagtgggtccatgtcctcagcgaaggatgggccacacccctcagaggcttcatgagagaagccgagttcctccaaacgcttcatttcaactctctccgactcgatgatgggtcggtcgtgaacatgtcagtgcccatcgtgctggctattgatgatgcccagaagcataagatcggggataacaaaagggttgctcttttcgattccaaggagaccctgttgcaattctcaatgatgttgagatttataagcattcctaagaagaaag

SEQ ID NO: 207667 - DNA, 473 bp, Glycine max
gatcaaaccaaatcctccttagcacaaccacattcattatattacagagagttggcatgcacaattgcaccataagtgcaagaggctgtctaatgccatacatacagagagaggcaatgtatctgtgcctgtgcctccccagagttttaattattattattattattaaattgggccaggagtatgtatcttagcaggagaatacataaagcttaaggtttctcccaatcatgagatatacattataatacaagattaagctggaacagcttccggcactttgccattgcttgagagtactaagctatcatagtattcaaccagtaccttccaaccaccagggcacataaatccatcaggagggctttctttggtccttgccagtgtgcgcatctttgtgcctgatatgaacgggaagtcctgaggccttgaagggtcaaagaatgccattttaccctgagtcttgtcatatg

SEQ ID NO: 207668 - DNA, 538 bp, Glycine max
  unsure (1)..(538): unsure at all n locations
agagcagagatctagcgtattctctcgctctttctttcactgtcacagagccacatccatgggcttcccagccaacggcgcctctgcggcccagcccctaaacttcctcatctacggccgcacgggctggattggcggcctcctcggctccctctgccgggcccagggcatctccttccattacggctcgggccgcctcgagaaccgggcctccctcgaaaccgacatagccctcctcaagccctcccacgtcttcaacgccgccggcgtcacgggccgccccaacgtcgactggtgcgagtcccacaaagtcgagaccatccgaaccaacgtcgtcggaaccctcactctcgccgacgtctgccgcgaccacggcctcattctcatcaactacgccaccggttgcattttcgagtacgactccgatcacccnctcggatccggtatcggcttcaaagaaaccgactctcccaatttcaccggttctttttactccaagaccaaggcaatggtagaggatccgctgaagaactatgat

SEQ ID NO: 207669 - DNA, 456 bp, Glycine max
aaaaacgacaagaaatttattcaatcacgagcggtaaaaatacaacatacaaataaaaataagggagagtgacatctacacaaaatccacacaaacttaaatcaaacgaggacaataataataataataataatgatgatgataaaaatgagaaaagcttgaacctttagacttgagctttaaccttctggtttggctcgaagacatacttaataagagaatccttaatagacaacagttctggaaattccttcttcaatttggcagcgtcaagctcattgttgctcctcggagcaacaatcaccttggcctgttcctgagagtgaaggttgttccaggtgaagttcgggtcaacataatctctgtacatctccaagatttcattgtgactaaccactctgggttagtaaagttccagatcccagtcagattcctcttccccatctcaattgaaat

SEQ ID NO: 207670 - DNA, 652 bp, Glycine max
  unsure (1)..(652): unsure at all n locations
tgcccaagatgcgcattgtcattgaagtcacatangnanaccaggtncnngttggnngnnnngnccgnggggggggnttgggtttggacttngttgtttgaggttctggattctcagtgtttgcgaagcgctgcatcatcctttggggaagaatggatcatcaagggcatagccagaacccatctatgggggtggttggtagtggagctcaattagcatatggttctaacccatatcagccaggccaaataactgggccaccggggtctgttgtgacatcagttggtaccattcaatccacacctgctggagctcagctaggacagcatcaacttgcttatcagcatattcatcagcaacaacaacaccagcttcagcaacagctccaacaattttggtcaaaccagtaccaagaaattgagaaggttactgatttcaagaaccacagtcttcccctggcaaggatcaagaagattatgaaggctgacgaggatgttaggatgatatcagccgaagcaccagtcatctttgcaagggcatgtgaaatgttcatattagagttaaccctgcgttcttggaatcacactgaagagaacaaaaggcgaacacttcaaaaaatgatattgctgctgcaatcaccaggactgacatc

SEQ ID NO: 207671 - DNA, 609 bp, Glycine max
  unsure (1)..(609): unsure at all n locations
gctcctgcccctggtgcagtttgacatagaagcacgtangaacancagtacctaagcttggagataggntcgaggacacataagtaacataaccaatggcatcgcgtgcaggagccaattatcgtattgcacgggtctctgctcatcttcggcctccaaatttccaggaagggagtgatgttcttcttaagagtgctgagtgcagagcaaagggtggcgcacctggattcaaagttgcaattccgggggctgctgggggaattggtcaacccctttctttgctgatgaagatgaacccattggcttcagctcttcatctttatgatgttgtcaacacccctggtgtcactgctgatgttagccacatggacactggtgctgcggttcgtggctttctggggcagcaacaacttgagagtgcactcactggcatggacttggtaatcatacctgctggggtaccaaggaaacctgcgatgacaagagatgatgtatttaaaataaatgctggaattgagaggaccctatgtgaaggaattgccaagagctgccccaatgcaattgtcaacttgactagtaatccagtgaattccacagttgctattgctg

SEQ ID NO: 207672 - DNA, 427 bp, Glycine max
agctaaattgttcgtttcttactaagcaatttgctttgtgttcaagataacaaagaaacagttacccatctttagatgatgggaatggggaaaggcataattactacccatgttcaaagtgacatactagtaatattagaactacagaatggtagattccaacccatgcagttaagaaaacatttgggtgtggatctcatcaataagcctaaattacacaaacaattacataaactgcaatgtaagttaccatgcacctttaaaaatataaggtaattagcttctgctgctgctcctcagtcctcagcatctccaagtagaaactgagatgagttctttcttctgccagcatagaacaagtgatgaaggctttctcttcacatgaaatcccctacaggtgccctctgaactagacacttagcttgag

SEQ ID NO: 207673 - DNA, 514 bp, Glycine max
gtaaacatcacatgtaagtatccaatcaccattacatatccttactctgtggctcaatgcgcaaacaaatcccgatttagttacaggatttacaattaattatacatcaataaggtatagcgtgcttgtaaactcttgagaagtaagaaaatacaattcagacataaaaatcatatataactattaatttcttaaaattacatccaaacatgttgtataaatgtgaaaccaatcacgataatagtgacttactatttgatggacataaaatgtaagcaataaaagcctatgagagaatggatcatctgggagactttaaagattcaatttgagatttgcctcgaggtcctctcattctaatgaagagtctgtattcatcgcaggtcattgctgggtagagtgagggccttttcggtgttacaagctcttttattggttctatgggtatgtcactcttggggttgcagaaaaacgcaagagagactctctctttatctgaaattactatcactct

SEQ ID NO: 207674 - DNA, 358 bp, Glycine max
gtagagatgcttacaatatcaagctgacaagtccgttattcaaaccaccaaactgcgtaaatggaaacaccgacgggccatgcgataaaattcatggcgcggacgccgatatgctatttgcaggcctatatcttcgtgctgtgagcgtacgaggcataaaaggttcacttcctcctcatggagctgttcagtgtgatgagaatacaccagatggaaggaagcttacatctgcattttacaactactttgttgtcagactgttatgtggagcatcaattgcagaaactcaagtggaatggattgaatacaacaagggattgaagtggtgtgataaagaatcaagtgcatcaatcacctc

SEQ ID NO: 207675 - DNA, 463 bp, Glycine max
atgctcacaatacaagctcacaagccgacactcaaaccaccaaactgcgtaattggaaacaccgacagtccatgctataaaattcatggtgcggacgccgatatgctatttgcacgcctctatcttgtggctctgggcgtaggaggtataaaaggctcacttcctcctcatggagctgagcagtttgatgagaatacaccggagggaaggaagcagagatctgcatttttcaactactttgttttgagcctgtcatgtggagcattaattgcagtaacttttgtggtattgattgaagacaacaagggatggaagtggggtgtagtagtcttaactgcatcaatacttctctccattccagttttctattcttggctcacacaagggcaggaccatgattccagcaggaagccccatcacatccatgttcaaggatcttgttgtagcaatttgcaacaactgc

SEQ ID NO: 207676 - DNA, 568 bp, Glycine max
ctgaactaggttgcgttgcgggccccagttaagtgaactgattccaggggctcactgctcactggccggccttcgtcctttttttttttaaactgttcagattatattaactttacataaccctgacaagtaaaattactggacaaacattgagttctattttacagacccatagtaacctctaaacagctgctgataccagcaaataaacgaacttggctgatcactgtgaatgggcgaagaaaaaaattatgataggtttccccccaaacagatgtatgatgaacactttacctcattcatgccggccccacgctggcccataatgctgacataacactgccttcctccgaacacgaggcacacgctaaaactgcatggatggaactgccattcatattagcacatggaggggttgcatgaaaagctgattgcctacagggctcttatgtaataagctttcgagacagggaggagggacccgagtcaccaatagacttccctaagctcagttgagatatgccaaccagtgcatccacattgatagggcttttagaatgtactggag

SEQ ID NO: 207677 - DNA, 334 bp, Glycine max
atttccatctattaatcaatgccgttgattactgcctcatcagaggcgtgtaccacagagatctgtagcccgagaatcttcttctggactcaaatgctattctagacgggacagattttggatagggcacgtatgcacgtcaggaggatgaacttttcctcactgctggaggaactccaaactttgttggttcggaggcgcgttaggagagaagtaatgttgggtctacatctgatatgtggtcctgtggagagattttcttggagctgatggctgggagcttgcccttcgatgagccatgatatgtgacactcaaccgaaacaatggcagggg

SEQ ID NO: 207678 - DNA, 501 bp, Glycine max
aattaaggtcatgaaatattatgaataaaagttcaaggaaatatacactctaagttttgtacgatctaggttttgtttttaccctatcaaacattagagcagactctcccaactcaacatgctccagttttagctaagcacgatatcttccatgaacaaaaaaagttcctgatatcttccaacaaaaatacgtgcatgatatcttccatgcatgcacatcttgattcttcattggtttgcttcagaatgccacactatgtcttgcaaccctgatgatgatgaaaagcttttgtagaacttgtgaaactctagtgtgtcacccccggtctttcgcagttccaccatgtgcaaggagggagccacttcaaaaacctctgtagcaactgaaaggtgacccttccttccgctcttatcaccttgcagcttcatcttataatttcgcttgtgaacattaaatcccagaggcttcgcagcttcctcaatttttgacatgatttcatt

SEQ ID NO: 207679 - DNA, 567 bp, Glycine max
agataaaggtccgccttaactggattatgttacaggaggcttctacagccagaaccgaatcgcgaagaacaaaaactggctataccaagtgttgaaacgccagaacatagtggtggcagatggcacagggcagaagaacatgcccacaggaatagtcctccataactgcgagatcatgccggaccctaccctcttggcagaccgcttgagcgtgaagacttacttggccaggccatggaaggcattctcaagggcagtgttcatcgagaatgttatcggggacttgattcagccagatggttatattccatggaacccaattgaaccaaacacacaggattgctacttcgctgagtttggcaacactggacccaggttcgttgctcaagcaagagccaagtttggcaaaggtcttattagcaagcaggaggctgcacaattcactgctgagccttggctccaagctagcacttggttgcctgctgctggcgttccttttgatgctagcttcaccaaagcttaaggatccgagacaaaccagcatcttgagagttataatcttttttt

SEQ ID NO: 207680 - DNA, 457 bp, Glycine max
gcgaggccttgggaggcaatcactctctagaaagcttagttattggaggagtggatgttgagtgtcttcctgacgaaggtgtactgccacactctcttgtttatctagagatcaggaagtgtggacatctaaaaagactggactacaaaggtctctgccacctctcctctctcaaggaattgcttcttgttggctgccccacgctcgaatgcttaccagaggagggtctgcccaaatccatttcaactttgtggattatcaattgtccgttgctcaaacaacgttgccgggaacccgaaggcgaatactgtccaaagattgctcacattaaacgcgtgtcggtattagattgaaagagctgtcaaccacgagctatgttagtacatgatttccaaattggtttgtactttgaagattaatcaatatcgggggaagaatagtttggacgtaaaaagta

SEQ ID NO: 207681 - DNA, 410 bp, Glycine max
gggccaaaaagctgacacaaattttccatatagaaactaaataccctactaatccaggaaacgggacctaactagccaacattccaaaattttggaaaattcaaaacataaacatagtaaaagactgttccccaatcattgtttttaaaaacacaaaggcaaatcaataattaagttagatttaatcaactttttccattttgctaccctcagcatcggcatcagcatcggcgtcctcgagagggggcatgtcagcatttgcttcaccagcattttcataaatgctcagtccaagcttcagcatcctgtgaatcctgttccgaaagtgttgggatcatcaagggtgaacccagaagttagaagagcagtctcaaagagtaggagaacgagatccttcacagatttgtcat

SEQ ID NO: 207682 - DNA, 488 bp, Glycine max
gcgaacaattctaattcaggtacatccatttgttttggttttctttgcccatgttccgatgattttcaggaacaaaaatctctagtctttggttttcatataccatccaaatatttgtggcaacaatgttcccttgctcaatcagtaagcccccaaaacaaagaaaacattatgttctgttaatgaatagtaatattttacaaagaattaatgtacaacaacccccaaaaaatcatgattttgaaaaaagctggatcctattgacgtagcaagaagacgcaggatcctggaggcaattgcaaaatgcatcctcatccttgggaaatgatattggtagaggatggtcaggaatgacaccaaccttggcaatatctgtatgtgccggtgtctcgtagcgagcaacagtaacaaccaatccagagccgtcagagagctcaaaaactgattggatcttcccttttccaaatgttggctcttcaaacaatacg

SEQ ID NO: 207683 - DNA, 476 bp, Glycine max
tttcttttttttttttaagattaataaagaagacttcttttggtattgaagcaacattacatatatgatcattattttaccatagccacgttggagtatttattcacaagagaatacagttactagacacctcctcttttaatggggacggcttgtttttctacataggaaaaatagtaaaagaaaaggggtaaaaaaaggggcattattgtagttgatcattctaggctgtacaagtaggagcttttcctgttattgcgggcttgacattagcacatttagctgttgctgcagctccggtgaatgggagatcaatattagccatctctacaccctcacatggtgcaccactactacaaacaagaaccaccccatcttgacgttctgaagtgcccttaatgttcttgaaggaaaccttgcttatcttgatttttgatggagtctggtgggagcattggttccaaggacaatgctct

SEQ ID NO: 207684 - DNA, 498 bp, Glycine max
ttcaacccaatccaatcctcgcacacatgcatgctgtctctgccaaagttggggccaagtcataactacatttccattgttacgattctttctttccatcccaaccacttattaagcgtctgatccaatttctttctctcaccatggatcatcgcaaaccattgttacccacttcctctgacgatgctccaaatccacgcactcggaaggaccttgttctaatgatttgcggcttgtttttgctctcttcccttgttgcctttggagggtacagggcctccaacgcgccacatgctgacgtgtcatcgccagcatcgaacgatgaacaacctagtcccacatcggtgccttttacgaaatggtacccggtttcacggggtgtttcttctggggtgtcggagaagtcatcaagcatgttgattgcggctaaagatggagcttcggaagcattttcttgggacaatagcatgctgtcgtggcagagaactgcttttcatt

SEQ ID NO: 207685 - DNA, 446 bp, Glycine max
gaatcggataacatttgcatcatatttctttgaaaaacagattctcttgtaagaatcattaaacatgatatgataaaattataataaacattctcataaacataaatgagcaaaaaatgaaggaatgggctttgagcaagaacccataactttatgtgtgtttatgggaaggtaaacaattgatgagtacaaattgccaccccaagatgttttccgatcctttgtgactacaagtcttttatatccaatttaattatttattttaattcttctgatcagggtggaatgggcgtataaatgcagaattcatttgccaaacattgagtgaggctgtcacagtggcctcagtagcattgttgaacaagaacaacctagcagctccatagattgcctttgttggataaacccgagatgtcacaaccgtgcttccaccttgagcaaagctt

SEQ ID NO: 207686 - DNA, 552 bp, Glycine max
gttacggcactgactcttcttaagaaacacctgttcaattatcaagggcatgtctcagctgctttagttcttggtggggttgatatcactggacctcatttgcatactatttatcctcatgggtcaactgacaccctcccatttgctacaatgggatcaggttcacttgctgcaatgtctgtatttgagtctaagtacaaggaaagtttgagtagggatgaaggcattaagctagttgttgaggcgatatgtgctggtatatttaatgacctaggaagtggaagtaatgttgatgtttgtgtgataaccaagggacataaggaatatctcaggaaccaccttctaccaaatcctcgtacctatgtcaatccaaaaggctttgatttccccaaaaagacagaggtcctcttaacaaagattacaccgttgaaggagaaggtggaagtgattgaaagagatgctatggaagagttacaatcattccaaaaaaaattggtgtatgagtatgaaacttgattagtgcagtggctgtgatatttgattttgactttc

SEQ ID NO: 207687 - DNA, 394 bp, Glycine max
gaaagcacaaaatcaaatatcacagccattgcactaatcaagtttcatactcatacaccaattttttttggaatgattgttactcttccatagcatctccttcaatcacttccaccttctccttcaacggtgtaatctttgttaagaggacctctgtctttttggggaaatcaaagccttttggattgacataggtaccaggatttggtagaaggtggttcctgagatattccttatgtcccttgggtatcacacaaacatcaacattacttccacttcctaggtcattaaatataccagcacatatggcctcaacaactagcttaatgccttcatccctactcaaactttccttgtacttagactcaaatacagacattgcggcacgggaacc

SEQ ID NO: 207688 - DNA, 292 bp, Glycine max
gatcgagaaatgtatgatttaacataagcctgttccatgaggaccacaatggacccctttagagacttgcttctctagctaaaatttcacaattccaacagccatggctatccttatgaccaaaaagcagaggtacacactcaataggcctgcccccaaggatttatcaagcctcatattcttcttaggcaaaatcacaagtgcccaaagcacccctcccatcaagaacaaaagggtctcatagagtgaagcgttcttaggagtgacatacgggtctggatgctcagaccta

SEQ ID NO: 207689 - DNA, 486 bp, Glycine max
aattaaggtcatgaaatattatgaataaaagttcaaggaaatatacactctaagttttgtacgatctatgttttggtaataccctatcaaacattagagcagactctcccaactgaacatgctccagattagctaagcacgatatcttgcatgaacaaaaaaagttcctgatatcttccaacaaaaatacgtgcatgataacttccatgcatgcacatcttgattcttcattagatatgcttcagaatgccacactatgtctagcaaccctgatgatgatgaaaagcttttgtagaactcgcgaaactctagtgtgtcacccccggtctttcgcagttccaccatgtgcaaggagggagccacttcaaaaacctctgtagcaactgaaaggtgaccctttcttccgctcttatcaccgtgcagcttcatcttataatttcgcttgtgaacattaaatcccagaggcttcgcagcttcctcaatttt

SEQ ID NO: 207690 - DNA, 376 bp, Glycine max
  unsure (1)..(376): unsure at all n locations
ctaccttctctctacttcaacatagcaaactttgagaaagaatggctgccatcacatttgacatttctgcctataaaaaacttccaatatatataatattgctaacccaccaccacatcacacccaacagactctttatagctaaactgtcaaccaatggctgntgtgattgtatttttcacaacagccgcctgccatgccaagccagcccagaccttcttaccttgaaggttgagcatctggtgacttaccatataagcctctgccatgggctgaacccccacagcatctatcgaggatcacagagttagttctaatgcactaccaaagggccctgcaagctgaaccagggatcttggcaacagaggcatcgggc

SEQ ID NO: 207691 - DNA, 490 bp, Glycine max
aaactgattgatcatcatgctctcattaacaatataaaaactaaacaattaaaaacaaaaatagaaaagaaaagaaattaaaaacagctgattaattaaccttgtagcatcatcatcatcatcataatcatcattaacctatctaatacattattattttcttcccccttagatcaagaactagaagatccattagcaccaacaacgttcaccccatcatagtgattactactcggatcttcagcgcgatcttcaccaccatcattgttagggttttcaaaaaccttgacatcactcccatttgcatcattatcagtagaaatattatttttagtagtaatattaatatcattactagtaacaatattattgttatcctttttggcaaaggtgtttttgttgttatgcatccaaaccttgagaacgcttctatcaacgccaacttcgttgcaaatttcgtgaatcaaatcctcgtcgcgcttctgaatct

SEQ ID NO: 207692 - DNA, 387 bp, Glycine max
gatgcaccccttcttctatttctatgcctaactcttcctttggttgtgatgaccttgttcaaataccgtataaccttcaagaattcaccactttcaccaggacctagaggacttgccataagagggaatctttatcaactagatagcccttctgttcatgagcagctatggtatctgtcagagaaatagtgggcctttattgtcccttcaatttggattaaggccggccatagctgtttcctctccaaaattggcctctgaggggacgagagacactgaccttgagtgctagggacgacctaaattactaagccaacagaaactaacctatgatgggtgagacatgggattgtcctcatacgatagttattggagagaaatcagaaa

SEQ ID NO: 207693 - DNA, 482 bp, Glycine max
ggagtgcttacatctttatttaataatcttcgttggaagagtacaatcattaattattttattttatttttttcagcagtagttacgacttttggattttacatatagcacttggccacaacacacagaggattcttcttatgctgtgtaactcctggcaacacttcagtatcaatgtcttcctttttcattccttgtggcaattcccagtcaaaggaataaagaagattagcaagtataagatccaatgcagcaaatgccatattcataccagggcacaatctacgaccagcaccgaatggaataaactcaaaatcttgtccataaagatctatgtcgcaatttaaaaacctctcaggtataaactcttctggatctttccaagccttaggatctctatgaattgcccaagcattcacatataataatgtcttggctggaatttcgtagccatctaacatgcattttttatttgtttctct

SEQ ID NO: 207694 - DNA, 492 bp, Glycine max
  unsure (1)..(492): unsure at all n locations
tgctaccattgctattcgaaancaantaggaatgtatgcacgagttaactagctcactaggctggcggacaccacccttcatggttcttattaagattaaggagatagcggaggcgcaactaggttatcaccatatagaaagcagatgacactgtgcctgcttacttcaacgactcacaacgataaggccaccatgaccccagttgaaatatctgggctcaacgcgatgcgaattaacaactagcctaccggggatgtcatagacactgggctcgacaaaaatgccactatctatggggagaagaatgatttcatcttcgcaactcagaggtgggacacatgatgtctctcttataaccaacgaggatggtattttccaggcgaatgccactgatggcgaaactcacgggggaggcgtagataatgattgcagaaagatgaaccattttgttcaagggtgcacgaggaagaacgagaaggatattaaaggaa

SEQ ID NO: 207695 - DNA, 441 bp, Glycine max
agcaaaaacttatatcattgttcaagtaaaaacggggaaaagtacattaaaaaaaaaagagaaaaataaaatcgcaataaaaacctattggcacgctggtatctaaacttcaaaaggggttttgacaaaatcaagaacaacccatgagaatcttctggttaatcgacttcctcaattttggggccagcaccgtttccactgccagctgcaggaccatcctcatccatgggtccacccgcattaccaccagcaccctgggacatttttgctatgaagggattacaaatgctttccaactccttcatcttatccccaaattcggcagccttagcaagttgggttccatctagcccttggatagcctgctcaaacgcattttcaaatttcttcttatcatcagaagacagtttggaagcaattttggcatccctgattggggtc

SEQ ID NO: 207696 - DNA, 439 bp, Glycine max
tttgttttttttttttttttttttttttttttttttgttaaattttttttttttttggttttttttgtgttttttattacatttgttttttttaagtttttttttcagaaaaggaaaccggagatttttaccccgggggggggaaaaaaatagtttttttttggggtgcgcaaaaataaggaagggggcccagtgatcacaaaagacagggggggaaaaccggggggcagccaaaaaaaaaggagatgggaaaaatccccctttaccaacagggggaaaaagcagaaagggccggcccgacccccccacaaaaagttagccccccctaagggggcaagggaaacccccccttaagggggaaaaaaagggggggggggggggggtacacccctggggtcccagaaaatgagggaaccgcgaagccccccgggatttaaat

SEQ ID NO: 207697 - DNA, 518 bp, Glycine max
aactcatcaaaatgaatctgtaccactcctccaccaccaccaccaccaccaccatgttcaccgttatattcctcctccttgcaatattattcactctcacaccccacaaggccaacggtgccgcgtgtcaccctgaggaagaagcgggcctgttgggcttaaaatacggtatccgatccgacccgtccggcctgctcagaaactggatatcgggtaccgactgctgcacatggaccggagtagaatgccactataacagcacccgggttcaaagattattcttaacgggtcaaaaacccgaaaccatcttatcgggacccatctcacccaccctctcaaaactccaactcctcgatggactctacctcataaacctcatcaacattgcgggtcccttcccaaattttctttgccaacttgcaaatctgcaatttatctatctagaaaacaacaatctctctggacgaatacccgataacatcggtcaccttacacgattagatgttctcaacttaact

SEQ ID NO: 207698 - DNA, 478 bp, Glycine max
gtagaaccttcactctgctctcacccttattcctctctttcctttctttcttctgcaacaaaaatcatgtctgggtccttgggattcttctttgtgggtcttacgttgttgttgatggtcggggtggctaatgctgtggccaacacttccaacaaatttgatcaactcttccaaccaagctgggcttttgaccacttcattcatgaaggggatctcctcaaactcaaactagacaatttttccggcgctggttgtacttccaagagcaagtatatgtttgggaaagtcaccatccatcttaagctggaggaaggtgactctgctggaacagtcactgctttctatatgtcatcggacggtccaaaccacaacgagtttgattatgagtttctaggcaacaccacggcggaaccatactctgtccaaatccatgtgtatgttaacggcgtgggcaacagggagcaaaggctcaaccttt

SEQ ID NO: 207699 - DNA, 432 bp, Glycine max
ttcgtccttttttttttttttttttttttttttttttttttttttttttttttttctgctgtgaatttttttttttaatttttattttttggggggacaaaaaaaaaaacccacaaaatatattcccccccccgccttaaaaataaaatggaaggggggaaaaacccccttcccctctctgttttccaacctttaaaaaaaaccccccccccaaagaaaggggaatattttccccaacccccccacaattttgggccttaactaaaaaataaacccacaggggggaaaaaaaaaaaaaaaaactttgaaagtttgacggggaacccccaacggggcgcttttgggtaaaggggccattaccgggggggggggccaaaaaaagggggggtgtttgaccacttcgaaaaaaccccctgggggcaaaaccccccc

SEQ ID NO: 207700 - DNA, 481 bp, Glycine max
ggtatatattgatatatgtgtgtatttcctttgggcttgaaactcaaaactataataatgggttcttcttctcctccggacactagcaagagcataaagctagagcgatacaacagctacatcaggagactcaacagcaccaaactcctcaacgcctcctccaaactcctgttccgtgccactatcttagtcgcactcatcctcgtcttcctcttcaccttcaactaccctcccctcgccccagacttcacctaccaccgacacctacactcccactcccacttgctctcctactcctcctccttcgcctcctgggagaagcaggtccgtcactcctccacccctcgccgccccaacggccttaccgtcctcgtcaccggcgccgctggcttcgtcggcagccactgctcccttgccctcaaaaaacgcggcgacggcgttctcgggctcgacaacttcaacagctactacgatcccttcc

SEQ ID NO: 207701 - DNA, 524 bp, Glycine max
aggacgcagaagattagatagaataatagaaattccattgccaaatgaacaatcaaggatggaaattctcaagattcatgctgctgggattgctaagcacggtgaaatagattatgaagctgacgggaaaccttggggagggctttaatggagctgatcttcgaaatgtgtgcacggaagctggaatggcagcaattcgtgcagaacgtgattatgtgatccatgaagattttatgaaggctgttagaaaactgaatgatgcaaagaaactcgaatccagtgctcactacagtgctgattttggcaaagactaaaagctattataaaattctgagccatggatatctagggaaaacttcatgcaattaggttaactcagacggtctgaccttaagatgaagtggtctcttttagctatgccttctattgttcgacttatgcagctccatagagaagatgtttagttgaatcatttgcctaagctaattgaattattattattcttgatttctctgggattatgc

SEQ ID NO: 207702 - DNA, 480 bp, Glycine max
agattaaacaccaaatcagatttattgaagcttgcaacgcaaattcactcaacaagcagtctttaaccataaatggggaggcacgcaaactctaaattcaaagatcagtaatttgtatagcataatcccaaagaaaacaaaaataataataattcaattagcttaggcaaatgattcaactaaacatcttctctatggaactgcataagtcggacaatagaaggcatagctaaaagagaccacttcatcttaaggtcagaccgtctgagttaacctaattgcatgaagttttccctagatatccatggctcagaattttataatagcttttagtctttgccaaaatcagcactgtagtgagcactggattcgagtttctttgcatcattcagttttctaacagccttcataaaatcttcatggatcacataatcacgttctgcacgaattgctgccattccagcttccgtgcacacattt

SEQ ID NO: 207703 - DNA, 446 bp, Glycine max
aaacaacaaattcttgtctttcaatcctttataaagatatacaccataatctggtagttgagccgttacagtgtgacctcacatttccaaaattgagctacaaaaagcttttcccacaacataaattatgaaatatgttcttactcatgtgcacagctccccaattaattgttcttaaacaaagggcttggttatggaaataataacaatgtgaagaatgaagaccccccccataatgtatggcactctctagctagtaacgcgtgaactgaatgaactatactcagaaacatgcctgccctatttgaacagggggatcagagagggatccatagagaattcttttagcaacccattgatttgctgcttgagagaagtgtatgccatcccaactaacatgttgggaaggatttttgcatggatttccatatactggtccatttact

SEQ ID NO: 207704 - DNA, 371 bp, Glycine max
gattgttggtactgtttgtgtttctgcaagcaactgctattttgatgagatccataaggttgatccagagtgcacttcgaccactagcttactcggaacgtatggcatgctttggggtggaaacatgtggggctgaagaggaccaccctcccttcatgcagactttatcgacttgtgtcagaagggtggagacgcttccaaaaaagcatgattttcccttgccacctctgacatcgatgtctctggcgcgagcgctgaaagcgctccaaagaggctaaccttcgaagaaatgcataggaggacctacttgggagtgaacgggaccggctcaacaaacctttgttcaacgatcggtggtgggtcggactcat

SEQ ID NO: 207705 - DNA, 519 bp, Glycine max
ggttaaaacatgggctacaatccgttacgaacgccgttaacggacttgatcgacgagctcactagctcagtggtcggcggtcgcccttttttttttttttttttttttttttttttttttttttggccaaaaagctgacacaaattttccatatagaaactaaatacccttctaatccaggaaacggggcctaactagccaacattccaaaatttggaaaattcaaaacataaacatggtaaaagactgttccccaatcattgtttttaaaaacacaaaggccaatcaataattaaggtagatttaatcaacttcttccattttggtaccctcaacatcggcatcagcatcggggtcctcgagagggggcatgtgagcatttggtttaccagcatctttatcaatgctcagtccaagcttcagcatcctgtgaatcctgttaccgaaagtgttgggatcatcaagggtgaacccagaagtttgaagagccgtctcaaagagtgggagaacgagatcctt

SEQ ID NO: 207706 - DNA, 531 bp, Glycine max
gcaccaacagcgagaggatgaagcagaacctggacatatttgattttgtgctgagtgaagaggatttagagaggatcagtcaggttccacaacgcaggcaatacacaggggacatatgggtatctgaaaatgggtcttgcaagaccttgcaagaactttgggatggagacgtttaagtattttttcaaggataaaactatggtttgggatataaactatgaaaataagcaagattcgaattccatgttattaagatgtcttgcattattattatcattatggctggctataactttatataaggacctggatggccttagtatttatttcacaagtgcccttgattgagaccttgagttgaataagagtgtggcatgtttatcattggagtgagggtgtggtgcctcttccattccatggaaacataaaagatttatatttgtcatcaatgcataccatgaccaccaaccatactgcactaacattctatgctaatgtttatggattttgcttagcttcttgcggcatctt

SEQ ID NO: 207707 - DNA, 322 bp, Glycine max
gggaaaacccgcgatctgagcttctcttccaggcctttgttcctgggccctataaagctgtgttacgactgttcggacatggctttcgcacccttcgggctggactggagcgacatgtacaaactgtgactcgaccacctcttaatcgcgcaccgcgtttggacctttctatcaattgccgataacgaggttgcacacatggttcggaaactgttggaacacgaatcttctggttctgccgagaacttgaccgaaactgtgatgtctattacgaactctatgatatgtacaattgcttctgcgaaaagttacgggagaagag

SEQ ID NO: 207708 - DNA, 433 bp, Glycine max
gtaaaaccagacatatagggaaaagaaacagagagcatagtgcatgaagcataagaccccacacgggatattaacaactttcttgcgcgttacatagaaagcaccaacagcatgacagcacgtgcacttccttgccagctaggaaagatgactggtttcgtgcacaggatatacgcggtataaatcgcgtagccaaccatacacgcttgtcgaaccatggagaacacctgcactaaaacgccgagtgagtgattggacagagaccacctcacctatttagaaccgatgtgcgaatgcagacaccatttgcctacaaaaacgagcggcggcacctgtggccaaagattccccttctaaggcaaacgacctatcaagaacatggcctgctgagttgggaaactcctgctaggtctcccgagctctttgattgggc

SEQ ID NO: 207709 - DNA, 399 bp, Glycine max
cttctaatcttttcacgtcattattctaaacttgcagatgttcacatgccaagcaagatgaaggggacgttaatgtttctggcgctgctcctttgagccacctttcatgtctccttctccattgactgacggcttagaggcgacggcagctacgagctgggtccgaagccctacaccctgaaaggaactgtggtgatcggcggcagccactacatcccagaatgggagacctttggcttcgacgagtacatatagtacggcctgaagcacaccgacatgctgctcttgggccccgaaggggcctgacgagagcgcctcaggaacgaagccttcattagtccatgagcaatgtgatctatggcatggactcctacatcaactgcatggaggccagcacct

SEQ ID NO: 207710 - DNA, 488 bp, Glycine max
  unsure (1)..(488): unsure at all n locations
atagcataaaagcaaagttgtgaataatctatatttgtttcgcaccatttattcaaagtacatgaaaggagttatagaaacacgccaccgtatatatactatacgtctatagatgatacttgntatacacacttatttttttcatatttaaatgaaatcaaactcgttacctctcaagcctctaaagaaaaaaaatagaaaataagaagcattcttaattattctcctaactatatataaaatcaaaggcttagaacccatatatataatactttgattcattagcctcacaccctagcaagcccaaattccctcatcatggtttacgcaggctcaccaacttgacatcatcaatcacaggcccacagagtgaagaaaagtcatcacttctcatggtgtagaatgtgctaaggaacatgattcttgttctaggggtaacagccacaaacttgagtgctgcacgtttgaaccctcctttgcctttggac

SEQ ID NO: 207711 - DNA, 463 bp, Glycine max
aatcaaagcaattttaaaaattttcattaaaaatatttccggtagacctccaaagataaatacaaagaataacaaattgtctacggactatgaccctcatcatcacactctttaacaggactcaattgatgatgcatggatatgtgtttgtgtaatttcaattaagccttcatgaagctaaatgcgtgaggaacacggagagctttcaaccagtcgctttcaccgttggctccagcctgtaggaactgggcaggggtgaattgggtagcttgttcgcggctaataagaccacggtaacccttccacttgatccttccgttaacgttggcaccaggtccatagctgtgggattcagcctagtccaaggggtcttcgaagtgtccaccggcccatgggcaccatccttcggggtgaaggaagtcacccacggtggattccatcacaaccgaccttgagaattgct

SEQ ID NO: 207712 - DNA, 515 bp, Glycine max
ctcatgggtttacaatgcaaaaagttacaaagggatcgcattttctttgctaataagacatatgttccaaatgaaactccaactccactagtgaagtacagaaaagaagaattggaaaatctaagaggagatgggaaaaggagagcgcaaggaatatgataggatctatgattatgatgtctataatgatttgggtaacccagacaagagcaatgatctagctcgtcctgttcttggagggtctagtgcctatccatatcctcgcaggggaagaactggtagaaaaccaacaacaaaagactctaagagtgagtcaccatccagcagcacctacatcccaagagatgagaactttggtcacttgaagtcatcagatttccttacatatggaataaaattcatagctcaaaccgttttacctacatttcaatctgcatttggtttaaatgccgagtttgataggtttgacgacgtgcgtggacttcttgaaggtggaattcatctccctacagatg

SEQ ID NO: 207713 - DNA, 455 bp, Glycine max
gacatagagaaatttgatttgacattcatagatcagaatatcagacttacatacgggtgaacatgatacgggtgaacatgataggagcacaatactatacataaaaactgacacaacaccctattagatatgaaaaactagatagcatccaattacaaaacttaagcatacataagaaaattatgcacacataagtttgcacgtttatttgtcaatgagaggtacgttggaaggaaagaaaaccacacaccacacaccacacactctcattagatagagatgctgttgggaattcctctgaaagtaaggccttccccactggtaggaagaagcacagtgtagggcatctgcgccggtccattacggttcctaaggcttgaattcttggtcctccctgagattttgtcctcaatttccttcagcttgtttccaaacttcttaaaggcttgaattgc

SEQ ID NO: 207714 - DNA, 568 bp, Glycine max
  unsure (1)..(568): unsure at all n locations
gtcaaactgcacaatcaacattaactttacataaccctgacaaataaaatcactggacaaacataaagttttagtttagagacccaaagtaactcctagacgctactgctaccagcaaataaacaaactaggttaatcactgtgaatgggcaaagaaaaaaattatttaggttaccccacaaacagatgtatgatgaacacaagaccacattcatgcaggccccaagttgatccataatgctcacataacaatcccttcctcggaacacgaggcacacgcttaaactgcatggatggcactgccattcatatcaccacatgttggtgttgcatgaaaagctgattgtctagagggtccttcttcaataagttttcgagacagggtggagggacccgagtcaccaatagactcccctaaactcagttttgatatgccaaccagttcatcaacattgatagggcttttagaatgtactgcagttggtttcagcacttcatgtgtttcctccttcttggtgggctctggactgtattctgaccaatanggcagaggaaacgggaacactgg

SEQ ID NO: 207715 - DNA, 387 bp, Glycine max
ggcaaaaatggcaggtggaggattttctgatgctggaacactcaagagggctcatctttaccagtacaagattactggatatttcatcttttcttgcattgttggagctcttggtggcgctctatttggctatgatcttggtgtttcaggtggagttacctacatggatgatttcctcatacaattcttcccaaaggtgtgtgaaaagaagcatgcacatcttgcggagacagattattgtaaatatgatgatcagatattgacactctttacttcatctctatactttgctgcccttgtgtccacgtttggtgcttccagtgtaacaaacaccaaaggcaggaaagctagcatcttagctggatccgtaagctactttataggagc

SEQ ID NO: 207716 - DNA, 437 bp, Glycine max
agcaaaatgaagagtgcgatttgtgggataatcctctctcccaaccacgtcttcaaaccaggggacacacattcaatttgtaaaggaccatactccaatctttgcgtacccatggttgtattggcaacagggcctggtataggaggtggggtgctggaaaagccaattattgaaaaagtcacccctggccgtgagtgtgaattcgatttaaagaaatcacgggaatcggcaccgccctatcatgttatattgcacaacgacaactttaataaacgggaatacgtggtccaagtgctgatgaaggtcatacctggaatgacccttgataatgcagttgatatcatgcaagacgcacactacagtggattgtcagtggtgatcatctgtgaccaagccgatgctgaagatcactgcatgcagctaagaggctatggatt

SEQ ID NO: 207717 - DNA, 416 bp, Glycine max
  unsure (1)..(416): unsure at all n locations
aatatgttgggcacttctttattcaaaatgacaactatcacatgtcttaatcataggttttttgttcatcttaatcataaggccaagttttacacaagaaatatnctttttttcttttctggtttctctaaggccttcatgaggagggaacttatgtacacctgcaaatagttccatctcacctttcaatagcataaaagccagtgagatttgaagttaaacttgtcatcagcaaccaccatttgcaggttcaattgaactgagcaatccattgcctcttagctgcatgcagtgatcttcagcatcggcttggtcacagatgatcaccactgacaatccattgtagtgtgcttcttgcatgatattaactgcattatcaagggtcattccagggatgaccttcatcaacacttgga

SEQ ID NO: 207718 - DNA, 566 bp, Glycine max
tttaagtgaggagctagagaatgatgatgaagtctgctatgtgtgcagtggtggttgtagcacttcttcttctggcggaggtggggcccatggctgaggctgtgacatgcaccccaacagagttgagtccgtgtcttccagcaatcacttccggtgctaaaccttccaatgcttgttgcacgaagctgaagcagcaaaaaccatgcttatgtggctacctcaaaaacgctagcttgaagcagtatgttaactctcctaatgcccgaaaaaccgttgcttcttgtgggattccctttccaacttgttaattaattaagccttcttataattaaagtgtgggatatatatatatatatagataaacagtttaatttatacacactttgatcctacaaagcatcttgacacaagcattcaataggatttcaccactttatcgcaacattttaacatgatgcggtaataaagtaaattcttgttgaatatttggataacgatgttatatactcatagtttgtgtgtataacataaacttatatttattatgtactctatatatgccactc

SEQ ID NO: 207719 - DNA, 349 bp, Glycine max
tagtagtaagcatggagtcctcaaagatctatgcttacctcttcctctgcatgatctatttctcttccaccactcccattctcggttgtggctactgtggcaaaccccccaaaaagcacaagcctggtaaaacaccaaagacacccaaaacacccgttgataagccaccagtcaccatccctcccattaatgcacctaccgtggttcttgcaccaatagtgaaacccccaagtattctccctccaatttcaattattaacccaccaaccacaccaagggagggagggaacactccatgcccaccaccaaagtatactgcgcaggctacgtgccccattgacacgcttaa

SEQ ID NO: 207720 - DNA, 488 bp, Glycine max
attcaacaaattaaagcgcaattcatataaattaataattgaacatgtcacagagaagcatctttgctgctacttgcctaagattatattaaaccatacatgcaacgatctcaattaaaaacaaatggttttacaaataatagcaaaacaaacaacagcagttccaatcagaagagaagagagatagtgtggctcgacatcctctcatgtcgattttgaccatatattcctcaatcctttccacctggtttagagggagcacgtgtaaccaggaggaggagacttgccacaagtcacaaggagctgaagggcaagtgggacataaatgttgaggttgagaagcttcagtttaagagtggtgcaaagacacaccgcagcttcaacctcaacaagcccttgaagcacggggcagcactggttcgcaacagggtcacccaaaccaatgtgaaccaaccctccaagaagatccacacaggcaccaagtttga

SEQ ID NO: 207721 - DNA, 436 bp, Glycine max
aggcgctcagtcagatacggtattctgaatctaggacgcacgcatgcgctcgtccgggagttcggattgcggactcagcatggcttactattttaagacccgtgaacgtctcactataggaattagtgacgaattctgcaagcgggcgcaggctgatcgccgaacgcctgttctaatacgaagaccacctgagcgcgaagcctagccgtgcgatgtgatggattgagatgaacatgtttagtgaagatgcggatatttaagttcataatcaggggaacagttggttgagcgggctggcaatacacgaggcttactcgcgagatgggctagggtatattgcgactacagtagttgacatgacagctgggcatgtattctaaccatgccgatccaaggaatgatgaaggcacagccgttctgcaagttatgctcccca

SEQ ID NO: 207722 - DNA, 474 bp, Glycine max
cattcgaattcattttatttatatattaatattatattcaaatgaaataaaaagatattaaaagatactaattataagaatttgaaagtgaaattataaagttattaaatgattaatcaatttttttctacctgttcctgtagtaaaaagagttccatctgttcttgaatagcttccttcaaaaggacttctgcttccccagtgaatgtcttggtagaagatatgatttctttgaattgaggtttattcgtgtttaagtaagcacgtaactcaacaagaaatttccttacctgtccaatttctaatgaatcaagataaccattcgttccagtataaatagttattatctgttctttcacggtaagaggagctgattgggattgtttaagcaactcgcgcaatcgttgacctcttgctaattgattttgagtagctttatcgagatcagaagcgaattgggcaaaagcttctaat

SEQ ID NO: 207723 - DNA, 399 bp, Glycine max
aaaaaaaaaatttccctttttttggctcaaaaaatttctgcaatacattggctcgttacaaatttggaaaaactcttccctcgcgaattttaactggggaagcccaaattatgggttattgggttgccatttctcaaaccaatcaacggggggtgctaaaaaaatactccctcaaatgttcccgatttgatgaaaccaggaattttttgaacaaaacattgcgagttattcaatcagacggtccaagctttttttcagggaccccaagcttgtcaaaatcttcagagctgggccctccgagtttcaatgcagcttccttaagagtacccccctttttgggggctgttttggcaactggtggtgccttgtcataaccaatttttgggtttaagggtggga

SEQ ID NO: 207724 - DNA, 444 bp, Glycine max
ggcaaaattaagagtgcgatttgtgggagaatactgtctgccaaccacgtcttcaaaccaggggacacacattaaattgggaaaggaccatactccaatctttagtgacccatggatgtataggcacagggcatggtataggaagtggtgtgctagaacagccagttatgagaaaaagtaacccttggccctgagtgtgtattagatctaaagaaatcacggaagtcagtaccgtgatatcgagtcataatgctcaacgacaagctgaataaaccggaatacttggtccaagtgctgatgaaggatatgactggaatgaccctggattatgcagttaatatcatgcaagatgtacactacaatggatagctggttgtgattatgagcctaccggcagttgctgaagatcactgcctgcatctaagatgccttggattgttcaat

SEQ ID NO: 207725 - DNA, 620 bp, Glycine max
  unsure (1)..(620): unsure at all n locations
ccgcaattgcgaaatctctggaacaattgatttcattttcggatactccaccaccttgatccaaaactcgaagatcttggtgaggaagcccatggcaaatcagcagaacatagtggtggcagatggcacagggcagaagaacatgcccacaggaatagtcctccataactgcgagatcatgccggaccctaccctcttggcagaccgcttgagcgtgaagacttacttggccaggccatggaaggcattctcaagggcagtgttcatcgagaatgttatcggggacttgattcagccagatggttatattccatggaacccaattgaaccaaacacacaggattgctacttcgctgagtttggcaacactggaccaggttccgttgctcaagcaagagccaagtttggcaaaggtctcattagcaagcaggaggctgcacaattcactgctgagccttggctccaagctagcacttggntgcctgctgctggcgttcctttcgatgctagcttcaccaaagcttaatgatccgagacaaaccagcattttgagtggtatgatctcttttttagcctacctaaattaataaaactttaaacaggaaatcggttacctaatt

SEQ ID NO: 207726 - DNA, 506 bp, Glycine max
ccgtaattgcgaaatctctggatcaattgatttcattttcggatactccaccagcttgatccaaaactcgaagatcttggcgaggaagcccatggcaaatcatcacaacatagtggtggcagatggcacatggcagaagaacatgcccacaggaatagtccttcataactgcgagatcatgcctgaccctacccttttggcagaccgcttgagcgtgaagacttacttggccaggccatggaaggcattctcaagggcagtgttcatcgagaatgttatcgcggacttgattcagccagatggttatattgcatggaacccaattgaaccaaacacacaggattgctacttcgctgagtttggcaacactggaccaggtttcgttgctcaagcaagagccaagtttggcaaatgtcttattagcaagcttgaggctgcacaattcactgctgagccttggccccagctagcacttggctgcctgctgctggcgttcctttcgatgc

SEQ ID NO: 207727 - DNA, 566 bp, Glycine max
ctgaaatgtggtcctggacactgtcttagtattggaagtcttggaaagtatgcggatgagcaagaagtgaaagacattcgcgttaagaactgcacgatggttggcacacccaatggcctcagaatcaagacatggccagagtcctatccacgttcagcatcagctatcaccttcagtgacattgtcgtggaaaatgttaaaaatcctatcataattgaccaagagtatgattgcgaaccagcaaactgccaaaagaagccttcacttgtaaagataaacgatgttgttttttgaaacataaggggaaccacacttttaccaattgcagtggattcaaagagtagcaagcagttcccatgccaagatgtttaacttaagaacataaacctgaaccttggacccaagccgttgggtttctgatgtaccaatattaaaccagactatggggggtgtcaaagaccagcagttagcctataaatcttgacattcaagcattttgcagttcttgcaataaggagggaagggcaagtaatggttttgacaatcaaaccaaatgagggaaacat

SEQ ID NO: 207728 - DNA, 489 bp, Glycine max
agaataaacaaggaaaagggatcctcatattatgcttacaaaataacctgtcctcaatctcatcccatgcactgatgcaagggtagtataataataactaattgttatatacatgattatcatagattacaaatttacaaccattaggctgcttgcatgctcacagttgaatcacggctcataaccacggcggattcagcacctacttcctcctcagcaggtagatcatctgaatgcagttccggttgcttaaggctccggacaaactcagtgaacaaaggaaaatgctctggagagaagaatgatgctcccattctatgatatgtgaacaagtccaatacattatctccagataaattcttcttaatttgttcaaacccccctggaacaccagattcagacgaattttgacctgaaacctgaacctcatgctttttgcaagcttccataatttgtgcaagtagcaactcagggctagaatggttttcc

SEQ ID NO: 207729 - DNA, 516 bp, Glycine max
atagcttcatcccaaaaagctcttttccttctaaatttgattccttagttcagcattctattattatatatggcttcttcaccttcctcagaaaacaaaaacctagagggagtagctggtggtgccggacagaaacccattccacttggtgagaacgttctgcagaagcatgctgcattctttgacttgaataaagatggtgtcatctacccatgggagacttttaaagggttgcgtgaaatcgggactggggttttgctgtccgttggaggtgctattttcatcaatgtgtttctcagtcagagtactcgtcccggaaagtttccatctatactttttccaattgaaattaaaaatatccaacgcggcaaacacggcagtgacactggagtctacgatactgaaggaaggtttatttcttcaaaattcgaagaaatttttaacaagcatgcacatacacattcaaatgctttgacatatgatgagttaacggagatgataaaagcaaattgagag

SEQ ID NO: 207730 - DNA, 121 bp, Glycine max
ttttttttttttttttttttttttttttttttttttttttttttttttttttttttttaggatttttttttattttttttttttattttttatttatttatttttatttatatatttaatt

SEQ ID NO: 207731 - DNA, 369 bp, Glycine max
gccacgcataataattccacagtccttactgttacaaaatgacagggaacaatgcgagcattaaatcgaacctatgaaacccgcgtgtaatatttgaaggaaacacccacccactctccattgaccttccttattacggatttggaacagaagaatgcttataatgggggcaaaaacactaacatatgctctctattggaaataactaggggcctgctcatttagagccagagaaatcggcatcaatgacatcaccggggggttccttggctgaggatactgaggggccagaatccgcaccgggtggagttgatggccattctgcgcctgcatatcctggctggctgcaaagggactgaccaatctgga

SEQ ID NO: 207732 - DNA, 529 bp, Glycine max
cccaagacatgcttgagattttattaacttcagataaatatacatatttctttaatagaggaaaaagacataatattcttggcatctaggaaatttgatccaacttggttggaacatcaatttaacttgaattgatttaagacttattaattgatcattctgcaggcctttctaacctcctgtccaccattgatgctactcattctgatcatggacttcgcaaaagcctcataaaaagccttttttgaggtggcaaactttgtaaccagatttttagtgtctgggttgtcaagcaaaacttgatcagaagaaaacaagcctttctgttggaggatcaacctgtaatatgtattatcaaaagttgttgttgaagggtccatagaggtgcctgcattttttgcctgattttttagtggacaaattgagatcagttttgctgccaatgatggatttaatgaagggtcaacatcatgtgttgcattgaagtagtggattctgttctttgaagaagagcagtgagagaaaccca

SEQ ID NO: 207733 - DNA, 511 bp, Glycine max
cgaattgcgaagtgaatttgacagatgagagaagcggggaaaaacaaaatcctaaatctcttcttgagttattgagatttatgaatcatcacacatatatacatatttattcttacggagatataatttaccatgaattcgagtatacacctaaattgatattcatgatagtagaccgaataaaactagcgaggcttgtttgatgactcttgagactctccaaacttcgtgctgtacacgatgccacgattctgcagtatgtacatttttggccattttaacagcatcatcgattccagggaaagattgagagccgtagtcattatgttttgatggtccataaatcaaatgcttataccatgacattccaaagaggccatctctgtcagtgaatgcacgctcagccatcatcaatctatcattcagctctctcactctcaagtggtccttcttacctgttatccaacctttaccagcttctattacctttctctggctatctatcttgatt

SEQ ID NO: 207734 - DNA, 481 bp, Glycine max
cttgcagtcgcagaggaaaaccctagctagtagtctcagttcgtttgagagagaaaaaatggcagagggtctcgttctccgcggaaccatgcgcgcccacaccgacgtcgtgacggcgattgccactcccatcgacaactccgacatgatcgtgacggcgtcgcgcgacaaatacatcattctctggcacctcaccaaggaggacaagacctacggtgtcccccgccgtcgcctcaccggacattctcacttcgtccaggacgtcgtcctctcatacgacggtcagttcgccctctccggcttctgggacggcgagctccgcctctgggacctcgcgggtggcacctctgtccggcgcttcgttggccacaccaaggacgtgctctgcgtggcgttcttcatcgacaaaccgtagatcgtgttggcctctcgtgaccagacgatcaagctgtggaacaccctgagtgagtgcaagtacaca

SEQ ID NO: 207735 - DNA, 539 bp, Glycine max
aattgagattatatctcaaccatattctgaagtaaagataatattggtaaccggagaaaaacaaagatgttgaaatatccatgtaacaagtaaataaccaaaacgaacgttttaaaaaataaataaaaggccttagtgcctcggtcttcaacataaaaatgaattctacagtaaagcagtaactaactttgtcccaaaacttaaaaacagattcgcatctgaaaacactaaaaagcttaacctaataacgtccaatagcccaaactctgaccacaccatcggtatagccactaaacaaagtgcttccatgcgcactccagttcaaacttgtgcaataaataaccttcttcttgttggcgttaccaccaccggaggtggcatcagcctcagtcttgaggtcaaccttcaaattctcaacgatactcttgctctccaaatcccagatcttgatgctctgctcggaggcggcgcagagccaatacctgttggggctgaagcaaagtgcatggatgattgagccagcatcgagagagtaaaga

SEQ ID NO: 207736 - DNA, 330 bp, Glycine max
caagagcttgatcccctgcgcgagtgttggcgagaggaacctgctagctgacgtggcgaggattgttgagaaaaacggcacgtcgtttaagcgaaaagacgatttgaggaaggtcgtcgcagaagcactttcctctctcggctacgattcctctatctgcaaatcgaagtgggagaaaactttctcttgtcctgctggtgaggatgaattcatcgatgcgattgtggaaggggaaaggttgattgtcgatgttgattttagatctgactttgaagtagcgcgaacgactggaacttacaatgcgatgctgtaatagctgtcgttcaccta

SEQ ID NO: 207737 - DNA, 478 bp, Glycine max
tcccttcacaccattctcacaaaacaactttcaaactctgagaaagaatggctgccaacacattgatgagtactgctatctcagccttcccatctctcctttcttcctcaaaatccagatttgccaccgcagttcctctttctagctttggtgtcaccaatgcctcttcttctcgcttttctatgagagctgactggatgccaggccagcctagaccttcttaccttgatggttcagcacctggtgacttcggattcgaccctcttcggcttggtgaagcaccagacaatcttgagaggttcaaagagtcataactcattcactgcagatgggccatgcttgctgatacagggattttggttccagaggcattgggcttatgcaactgggtaaaggctcaggaatgggcagcatgttctgcgggccaagccacctacctaagcaattcagatccatggagcaccctacccaccattct

SEQ ID NO: 207738 - DNA, 493 bp, Glycine max
  unsure (1)..(493): unsure at all n locations
aggacgtagcgtcggtangcgagccccaattaggaaccgattcgacgagctcactgctcgctggccggccgtcgcccttttttttttttttttttttttttttttttttcaaggcaaaatctattggggaataatgatgttttcaatgtttttgtgccaaggaaaaaacaagtgatccccctccttctccaaagggtctttgccgggaaacgcggatttgttgaacccggaataacaggaaaccctaaaaaccaagacgccaattttcaagttttttttctgggaatgcatggaccgctttagggcccttaaaggaaaccaaggggtggaaaccaccaccaggggattccttcttccctgggtcctttaaaaaaccccctccttgttttaaaaaggaaatagcctggaaaaaatggggcgtattgggggcacacggagccccagggagacttccccgcttaggttgccagattggcccccagaaaccgctggc

SEQ ID NO: 207739 - DNA, 438 bp, Glycine max
gcatgttcctctatttgactctcattcctcattcttatatacttttcttatacaaaaccagagcattcatattcaaacacaaccatgttacccccatcctcggtattggaacttctaaaattgctttatagaaacaacactatcacatatggacctttacactgatgttcaaattacataaaagcttttaaattacaggcattacctacatttctaggttccctgaagatgaacacaagtgcaagacttgtaacagatcggtgaagcaaacacatcatttgctttgtgtagctgcaacagttcgctgaacagttgaaacaccatccacaaattttgtccggaaaagaacatttgcattattgaacatgccttccttcaaggaaaccacaataaactgagagtgcggaaagtgagcctttatcattctccctatgtttt

SEQ ID NO: 207740 - DNA, 361 bp, Glycine max
acattgtgcaagatgtggcattgattgggaccagaaagatggccttctcctgattgaagccgatagacttttaaaacctaggtggatactttgtttggacatcaccgctcacaaatgctcgtaacaaataaaatcagaggaggtggaagtttatgcaagattttacattaactctttgctgggaactgctgtcacagcaagatgaaactgttgtatggaagaaaactagtataaaaagttgctatgcataaagaaagtctggatctggcccttctttgtgtggtagaggtattgaaggggagactccatatgatcgagaactgcaaaactgcataggtggaatacagagcagtcgttgggt

SEQ ID NO: 207741 - DNA, 532 bp, Glycine max
  unsure (1)..(532): unsure at all n locations
gattggtggtaatggcagcgttactacaagcagcagctactttcatgcaacccaccaagttgagcaggagcaacactttgcagcaaaagtctactcagtccatttccaaggcttttggtttggaacctgttggagctaaaaaggtcacatgctcccttcaggctgatcttaaggacttggctcacaagtgtgttgatgctaccaaaattgcaggattcgcccttgccacctctgccctcgttgtctttggggcaagtgctgaaggtgttccaaagaggctaaccttcgacgaaatccagagcaagacctacttggaagtgaaggggacaggaacagcaaaccagtgcccaacaattgatggtggattggactcatttgccttcaagccggggaaatacaatgccaagaaggtgtgccttgagccaacttcattcacagtgaaggccganggtgtggccaaaaatgctccccttgagttccaaacacaaagctcatgacacgtttgacctacactcttgatgagattgaggga

SEQ ID NO: 207742 - DNA, 492 bp, Glycine max
aaaccttgaattttaaacattgtaattggaggtcgatataatatacaaccatgacagtactctcagtagtgctaggaaagttgggtcaagggataatgcagcaacaccatgcatgaagttactaacaaaatctgagccaacaaacaaaacagaaaacaaaacactctatgactcaagctgagcataccagatgccctggatcttgacatcctttggagcctttgctcccaaatcagtgtcagatggttgaacactctcgaacacaccgataacctcacccgtctcatgcttggtcttggtgacacttaaagtgattttgccccttgaataataaggacttttaattggtttccttggcaagttcttcctcatctcctcttgcaccagcaggcaaagcaactgcattgacataacctgtggaagcacctcttcctttgaggtccaagaaagagctttcacggtaggatgggactagaaactccccactaaagc

SEQ ID NO: 207743 - DNA, 473 bp, Glycine max
gttaaaagcaagtaacattaagttggattcggatacgcaagattattcacattatctgaagtacttcaccaatcacaaatcgaaaaactcttaaaagtcatttcggtctttgacgctcactttccggggacgaagttggtggcataggcccaggcgttgtagttggcaggggcagcaaggtgatcggagagggtctacaatggaccctttccggggacaatggcccgaacgaagaagccagacctatagaacatggccaatcgtacgatcttgggttccttcatcttaagctcagcaaaagcctttgggtcatcagcaaggcccaatgggtcgaaactgtcacctgggtagattgggtcagtgacctgaccgagggggccaccagcaatacggttaccttcagcgcgacccattatgagaacttgtgtggcccacatggtgaggatgctctgggcgtggatcaggcttgggtt

SEQ ID NO: 207744 - DNA, 420 bp, Glycine max
ccaactctctttgaatttgtgtctttgggtgaaaagcccaccatcctgttctccgagagacttggagaggcaggactgcaggtgttacgcggtgttggacacgaggaatgcgcgtatgagctctcgcacgatgagttgtgcacaaagatctcgtgctgtgacactattatagtgaggagcggtacgaatgtgacaagggaagagattgatgctgacaaaggaaggttgaaggttgtgggaagagccggcgtggggattgaccacgtggatttgcaggcagccaccgaatttgggtgccttgtcggtaatgcgccaactgcaaacactattgacgatgccgatcatgggattgctcttctcgctgacatggcccgaaacgttgcccaggctgacacctccaccaaagctggcaaatggcag

SEQ ID NO: 207745 - DNA, 490 bp, Glycine max
gcacactactagctgcaaacagctagttttattctgaatcatccaatccaaattatattacattcgcataccatagcttcaagtttcctcaaattgtccatcaaaatacctcttctacggtgtaaaaacagatctagatcatctgaagtgcatgtgcacttgagaattgtcaaaaaaacaaaaacatttctttataaccaaaatagtagctattttactttctaaaacgtaccatccatagatggtaggtagatacgcatgattgtttgtataccattacattatcaactagtactagagcttgaggaagacgaactcttcaatggcagacacggctccaatattgtcaagagcctccttgtttggttcttcatcgacaccaatagccataatagccttgttcctacgcgatgtccttcccacactcataaagctcacattcacgttttgttcacccagtatgtttccaacacgaccaatcatgccgggc

SEQ ID NO: 207746 - DNA, 508 bp, Glycine max
ataaaataagatgccactagtttccattgagagatatatagcatatacatatttggaataagaaacagtgagtcttctgtatgtgacccacaatcacaccctcctacatcactccaactaattactttgcctactttttcaacaaaaaatagaatcgagagatttgaccatgatgcttttatgtggtagataattaattctacacacacagtcattagtcagtctaattatagttctcctaactagttagggaacttcctagtttgtgttcttggtttggatcttggcaaattccagggtctttttaccttgtaacttgtttgttacatagtgtttactgtactctccatgattgtatattttatacttgcatgggtggttttcatccacaaactcaggcattggaccaagctccacttcatagctaggagcaaaaaatgtcacaattgagagtctagctttctcctcatgagccacagctctatgctccacactcctgtatttccca

SEQ ID NO: 207747 - DNA, 359 bp, Glycine max
ccccttcacaccattctcacagacaactttcaaactctgagatagaatggctgccagcacattgatgagtactgctatctcacccttcccatctctactttcttgctcaaaatccagatctgccacccgaggtcctctttatagctgtggtgtcaccaatgcctcttcttctcgcttttctctgagcgccgactggatgccaggcccgcctagacctccttaccttgacggttcactcccatgtgactattgattcgaccactcttctggaggtgaacccccagagaatcttgataggttcagagagtcagcactcattcactgccgatgggccctgcgtgctcgcccagggactttgg

SEQ ID NO: 207748 - DNA, 258 bp, Glycine max
tatggattgcttcagctctatatgctgctgttaacatcggacagcatccatatggaggttcaattctgaataggtcaactattagcaagagactcatgcctgagaaaggggctcctgaatatgatgccgtggataatagccctgagaaggagtttctgacgactatcactggcaagacagagaccgtcattgcccttacgcctatagagagagcatcctggcacgcattggatgagttttaccgtgcgcagagagatg

SEQ ID NO: 207749 - DNA, 350 bp, Glycine max
ccaactacgaggaatttgggtctttgggtgaaaagcccaccatcctggtcttcgagagacttggagaggcaagactgcaggtgttacgcggtgttggacacgtggaatgcgcgtatgagctttcgcaggaggagttgggcacgaagatctcgtgctgtgacgctcatatagtgaggagctgcacaaacgtgacatgggaagtgtttgaagctgccaaaggaaggttgtaggttgtgggaagagccggcgtggggattgacaacgtggatgtgcaagcagccaccgaatttggttgccttgtcgataatgcgccaactgcaaacactattgccgctgacgagcatgggaat

SEQ ID NO: 207750 - DNA, 492 bp, Glycine max
gcacactactagctgcaaacagctagttttattctgaatcatccaatccaaattatattacattcgcataccatagcttcaagtttcctcaaattgtccatcaaaatacctcttctacggagaaaaacagatctagatcatctgaagtgcatgtgcacttgagaattgtcaaaaaaacaaaaacatttctttataaccaaaatagtagctattttactttctaaaacgtaccatccatagatggtaggtagatacgcatgattgtttgtataccattacattatcaactagtactagagcttgaggaagacgaactcttcaatggcagacacggctccaatattgtcaagagcctccttgtttggttcttcatcgacaccaatagccataatagccttgttcctacgcgatgtccttcccacactcataaagctcacattcacgttttgttcacccagtatgtttccaacacgaccaatcatgccgggctga

SEQ ID NO: 207751 - DNA, 509 bp, Glycine max
  unsure (1)..(509): unsure at all n locations
aatgggtcgtagcgtcacgaatacagtatcctccagattatattcactggagtgcgacagaggtctcgactanggtcagtgtgggcctgcgcctctcaatcttctttattgtatattttgtttgttcttcttggagttgaataatgcctcactcattttctgtgtactttctgagagtactatggatgatgtgcttacgacctgctaggttgtttactgtctggtgtatggaacactgtaggatatgctgcgcaattgacactctttgcagggacgttgtttgtgctacgaaagaattttagtggctgtgaccgctcttatatttaggcgcgggacaaatgtgatatgggaagtgttcgaagctgcctaaggaatgttgtaggttgtgggaagagtcagggtggggattgacaacgtggatttgcacgcacccaccgaatttggatgtcttgttgtttatgcgttaactgaaaacactacagacgattgcgaacatgggatcgctcttc

SEQ ID NO: 207752 - DNA, 491 bp, Glycine max
gcacactactagctgcaaacagctagttttattctgaatcatccaatccaaattatattacattcgcataccatagcttcaagtttcctcaaattgtccatcaaaatacctcttctacggtgtaaaaacagatctagatcatctgaagtgcatgtgcacttgagaattgtcaaaaaaacaaaaacatttctttataaccaaaatagtagctattttactttctaaaacgtaccatccatagatggtaggtagatacgcatgattgtttgtataccattacattatcaactagtactagagcttgaggaagacgaactcttcaatggcagacacggctccaatattgtcaagagcctccttgtttggttcttcatcgacaccaatagccataatagccttgttcctacgcgatgtccttcccacactcataaagctcacattcacgttttgttcacccagtatgtttccaacacgaccaatcatgccgggct

SEQ ID NO: 207753 - DNA, 492 bp, Glycine max
cggcgttggagctgacggagttatctttgtcttgcctggcatcagtggcaccgattataccatgaggatttttaactctgatggtagtgagcctgagatgtgtggcaatggagtgcgatgctttgccaaatttgtttctcagcttgagaatttaacatgggagggatagttttaccatttatactggtgctggtctgattattcctgaagtcttggaggatggaaatgtcagagttgatatgggggaaccaattcttaaagcctcagatgtgcctactaaattacatgcaaataaggataatgctgttgttaaatcagaactagttgtagatggagttatctggcatgtgacctgtgtcagcatgggaaatccacactgtgtaactttcagtagagaaggaagccagaatttgcttgttgatgaattgaagctagcagaaattggcccaaaatttgaacatcatgaagtgtttcctgcacgaactaacacag

SEQ ID NO: 207754 - DNA, 488 bp, Glycine max
aacaaaccgttgttgtgacacattcaaccaaaaaagggtaggaagatataaatatgtggcaaaatagtaagaacaagcagaaagtccacctctcatacaaatattattcagcaattcctaattccatattgggtttaacaatgggggcaacatattaaaggggcaaagatccgtaataaactacatcggctgagcctgtcatataaacatgattatcttcctccctccattcaatctgaagaggtcctccaggtagatcaaccgtgcaattcctcccagcacgaccctcaagaactgctgcaacaacagtagcacaagctccagttccacaggctagggttgctcctgctccccgctcccagacacacattttcaagtgagaattagacaacacttgtacaaactctgtgttagttcgtgcagggaacacctcatgatgttcaaattttgggccaatttctgctagcttcaattcatcaacaagcaaa

SEQ ID NO: 207755 - DNA, 556 bp, Glycine max
aagggatacatgcagtggtggaatgaatggttacatatccttatgtggtggagaaccttgccctcctatttttaggtctcctattgcaagcatggaagatatcatggacaatcatgttatatgtgcaatatatagactcccagatgcacataaacatattacccgaccaccacaaggagttaaatttccaaaaaagattgttgaaattggggatctaaaacctgaacctgttttgtggcatgaagattcaggcaggagacaccattctgaaaatgggaggaaaaaccctccaggatctatttctggtcgggagcttggggatgcagcacacagactcattgtcaattccttacaggcaaaggttgatactaatggataccgccatccgcataatggacctcctatatcttatcctgcacccatgggtcattatcgacaaccagtgccttcgtatggttatgaatccagcccaggatatgttgcaatgccgccacctatttcagcttcctcactccaaggcagaccacagtttgcaccttacaaatgctgccctact

SEQ ID NO: 207756 - DNA, 470 bp, Glycine max
ccaaaagaaaagggagtgggaggaccaagatttgttcaatccaaacgccattacacagttcacggctgcaacgaatgaagatatatctctctcttctcacctctaattgaccttcaactaccaaaagttcaaaaccttgctagtcatatattgctaagattaaaactaaaaaatattaaacggcttggttgcgcggaactgagatatcaataacaaaaggccttcataaaagtctatttttcatgaacaagagggcaatactcagggtaccacatattgcctcggacatactccacggtttcttcttttgacatgtttgctagctctttgaaccctacatcaccatgtccttcagcctgcttttctgcaaccgctgcatgtacaacagcagccccaacctctgctgtaacatctcgtatacagtcaatggatgggtacaagattcccttttgacatcctcatctgtcatg

SEQ ID NO: 207757 - DNA, 487 bp, Glycine max
aatcatgtcaatcgattggtcccctctccaacttattaataagaatataaagatagattataaaacaggtaattcttgggttgataatgataattgccatcacttttaaaccccgtttaggattgcctagactcttaatccgattgctaattgatttccagaaataaacttaactattcaatgccaaatttaatctgacttattccaaggctcattgatagatggaccaatacagcaaggatgaatgttggacttctacaacagccacttgagctccttcaaaggttctgaaaatctttttaatttgctttagaactaatcttcctctttgcaaatgacggcaaacagaaagctgctgtatgaatctcagagttgtaaaatttcagtggtcttactgacttctgactctcattttcatctatgggattaactggatgcttgaaatcaacaggtggtccctcagttgagcaaagcataaaaccaatca

SEQ ID NO: 207758 - DNA, 457 bp, Glycine max
aaaaataacaaagcaatcagaataggaattgaacatacaagaggaagcaaagctatcttgctttggcttaatttataccatgaatgaatcactgtcaatgtgatcatatgaacatacaagaggaaacattagaaatgttatacacagacttgaaagaatataatcacacttataaggtcactgtgatgtgcatgcaatacaccaaaacaaataagaaacaacttgagaaaaatactttgactgaagctgattttaattttctttctgtgtgaaacttgacactggtcttaggccatgtttgagtgctgcttcccacacaagatcgattctgttaacatctatggccccaacttcgggatgagaccaaccttcaaggctatgtaccactcctcctgcatggcacgcgtgaaccactcccctatccatcgtgtactcacaacacccaagtccttccacg

SEQ ID NO: 207759 - DNA, 503 bp, Glycine max
cggacctctctcttcttcagtggtggaagctactagaacactagtttgttgagcactgcgatgaggaagtggacggttgcttccgctctccttcttctctctctcctctttctctttgcagatcaaggtcgaaagtttcaggcgaatgccgagggagattccgacgagcttgtagatccacccaaggtggaggacaagatcggtgctgtgcctcatggcctttcaaccgattcagatgtcgtcaagagggaggcggagtcgatctcgaagagatctctccggagcaacgcggagaagtttgagttccaagcggaagtgtcgcggcttatggatatcatcatcaattctctctacagcaacaaggatatcttcctcagagagttgatttccaatgcttctgatgctttggacaagattaggttcctctccctcacggataaggaggtgttgggagaaggtgataacaccaagcttgatattcagaataagttggacaaggaaaa

SEQ ID NO: 207760 - DNA, 534 bp, Glycine max
cgacacacgccgtgcggattacgccccgtacgctaggctttcggctcgagctcatatcaggggttagctactgtcatgcaatgcaagtatgccatcgtgacttgaagttggagaacacattgctggatggtagtccagctcctcgtttgaagatttgtgattttgggtattcgaagtcctctgtgcttcattcacaacctaaatctactgttggtacccctgcatacattgctcctgaagttctgcttaagaaggaatatgacggcaagattgcagatgtgtggtcttgtggggtgaccttatatgtcatgctggtgggtgcatatccttttgaggatccagaggaacctaaaaatttccggaagacaattcataggattttgaaagtccagcactcaattcctgattatgttcatatatctcccgagtgccgtcatctaatctcaaggatctttgtggcggaccctgcacatagaataagtattgccgagattcgagatcacgagtggtttgtgaggaacctgccggctgatc

SEQ ID NO: 207761 - DNA, 489 bp, Glycine max
  unsure (1)..(489): unsure at all n locations
acaccccaatcgtagccgtcgcactttgcgttttctgcgtcatctccgattccccgacaatggccacccaaatgagcaagaagagaaagttcgtagctgatggagtgttcttcgctgaactgaacgaggttctgacaagggagttagccgaggacggatactccggcgtggaagttagggttacgccgatgcgcaccgaaatcatcatcagagccaccagaacccaagccgttctcggtgagaagggaaggagaatcagggaacttacctcggtggttcagaagaggttcaagtttcccgagaacagtgttgaactttatgctgaaaaggtcaacaataggggtctttgcgctatagcacaggctgagtctctccgctacaagctccttggtggcctagctgtgcgcagggcttgctatggtgtcttgaggtttgatatggagagtggtgctaanggatgcgaggtcattgtgagtggaaaattgagag

SEQ ID NO: 207762 - DNA, 527 bp, Glycine max
tgtggtcgtccttttttttttttttttttaagataaaacaaatttcttagaatacttgttactgagtttaacaatttctttaaatttaagaaactacaaaattgtgaacatgtctttgacaacaaacattgcacacaagaaaaactaggcactcagctactatgaattacttctacagtgtataacttttcaagcaacagggacctgcgtatcattagcagccaaaactggagcaggctggatgtcttcttcttcctcctttggagaatggattgtgacaagatcagggaggggagttataggaccctgtttccccttaggatcccaatcaagcatgatcttcaccttaatgcccagaacaccctgtctcaagagcacatgttttactgcagagtcaatgtaatctttgacaggttgcccagaagaaatcatgtaaccatccttaaacttcatatatttggctctctgggctctcaagtttccactcacaatgacctcgcatgccttagcaccactctgcatacaaa

SEQ ID NO: 207763 - DNA, 406 bp, Glycine max
acaccccaatcgtagccgtcgcactttgcgttcactgcgtcatctccggttaccggacaatggccacccaaatgagcaagaagagaaagttcgtatctgagggagtgttcttcgctgaactgagcgaggttctgcatgggagttagtcgacgacggatactgcggcgtggaagttatggttacgcctatgcgcaccgaaatcatcatccgagccgccataaccgaagccgttctgggggagaagggtaggagaatcctggcactctcctcggtggttaagaagaggttcgagtctgccgagaacagtgttgagctttatgctgaaaacgtcaacgatatgggtctttgcgctatagcagatgctgagtctctccgctacaagctccatgggggcctaactgggctc

SEQ ID NO: 207764 - DNA, 522 bp, Glycine max
tacaaagggagcttacaaacccgagtctgaccgttcttgcatacatttggaatttgatatatcagggactggcttaacatatgaaactggagaccatgtgggtgtttatgctgataactgcgacgaaactgttgaagaaactgggaagttggtgggtcaagaattagatctattgttttctcttcacactgataaggaggatggcacttccctaggtggttctctcctgcctcctttccctggcccttgcacactgcgtactgcattagcacgctatgctgatctcttgaaccccccacgaaaggctgctttagttgctttagcttctcatgcatctgaacctagcgaagcagaaagattaaagttcctttcgtctcctcaggggaaggatgagtactccaaatgggtggttggaagccagagaagtctccttgaggtgatggctgagttttcatcaaccaaacctccactaggtgttttttttgtgcagtggccccttgttacagcctcgttattattcta

SEQ ID NO: 207765 - DNA, 493 bp, Glycine max
acagtgtagaacatccactgtattttttttaaaaaaaatacatgtttcattaataaaataattattcgttaccaattcctacacttaataatacatgaccatccactgtaaccggtatttgtttaccgatttctgagactaactatcacagagtcccccgataaataatcccacttcagagggatccaacctatcataataagagaatataaagataacagaaaataaaagaaaaaagggtaaatgtccagaaaagcatttcttctcaaggaaacctgtttaacctccactgttggtgtcctaaatttccggaaaggcagtgactaatctcaagaatatccttcagccaatcctgaatttagcatatcaaatagcaaggataccacaatctgggcagaagaatgatcagaaaaatcaccacacatcccttaggtaacgtgcatccatctgaagttttttcactatagcctcagcctttgtcgagtccacattt

SEQ ID NO: 207766 - DNA, 490 bp, Glycine max
  unsure (1)..(490): unsure at all n locations
ggcgagaaacaactaaacaataatttatttctatacacactgaaaatacacaacgaccacactgaaaatacatcaatgcaatggcgtcactcattctaatccaaaaactgacttatagaaaggaaagaaatgccatgaagtaaaaaggaaaaccaaatgaaacggacaaacatattccagactcaataatttttctacctcctcaccacatggtaccaatttgaacatcattgacctcactcacatgacaatctccggcttcagaatatttgacttgatctccttgtgcggcaaaacaacaccaccattgctgtaaatttcatcacatacatggacatcttctccaaggatggtcattattatccactcgagcccattgcccaacagttgaatgccacccaacaatactgctggatacacaagcatgcttcttaactcggactccacgcattatngtgcagcttttgagtctaacaccttgctcaataac

SEQ ID NO: 207767 - DNA, 493 bp, Glycine max
gtagtgtgcaaaataaaactcaagctcccagattctgttccaatgcctcccgtaccaatttgccccatcaaagttgggcacattgatgatgtccaagagctaagaaaaaccaagccaaggacaattcctcaaagatttgtacgagacttgacagaaagaccaacactcactacacctctttccccaccacatagtgacatgccagtcattgatttctctaagcttatcaaagggaacaaagaggaagtcctcactgaactttttaatcttgcaactgcttgtgaagagtggggattttttcaggtaattaatcatgaaattgacctcaatttgctggagagcatcgagaacctgagcagggagtttgtcatgctacctttggaagagaaacagaaatacgctatggcttcaggaacagtacaagggtatggacaagcttttgttttctcagaagaccaaaaactggactggtgcaacatgattgctcttggaa

SEQ ID NO: 207768 - DNA, 619 bp, Glycine max
gaagaaagaccttttcctccaattgcagagtcaaagtttaaggcctaagttctctcaactctcattcaacccacttccaccatcaacttcttccttttcttcaccccgtacattcacaaccctggctctcttcaaatctaagacaaaagccgctcctgctaagactaaggttacaaagccaaagcaaaaggttgaagatggtatctttggcacttctggaggatttggttttactaagcagaacgagctctctgtgggtcgtgttgctatgcttggatttgcagcatcattgttgggtgaaggaataactgggaaaggaatcctagcacaattaaacctggaaactggaatttccatttatgaagcggagcctcttcttctgtgtttcatcctcttcaccctgctaggagccattggaggtttaggtgaccgtggaaaatttgtcgatgacgaacctactactggaggtgttattccttcaggcaaaggcttcaaggaagcccctgggctcggttcaggtcctttattcggattcacgaaagcgaacgagctatttgtgggaagattggcttaattgggttcggtttttaagtgattgagaaattataccgaaagggag

SEQ ID NO: 207769 - DNA, 418 bp, Glycine max
acgacgaactcaatgcattttatgatacatgaggaaacgagtattttaaacacaagcaaacaaaagggttagcgtctaatcatcctccccgtcatctgaccccaatatgccagtttcaggatacagagcagcaatgaataaaaggagaacgttgaacaacactatgggctagatttcattgattggtaccccctggtaaatgtaaaaatggggtaaagctcccttcccaggaatcatttcttccatcgccgacaaaacaaaacccaattgagccggtctccccacaatatagatcgtacgctttcacgaatccgaataaaggacctgttccgagcccaagggcttccctgaaccctcttcctgatggaataacaacttcaatactatgtacgacatggacaaatattacatggttacc

SEQ ID NO: 207770 - DNA, 474 bp, Glycine max
tttcaaactctgagaaagaatggctgccaacacattgatgagtactgctatctcagccttcccatctctcctttcttcctcaaaatccagatttgccaccgcagttcctctttctagctttggtgtcaccaatgcctcttcttctcgcttttctatgagggctgactggatgccaggccagcctagacctccttaccttgatggttcagcacctggtgactttggattcgaccctcttcgtcttggtgaagtaccagagaatcttgagaggttcaaagagtcagaactcattcactgcagatgggccatgcttgctgttccagggattttggttccagaggcattgggcttaggcaactgggtaaaggctcaggaatgggcagcagttcctgggggccaaacgacctacctaggcaatccagttgcatggggcaccctacccaccattctggccattgaattccttgctatttc

SEQ ID NO: 207771 - DNA, 401 bp, Glycine max
aaaaaaacacattacacaatgccattccaactagtaaaaacttgggctccaaaactcacaccccccattaatttaaaccttgaaattttaagcattgtaattggaggtcgttaatgtacaaccatttgacagttcttttattgggctaggaaagttgggtcaagggatgataatgcagcaacagcatggggttacaagaaaacaaagggttgaaaaaaaaaaaaacaaaaaaaaaccctttttgacttaaggtgagcataccaaatcccctggattttgacattttttggggcctttgctcccaaattaatgtcggacgggtgaaaactttggaacacaccgataacctcgccggtttaagggttggtcttggggacactgaaggggattttccccttgga

SEQ ID NO: 207772 - DNA, 492 bp, Glycine max
atatatgactctggggttatttttgattttgcaaattaaattacacaatcacagccgtacatcacacatgagttgggcctcttccaacttaaaagcagaggataacattggcccatgacgcgacacatgcaccacctagtaatcataattttacatctttacatacaaaatacaaagactttaaattttaaaaagaagaaaagagataaacagatcatcttaatgaaatgaaaccaaaacccacaaacattggcttgatttttgttgttgttgttgttcccaacttgattaagcatgaaccgtttgattgaatcacttggacttgaagggaatggccctgattacaacctggtggtagagtgctgcaagagctgcaccgatgaatggtcccacccagaagatccagtgttcatcccaaccaaggtccttgttgaagatgatagcagcaccaagactacgagcagggttgataccagttccggtgatggggat

SEQ ID NO: 207773 - DNA, 504 bp, Glycine max
acacaatccaagttgaacctcttctgagctttgaccacgacaagaactaaaacttctccctcggcctcacatcacaacacaagaaagttcctattattttccaccactttccctctctcatctcttaaagcctccaaaagctgcaatctttcttcttctactgattttgttccctggctctccagtgaaccttgcatgtttcccagccccttttgattgttttccactagaagcagtgttttctgctaatagttaggaggttctaatggctgtgctgatgatttttcacatgtgtgctgcaatagctctgcctgcttatggagatgctttcatcggtgtcaacattggtacagatgccaccaacatgccaagtccaacagaggttgttgcccttcttaaggctcaaggtatccaacatgttagactctacgatgccgacagagccatgcttcgcactcttgccaacacaggaatccgtgtaattgtttctgatcccaatgatca

SEQ ID NO: 207774 - DNA, 421 bp, Glycine max
gcggacggaggttagagtaatttgtctccgaattctgcgaacgcgctgcccccactttcgtccttagaattcttgttggggacatcatagaggaatttgtgctgattagggttgttttctgcttttgatcagaacagaaggaagaatcacttagtatagatggttgcagatcactattctcctcctctgtttagtgtggctccaatgatggactggacagatcatcactataggactttggcacgcctcatatcgaaacatgcttggctctacacagagatgcttgcagctgaaacaattgtatatcaaaagggaaacctgattattggcgttttctccagatcaacatcctattgtgctataaatcggagggagttattttttatatttggcaaaagcaactgaacttgccaatgctttc

SEQ ID NO: 207775 - DNA, 328 bp, Glycine max
tttgtttttttttttgtatgacatgattaaggggattgatctggctccagaccatacattatctttataagataattaatacgcactatcatatgaaggttgatggggtcgccgaacattgcttttgaaaaatcctgcccctgatacatgaactaccaaccttaagtgttaaaacaaaagcgccacaataacacgcttttacttcagttgcaattgaatatctggcataatatgggttacagactaaatctgaactcgatggactataatagtctcctgctagagttatacgacgccctttcctcatgatcgaaatggggcacgcatt

SEQ ID NO: 207776 - DNA, 341 bp, Glycine max
ttcttttcctttattaagcacaccttcggcatgacccataccgtccctaccatcaccctttgagcggtatgctttaacaataaccacatctcatagggccgcaagtcaaaacatgcatggaacaccttctatactgaatcggcacactgtctttctatggacacttgatgacagtcgttctacaagatgactccaacctgcaggatgacagtacatttgtattgcatatcagattcataggtgcatttcttatgcttagttaaacgctcaccgttatgttcctactcatggatggattacgcgtcttctgcaatgaaaacttcactgccttcatccacgac

SEQ ID NO: 207777 - DNA, 532 bp, Glycine max
cttctagtatttttcaagtaacttaaggtttcaaacctaggaagttggaagtcatggcagcaacattgatggcagcaacaagttctggcactcttaaagcaactcctttcctaggccaaggcaagggtgccaatgccaatgctcttagggaatgtgttccatggaaagggggaagtacaccatgggcaatgatttgtggtatggaccagacagagtgaaatacttgggacccttttcagctcagaccccttcatacttgaaaggagaattcccaggggattatggatgggacactgctggcttatctgctgacccggaagcatttgccaagaacagggctcttgaggttatccatgggagatgggccatgcttggagcactaggatgcatcaccccagaggtgctagagaagtggttgagagtggacttcaaggagccagtgtggttcaaagctggagcccaaatattctcagaaggtgggcttgactatttggggaacccaaaccttgtacatgcacaaagcatcctggca

SEQ ID NO: 207778 - DNA, 367 bp, Glycine max
tttctttttttttttttttttttttttttttttttttttttttttttttttttttttttttctctttaaacattgctatgcctttttaattgggcgcttaaaacaaaacctggatcaacaaacaggggcctcccagtgtaaagaatgaagccctccaccttatgaatgccacttatccaacaatttttttcaacatatgctctccccctagatcacaaaggcaaccccaagggttttaaacccagggattcgggaaaaaaaaatcatttacgtttaaaaacctggggccaacttaggggcttaaacccaagcttttgaaaccacaggtgtactagggtgggccaaaagggtctccaaagggcctttt

SEQ ID NO: 207779 - DNA, 479 bp, Glycine max
cttcttcgtctcaaacctcttcgttccttcgattcattccatttcttccaaaatggccaaagacccagttcgcgttctcgtcactggagccgcagggcaaattggatatgctcttgtccctatgattgctaggggagtgatgctgggtcctgaccagcccgtgatcctccacatgcttgacattcctccagcagcagagtcgttgaatggggttaaaatggaattggtggatgctgcattccctcttcttaaaggtgttgttgctacaaccgatgtggttgaggcatgcactggggtcaatattgcagtgatggttggtggattccctagaaaagaaggtatggagaggaaggatgtgatgactaagaacgtctgcatttacaagtcccaggcttctgcccttgaaaagcatgctgctgccaactgcaaggttcttgttgttgctaacccagcacacaccaatgcattgatcttgaaag

SEQ ID NO: 207780 - DNA, 545 bp, Glycine max
  unsure (1)..(545): unsure at all n locations
aaagaatcagaatcaaaacttcaagtgagaatcatagacgaagcttgttttcatcttaatcgtaaccaaagcttcgcgaatatgccttcggagaagaatttaagaggggtgcttaggtcagaagtagataggtccctgtctaaagatagcatcatcatagtagattctttgaataacatcaagggttaccgatacgagctatggtgcttggctcgagcagcagggatcagatattgtgtggttttctgtgatgttgaagaaaccatttgcaggaaatggaatgaagaacgcagggagaaaggagaagccaattatgatgattcgatatttgaagatttggcaagaaggtttgagaaaccagatagaagaaaccggtgggattctccattgtttgaattatggccacacagagaagcaacagagaaatcttcccctgctgttgtagatgctgtctcctacttaaccaagaaagtggactccaaaaccagggatgttaagatactacaaccaactattgcaactcanacctcgcgtttttctgatgc

SEQ ID NO: 207781 - DNA, 503 bp, Glycine max
catcaacagagggtgttactaaatacctgatgccatctgttgctggttttcttttgcaaaaggaacttgattaccttgttggggcagtatcaaaccccaaaaggccatatgctgccattgttggcggttccaaagtctcatctaaaattggagtgattgagtcactttgaaaaaaagttgacatccttcttcttggtggaggaatgatcttgacattttacaacgcacatggtctttcagagggttcataccttgtagaagaagataagttggatcttgatacatcactgcttgcaaaagcctaggaatagggggtgtttttgttgttaccaagtgatgtggagattgcagacaaatttgctcctgatgctgatagcaaggagctgccagcatctgccatccatgatggctggatcggattggatgttgggtcacattctgttaaatcattcaatgtatcgttggatactacccaaaccatgatatggaaaggaccaatggga

SEQ ID NO: 207782 - DNA, 500 bp, Glycine max
cacgttctctccgggagaggtagagagaaaaattattatatactccaaataactccgtgtgttcatgtagggatctcagtcaaatagaaatataaaaattgattatgaaatgattggggggagtatatgcataatatattactgttataccaaccttgcaaattgacaagaagttcatgtccgttacactgtctccaagtcccaaatcaggcaagttggttccaaactccttcaatatcacctcctttttgtgaacaccaacaagcacaccaggctccttagcgagccccgtaaccctccccgacgccgtcaccaccagctttgtcccgagcaccgtatccgcgccgagaaacgttttcgcgaacggctccaccatcacccgggggctcgccgtgacaatgcaccgcctccccccgaacgcgttgaacacgcgccacgtggtggggtgcacgtcctcggcgtagaacctcggcagcacggagcgggacacgagctcgacg

SEQ ID NO: 207783 - DNA, 526 bp, Glycine max
gttctctcaccgtgaaagagagagagaggttaggctatggctgatgagagcgttgttgagtccccagtgaagaggcagagagatgatggtgaagaaaatggtgtctctgtttccatggacgcggagggtggcaaagaccctcttagtaacggtttatcatctgtgattcctgggtggttctctgaaatcagtgcaatgtggcctggagaggctcactccttgaaggtggaaaagattttgtttcaaggaaagtcagaataccaaaatgtcatggtcttccagtcatcaacatatggcaaggttcttgttttggatggagtaattcagctaacagaaagggatgaatgtgcctaccaagaaatgatcactcatcttcctctttgctctattccaaaccctaaaaaggttttggttatcggtggaggtgatggaggggtcatacgagaagtagcacgccattctttagtgaaaagatagacatttgtgaaattgacaagatgggtgttgatgtctccaaacaatactt

SEQ ID NO: 207784 - DNA, 584 bp, Glycine max
  unsure (1)..(584): unsure at all n locations
gcacttagtgctattcaataattacgaaaaaccaacagcgagtgttgtttttgtttggtccaggctggaccagggaatgaatagagatgagaggctttcggttgaagagaactgagttaagcggcgaagccaaacgcagaatcggcggcagaaattgccaccggaagcacgtcgaagacgggtgaaccaaacacaaaattccatccaccacttctcttttcaatccccaactcaaatctgtgaagaaaatctcaatttctaaattgtaattcttagcactactgctagtagtagtaaaaaaaaacaattagaaagtagtagagtgtttttttttctttttttcgtttgttttacttttaagatgggtgagaagagcaacgttggcggcgacgcgattaacacgacactgcttcacgggaagtacgagctgggccggctgttaggccacggaaccttcgcgaaggtgtaccacgcgcgccacctgaagacgggaaagagcgtggcgatgaaggtggtgggcaaagagaaggtggtgaaggtaggcatgatggagcanatcaagagagagatctcagccatgaaca

SEQ ID NO: 207785 - DNA, 328 bp, Glycine max
agctcttctgggtccgattaaccgactgttcgatccggaagagcgccagcatgggcaacctaacccactacgctggatccgggacggctcccgctccatgttggtgagaataacccgaggatacccggggagacgcccgttgaccgccgctacagcggccacggttactcctccgaggacttggaacccggatcttgttctagctaccgtgaaagaaagaaggcaggtccatggactgaggacgaacatataatgtcagggcttgcattgcataaggtgggcaaaggcgattgacgtatgattgaaggaactatgttatataaaggac

SEQ ID NO: 207786 - DNA, 523 bp, Glycine max
ctacactcagctattcttacctcttggcatgaccatccaaatgtcttcttttctcttagcttctcttgctgttctctttttcttctcctccttggagaagagttttgcctttcaagcactaggaaaggaggacacagaaagcaacaatcttcatcagtatactcatcgtgtacacctccgctcactccttgcttcatcttcttgcaactattgtaccaaaagtcccaaaacaaaagcatcattagaagtggtacacaaacatgggccatgctcccaactgaatgatcatgatggcaaagctaagtctacaacaccacacagtgacattctgaaccaagacagagaaagggtgaaggacattaactcaaggctctctaagaacttgagccaagatagtagcgttgaggaattggactcagctaccctaccagccaaatgaggtagccttagtgggactggaaattactttgtgggtgtgggtcttgggacacccaagagggacttgtctctcattactgacact

SEQ ID NO: 207787 - DNA, 514 bp, Glycine max
ggctgattttggtgactattttgggttgcttttcatttggctagcctccatcttcattttacgtgtaatattattcacaaagtctagcatcgagtcacgtctacccccaagtgctagagccctccctgtgtgaggacacctttaccttcctcaccaaagcttcccccaccaaggcattccacaacatctcaatacgttatggtcctttggtctacctcttgttcggttccaagccttgtgttcttgtttcatcacccgaaatggcaagacaatgcctcaaaacccacgaaacatgtttcctaaaccgacccaaaagaaccaatttggactacatcacatacgggtcttcagattttgtgctggcaccctatggaccctattggagcttcatgaagaggctttgcatgactgaactcctcggtggccgcatgcttcaccagcacctttccatttgagaagaagaaaccaagctgttttttaagagtatgatgaacaaggctttgtttggagagga

SEQ ID NO: 207788 - DNA, 522 bp, Glycine max
gcatgaatcaactgacaatttgatttgccccttcattatggtttggagtttaagttcatgcaacatttcatgctaattttgcacacaagaaaaaaaagggtatttttttcttcattaattaaatgcatggatagactaaaacatgcacaagcatagattagacttcagcaaaaggatggagtctagccgcagggaaacattgcaagggatgtgccctaggaagggccattcctggtccctcttccatgtcaaccattcccttcccttcttcaccaaccttccattcaaaacactgaatcattccagctagggtgttgggaataatctgcaaagctagtgaagcaccagggcagcttcttctcccagctccaaatgacaaaagttcaaaatgctgccccttcagatccaaaggactctgtccctcttcgttaaggaacctctctggcttaaactcaagtggattttcccaatagttagggtccctaccaatggcccacacatttacaaacaaagtggtcaatg

SEQ ID NO: 207789 - DNA, 538 bp, Glycine max
aaaaaagaaaatgatgctcggagagcaccatcgcgcgaatccaacggttcacgtgccaccgtggccaacccacgacgatccaacggccgagatgtactccgcgtttttaacaaacgacgtcaatgctggtgagtactctccgtactatcttcaagaagcactaacggctctgcagcgttttctgccgtctaacgaaacggacgctgactcggacacggaggctcaacccgacgcggcggtggacgcgtactcgtgcgaccatttccgcatgtacgagttcaaggtccgtcgatgcgcacgtggcaggtcacacgactggacggagtgtccgtacgcgcatcccggcgagaaggctcgacgccgggacccgagaaagttccactactccggcgcggcgtgcccggagtttcgcaagggaaactgcaagaaaggcgacacgtgcgagttcgcgcacggcgttttcgagtgctggctccacccggcgcgctattcgactcagtcttggcaggacggcacgagttgccggcggcgggtgtgc

SEQ ID NO: 207790 - DNA, 511 bp, Glycine max
ctcagagctgaagaagtgtttcgcttggggcttgaagtctctgcaccaagcgaagcaatgccactgccttctcctccgtctcggtctccaccaagacacctacctcatcaacctcctcctacgctcttccctccacttcgccgccacgcaatacgctaccgtcgttttcgcccaaaccccgcaccccaacatcttcctctacaacaccctcattcgcggcatggtctacaacgacgccttccgcgatgccgtttcggtctatgcctccatgcgccagcacggctttgccccggacaacttcaccttccctttcgtcctcaaagcctgcaccagactcccacattacttccacgtgggtctcagccttcattcccttgtaatcaaaactgggtgtgactgggacgtgttcgttaagaccggccttgtttggttgtactccaaaaacgggtttttaaccgatgcgcggcaggtggttgatgaaattcctgagaaaaatgttgtgtcttggact

SEQ ID NO: 207791 - DNA, 417 bp, Glycine max
cgccgtgtggattgattgccgggctgactagctcactggcgggcggccgcccttttttttctgtgtttaacaatacggaagcgaaaaatccaaaaaaaacccttgtattgtataacgaataatacatagttacacacatactacacgtgaatacgaatgacacacgcacatgttgcgaggttctcgcataccgatctctgagactacctgtcacagagcccgcggatcaaccattccgctttagagggacccaacctatcataataagagaagactgagacttccttggggtgaagaacaaaggggtaatgtccagaaaagcatgtgttataaaggaaacctgttaagcccgcactgtgggtgagcgaaattctcggaagggcagttgctaatctcaagaatatacttcagtgaatc

SEQ ID NO: 207792 - DNA, 530 bp, Glycine max
atacaacacgcctaggccaaacccaaatccaccgctctttattttcgtcttttctacccttcccggatcccaatccctaatctttctaccactctcactccaaaaatctctaattttttcatctgggaagatcggttgacgaatcgaggatccgatcgcttgcgaggaactagggtttcaatcgatcgcatcacacacaaacaatcatgtttagccggatgttcggtaaacctaaacaggaaaccaatgctgttgccactttggacaagctaaacgagacacttgaaatgctggagaaaaaggagaaagtgctccttaaaaaggtggcagcggaagttgaaaaggccaaagaattcacaagggggaagaacaaaagggcggcaatacaatgtctgaagaggaagaggttatatgaacagcaaatagagcagcttggaaatttccagttgcgtattcatgaccagatgatattgttggaaggtgctaaagctaccactgaaacagtagatgcattaagaactggagcagct

SEQ ID NO: 207793 - DNA, 517 bp, Glycine max
cccgcagaccccatgtcgcaggttccaaagccaacgctgaagctgcctcatacgttgtctcagtcttcacctcctcatacataccatcacacatagtttcctacgaggtttctctcacgtaccctttgtcacgttcgttggttctaataacgaacccttctacaaccttcactctccaccaagaaacctacgagggtgatccttatgctgacgtggcagatgaggttgtccccactttccacgcgtatgccaagtcaggcactgtggctgctcctgtgtgttatgtgaactatggaagagtggaggactatttgactctgaaggataaaaatggtgtgaatgtttcaggcactgttgtgttggcaaggcatgggaagatatatagaggggacattgtgaagaatgcttatgaagaaggtgctgttggggtggtgatatattcagataggaaggactatggtggtgaggaaaagtggtttcctgatgagaagtggctgccaccaagtggtgttcaggt

SEQ ID NO: 207794 - DNA, 402 bp, Glycine max
agctcttctgggtccaattaaccgactggttgatccggaagagcgccagcatgggcaacctaacccactacgctggatccgagtctgccccgctccatgtttgttagaataacccgggtacacccggggagacgcccgatcacgcctgcgatcgacgtcgaacggttacttcctccgaagactgccgaacccgaatcagcgttctggcgatcgagaaagatagaaagttgtcccatggactgaggacgaacatacaatgtttctgcacgcattgcataagctgcgctaaggcgattggcgttgaatggcgaggaactatgtcatagcaaggacgcctactccggtggcccgcactgcaaatacatatttcatgaggctacgcaatgtgtataggcgaaaaag

SEQ ID NO: 207795 - DNA, 518 bp, Glycine max
gcaaaaagaaagaatcccaggcgaggagaaagatggaggggaaggagcaggatgtgtcgttgggagcgaacaagttccccgagagacagccgattgggacggcggcgcagagccaagacgacggcaaggactaccaggagccggcgccggcgccgctggttgacccgacggagtttacgtcatggtcgttttacagagcagggatagcagagtttgtggccacttttctgtttctctacatcaccgtcttaaccgttatgggagtcgccggggctaagtctaagtgtagtaccgttgggattcaaggaatcgcttgggccttcggtggcatgatcttcgccctcgtttactgcaccgctggcatctcagggggacacataaacccggcggtgacatttgggctgtttttggcgaggaagttgtcgttgcccagggcgattttctacatcgtgatgcaatgcttgggtgctatttgtggcgctggcgtggtgaatggtttcgaggggaaaacaaaatac

SEQ ID NO: 207796 - DNA, 426 bp, Glycine max
ataaaattggggttaaagtcatcagccttgctgcattgaataagaatgaatcactaaatgggggtggaaagctttttgtggacaagcaccctaaccttagggtccgagttgttcatgggaacacgttaactgctgctgtcatactcaatgagatccctcaagatgtgaaggaggtgttcctaacaggagccacatccaagcttggaagagcaattgctctctacctttgccaaaagaaagtgaaagttctgatgttaactctctcaacagatagatttcagaggattcaaaaggaagcccctccagaaaatcaaagctatcttgtccaagtgacaaaataccaagctgcacaaaacttgcagacctggatcgttggtaagtggatcacgccagagagcaatactgggcaccacgtggaacccattt

SEQ ID NO: 207797 - DNA, 455 bp, Glycine max
gaagtaaccaacgcaaccacatcactctttctttcaaatctagggtttcctccttctgcaaccatcaatgtcggcaatcgcggctccccaacacagatcctcgaagacagagtcctacgtggacaataagcgcaaggaggatattcgtcatgccaacattgggggcgcacgctcagtcgccaacgcggtttcgaccagtctgggccctaagggcatggacaagatgatctccaccttctccgacgaggtcatcatcaccaacgacggcgccaccatcctcaacaagatgcaggtccttcagcccgccgacaagatgctcgtcgagctctccaagtcccaggactccgccgccggcgacggcaccaccaccgtcgtcgtcatcgctggcgccctcctcgagcagtgcctccttcttcttttccacggcattcaccccaccgtcgtatacgacgccc

SEQ ID NO: 207798 - DNA, 537 bp, Glycine max
  unsure (1)..(537): unsure at all n locations
attagatttccctctctctttctatctctagctattgcaaacctttccctctgccttcaaaataggcaaattcatgggtcttagagacattggtgcttcactgcccccagggtttcggttttacccgagtgatgaggagttggtccttcattacctttacaaaaagatcactaatgaggaagttctgaagggtaccttgatggaaattgatttacacacgtgcgagccatggcaactccctgaggtggctaagcttaatgcaaacgaatggtacttcttcagcttccgtgaccgtaaatatgcaactggatttcggaccaatcgtgcgacgacatctggctattggaaagcaacggggaaggatcgtacggtgcttgaccctgccacgcgtgaggttgtagggatgaggaagacattggtgttctacaggaacagggctccaaatggtatcaaaacgggttggatcatgcatgagtttcgcttggagacgccacatacgccccctaagaggactgtngtttgtgtagagtgtttcac

SEQ ID NO: 207799 - DNA, 531 bp, Glycine max
  unsure (1)..(531): unsure at all n locations
cttcacttctcttcttcaattcattctagttctggattccgactcgccgcattgactcggtccgggttggggtcgactcagttcggtttttcattctctcgcgaatctaatctataggaaaagctaagggcacatcacaatgaaggcattgattctggttggggggtttggaacaaggctgaggccactgacactcagttttcctaagcctcttgttgattttgctaacaaacctatgattctgcatcagatagaggcccttaaggccattggagttactgaggtggtgctagccatcaactaccaaccagaggttatgttgaatttcttgaaggattttgaaacaaagctcggcatcaagatcacatgttctcaggaaactgaaccattgggaacagcaggtcctctggctcttgccagggataagctgatagatgactctggagaacccttttttgttctcaacagtgatgttatcagtgagtatccactcaaagaaatgatngaattccatanaaaccatggaggaga

SEQ ID NO: 207800 - DNA, 447 bp, Glycine max
gacggagtagtaggggtcctgagatgcctgtaacagctgacgcaccacctctggttgctgttgtaaatgatgaattgtatgctgatgattatgccgacatggaagataacaagtctgacacggagagaaaagtgtggctaaccattgggagactgtcagaacgagcaacgtcaatgaatggctggggtcttgcattcagggcatgcggagataatcttattgtcattgatggacctaggactcatggcgagggctttattgaactcaatccatgggtgcctagggaaggacctccaccgtgggatctactcgctagaaaacgttccggccactgtgtctataattgtgctgtgacgggatgctgaagcatcgaactttcaaaacacattttgatgctccgagtccaacgagatgcgcaacattgaatgatccatttacacaagattc

SEQ ID NO: 207801 - DNA, 328 bp, Glycine max
atagtacttaaattatcttggttgttttggttgcattcttgaatttgatcattatctttgagaaattttgtacaacaggcaagggggggggcataaactactatgcaaaaacatgccctaatgtggagtacatagttgtcaaggaaatttaggatgccaaagctagggacagatctgttacagcagcaattctgcgaatgcactctcacgattgttttgctcgggggtgtgatgcctctgtgctgctaaaggcacaacgaagcaagagatcatgaaaagactggccaccaaatgtaagtttgcatgccctctatgctagtgaggcacc

SEQ ID NO: 207802 - DNA, 558 bp, Glycine max
ctcgagccgaatcggctcgagattctctatcactcttcaccttcctctgcgcaatttgtgcgcactccgtcgccgtcacctccgcggcatatccttccatccccggcacggaaaccggagagtgctccctccgcggcgtcggcgtcggcgacggtgttctggtccctccgcggcgagaagtgtacgaggaggggcgaatcttcgacatcacccacaggtatgtccccgagatgccggtgtgggactcgacggaggggctcgggcagcacttcctgtggctcgaaaagagcatgaagaatggctcgcgcgctaacaactccaacatgaagctcggtgttcacaccggcacccatgtcgacgcgcccggtcacttttacgacaattactacgacgccggcttcgatgttgactcactcgacctaacactcctcaatggccttgcacttttggttgatgttccacgggataaaaacattactgctgaggttatgaagtccttgaatatccctagaggtgtaagccgcgtgcttttcagaactttaaacactggcaggcaac

SEQ ID NO: 207803 - DNA, 457 bp, Glycine max
aataaaacattttacacagggcctttccaactagttaaaatttgggcttcaaaactcacccccccccttaatttaaaccttgaaatttttagccttgttatgggggggtttttttggacaaccttttgacattttttttattgggctaagaaagttggggcaagggatgattatgcaactgcagcttggggttaccaaaaaacgaaggcttgaaaaaaaaaaaaactcaaaaaaagccttttttgactcatggtgaacctaccaaatcccctggattttgacattctttggggccttttctcccaaataaatgtcggacgggtgaaaactttggaacccaccgattacctcggcggtcttaaggttgggcttggagacactgaaggggattttccccttgggtgatgagggccttttgttgttttccttggaaaggtccttcttattttttctttcc

SEQ ID NO: 207804 - DNA, 496 bp, Glycine max
attagatatgattgcaaagcaatggcatcgtcactacaagcagcagctactttcatgcaacccaccaagtttttgcagctaaagtctactcaggccatatctaaggcttttggtttggaacctgctggagttaataaggtcacatgctcccttcaggctgatcttaaggacttggctcacaagtgtgttgatgctaccaaaattgcaggctttgcccttgccacctctgctctcgttgtttctggggcaagtgctgaaggagtaccaaagcggttaacctttgacgaaatccagagcaagacctacttggaagtgaaggggacaggaacagcaaaccagtgtccaacaattgatggtggattggagtcatttgccttcaagcaagggaaatacaatgccaagaagttctgccttgagccaacttcattcacagtgaacgcagagggtgtggccaaaacgctccccctgagttcaaacacaaagcttatgacacgtt

SEQ ID NO: 207805 - DNA, 394 bp, Glycine max
aatagattaaccgtatatgtttttatctctagatattgcgaaccttgccctttggctataaaatcagcaaagacatgggttttagagacattggcgcttaactgcccccagggtttcagttctacaactgagacgagggagggatgcttttttgcctttacagaaagatcactattgatgaagttgtagagtggcacctttatggatattgacatacacacgtgcgagcaatggagactccctgtggtggcttaacttaatgcaaacgagaggagcttcttctgctgacgcgatcgtaaatatgctactggattggggaccaatacagctacgacatgtggttattgataagcaacagtgtaggatcgtccagtgcttgctccttacactcttg

SEQ ID NO: 207806 - DNA, 563 bp, Glycine max
  unsure (1)..(563): unsure at all n locations
acaaaacgcacaaaggattattattgcaatggcagaacaaaaccaaaaccagacaactgaagctggaaggcaccaagaggttggccacaagagccttctccagagtgatgctctttaccagtatattctggagaccagtgtctacccaagagaacctgaattcatgaatgaactgagagagttgacagcaaaacacccatggaacatcatgacaacctctgcagacgaagggcaattcttgaacatgctccttaagctcatcaatgccaagaacaccatggaaattggtgtctacactggatattcacttcttgccaccgctctcgctcttcctgaagatggaaagatcttggccatggatattaacagggagaattatgaattgggtttgccagtaattaagaaagctggtgttgaccacaaaattgaattcagagaaggtcctgctctcccagttcttgatgaaatggttaaagatgagaagaaccatgggagctatgacttcatctttgtggacgcagacanggacaactacctcaactaccacangaggttgatagagc

SEQ ID NO: 207807 - DNA, 557 bp, Glycine max
  unsure (1)..(557): unsure at all n locations
gcctcagtaatctgagagagaaacaaaaacaatgaaggtttccattgccaagttccactcccttcccctatgttttttccttctcttggccttcaacacaaaacccctcctagcagcagaaccagagccagtggttgataagcaagggaaccctttggagccaggagtagggtactacgtgtggccactttgggctgatgaaggaggcctcacactaggccaaacaaggaacaagacatgccctctttatgttatccgtgacccttcattcattggcaccccagtttcattcttagcaccaggccttgaccatgttccaacactcactgatctaaccattgatttccctgtggtgacagtgtgtaaccagccaacagtgtggaggctcaacaaggtagggtcagggttctggtttgtgagcaccagtggtgaccctaatgatatcactagcaagttcaagattgagaggcttgaaggggatcatgcttatgagatctacagcttcaagttctgccccagtgtgcctggtgcgctgtgtgctcctgtggngacttttg

SEQ ID NO: 207808 - DNA, 495 bp, Glycine max
gtagaacttgaacaatgtgttaagactaaggtggtaaggcaaaattccaaggggatagtatgattacagtaagactaatgttctcctttaactacttatgaaatcaaaactcatgctaaagaagtcttttacggtctatcttaaagctaaaacaaacaaaggggaatcggcagcaccgtcattaaatagtggatgtcatgcaaaatctacaactcgtccttgacatcattatcatcgttaacagcatcagtttcaggctttgaatcttctttcgcgtcactttcagcctctacttcagtgtcatcttcctcctcaactgttgcttcaggactgatgtccaggctagtcttcactgaatcataaatccgggaagcaaaatccttgggatcatcaagcaggaagccgctttaaagagtgcagtctggtacatcagctgtgctgtatgcttcacaccctcatcctcagggttctttactactctctctcggagctcct

SEQ ID NO: 207809 - DNA, 532 bp, Glycine max
gttgtgtgacacagaaattaagctagagcttcatagtttcttcttcttttctcaccttccttctctcccttcagacaaagggacaaaaaatcagtgtgtgagagagagagagagaaattccaaaaccatgtcccacagtcatctaagtttcgcctttgggattctatgtaacattgcctccttcgtgtgctttctggcaccactaccaacattttatagagtttgtaagaagaaatcaaccgaagggttccaatcaattccatatgtggctgcactcttcagtgcaatgctttggatcttttatgcctatgtgaagaccggagaaacgcttcttatcaccatcaatgcattcggttgcgtgattgagacaatttaccttgccgtatttatcacttactgcccgaagaaagctaggatgtcgacattgaggatgattgttttgttaaattttgggggattttgcacaattgtcctcttaacccacctactagcaaaaggagaagaagcccgtgtcaagcttctaggatggatt

SEQ ID NO: 207810 - DNA, 537 bp, Glycine max
gggggttgttattattcttcataatggttgcaacagctgctacggcgtcgtttctccctgtgccttcgccggacgctggaaaagggaaacccaagggtggtggtggcggcggcgtttctgtgaacctcggaggactcaaagagaagcaaggtttgtgcggttgcttgcaggtcaaggcaaacgcacaagcccctccgaagaccatggagaaggttgagaatgatttgccatggttgccgtcgtcgctgatttcgcacgccccgaggacttttataaatcagatacctgactggagcatgcttctggccgacatcaccaccgtgttcctcgcggcggagaagcagtggatgatgctggattggaagccgcgccggcccgacatgctcattgacccctttgggattgggaagatcgtgcaggacgggctcgtgttcatgcagaacttccccataaggtcttacgaaattggcgcagacaaaactgcgtcaatagagaccttaatgaatcatttgcacgagactgcacttaatcatgtta

SEQ ID NO: 207811 - DNA, 507 bp, Glycine max
gggggttgttattattcttcataatggttgcaacagctgctacggcgtcgtttctccctgtgccttcgccggacgctggaaaagggaaacccaagggtggtggtggcggcggcgtttctgtgaacctcggaggactcaaagagaagcaaggtttgtgcggttgcttgcaggtcaaggcaaacgcacaagcccctccgaagaccatggagaaggctgagaatgatttgccatggttgccgtcgtagtcgatttcgcacgccccgaggacttttataaatcagttacctgactggagcatgcttctggccgacatcaccaccgtgttcctcgcggcggagaagcagtggatgatgctggattggaagccgcgccgccccgacatgctcattgacccctttgggattgggaagatcgtgcatgacgggctcgtgttcatgcagaacttccccataaggtcttacgaaattggcgcagacaaaactgcgataatagagaccttaatgaatc

SEQ ID NO: 207812 - DNA, 443 bp, Glycine max
aagaaaaaacacataacttggactacttgtggctgaggataacaatttgttcaaaattcaagaaactacaaaattttgaacatgtctttgacaacaaacattgcacacaagaaaaactaggcactcaggttctatgaattacttctccagtgtatgaccttctaagcagcagggacctcagtatcattatcagacagagctggagcaggctggatgcattctgtttcctcctttggagaatggattgtgacaagatcggggaggggagtaataggaccctgtttccccttaggatcccaatcaagcatgaccttcaccttaatgcccagaacaccctgtctgaggagcacatgttttactgcagagtcaatggaatctttgacaggttgcacaaaacaaattatgaaccgtccttaaacatgataaaattggctctctgggct

SEQ ID NO: 207813 - DNA, 592 bp, Glycine max
cccagatcgtctactaccagacagggtccaggttggcatgactcaacatttcatgaagagttactctgatctcctcatcaggacatgccacaggcgcggtgtgcatgctatgggaggaatggcagcacagattccaatcaaagatgacccagttgcaaatgacgcagcactggaacttgtaaggaaggacaagcttagagaagtgaaggcaggccacgatggaacttgggctgcacatcctggcctcattccatcctgcatggaggttttcaacaacaacatgggcaatgctcccaaccagatagacacagtgaaacgcgatgatgctgcaaacttaactgaacaagacctcttgcagataccaacaggaaccctgaccatggaaggtctcagattgaatacaagggtgggcattcagtacttggcagcatggctcagcggaagcggttgcgtgcctatttacaacctcatggaagatgctgccactgctgagattagcagggtgcagaactggcagaggctcaagtatggagtggagctagatggcgatgggcttggagagaaagtgaacaaagaccttttcatttagtgg

SEQ ID NO: 207814 - DNA, 513 bp, Glycine max
tttggttcgtcttttttttttttttttagccataaaaaaggggcactaacacataaaattagaggactgatccaaaattcaatatgcggcccatggtctaaatccatgactaaaactgtaaagctcaaatatactatcctcctaaaaggattagatgttgaaatacaagttattccaatgaaagacaaactctctcgagtgatagttccttggtatcttagaaggagccttattcaaaattgaagctacacttctgtgggcaaaccatgggaacctactaacaaggacagtagccaagaaggagcgatggtttctaatttaggcatgactaagccaatgccttgtccttagaaagctcttctgcggtcaagtccaacttctttcttgagaactcatcaatgggaagtccttgaactattgtccattccccattggcacaagtgacagggaatgaatagatcagttcagctggaacattgtgggaaccataagaatatactcccattgacaccc

SEQ ID NO: 207815 - DNA, 439 bp, Glycine max
agtaatacaaataatttaaaaaggggattttacaaggggggaaagtaactttgtagctagctcagggacagccctttaatttatgaactacacacgcatcctgattttcatggatctattcattctattgttacatgtattgagtactgggggagccatgtattttacatatagcaaatggggtgatgtgctgcttcctccattgtaacacagcattgcaaaccgatacccttctgtccccaaagatgggagcattcctcttacagcgcctttggataatcagcccagaaatgagctatccatttatacgaacgtgccatcttctatggttgccttctccattatgatggtgattcctgatcgaatgtctaatccatcttctggtctatctgcttctagaaccccatctttgtttgcgatgatgacatctttgccgatc

SEQ ID NO: 207816 - DNA, 473 bp, Glycine max
cccaaggttccctctctacctcgttctccctccctcactctccgagcctactccaaaaccaccttcttacggccacccaaatccactctcaccgcctcaaaatccgtaactgttaacccttccccaacagagctatcccttgagaagctcttcggaccgccggagaccaccgtgtccctcgaaagatccagagtcttgaacggtttcaacattgtgctgagttactacgccaatgatgctcaggtgttgcaagccgagtttgtgaaaagcagtgtgaagatcgaggattgtcccttcgatggacttcctgaggtcactatcgttggccgctccaacgtctgaaaaatcttgctcctcagctccctaaagcgccagaagaagctcgccttgaattcgaagaaacctgatagggcttggagataggattatgctgtgctgatcgagggagagctcctagatgcgcatttcgagac

SEQ ID NO: 207817 - DNA, 450 bp, Glycine max
  unsure (1)..(450): unsure at all n locations
ataaaatccaactcggcctctttcgcacatatacccaaccctttaaatcaaaacctaagaatttgatatgagagagcgattgtgtttccgttagtatatataaacgaattgaagcgtatctactatcttacccttagacataacaatatcatctagctagctagctagctagcanatagcattgttaaaaaaccaaccacaaccagattggcctgagcccattgtccgggttcagtccttatccgaaaactgcgaagattcaatccctgaaaggtacatcaagccttctactgatagaccatccataaaaagttgtgattttgatgatgccaatattccaatcatcgaccttgggggactatttggtgctgaccaacatgtctcagcctcaattcttaagcaaatctcatatgcttgcaaagaatggggcttcttccaagtcactaatca

SEQ ID NO: 207818 - DNA, 417 bp, Glycine max
tcggcctttggtttttgttaacttttgtttttgtcatctaaacttagttagagtaagcgcactttgatcagcaacaatggcaacctactggagccatgctaagaaaaccatcccttcttccttggggaaaccagttactgttagtgccaaaacaacatcattatacctcacactctcaattaccatacctgtgttacccttcagctgatcaaaccactctctcaccgaaaaccttaagctgaactccactttgccacacttttgcttgtcttcagttcccaagaaatctttcacttgtagaagccaggctgagcctgttgactctgaaaaagtccaagagttgactgtgtatgatatcatcgagcgtgaccgaggaagccctgtttatcttcgattgagctataaaagtgtcaattc

SEQ ID NO: 207819 - DNA, 430 bp, Glycine max
tgctcgaccttttttcccccaacctatacacttcaccaccacaccacaaccctaccctatctctctgtcatggtcattggaggagccttccctcgtttcgacccaatcaccaaatgtagcacccaagaccgctccaaccagaccatcggctcggacctcgatggcacccttcttgtgatcccggagtgccttcccctactacttactcgccgccctcgaagccggcagcgtcttgcgagcccttcttctgttaaccttcgtcccgttcgtctacttcacgtacttcgagctcttcgaagccctagccatcaaaaccctaatcttcataacctgcgcggggcttaaactaaaagacgtcgagctcgtgtcccgctacgtgctgtcgaggttctacgccgaggacgtgcaccccaccacgtggcgcgtgttc

SEQ ID NO: 207820 - DNA, 530 bp, Glycine max
ttcttcctcttcctcagtagtgcgattttcgattctcttctctgcaactatgcctaaccctaaggtcttcttcgacatgaccatcggcggtcaacctgccggccgcatcgtgatggagctctacgccgacgtgactccgagcaccgccgagaacttccgcgcgctcttgaaccggcagaagggcgcccggcggagcggcaagccccttcactacaaaggctcgtccttccaccgcgtgatccctaacttcatgtgccagggcggcgacttcaccgccggaaacggcaccggaggcgagtcgatctacggcgccaagttcgccgacgagaacttcgtgaagaagcacactggtcccggcattctctccatggcgaacgccggtcccggaaccaacggatctcagtttttcatctgcacgacgaaaacggagtggctcgacggaaagcacgtcgtgttcggacaggttcgtgaggggatggacgtcgtcaatgagatagagaaggttggattcagcttcggcaggaccgcca

SEQ ID NO: 207821 - DNA, 415 bp, Glycine max
aggcgaataatagaggtcctaatttttattgaagggagctcatcatatttttttatgtggctcataacagactccattcactctatgaacgaaccacatgatcccgatattttagaacggaacggaaggatccaaaggggaagggtttccaaatgatatccataacaccgcaagcccctaaacgacatgggaaagagaaaaaaaagggaaaaacgaccccgaaagaaacggctcattgagagccaccgacacaaagataaaagcctagggtcaacgtcgtctatctaagagagatgaccacagacggcgacgactacaggcttggcggacctgccggaactggatccgaccttctatatctccttgacgacatccatcccctcgacgacctgttccgacactaagtgctttccgt

SEQ ID NO: 207822 - DNA, 487 bp, Glycine max
ctctcacttggtctttctctctctaaaatctcaggactcagattgagccctttttgacaaacctgtgctctttgattccagttggcttctcagacgtgtgttagtgaagtatttattgaccagagaatggctgggactgtgagtgaggagtatggagtgtgaaagtccgcggcgggtatttcaaatgggcagcgtcgtcaatctggggaagcattggcagagtggcggtcttctgagcaggtcgagaatggtatcgagtgcacttcccccccttactgggacactgatgatgaagatgatggaccacaacctttggcattatatggaagatctacggggaagatagaaaagttttctcatattaccaaaggggaacttcgctctagtgcatttgaggttggcggttacaaatggtacatttaaatctatccacaaggctgtgatgcttgccatcatctctcggtgttgctggtgtagctaatcatga

SEQ ID NO: 207823 - DNA, 354 bp, Glycine max
acaaaggaaacaacacagacacatttcatttacaagtacagagatgcccaaattaaaacctgactttgaaaatctataaaaaaattgtcataatgctttaatataaattacaagccctacacatgccacgagatccatctattatggattgatgttgcattctcgcaaatacacaagatcatagtcaacatactttgtccaataacctcggaacttgggaaaacttatctcaagccacggtttcatgtttgcattgtagtgtataacagcagcaaatttccttgtcctcaaaaacaactttagtaaatattaaaaggaatgggcggccgctggcgatctaaaactagtctcgag

SEQ ID NO: 207824 - DNA, 401 bp, Glycine max
gataaaacccagcatatccatgtttctaacgtcatgtaacatcaaatcaacgggacacaagatgggtatctcttgaaaaggctctgatcaaatcttggaaaggtatctatatttgcacaacgtacccaataacgaggactttgaccctgatacacgcctcaagaatcatgcattacacaaatatgatagcgtgccagccattcaattgacctttgcctcggggacacacacgcgagtactatatttagacaaaacgactgttaccacatcgatgaacatcgaccctgactgttaaacgatctaggagcgacaccggcgaatcttgaaatgcactccgaggagggcctcataggatgaacaacattcttatctgccacagcccattttatatagccagaaag

SEQ ID NO: 207825 - DNA, 388 bp, Glycine max
gcatcacatgacaattttattttcccctttaccatggcttgcagtttaattatatgctacattatacgctcattcttcacacgggagaaggaagggaagttttttgttcatgaataaaccgccccgatagactaaaccatgcgccttcattgtttagactttagcgcaaggatggcaccttgccgcttggaaacatatgcatggtatgggccctatgaagggccattcctggtccctcttccatgataaccattcccttcccttcttcaccaacctttcattcaaaacactgaatcattccaactccggcgttggggatcatctgcatagctagtgaagcacccgggcagcttgttctcccagctccgaatgacaaaagttcaaaatg

SEQ ID NO: 207826 - DNA, 408 bp, Glycine max
gagaaaacacagcgtatcgttgtttttaatgagatggaacaactaatgcacgggagacttgatgggaatggcttaaaaaggcatggattatataatggaaagggttcagtcatgccacaaggtacacgctttcctgttctttgaccataatggcggcagcaaaatctttgtattacataaatatgatggcgtgcgatccctcccatagtccgttgctacggtgacataattgctccatctttcttcagaaaatgcaactgtctcacaaccaaggaagatggatttctaccgattcacgctctgcgaggtcgaccgtgcgtttcttgaagctcatgatatgggggcccttctacgatggactctattcatgtctgcccaagacacttttaatgactaagattgtctgag

SEQ ID NO: 207827 - DNA, 337 bp, Glycine max
tttggttttttttttatgataaaaatatacattaatataaataatttgaataacacgatttctcttggatcctacatatttatacattcgttcataaatgagatgatattatcttgtacacgttcataacagacacgagtgggataattaagtactcatatacatgatactcataatagtacatcgcaatcacaactttttttcgctggccgttcaaacggctccagatactatcaatgtcctaaatcagtagagggatgtcgatcaattttccacaccaatgttttaaacccagagatgctacagttgataaggtgaagggttccttccttccgga

SEQ ID NO: 207828 - DNA, 511 bp, Glycine max
ataataaccggtttttctcacttttctttttcttttgggctttcagtttcacataacaaaccgtttgcagaacatcccataaaagcttagcttgtattcagtttctcttctcccaacgtttttgtcgctagtaacagaatattacaaagtaacggctttctcagtggagcgcttgatttgggttggtgggtcaacttcaagtttcaatttttttttcatttttgtctggtcgattgagaaggctcagttgcagagacggtgggggtgggaaggttatggctttttgcccaattttttgttgcggaaatagttcggatcgcaaaggacgagggaagaaacaacctccatggcgggtgttttctttgaaggaattacactccgctacaaataatttcaactatgataacaagctcggcgaagggggattcggcagtgtgtactggggccagctctgggatggatcgcaaattgcagtgaaaagattgatagtttggagcaacaaagcagacat

SEQ ID NO: 207829 - DNA, 472 bp, Glycine max
aagataaaacaaataacttagaatacttgtaactgagtgtaacaatttcttaaaactaagaacactacaagatatggaacatgtctttgacaacaaacattgcacacaagaaaaactaggcactcagctactatgaagaacttctacagtgtataacttttcacgcacacagggaccttaatatcattagcagccaaaactggagcaggctggatgtattcttcttcctactttggagaatggattgggacaagatcagggaggggagttctaggaccctgttttcccttaggatcccaatcacgcatgaatttcatcttaatggctagaacaccctgttttacgagcacatgtctcactgcagagacaatggcatcgttgactggttgtccagaagaaatcatgtcaccatccttaaacttcatagattcgggtatctgggctttgacctgaacacttacaatgaccttgc

SEQ ID NO: 207830 - DNA, 534 bp, Glycine max
ggtattctctgcgccgtcatgctcgacaccaaggggcctgagattcgaactgggtttctcaaggacagtaagcctatccaactgaaacaaggtaatgaaataaccatttccactgactatgacctaaagggtgatgagaagacgatttgtatgagctacaaaaagctgcctgaggatgtgaggcctgggatggtcatactctgcgcggatggcaccatatcatttacaggtttatcatgtgacaaacaagcgggtttggttcaatgccgatgcgagaactctgccactcttggtgagaggaagaatgttaatttgcctggagtgatagtggatcttccaactatgacagacaaagacaaggaagatatcttggcctgcggagttcccaataaaattgacatgatggctctttcttttgttcgaaaaggttctgacctggtgggagtcacgaaagttctgggaaaacatgccaagaacattatgctcatgtctgaggtcgaaaaccaagaaggggtttgcaaatttgatgaaatc

SEQ ID NO: 207831 - DNA, 497 bp, Glycine max
gcacataccaaatggttttttgttgatgtcaaaggtccttgcaaggctcctattgaggttcaagttgatggaacaattcaagcacctgcaaacccaactgaccttaaggcggctcatcaatggtttgttgttcaatatgttaactctttcaccctgtccggtaaaggtgattttgatggtcaaggggcaactgcttggaaacaaaatgattgtacaacaaacaaggactgcaagatgctttgcatgaattttggttttaatttcctcaataattcaattgtccgtgacattacttccaaggatagcaaaaactttcatgtgaatgttttggggtgcaacaatttcacatttgatgggtttaaagttagtgcaccaaaagatagccccaacaccgacggaatccacattggaagatccacagatgtgaagattcttaacacagacattgctactcgagatgactgtgtctcattgggtgatggtagcaaaaatataac

SEQ ID NO: 207832 - DNA, 277 bp, Glycine max
agccaatccttgattttctgagcatccatacacacatagtctggatttggaaaactctaagggtgcagataaaatgtgaaccaggacgggacgagcgcacgtgaacaaacaccttctgtcttacataaccggaaaccaccttaaacacgcagatgtcatgggccttgactgactcgtttgggatcataggaccctcttccctccaaacaaacgtggtgagccaactgcgatgattaatgactgtaaggaccctgtatcgctcgcttcaagaggattg

SEQ ID NO: 207833 - DNA, 473 bp, Glycine max
atccgtcttccattcatcaacaaccactctctctcccctctctgcagcaaaaccaattctccggcgacatctccggtcaggttccggcagcctctccggcgactcggcatggcaactcaatgaatgcggaatcaccgccggggctcctcatgtcggcttcctgcctctccgactacgacctcctctgcggagaggactcctacggaatcctctccggagagtcgccggagtgctccttctgcgacatcgactcctcacctcctgcgccgtcgccgacgacagaggattgttattcgatcgcgagcttcatcgagcacgagcgcaacttcgttccgggattccagtacctgacgcggttccaatctcgctccctggacgccaacgccagagaagaatcacttggatggattctcaaggtacacacgtactatggcttttagcctttgacggcgtaccgtagccgaaactatatg

SEQ ID NO: 207834 - DNA, 508 bp, Glycine max
  unsure (1)..(508): unsure at all n locations
gcttacaacgcctaccgcagattgtcgtatttggtttcccatgcgctggttgcgttgcccgcattagcatttctctcgctggctttcgcggcagccacgttttgggccgtgggcctggacggtggaatatcgggctttttgttttattttctgataatattcgcttcgttttgggccgggaactcgttcgtgacgtttctttcgggggtggtgcctcacgtgatgctgggttacaccatcgtggttgcgattctggcatacttcttgctcttcagtggcttcttcattaacagggataggattcccagttactggatatggntccactacttgtcgttggtgaagtacccatacgaagcggttctgcagaacgagttcgatgaccccgtcaagtgcttcgtgaggggtgttcagatattcgataacactccgcttggctcgggtgccgagcctctgaaggtgaagcntttggagaccatgagcagcacgctgggaacgaagatcacca

SEQ ID NO: 207835 - DNA, 374 bp, Glycine max
cattggaggagccttccctcgtttcgacccaatcaccaaatgtagcacccaagaccgctacaaccataccatagcctgggaccgcaatggcaccctccttgtcgcccggagcgcctatcgctactacttcctcgtcgtcctcgaagacggcagcgatttacgagccctacttataataaccttccgccccttcgtgtactacacgtacttttgactctccgaaaccctagccatcaaaaccctaatcatcataaccttggcggggcttaaactaaaagacgtcgagcacgtgtcccgctccgagctgacgaggttctactccgaggacgtgcacccgaccacgtggcgcgtgctcaactcgttcggagggaggc

SEQ ID NO: 207836 - DNA, 410 bp, Glycine max
cgaacaacggcgacaaatcgaacccctccgagagcgaaatgatgtgaaaagcattcatcgtagtaaaaacctcctgctcatgctgtttaatcttctcctccagatccaattcctctcttttctttcccatcaagttcttcggcacgggtttcttgaaccacgacgagtccatgatttttgaaattgtgattcgcgtgttcgggttggggtcgaggagcttggtgatgaccctccgcgcctcggaggagaaccacggcggacacttgaagtcaccgcggtaaatttttttgtacaaggccaccaggttgtcatcctggaagggtaaaaaaccagcaagaagtccgtagaggattacgccacaagaccaaatatcggccttggcgccgtcgtagcctcttttcccaatcacc

SEQ ID NO: 207837 - DNA, 562 bp, Glycine max
gactagtgttattctccggtggctccttccttccttcgccatggcgttctacgtgctctcgcgtcgtttatcagctggatccaactcaacgacgctcctcgccctgcgttttgcttcctcttccagatccttctcctcttccttcagggaagaaagagatacctttggacccattcaagttccctccgacaaattatggggagcacaaactcaaagatcgttgcagaacttcgacatcggtgggccccgcgaacgcatgcccgaacccatcattcgcgcttttggcgtcttgaagaaatgcgctgctaaggtgaacatggagtatggtcttgatcccatcgtgggagaagcaataatgcaagcggcacaagacgtagccgagggaaaactaaacgaacattttcctctcgttgtatggcaaactggcagtggcactcaaagtaacatgaatgctaacgaggttattgcaaaccgagcagcagagattcttggccataagcgcggtgggaagttcgtgcacccaaatgaccatgtcaatagatcgcagtcttctaatgataca

SEQ ID NO: 207838 - DNA, 126 bp, Glycine max
aatcaaagcaagcttctgcatgtttattatgccaggtatcaacaagtcattgggagacaagatggctatctctggagaaggccctgatgaaatcctaggagggtttctatgtttgcacaaggcacc

SEQ ID NO: 207839 - DNA, 605 bp, Glycine max
  unsure (1)..(605): unsure at all n locations
ctccagcatacccttttggccggagatgagtaatagtaattgggtgttggattatgattatctagacaacattcctctcaccacccttgaaccacccaatttctcttggtcttcctcctctcctcctactacactcagtgtggagctagatgactcatttggaatgttggatggtctcaaggaaaacaggtcaagacaacgtttgaggccatctgattctaaagcatgtagagagaaaatgcgaagggatcgacttaatgacaggtttatggaactggggtctatcttggaccctagaaagcctctcaaaatggacaaggctgttatattaagtgatgcagttcgagttgtttctcacttacgagaggaagctcaaaagctgagggagtccactgagaatctacaagagaaaatcaatgcattgaaggatgagaaaaatgagcttcgcgatgagaagcagcgactaanagtagagaaagaaaaccttgagcagaaggttaaatgcttgagttcacaacctagctcttctgctgcaacaaagacaagttgttagcagcaagctggtgccattcatgggctacccaagagttggcatgtggcagttt

SEQ ID NO: 207840 - DNA, 557 bp, Glycine max
gggtaccactaccacctttccgccttcagccgtttcaaccaccagcaaatggctgggcttcgtggcggccgtgtggattcaatgcatctccggcaacaactacactttctcaaactactccgacgccctcaaatccctcatgcaccttactcagctacaactcaacaacctctccgtcgctaaagacgttggcaaagcctttgggcttctcgcgggcctggcctccgaccgcttacccacttgggccattctactcataggctccgtcgaaggcctaattggctacggaacccaatggctcgttgttagccaaagaattcaacccctcccctactggcagatgtgtgtgtttctgtgcatgggagggaacagcacgacgtggatgaacactgccgttttggtaacatccattcggaacttccgttcaaacagaggacccgtttcggtgattctgaaaggctttgtagggttgagcactgcgatattcactactctctgttccgctctcttcgccgacgatcctggctccttactcatcatgctctctgtcattccct

SEQ ID NO: 207841 - DNA, 471 bp, Glycine max
cggaaggcactacactggaataacatcccgacctacatgctcctattccggaggctcggccttttgtttttgtttttcttaccctcttttttcgaatctgaatcgaaatggcttaggagactgagacgtctgctttttaggccgtgatcaaccagctcctcagtctaatcatcaacaccttctacagcatcaaggagatctttcttcgagagctcatcagcaatgcctgctgatgactttggacaagattcgatttgagagtcttacagacaagagcacgcttgatgctcagccagagttgatcattcacattattcctgacaagaccaacatctcattgtctatcattgacagtggtattggcatgactaaaggcgatttggtgaataacctcggtactattgcaaggtctgcgaccaacgaattcatggaagccctgtctgctggtgctgttgagagcatgattggaca

SEQ ID NO: 207842 - DNA, 480 bp, Glycine max
aggcaggtgaggtgaattgaggttactgcaatgtcttctgcttgcgcgaccttgaaatccaatacccatttaccaaactctgagaagggctctctaggagaaagaataatgaggtggtcttcaaacaacagtagcccttggtaaatgaatcacctcgtctattcgttctacaagccacaagagggtgaaacatggggccggtgttgcatctgctgtcctcacttcaaacaatgccaaagaatcactgaccttgccagtgcctttctttttaagaagaagggctgatccaaagaatgttatttccatcatattgggaggaggacctgggacacatctttttcctgtcaccagacgtgctgccacacctgctgttgctgtggggggatgctcccggcttatagacattcctatgagcaactgactgaacagtggcatcaacaaaatatttgtgctgacacagttcaactctgcatccctcaa

SEQ ID NO: 207843 - DNA, 341 bp, Glycine max
cccaacccaatgttcaccttcgcccacaacaaattccattcctggatctcctccttcagcatcgctgctaactttactttccattcatgtgacttcctccccgagaaaaaaatggcgaacgcagcatatagcctggccgggcatgatgactgcaagctaaagtttgttggagctcaacgcgaagaggacgtaccggcttatctgctttaagattgaggagaagcagaaccgcgtcattgtggagaaactgggcgagcctgcagatggttatgatgatttcgctgccagtatttctgccgacgagtgtcgatgtgctgttcatgattctgattacagtcact

SEQ ID NO: 207844 - DNA, 341 bp, Glycine max
cccaacccaatgttcaccatctcctacgtcaaattcgattcctggatctcctgattgaggatgagaagatacctttactttacattcatgagctttctgccatagagaaaaatgggaagagctgaatagaggcctggctctggcatgatgactgatagctaaagtttgtgtggctcaacgcgaaggggacgtaccgacttatattctttattatagaagagaagcagaaccgtttcattgtctagaaactaggctagcctgcagatgattatcatgatttctctgcaagtatttctgacgacgagtgtaaagctgctgttcatgattctgagtaattgact

SEQ ID NO: 207845 - DNA, 427 bp, Glycine max
tgagaaacgaggagctagatcagttacgtggcattgggcaaggtgaactcctgagctgtgagagaatatacgattacgatgcgtacaatgatcttggagatcctgatagcggcgacaacctcaagagacccgttcttggtggcaatcaacatccatacccaaggcgttgcataacaggaaggcctcgttgcgacaaagatccattatcggagaaaagaagtagtacggtttacgttcctagagacgaaggcttgtcggaagatcatcaactaacgttctcgacaaatactttatatgatgggttgaaagctgctcgtgccggcgctgaagacattgatagttgacaagaatctagggtctactgtgtgctcagccatatgatgacctgttccatgaaggcctttactcgcctgctgtaaaaggcatc

SEQ ID NO: 207846 - DNA, 367 bp, Glycine max
gccaataagtcactattcatatgaggtatcgatcattcattaacaagtgacatgtgtgttaaacaatacaccttaatgctagcagccaggctagcgccgatccactgtcatgcacaccacacactcaaaccgagatgctgtacggaacccccttatctgggcaccctgctccgatgaaggcttgaagaagtcatagggcacaataccgggaccgatccagctcctactggccctatccgaattcctggcgtcaataatgactatgcgctcaatgaactaccctctaaactcgtcaaacgcggacttaacaaggggtttctgctggcacgccgggtacacagtcctcctgagatacttctggtccggc

SEQ ID NO: 207847 - DNA, 347 bp, Glycine max
ggtgggctttacgtatacccataaaccttggttaagaaccgtgaactcagggggatccacatgaggtgggccatgctcggcgccttgcactgcgtactcacgcagctgctgtgccgcaacgaagagaagcttggagaagccgtgtagtttaaggacggttccctgatcttcatcgagggcggactgcgctactagtgcatcccgagccggatccacgcccagagcatcctcggcatctgggccacacaagatatcctaatgggttccgttcaaggtcaccgcatcgctggtggccccctcggagagggcactgacccaatctagccaagtggaagcttcgacccatt

SEQ ID NO: 207848 - DNA, 544 bp, Glycine max
ttcgtttttttttttgtaaaaagcaagtaacattaagttggattcggatacacaagataattcacattatctgaagtacttcaccaaacacaaatctaaaaactctcaaaagtcatttcgttctttgacgctcactttccggggacgaagttggtggcataggcccaggcgttgttgttgacagggtcagcaaggtgatcggcgaggttctccaatggaccctttccggtgacaatggcctgaacaaagaagccaaacatagagaacatggccaatcgtccgttcttgagttccttcaccttaagctcagcaaaagcctctgggtcatcagcaaggcccaatgggtcgaagctgccacctgggtagattgggtcagtgacctcaccgagggggccaccagcaatacggtaaccttcaacggcacccattaggataacttgtgtggcccagatggcgaggatgctctgggcgtggatcaggcttgggttgcccaagtagtcgagcccaccctcgctgaagatctgggacccggccttgaaccaca

SEQ ID NO: 207849 - DNA, 528 bp, Glycine max
aataaagacagtgccacttattttcatttataatagaggcaaatataaggtatacatagatgagccagctagctaataagacataggcaactgaacacaacacatgatatccccacaaaggataaatcataagacgtacaaaagcacaaaggtaaggactattattaattcatggcccttaaaaaatactaaaaacaccaagggggcatgcaaatgatacatatgtaattattattaattaagcaagaatctccttcaaaggcttggcctcaagttttgccttctgatcaagttcttgcaaatgcttttcattctcaaggtcctgcaaatgcttttccttagccagcttcttcatccttgcaatctcaatgtccttgctcatcttcctcctgtacatttcagcaaaagtgattggttcctccatcacaggcttctctacttctcttatcttcagagggtaaacaagtgcatttggtgctgggttttgaaaagtggctatggacaaacggctatggtttgagttcacca

SEQ ID NO: 207850 - DNA, 515 bp, Glycine max
caaattgagtgatcgtgatggcaccaaaggcagagaagaagccagcggagaagaagcccgcggaggagaagaagtcgacggtgggagacaaggctccggcggagaagaagccaaaggccggaaagaagcttccgaaggagggaggcgccggcggagaagggaagaagaagaagagaaacaagaagagcgtggagacatacaagatctacatcttcaaggttctgaagcaggtccaccctgacattggtatctcaagcaaggccatgggaatcatgaacagcttcatcaacgacatcttcgagaagcttgcccaggaatcttctagacttgcccgttacaacatgaagcccaccatcacttcaagggaaattcagaccgcggtcaggcttgtgctgcccggtgaattggccaagcacgccgtctctgagggtaccaaggctgtcaccaagttcactagctcttgaactgactattatgccccttcgcttcgatctaagtgtctctggtaggaatat

SEQ ID NO: 207851 - DNA, 486 bp, Glycine max
gataggaataatatacgtctctgtattagcaactaattccatacaaagaaggatcaacaaatcccatattcttcacttacaaattgctttcaccaaaaagaaaaaataaaccaacacttcaacataaaacatattcctaacagagacacctagatcgaagcgaaggggcataatagtcagttcaagagctagtgaacttggtgacagccttggtaccctcagagacggcgtgcttggccaattcaccgggcagcacaagcctgaccgcggtctgaatttcccttgaagtgatggtgggcttcttgttgtaacgggcaagtctagaagattcctgggcatgcttctcgaagatgccgctgatgaagctgttcatgattcccatggccttgcttgagataccaatgtcagggtggacctgcttcagaaccttgaagatgtagatcttgtatgtctccacgctcttcctgattctcttcatcttcttcc

SEQ ID NO: 207852 - DNA, 436 bp, Glycine max
caccacttcttccacctgatatatgaaaggcggtttatgtagctgtaatgcaacgggcgagcaaatctaacagatcgggttatgaatcccttttgaaagtatataaggaagctgacctaagtcaggagaaaacgcgtatcctgggctctctggcatcttcacgtgatccagatctaatgcttgaagctctaaacttcatgtggtcatctgaggatcgtaggcaggatgctggtgttggacttgctgttacccgggaaggacgagatgttgcttgggcatggcttaaggaaaattgggaacacctcataaaaacatatggttcatgatttttgataacttggtttgtctgtgcagatgtgtcaccgtttgcttgctttgagaaggccatggaggtagaggaattctttgctacccacgctatgccatccattgctag

SEQ ID NO: 207853 - DNA, 441 bp, Glycine max
tttatttattgtttttgtctagtacatgtttcgatcttctcactataatgctaatgtgttcttcacctctccaaaacttgtagctgacgatcttattactcagcaaaaattcatggaagttccaatcaagtctccggcaaaactcacccttagggtggctcttacttgtatcatggcggccaccgacggagcgatttgtggctatgaccatggcgatgcaggtggagtgacctgcatggattgcttcctgcagaagctcttcccatctgtatatgaataggagtctcgcgtgaagccttcttcaaaccagtactgcatattcaacagtcagatactgacactgcttacatcttccctttatctaagtgctcttgctgccattcttggggcatgcagcataacccgaatgttgagaacacgtgcaaccatgatcatggctgg

SEQ ID NO: 207854 - DNA, 543 bp, Glycine max
aatcaagttgataatcaattgttaaaggtctttgcagtatacaaagtgaagatttcatcttaaaatgttatgtacattagagtatcataaagaaagctaggccaataaattcaagttgttaaagcagacgtggataaatcaaagactgaaaccaacacaactagtaatcaacatttggagttcattttgtcgttttggatggggttgtccgactccaaaaatttgccccagatggggtgtttctgccaaaccatactcatttcctcaagtgggatgccctttgtctcaggcaataacttgtagatgaataaggtcatgatcaccacaaagcacccaaagaagatgaacaaaccaaacttcatgtgacagagcattgatgtgaagaattgagctatgaagaaagtgctgatcatgttgacaccaactgtgatactctgagcagcaggtctaatctcaaggggaaagatttcactaggtatcaaccagcctagaggaccccatgaccaagcaaaacctgaaacatacacacagatgatccccaca

SEQ ID NO: 207855 - DNA, 536 bp, Glycine max
  unsure (1)..(536): unsure at all n locations
cacgattccacgaccttattttggagccgcggtggcggtagcggtggccggcgattgtagcggcgtaggagcaagaaatggttttatgttgtgaggaagattgttaagctgtgggaatatgtcattgagaagcatagtccgtgaactcaaggagatgagagatggaataggaagcacatcaaagcggggtgcagaaagcaagcatcggctcagtcggacaaagtcacatgtagctccagatgttcttgcaactccatttgaacctattcaacagggacaatgggcaaatctaccatcagaattgcttttggacataatccagagggtcgaagagagtgagacatcttggcctgcccgtgctgttgttgtcttttgtgcttcagtatgtaaatcatggaggtccattacaagagagattgtcaagactcctgaacaatgtggaaggatcacatttcccatttcattgaagcagcccggtccgcgtgattctccaatacagtgctttatcaggagggacaaagaanactctacatatc

SEQ ID NO: 207856 - DNA, 474 bp, Glycine max
acaggaggacaaatagatagacagatggaaaaagagattagagagccagtctattaggagagggatacagcaatttgacagtggaagataagagcagggcaaatcgactgaagaggtcgtaaacgtagccaaaggcagatacattggagtgaggcttcacctgtgagccacaggcctgtttacaggcaaagctgctcaagcagatggcgtaggcttgaaacgttgagagtggataacagtaagccatggtgaatatgtcttttccaatctttccaaactgcgagatgaccttcactggctcctcggcagagatattatgagatggatcagcagctggtacaagttgaaagttcttaacagaagccactgaaacgcgacccttgaagttcagacaccagcactgtagctgatcatgccatctgggagccttgttattcagagctaattgctcggttgagccttgggtcaatactg

SEQ ID NO: 207857 - DNA, 449 bp, Glycine max
ctcaaactcactgacagtttattatctatgggggttgctaggttaattaatacaaatcagggggatgcgatgttggctatgccagctaatgctgttcacaagctatggaaatggcagagaaatgagcggaacactactgggaaggccactgcaagtattcaaccacaactatggcaaccatctagtggaatactgatgactaatgatataagtgatactaacccagaggatgctgcgtcatgttttgcactgtcaaagaatgactcatatgttatgtctgcttcaggggggaaaacttctctattcaatatgatgacatttaagacaatgacaactttcatgccaccttcaccagctgcgacattacttgcatttcatcctcaagacaataatattattgctattggcatggaggactcttccatacaaatctataatgctagagtgga

SEQ ID NO: 207858 - DNA, 211 bp, Glycine max
attattatcaggaacagaggaaaatataacattcaacacaagaactgaaccacaatataaaaggttctactcggcacttcacctctgcatgtacatagaactggctgctgatgatccagctggcacagccactgctatctattcatcatccacagactcagaacatgatggactaaaccttgagggccagggaaacagaaccggacaacct

SEQ ID NO: 207859 - DNA, 501 bp, Glycine max
gaaataactggtctgatatcagagctctgacttctcatgcacgctgccctcggccgggaactcggctcgcgcttatagcttcatcccaaaaagctcttttccttctaaatttgattccttagttcagcaggctattattatatatggcttcttcaccttcctgagaagacaaaaacctagagggagtagctggtggtgccggagagaaacccattccacttggtgagaacgttctgcagaagcatgctgcattcttggacttgaataaagatggtgtcatctacccatggtagacttgtaaagggttgcgtgaaatcgggactggggttttgctgtccgttggaggtgctattttcatcaatgtgtatctcagtcagagtactcgtgccggaaagtttccatctatacttatttcaattgaaattaaaaatatccaacgcggcaaacacggcagtgacactggagtctacgatactgaaggaaggtttgtaccttcaaaat

SEQ ID NO: 207860 - DNA, 616 bp, Glycine max
attataaaattgtattctttattttactgtatacgtgcttttcggatgaattcaaacatgatagatgacacataagtttgacttgacatatacattattgatgaacataaaaataaacagacactttgaatattgcgactaacttactagcatataaattcataaaaataaccaattttgctgagatcgacaagtaacttcttcttttcacatacgtgtctgaaaaatattactacttctctttgcctgaagagtgttgttttttcagttgttcaaataaacttccatcgtaaacacctcggattgtttctttctgcagtaatccactcttatctttagcaagtttgtaaagaattttccattcaaccacactaccaatccttcctgagaaatctttaggctctctatttgcctttatcatctccgttaactcatcatatgtcaaagcatttggatgtgtatgtgcatgcttgttaaaaatttcttcatattctgaaggtacaaaccttccttcagtatcgtagactccagtgtcactgccgtgttttgcgcgttggatatttttaatttcaattggaaaaagttagatggaaacttccgggacgagtacttgact

SEQ ID NO: 207861 - DNA, 232 bp, Glycine max
ggtgaattcttggttctccgatcatccttcgacccaattatttttctctgcgtgcagcaacggaaccaggtcactctgctccctctcagctcttctaaccagaaccactgctgtgacgcagcgcagagaagttccgagaatccgtgtgtttcaaggccaggtcccagatctttatcgagggcgggctcgactacttgggcaacccaagcttgacccacgcccagagcatcct

SEQ ID NO: 207862 - DNA, 505 bp, Glycine max
accatttctcgcagaattccagttccagtttcaggttcagtttgttgatggctaaagttggtaagttgcggagcaaggctcgaggtcacagggcaagcccacatcttttgtcttgcggaagaaaaaatctgaaagatgttaatgttaggaagagctcttctaaagcattggagaagaaagattgggaagatgcaacctgctcagtctgtatggaggtcccccacaatgctatccttctcctttgttcatcttatgataagggttgtcgcccatacatgtgtgccactagtcatcgccattcaaactgttttgaacaatacaaaaagacatatacgaaagcaacttctgttcaaagcttgcagctagaagcaaacaattccaatattgatttaagcacaggtgaacctaaagacgatactgaagttcctgagcttctttgccccctttgtcgcccgcaggtcgaaggttggacagtggttgaagtggcacggaagtgtctgaatgc

SEQ ID NO: 207863 - DNA, 471 bp, Glycine max
aactataatgctaatgcgtggttaacctctccaaaacttgtagctgaggatcttattactcagccaaaattcatggaagttccaatcaagtatccggcataactcacccttagggtggttcttacttgtatcatggcggccaccggtgggttgattactggctatgaccatgcagtttcaggtggagcgacctccatggactgcttcctgaagaagcacttcccatctgtatatgaaaaggaggctaccgtgaagccttcttcaaaccagtactgcaaattcaacagtcagatactgacactgcttacatcttcccttgatctaagtgctcttgctgcggatcttggggcatccagcataacccgaacgccgggaagacgtgcaactatgattatggctggaatattctgtgaggcaggtgcattactccatggattagctgtaagcatctggactgctattgctggcagg

SEQ ID NO: 207864 - DNA, 547 bp, Glycine max
ctaaaaccctaatatctcttttccttgtaagtttgattccttattacaaggtgctattattatatatggcttcttcaccttcctcagaaaacaaaaactctcagggagtagctggtggtgccggagagaaacccattccacttggtgagaacgttctgcagaagcatgctgcattctttgacttgaataaagatggtgtcatctacccatgggagacttttaaagggttgcgtgaaatcgcgactggggttttgctgtccgttggaggtgctattttcatcaatgtgtttctcagtctgagtactcgtcccggaaagtttccatctatactttttccaattgaaattaaaaatatccaacgcggcagacacggcagtgacactggagtctacgatactgaaggaaggtttgtaccttcaaaatttgaagaaatttttacaagcatgcacatacacattcaaatgctttgacatatgatgagctaacggagatgataatgcaaatagagagcctaaagatttctcacgaaggattgtagtgtggttga

SEQ ID NO: 207865 - DNA, 388 bp, Glycine max
ggacactgctgggctttccgcagacccagaaaccttcgccaagaaccgtgaactcgaagtgatccactccaggtgggccatgctcggagccttgggctgcgtcttcccggagttgctgtcccgcaacggggtgaagttcggagaagccgtgtggttcaaggccgggtcccagatcttcagcgagggtgggctcgactacttgggcaacccaagcctgatccacgcccagagcatcctcgccatctgggccacacaagttatcctaatgggtgccgttgaaggttaccgtattgctggtggccccctcggtgaggtcactgacccaatctacccaggtggcagcttcgacccattgggccttgctgatgacccagaggcttttgctgag

SEQ ID NO: 207866 - DNA, 518 bp, Glycine max
acattaaattttttattttatcattttataatacacatgatagtgatagatctcaccaaactcatcaatcgaacataggaaatgttatttagttctttgacactgagtatcacgtgaccaaggcagtggcactaggcccagtacgttgatgatgacagggtcagcaaggtgatcggcgaggttgtccaatggaccctttccggtgacaatggcctgaacaaagaagccaaacatagagaacatggccaatcgtccgttcttgagttccttcaccttaagctcagcaaaagcctctgggtcatcagcaaggcccaatgggtcgaagctgccacctgggtagattgggtcagtgacctcaccgagggggccaccagcaatacggtaaccttcaacggcacccattatgataacttgtgtggcccagatggcgaggatgctctgggcgtggatcatgcttgggttgcccaagtagtcgagcccacccttgctgaagatctgggacccgggactggaccaca

SEQ ID NO: 207867 - DNA, 335 bp, Glycine max
ccaagactctgacttacctggcccaggagaaaaccctagaatcgagcttcgttcgggacgaggaggagcgtcccaaggttgcctacaacgaattcagcgacgagatcccagtgatttctcttgccggaatcgacgaggtggatggacgcagaagagagatttgtgagaagatcgtggaggcttgcgagaattggggtatattccaggttgttgatcacggtgtggatcaacaactcgtggccgagatgacccgtctcgccaaagagttctttgctttgccaccggacgagaagcttcgttttgatatgtccggcgccaaaaagggtggattcatt

SEQ ID NO: 207868 - DNA, 517 bp, Glycine max
acaggaccacaaaacaaaagacagaataaattccagaatcaacaaccaatttataagggggggattccaacggcagcacagctatgatttcagctgtatgccaccaggattggcaatcaacaactcagcagatgacgattacaatgtagtaatgcaacacctctcattcacaggcaggtttagtgtcaaagctgctcaagcagatggcgaaggcttggaaagtagagagtggataacagtaatccatggtaaatatgtcttttccaatctttccaaactgcaagattaccttttcttgctcctcggcagaaatattatgagatggatcaacagcagctacaagttgaaagttcttaacagaagccactgaaacgcgacccttgaagtttagacaccagcactgtagctgctcatgccatctgggagccttgtttttcagtgctaattgctcggttgagccttggctcaatactggtggctctgataagcttgcaaagtttaaatctgagacttgagc

SEQ ID NO: 207869 - DNA, 465 bp, Glycine max
ctaaaatatttgcaaaggatgcttgttttgctattacagcagcttacctgaagaccgtgaccatggacatggtcacgggactgttactgttcacgggcttaaagggcgcatctgtcctagacatggcgataatgtagttcgacagcgcccactgcctgctcgaaggcgaagaccaagagctgaagtctcatgtacgagcagtggctatgaagacacggtaaggagtacaccgcgctcggagagaatgacaacaggattcaaagcttggggactgcctgcgaggataagggaccacaactccccagatgaccgaacctgcatgctgtgtcttgaccgcttcgctgatctaaccaactaggactacaaggacaagcacttgggaagcaacatcgataccaaccttatgctctgttagaccctctgcaaccgatgcacgcaacgtgtaggggacagactacctgaatc

SEQ ID NO: 207870 - DNA, 536 bp, Glycine max
accaatctgaatagtaagaaccctctaatttttctcaaaaccaaaaccataactagaccctaataagatccaagatagaagtagtatcaattgaccctcccctaaatacattctcattcctcaaaatcacacaaaagaactcacttattctgcggtttctctttgcttcaatggagaagaaggcacatgtcattattcgaaggagcggaaaaacatatataattcttcactttctggacattccaatacggaaatatcacacaaataaattaacaaacgctgcttttctgtaactgtagtgtatggaagatgtatgattagtatttcttggaatccaaggccaaaatagtgctgagattcattgggtgcatgtactttgaggttcctgacataatctgctgaacgatcaacctgttggctttttccgatggatggaatggatcccaaaacgcgaattcgtgacggtttggacataagttggacactaccgtgcatagtccaagaccattaaagggtccttgaccgcaacatgctac

SEQ ID NO: 207871 - DNA, 567 bp, Glycine max
gtccctcttttaagctatttccttctcttaacacaattggttgtgccaattgccatagtcaccaaccaattaacaaaggtatatatatcatcatatcatcaccaaatgaaaaatattgggttgttttttcttgtggtggtggctacttttgtggtggcagccacagctggtagcttttaccaagactttgaaataacgtggggtggtgagcgtgccaaaatctatgagaatggaaaccttctcacactctcccttgacagagcctctggctctggctttcgttccaaaaaagagtacttgttcggaaaaattgacatgcagctcaagcttgtgcctggtaactctgctggaacagtaactgcctattatttatcttctctggggcctactcatgacgaaatagactttgagtttttgggtaacttgagtggtgatccttacactctgcacacgaacgtattcagccaagggaaagggaacagagaacaacagttccatctatggctcgaccccaccaaggactttcacacatactccgtccaatggaatcctgcaagcatcatattc

SEQ ID NO: 207872 - DNA, 544 bp, Glycine max
gaaactatgtgcctacctgggcctttgatcacatcaaatacctcaatggtggttctgagattcagcttcatcttgataaatacacaggtactggcttccaatcaaaagggtcctacttgtttggtcacttcagcatgtacataaaattggctgctggtgattcagctggcacagtcactgctttctatttatcatccacaaactcagaacatgatgaaatagactttgagttcttgggaaacagaaccgggcaaccttatattttgcaaacaaatgtgttcaccggtggcaagggtgacagagaacaaagaatctacctctggtttgaccctacaagagaatatcacagatactcagtgctatggaacatgtaccagattgttttctatgtggatgactacccaataagggtgttcaagaacagcaatgacttgggagtgaagttcccatttaaccaaccaatgaagatatacaacagtttgtggaatgctgatgactgggccacatggcgtggtttggagaatacagattggtccaaagcccc

SEQ ID NO: 207873 - DNA, 489 bp, Glycine max
ctaaaattcttactttttatatgattggtgttgcttatacacaagaataggtaaaggctatggcacctgatattgaggcggttgatggccctaacgacgagggtgacatgtttacacgctctgacaaactcagcgagcgttttcctcatccatatgcaaatgaagcaactgttaggtttgctaatggatgagcttatcctccagagctaagtcttattaccaaagcccgttacaatggtcacaactatgtttttgcccttctaactggatatcgtgacccacctgctggtgtttcaatatgagagggacttcattataatccttgctttactggtggagcaatacgccatgcctaaaatgcttaatgatggcgctagggaatatgaagatggtacccttgctacagatgctcagatggcgatcgatgatgtgtcacatttaagttgggccgccgaacctgagatggaagacagaaaactgatgggattt

SEQ ID NO: 207874 - DNA, 533 bp, Glycine max
cttatagcttcatcccaaaaagctcttttccttctaaatttgattccttagttcagcattctattattatatatggcttcttcaccttcctcagaaaacaaaaacctagagggagtagctggtggtgccggagagaaacccattccacttggtgagaacgttctgcagaagcatgctgcattctttgacttgaataaagatggtgtcatctacccatgggagacttttaaagggttgcgtgaaatcgggactggggttttgctgtccgttggaggtgctattttcatcaatgtgtttctcagtcagagtactcgtcccggaaagtttccatctatactttttccaattgaaattaaaaatatccaacgcggcaaacacggcagtgacactggagtctacgatactgaaggaaggtttgtaccttcaaaatttgaagaaatttttaacaagcatgcacatacacatccaaatgctttgacatatgatgagttaacggagatgataaaggcaaatagagagcctaaagatttctc

SEQ ID NO: 207875 - DNA, 506 bp, Glycine max
ctaaaatgctataaatagctttgtctagtacatgtttcgatcttctcactataatgctaatgtgttcttcacctctccaaaacttgtagctgaggatattattactcagcaaaaattcatggaagttccaatcaagtatccggcaaaactcacccttagggtggttcttacttgtatcatggcggccaccggtgggttgatttttggctatgaccatggtgtttcaggtggagtgacctccatggattccttcctgaagaagttcttcccatctgtatatgaaaaggagtctaacgtgaagccttcttcaaaccagtactgcaaattcaacagtcagatactgacactgtttacatcttccctttatctaagtgctcttgctgcgggtcttggggcatccagcataacccgaatgttgggaagacgtgcaactatgattatgggtggaatattctttgtggcaggtgcattactcaatggattagctgtaagcatctgggatgcta

SEQ ID NO: 207876 - DNA, 614 bp, Glycine max
caacatacataggcactgtctctgcttctatttctcactctctgaactctgaacaccgaaaatccgccatggattttcgcatctatggcgtcacgatccttctcttcctcttcccaaccctcacattctcaatctcacagggtcagataaactcaaactcaatccttgtcgctctgttggactcccattacaccgaactcgctgagcttgtggaaaaagccatgcttttgcagactctggagaacactgtcatgaacaacagcaacaacatcacaatcttcgctcccagaaacgaagccctcgaacgcgatctcgaccccgatttcaagcgtttcctactcgaaccccgcaatctccattccctccaaaccctgctgttgtcccacatcgtccccaaaagaatcaccaaacccgaattcaaaaccgggtcgacccgacacagaactttagcgtctcaccaccacctcactctccaagccctgaatatgactcactggaatggtgagtcttgccgggttattaaccccgattcggtaacccgacccgacggagtgatccacggcatcgacactcttctcatccgtcgctcagtccaagacgaattcaaccgtcgc

SEQ ID NO: 207877 - DNA, 453 bp, Glycine max
aagtgacaagacattaattagatgggaactggcaatattacattaatacctgatcccagatttacgtgctatcacacaatgaacagttacaggattaactagtaggaatagggctaagatgacacccagacacgggtgatatgtcacgaaccacatgatacgctggaacaagaaaagctttgtggaagctgctatagacctgatgtcaaaactgggaaaattgagtccaaattagccaagttgaccatccccatgacaactactattatgcataatcagaatcatccaattggcacggcttttgaacacatcaagacccatctcagctggatcagttgcttgcagctcaatctgaatcccatcaagctccctagtgaatctatctttggagccggcataaatcatactggctgctaaccctagatgtatcaggggaccatgcaatgaagaaaa

SEQ ID NO: 207878 - DNA, 462 bp, Glycine max
ctatgttacatttagtacatagcgggtaatgtcacatgagactcgaaagggaagcgaaacatagtgaggctatggaagctagcacggctgattgggatcctctgtttgagccttatcccttttttgaatcatacaagaattatctacagatagatataacagcagagaatgcagatgaccttagacaatggaaaggttgggttgagtctcgtcttcgccagttgacattgacgattgagaggcacactgatggtatgcttcaacgtcatccacatcctggtgaattctcagaccattctagaccctatcaccactgagactttatgggtctgcagcgtaagcaaggagttccagtgaatgaaggtgaacagcttgatataacgctcactgctgaagaatttaaacattctgtcagtgcttacactctatggaaaccttgaatgaatatccatgtgtcccatg

SEQ ID NO: 207879 - DNA, 591 bp, Glycine max
ctgttatgtgggcgtccggaattaatgtcccgggtcccggtgctaactgctcagtggtcggcgttcgtccttttttttgtttaattgaaatgctattatatgctatacgggtacacatgatctgtcacattatctgaagtacttcaccaaacacaaatctaaaaactctcaaaagtcatttcgttctttgacgctcactttccggggacgaagttggtggcataggcccaggcgttgttgttgacagggtcagcaaggtgatcggcgaggttctccaatggaccctttccggtgacaatggcctgaacaaagaagccaaacatagagaacatggccaatcgtccgttcttgagttccttcaccttaagctcagcaaaagcctctgggtcatcagcaaggcccaatgggtcgaagctgccacctgggtagattgggtcagtgacctcaccgagggggccaccatctatacggtgaccttaaacggcacccattaggataactcgtgtggcccagatggcgaagatgctatgggcgtggatcaggctcgggtcgcccaagtagtcgagcccagcctctatgaagatctgggac

SEQ ID NO: 207880 - DNA, 478 bp, Glycine max
acgatgattgtttcttggggaacagcgctggtggaggaggagttgatcagggtcaagagaagcctccaacttctttggccaagacactcacacaatctgatgctaacaatggtggaggcttatctgagcctagttactgtgctgaaaccatgatcccaaggttggattattctgctgagcctcctgttcataccatcatcgctaaggatatgcatggacagcgctggatgttcatgcatatctatagagggacaccaaggaggcatctttcgaccactggatggatcaatatcgtgaaccagacgaggcttgtcgctggcgactctattgtgctactgagggcagagaatggagatctctgcgctgagataacgcgggctaagatggggattgacggagggactgagtgaccttacggtggatggtataaccctctgtttggtggtggctccttgtgtgagagtgagaacaatgtgat

SEQ ID NO: 207881 - DNA, 524 bp, Glycine max
catagaattcactaaacttcatttaatttaattttacaggaccacaaaacaaaagacagaataaattccagaatcaacaaccaatttataagggggggattccaacggcagcacagctatgatttcagctgtatgccaccaggattggcaatcaacaactcagcagatgacgattacaatgtagtaatgcaacacctctcattcacaggcaggtttagtgtcaaagctgctcaagcagatggcgaaggcttggaaagtagagagtggataacagtaatccatggtaaatatgtcttttccaatctttccaaactgcaagattaccttttcttgctcctcggcagaaatattatgagatggatcaacagcagctacaagttgaaagttcttaacagaagccactgaaacgcgacccttgaagtttagacaccagcactgtagctgctcatgccatctgggagccttgtttttcagtgctaattgctcggttgagccttggctcaatactggtggctctgataagc

SEQ ID NO: 207882 - DNA, 405 bp, Glycine max
ctaaaattcatatatcacctatcaaggttcctaggataattcatacaatgcagcgggatgcgaaaacgggtatgaaagctgatgccagctacaatgccaagaactacgcagagataacagtgcaccacaactgcgaaggccactgtatgcattcaaccacagctatggcagccatctagtggaatactgaagactcatgatataagtgatgctaacccagaggatgctcctacatgtttcgcacatgttgaagagtgactcaaatgatatgtctgcttcaggggggaaaaagtatctatttaataagatgacatctaagacaatggcgacaatcatgcggcctcaaccaactgcggagtttattgcatagtagccagaagacaataatgacatagctattggcat

SEQ ID NO: 207883 - DNA, 228 bp, Glycine max
aataagaaaggcaaaggacaggccaaaccgaataaagaacccaggcccattaactagcgagaccgcgtactacctatgcgagtagaacgcacgcgaaaacggctgaaacactgatgggctttccgaagacccagaaacctttgcctaaaaccttgaactcagatagatccactgcaggcgggccatgctcggagcactgggctgctgcaagccggagtcagctgtcct

SEQ ID NO: 207884 - DNA, 249 bp, Glycine max
ttttgtggttggattatagagcatgatgaatatcgtcaccaagctagtttcctaagaagggcatggggcaggccaaaccgagtcaagtacttgggcccattctatggcgagcccccgttctacctaaccggtgagatcccacgcgaatacggctggaacactgatgggctttccgcagacccaggaacctttgccaagaaccgtgaacttggactgatccactgcaggcgggccatgctcggagccttg

SEQ ID NO: 207885 - DNA, 282 bp, Glycine max
tgtagttggaaagagggcttgccggcgaaagtgtcatatcatcgaaagatgtggttatggtactctttgagactgctattctaactactgagctcagccttgatgatcccaacactttctgtaacaggactcacaggatgctgaagctcggactgagcattgatgaagaggctgctgaagcacatgctgacatgcctactgtggaggacgccgatgctgatgccgatgctgacggtagcaagatggaagcagctgatactgtctaacttaattactgatctg

SEQ ID NO: 207886 - DNA, 568 bp, Glycine max
  unsure (1)..(568): unsure at all n locations
atcacaaatagccctcttggccttcaatttcgtccaattccaaatcatggctagctcttcagttttcacgtcttacattgttttgagtctagtgatggcactagcaattagcggtttcaatttcaaaggggcagaggcagcacgtgccttctttgtgtttggtgattctctcgttgacaatggcaacaacaactacttagccaccacagctagagcagacgctccaccttatggcattgattatccaactcgcagacccactggccgtttctctaatggcctcaatattcctgattttatcagctgagttctaattttgatttctccatcgctaatatattttgtgctgtttaattaatactatatggcttttttttttgttggacgttacatgcgttcgaacccatttcctgatgaaattgtcttactacaattatacggaccaagaatgcccataactaatatatgacttattatgccatgtagtgtaagttaatttgtgattaaattttgcaggtcaagaacttgggtcagagtccacgttgccatatntaagtcctgagctcaa

SEQ ID NO: 207887 - DNA, 571 bp, Glycine max
  unsure (1)..(571): unsure at all n locations
ctaactcgtctccagccgccctttttttttttttttttttttaacaaaaacaccttaaaaaaatatccaaggaatcaaaaacactacaaaaggatttataacaattgatatattctgctcaatcaactgaaatataattaattaactgaactacaattaaaagaaatccacaaaacatacaacattttctcttaaaacatgatgctactttgctatccagtcaaaatgaaattcatagaatactccgtaatttgcagacaggaattaatttctctttaacatcaattctttcagaaccagtattaccaaagttcaccttcactgacttctgtcactctcgtaaattctagattttagctattaaaaagaataaaaaatttcatgttatagtttcatatcttagatcgaagattactgctatatgtgatgaacattagtgacactagcattacagcacgcgttaatctttttgcagagataatccatgcaaagatattgcatcattcggtagcgatgacaccaaacaacaatttcaccaaaacagtatttcattgcaaaattntacattact

SEQ ID NO: 207888 - DNA, 517 bp, Glycine max
acgatatcaaagacatagaatcgtgatttggttggtgttgcttatacagaagaagaggtaaaggctatggcagctgagattgaggtggttgatggccctaacgatgagggtgagatgtttacacgccctggtaaactcagcgatcgttttcctcagccatatgcaaatgaagcagctgctaggtttgctaatggaggagcttatcctccagatctaagtcttattaccaaagcccgtcacaatggtcagaactatgtttttgcccttctaactggttatcgtgacccacctgctggtgtttcaataagagagggacttcattataatccttactttcctggtggagcaattgccatgcctaaaatgcttaatgatggtgctgtggaatatgaagatggtacccctgctacagaagctcagatggggaaggatgttgtgtcattcttaagttgggccgccgaacctgagatggaagagagaaaactgatgggattaaatggatatttgtactgcactg

SEQ ID NO: 207889 - DNA, 536 bp, Glycine max
  unsure (1)..(536): unsure at all n locations
ctcgcgtaacgcatgcgtttctttactcaatcggagcccagcactgatctatttggaactcttggaggtctgtggttttactgtactcaatttgataaattaaggcaaagacgatgaccaagaagaagaatcccctggtgtttatggatgtgtccatcgatggggatcctgttgaaaggatggtttttgagcttttctatgatgttgctcccaagactgcagaaaactttcgtgcattatgtacaggagaaaaaggtatcagtccaaatactggaaaatcactgcactacaagggttctttcttccatcagatcataaaaggttccattgtgcagggtggagattttgtcaatcgaaatggaactgctggagaaagcatatatggttcgaagttcccagatgagtcacctaagctaaagcatgatgctaccggactnttatcaatggcaattgcagaccgtgacacacttggttctcattntattatcactttgaaagctgatcatcatcttgataggaagcatgtagtctttggg

SEQ ID NO: 207890 - DNA, 332 bp, Glycine max
atgaacattggttcacacataagaacacattatcataacaagacactcactcgcatatgtacgtactataacttgataaccaattcatggaccctcactttccacagacgattgatgagaatgaggcccaaaacttggtggtgacaggataccatccgcgacctgctatgtgctccaatggacactatcctatgccgctggcacatggatggattccggacatgctgagcctggtcaatcaaacgagctggaggcacttcaccggaagctaagcaaatgccaaagtatcatcagatactgccattgaacctatgcatccttcggggctgaaa

SEQ ID NO: 207891 - DNA, 548 bp, Glycine max
ctcatctaggttggaggccgccctttttttttttttttcttttttttttactttttttggtgattattgtcataggaaccatccaattaacaatggtttatgtagcatcatatcatcaccagacgaaaaatatcgatctgattttacttgaggagttggatacttttgaggtggcagtcactggtggttgctatcaccaagactttgaattaacgcggggtggtgagcgtgccaaaatatacgagaatggtaacctgatcacactcttccttgacagatcctatggctctggctatcagtgcaaaagcgagtacttgtgcagaaaaattgacatgcaactcaagctagtgcctggtaactctgctggaacagtatactgcctatgatgcatcttctctggagcctactcatgacgaagtagactttgagtttgtgggtaacttgagtggtgatccttacagtctgcacacgtacgtatgcagcctacggatagggaacagagaacaacagttccatctatggttcgaccgcaccaaggactttcacac

SEQ ID NO: 207892 - DNA, 551 bp, Glycine max
  unsure (1)..(551): unsure at all n locations
aataaaactccaacaattttattaatgaaaatactttacaatttcagcacatatacactgccatgaatataattttgcacgctataattatctttcgccacaaacaatggagtagtgctcaacaaagcacaaaccaacaataataacagttttagttgcattaatttacacaagaaagtaaattaacgtaataggcaacacatgtgtgtcacgttcatgaggatcattttataatgatatgcaacattgaattaaatattctcatgcaatggagcattctggaggaaggccttgagggaaacgtctgatatcagtgcaataattgtaaatcatgtaattcttttgcacccaacggatctttgcctgccccgtggcgtccagtgattggccagtggaggaagaagtttgggaattgaagtttctgtatgaggctgtgaatggtgccttgctccaatccgttttcacaagcccaccccttgtggcccaatcctcagngttccaaagactagagtatattctcatgggttggctctctgggaatgggaaccctt

SEQ ID NO: 207893 - DNA, 512 bp, Glycine max
gcagacctttttcctacctgttcacttttgatcacattcaaatactctcaatggctggttctgagattcagcttcatcttgataaatacacaggtactggcttccaatcaaaagggtcctacttgttaggtcacttctgcatgtacaacgacttgcatgctggtgattcaggtgacacaccacctgatacccagttaccatccactcactcagaacatgatgaaatacactctgagttctcgggaaacataaccgtgcaaccttatattttgcaaacaaatgtgttcaccggtggcatgggtgacagatatcatagaatctacctctggtttgaccctacaagagaatatcacagatactcagtgctatggaacatgtaccagattgttttctatgtggatgactacccaataagggtgttcaagaacagcaatgacttgggagcgaagtttccatttaaccaaccaatgaagatatacaacagtttgcggaatgctgatgactgggccaca

SEQ ID NO: 207894 - DNA, 561 bp, Glycine max
ctgaacaccgaaaatccgccatggattgacgcatctatggcgtcacgatccttctcttcctcttgccaaccctcacattctcaatctcacagggtcagataaactcaaactcaatccttgtcgctctgttggactcccattacaccgaactcgctgagcttgtggaaaaagccatgcttttgcagactctggagaacactgtcatgaacaacagcaacaacatcacaatcttcgctcccagaaacgaagccctcgaacgcgatctcgaccccgatttcaagcgtttcctcctcgaaccccgcaatctccattccctccaaaccctcctgttgtcccacatcgtccccaaaagaatcaccaaacccgaattcaaaaccgggtcgacccgacacagaactttagcgtctcaccaccacctcactctccaagccctgaatttgactcactggaatgttgagtcttcccgggttattaacccgaattcagtaacccgacccgacggagtgatccacggcatcgacactctcctcatgcctcgctcagtccaagacgaattcaacc

SEQ ID NO: 207895 - DNA, 519 bp, Glycine max
cctgcttatccttgtatgaactccacttacaatgtgacatcaagtacattgcgtgttatgtcagatgagtttcgaaggggaagtgaaatatgtgaggctatggaggctagcaaggctgattgggatactctttttgagccttatcccttttttgaatcatacaagaattatctacagatagatataacagcagagaatgcagatgaccttagacaatggaaaggttgggttgagtctcgtctccgccagttgacattgaagattgagaggcacacttatggtatgcttcaatgtcatccacatcctggtgaattctcagacaattctagaccctttcaccactgttactttatgggtctgcagcgtaagcaaggagttccagtgaatgaaggtgaacagtttgatataaggctaactgttgaagaatttaaacattctgtcaatgcttacactctatggaaacctggaatgaatatccatgtgtcccatgtgaaacgccgtaccattcctaactacata

SEQ ID NO: 207896 - DNA, 378 bp, Glycine max
  unsure (1)..(378): unsure at all n locations
gctgagaagcctgtgataactgatgattcaaaccaacttgaaccttctctacttgatgagcttcttgccaacattgctacactatcttctgtttatcacaagcctccagatgcttttgtaactcgtgtacattcagctcagagaacagaagacgaagactttgctgagggaagcgaaacagggttttctgagtcacctgcaaatcctgctaatggtcctgcatcaccgcctacatctgcaacaggtgcaccagccacaccttcatctgttgcacctgtgccagatttacttggtgatttgatgggcatggataattctattgttcctgttgatcagccagttactcctactgggcctncatttacctatttactacct

SEQ ID NO: 207897 - DNA, 580 bp, Glycine max
  unsure (1)..(580): unsure at all n locations
cactaggactagcgtcgatctatcgctagnaatgtaccagagtcctgtcacctggcgctatgccatttgcaaccagcgccgcgcaaagggcttagccggtggctgcagagcgggccagcgcagcggaagtttttgaggatgaccgaaagggggaggcggctaggtaacaaggagaaggtgatgcaagttgcagtcagaagctgaaagaaaagagagacggccaagcccctggagggagatatgtcgtatatggcctagaaggaaagggatgcttgctaggggggggttagtgcagtacgcggcggaagccgccagcctccggtagcctacaaactaaaaaagttcttagaggaaaagagcctccagccgcgactccaaaagcctccagcgtagccgccataaaaaaaagagagaaggagagagatagagaaagaggaataaaataagacagaaaaaagaaagagaaagaaaaaaggaaaaaaaaataagccaggctaggtaaagaaaggaaaaaacgggtagcacggtatagaagaattaacgattactattaaagaaatgtaggtaacacggtaaaaga

SEQ ID NO: 207898 - DNA, 533 bp, Glycine max
ttgatagcactactatgattatggctaggaatgtaccagagtctgtcaacttgtttgcagcggttgcatggttgttaaaaatattggtgttggtggagaagttgctgaagcggtttatgttgtttaaactattggtattgagggatatgttattaaagcggttgatgttgttaaaaatattagtgttgctggagacgttggtaaagctgttggttttgtagaattaattgtttgagctattgatattgttaaaaatattggtgctggtggagaagttgttgaagcgttttatgttgtttaaaatattggtattgagggatatgttattaaagcggttgatgttgctaaaaatattagtgttgctggagacgttgttaaagctgttggttttgtagaattaattgtttgagcgggtaatattattaagcatattggtgttaaggaagacgttgttaaagcggtttatgatgatgttaagaatattggtcttggctaattaattggagcggttaatgtttgtaaatatgttggtg

SEQ ID NO: 207899 - DNA, 540 bp, Glycine max
aataaaactccaacaattttattaatgaaaatactttacaatttcagcacatatacactgccatgaatataattttgcacgctataattatctttcgccacaaacaatggagtagtgctcaacaaagcacaaaccaacaataataacagttttagttgcattaatttacacaagaaagtaaattaacgtaataggcaacacatgtgtgtcacgttcatgaggatcattttataatgatatgcaacattgaattaaatattctcatgcaatggagcattctggaggaaggccttgagggaaacgtctgatatcagtgcaataattgtaaatcatgtaattcttttgcacccaacggatctttgcctgccccgtggcgtccagtgattggccagtggaggaagaagtttgggaattgaagtttctgtatgaggctgtgaatggggccttgctccaatccgttttcacaagcccaccccttgtggcccaatccctagcgttccaaagactagagtatattctcatgggttgctctttgggatg

SEQ ID NO: 207900 - DNA, 486 bp, Glycine max
  unsure (1)..(486): unsure at all n locations
ggggatgagagagcatgaggaagaccgtcaccaagcaggtctcctcaggaagcccatggtacggcccagaccgagtcaagtacttgggcccattctctggcgagcccccgtcctacctaaccggtgagttcccaggcgactacggctgggacactgctgggctttccgcagacccagaaaccttcgccaagaaccgtgaactcgaagtgatccactccaggtgggccatgctcggagccttgggctgcgtcttcccggagttgctgtcccgcaacggggtgaagttcggagaagccgtgtggttcaaggccgggtcccagatcttcagcgagggtgggctcgactacttgggcaacccaagcctgatccacgcccagagcatcctcgccatctgggccacacangttatcctaatgggtgccgttgaaggttaccgtattgctggtggccccctcggtgaggtcactgacccaatctacccaggtg

SEQ ID NO: 207901 - DNA, 592 bp, Glycine max
agaatacagcatttcatttctcatcatcaatggctttctcttgtaaacttgacagcttcattctctctgcctataaaccccaaaactccattctcccactttcaatccaaccttcctccttccttccatctccttcttctttgaagcctcagaagcttcccttcagaattcgctatggttctaccatcagagccacgtcatcatcctcaaccccttccgcaaccattgccgaacctgaaggcattaagattaaatcgattccaaccaagcccattgatggacaaaagactggaaccagtgggcttcgaaagaaggtgaaagtgtttatgcaagacaattaccttgcaaattggatccaggctctgtttaattcattgccaccggaggactacaagaatggtttgttggtgttgggaggtgatggtcgatactttaatcaggaagctgcacagataataatcaaaattgctgctggaaatggtgttggaaaaattctggttggaaaggaaggtattttgtcaacaccagccgtttctgctgctataagacagagaaaggccaatggtggattaatatgagtgcaagccataat

SEQ ID NO: 207902 - DNA, 439 bp, Glycine max
aactgaggaagcgagctgatgctgacaagaatgacaaatctgtgaaggatctcgttctcctactctttgagactgctcttctaacttctgggttcagccttgatgatcccaacactttcggtaacaggattcacaggatgctgaagcttggactgagcattgatgaagatgctggtgaagcagatgctgacatgcctcctctcgaggacgccgatgctgatgccgatgctgagggtagcaagatggaagacgttgattaaatctaacttaattattgatttgcctttgtgtttttagaaacaatgattggggaacagtcttttactatgtttatgttttgaattttcgaaattctggaatgttggctagttaggtgccgtttcctggattagtagtgtatttagtttctatatggaaaatttgtgtcagctttctggcc

SEQ ID NO: 207903 - DNA, 411 bp, Glycine max
ggcttgacttgaccagcaagtttgaccgtactacatgtgtgcacgtcctccttctttgggggggggggggggggggggggggggggggggggggggggggggggggggggaggggggggatggggggggaggggaggggaaccagtggaatggccagaaaggctagacaccacacaatttacaacaataatggaaccaaaacatgcgggtttagtacccgggtaaaaaaaataggcccccagtaagaaggaccccacctggaaatcctgctggtagtgactgatttgtactggtcctagatctactcctcgttcacacaccacctagcgtactggtgcagagtttactcgcggtagaaagctgtacggtaactggaaaaagatgcgccagttgcgggttcaaacccggccc

SEQ ID NO: 207904 - DNA, 444 bp, Glycine max
cactgacgagcgagtttaacctactacatcgttgcactaccaccttcttggggggggggggggggggggggggggggggggggggggggggggggggggggggggggggggggggggggggaatagggacaacaaggtaaagggaggaacgacccaccctaacctaaaaacattcccaatatttaaccaccttatacccttaaattacacattacaatttttacaaatagaaaaaatcccccacccaaaatagaaatttaccctatagaaccctcttgcctttctaacccatttccttacaagttttaccctttaacttattgacataaccacaaatacaacagttaaagacacaaacttcaacttacgtgggtatggtttacaagcccaacccccaccccccaaccctaaaattctttttaaagggccccacgcacaattatc

SEQ ID NO: 207905 - DNA, 545 bp, Glycine max
aataaaactccaacaattttattaatgaaaatactttacgatatcagcacatatacactgccatgaatataattttgcacgctataattatctttcgccacaaacaatggagtagtgctcaacaaagcacaaaccaacaataataacagttttagttgcattaatttacacaagaaagtaaattaacgtaataggcaacacatgtgtgtcacgttcatgaggatcattttataatgatatgcaacattgaattaaatattctcatgcaatggagcattctggaggaaggccttgagggaaacgtctgatatcagtgcaataattgtaaatcatgtaattcttttgcacccaacggatctttgcctgccccgtggcgtccagtgattggccagtggaagaagaagttcgggaattgaagtttctgtatgaggctgtgaatggggccttgctccaatccgttttcacaagcccaccccttgtggcccaatccctagcgttccaaagactagagtatattctcatgggtctgctctttgggaatggaa

SEQ ID NO: 207906 - DNA, 534 bp, Glycine max
gaaagcacgaagtttggcacatctaagtgccttttattacacaaatattacttatttgaaaggctaagaacgaccaatggaaaaccactacttcacaatggccattaagctccaacctactcaatgcctaacttctttcttagatccataatgaactcataaaccttttgctgatcaggaagagacttggcaacgctttctttctgaaggcacctcttggcccaagcaataaacttggggcactcactctctatgttgagggtgccaaaagtctcataggctttgaaccaagtgtagaatggaacaagcgctatatccacaaaacctagattgtctcctccaaaataagtcttgtctcccagctgttcctccaacaatttaagggcttctatgaactccttcttggcagcttctttttcttctccttttgatgtccaaatcttccttccaagatcatatatctattcgacattgagaattaacatgcaaatagatcataaagtgtaagactgagatcagggaggattaagagat

SEQ ID NO: 207907 - DNA, 485 bp, Glycine max
gaaggctctttttttcttttttgttggtttctcttgtttttgtttttgtaggtactgaggaagaaagaccaaaactttatccgcttgcttcacttagctcaagagcgtacaattcaggcaaaggccttgaagtcggagtgtgggttaaggatctcttaggagctgcttctgtcttgactgaagaaatggaggtatatggcaaatctatggttgcaggtcctgcaaatgttatttttctgtcaagtattttgggccaagaaggtccagttcccggtcacaaatgcgactggaaatgtcaaaatgaacatgtttgtggaaacatgtatcgctgcaagctaactgggctgactcacatctgtgataaaaactgtaaccagagaattctgtatgacaaccatagctccctttgtcgagctagtggtcaaattttccccctttcacctgcagaggaacaggcagtgagaggcgtacgaaggaagcttgat

SEQ ID NO: 207908 - DNA, 453 bp, Glycine max
atggaacaagggcagaagatttattaaagccgcgtaagagacaacaagtaggtacgtggagtgtcttaggtgacttacccacataacataaagtgacattaacaaacatagctaatgctcctatttgaatagtgcatatcagcataccttattacatatagataggagcaaactctagctagattgttgagagaggtgaaggtactactcaatgtagtacatgggattaggaagcttaaaggtcctgctttcgcctctgtggtctccaagcaaatcgctccattggtctccaatgattccaacaattctgtatccctgccttaacagattctctctcattgctgatttgtatgaaagtgcatttggagtgatacgatgtggatccttgagaattaactggtaccatgtgtggaagccaaccttctttaggcttgcttctgatacgggcatttt

SEQ ID NO: 207909 - DNA, 507 bp, Glycine max
ctcaataataataataatatataaatttcatgggaacaattatgtagagttagttaaccagacatattatctatgattatgacatacacaccatgtgctttcatctaatggcaagtggcaacttttaagagtttcctcccccactccatacaatcacaaacccacaatagttcaatttattttatggcaatttttccgtacttcccccttgaacccttctttgacgtcgagcatgctcatcttcaccattgcttgttggaaatccaagaaaaacaaggcttggttcattgcataagcattcacaatgttcctcgtttgtgggctgttgtacaacgtttggtccgatgtaagaaccccgttgtttgagaccaaatcgttgaagtattcgctgtcaaaatcgttcctcgtggagtcaaagggttgctcagcagtgtcacccgcactgcatgtcttggagagtgtctttgcaaattctgagtccaaaagtgggtccacttgggtcagtct

SEQ ID NO: 207910 - DNA, 526 bp, Glycine max
aaaaaaatatattatatatatcactcaaatggcaacacattaatccgaacacacaggtacatacaccaatatattacataaggtaatatgtagattctaaattaatttattctagtaactagtaacaactcagaaataaacaaccaacggcagaatatgatgttctctgggcagttaagctcatcataactagtcatctggctaccagatgttggcttattggggtcttccttctgaaatcttaacaattagaaatccttggtcacaaccaaatgcaagctgagatgatcctttcttgtatccaatactccatactctcttgagaccaaagttcaacgtggtttgaagcctgtaagtgacagcatcccatattttaacagtagaatcctctgaagctgttattattataggaagctcaggatgagcacatattgctgtaacattgttttcatgtccttcaagcgtctgtacacagtttctagaatgataatcccataccttggcagtgtatcatcagaaccactta

SEQ ID NO: 207911 - DNA, 391 bp, Glycine max
aaaaaaaaagaaagcaaagggtaggcattgacccctttgcacaaaggaaaagaggggtggtgttgtgttaaaaaaatattgaacttggttggttctaagtagaaacaaaaattgtcattttcccatttctgcatttttggtttgggagaggagaaaccaagaattaagaaatgggttgctccgtaagagtttgttgtgtcttatttttggtgttgttggtggcatgtgttagaggggaggacccttatagatcctacacttggaatgtcacatatggagacatttatccacttggtgttaaacaacagggtattttaataaactgggcattttcagggccacaaattgaggctgtgaccaatgacaacttgattatcaatgtatacaacag

SEQ ID NO: 207912 - DNA, 540 bp, Glycine max
  unsure (1)..(540): unsure at all n locations
tcagcttaatacttatgataaggctagaaatgctgtggctcttgcactcagtccagttgtcaaagctcttgttgatccagatggtgcactgagggacataaggaatttggatagtattagcttttcagactggtttttatccaaaggtggcacacgcatgagtattacaaaaatgtgggatccagttgcctatgcccttgggtttattgactgtgataatatcagtgcccgctgcatgctcaccatatttgcattgtttgccacaaagaccgaggcttcccttttgcgaatgctgaagggttcaccagatgtttatctgagtggccccatccgaaagtacatcacagacagagggggcaggttccatcttaggtggggatgtagagaagtacttcatgacaaatctgctgatgggagtatttatgttacaggactttccatgtcaaaggctactgccaagacaattgtgaaagctgatgcttatgtagctgcttgtgatgtcccttgaattaagagtatacttncatcaaagtgagggaa

SEQ ID NO: 207913 - DNA, 510 bp, Glycine max
  unsure (1)..(510): unsure at all n locations
gaaggcaagatgtcgaagagaggacgcggtggttcggcggggaacaagttccggatgtcgctgggtctgccggtggcggcgacggtgaactgcgccgacaatacgggggcgaagaacctctacatcatatcggtgaaagggatcaaagggcgtttgaaccgtctcccctcggcttgcgttggcgacatggtgatggccaccgtgaagaaggggaaacccgatctgaggaagaaggttttgccagctgtcattgttcgccagcgcaagccatggcgccgaaaggacggcgtctacatgtatttcgaagataatgctggtgttattgtcaatcccaaaggagaaatgaaaggttctgctatcactggtcccattggaaaagagtgtgctgatctgtggccaaggattgcangtgcagccaatgctatcgtttgagtgggaattctggttaaatgagttctatgcttaagcttgtaggactgaaatttgtctcaggtttttttcaagcttgaa

SEQ ID NO: 207914 - DNA, 559 bp, Glycine max
tgctagacttgccaacagatttaccctactacatgtgtgcacgtcctccttcttgggggggggggggggggggggggggggggggggggggggggggggggggggggggggggggggggggggggggggggggggggggggggtggggggggtaattttaaagccccaacgggggggccctttaaaagggtttcccccaaattttttcccccctttttaagggcccccaaatttttttattttaaacccttttttttaaacaaaaaaagttttttatagccccccccggtttattaagggtaaaaaaaatttttttgaaaacaattttagttttaaactagaaaattaaaaaaactttaacttggggccttttttaaaataccgtgtttccccccttttttttaaacctttaaggggcccccccatttttttaaaagatttttccaattccaaaaaaaggccctaaaaaatttaccccctaaaaggggggtttttttttaaaaaaccccccagtattttccgaaaaaaggtggcccccatttttttaaaagatttctcc

SEQ ID NO: 207915 - DNA, 513 bp, Glycine max
cacttgaccttagccagcagatttaccctactacatgtgtgcacgtccaccttctttggggggggggggggggggggggggggggggggggggggggggggggggggggggggggggggggggggggggggggggggggggggggggggggggaaaaatttaaagccccaacgggaaggccctttaaaagggtttcccccaaataatttcccccccttttaatgccccccaaaatttttaaatttaacccctttttttgaaaccaaaaaaattggaaataaccccccccggaaaaaaaagggtaaaaaaaagtttttaaaaaccaatttaaatttaaaacgaaaaaattagaaaaaacttaacctagggcctttttaaaaaaacccaatttccccccctttttttaaccattaaaaggccccccccatttttttaaaaaattttgccaattccaaaaaaaggccctaaaaaattacccccctaaaaggggggtttgtttttaaaaaaccccca

SEQ ID NO: 207916 - DNA, 524 bp, Glycine max
actgaccagagaatttgccgctactacatgtgtagcactaccaccttcttgggggtgggggggggggggggggggggggggggggggggggggggggggggggggggggcgggggggggggggggggggggggggggggggggggggttttaaaaaaaacccccgaagggccttcccctaaaaaaggtttaccctttgggtaaccaaaaacccccccgggggaattttaccccgaggttttccctaaaaagggggtttaaaaaaaataccccattaaaaaccctaagggtttaaaaaacaccgcccccttctgaaattttggggcctaaaactgggctttaacccccccaaccttaatttccaaacccccggtggtaggccaaaacccctcccccctttttggaaaaaccccctccaaattttaaacccctaaaatttttttaaaaattttgcccaaaaaaaacccccccaattaccaaggtttggaaaaaaaatcccctgggagctttttccccctgggcaac

SEQ ID NO: 207917 - DNA, 490 bp, Glycine max
cattgttgaaacatgcgtgattgcctttattgctttctcttcgatctgttataaaaacagaatacagcaaacacgagaacattcaaccaccccaaatgtaacttgaccatacgtaggtagatgaaggaatcatattcctcctatttcacattattgaaaaacaggcagagtagtacagcaacctcaatgagagagcccttagatagagatactgttgggaattcctctgaaagtcaatccctcctcactagaaggatagagcagagtgtaaggcattttagctggcccagtgcggtttctcaacgtctcatccttgttcttctgtataagcttatgttcaatctcttgaagcttctttccaaacctcttgaaggcctctagtggaccagcatcagaagtccagaagtcaccaccatctctctccccaaggtagaactcatcagatgcgtgccttgcaggatttctataattgaaggtcaatgagggtctc

SEQ ID NO: 207918 - DNA, 584 bp, Glycine max
  unsure (1)..(584): unsure at all n locations
gaaagcacgaagtttggcacatctaagtgccttttattacacaaatattacttatttgaaaggctaagaacgaccaatggaaaaccactacttcacaatggccattaagctccaacctactcaatgcctaacttctttcttagatccataatgaactcataaaccttttgctgatcaggaagagacttggcaacgctttctttctgaaggcacctcttggcccaagcaataaacttggggcactcactctctatgttgagggtgccaaaagtctcataggctttgaaccaagtgtagaatggaacaagcgctatatccacaaaacctagattgtctcctccaaaataagtcttgtctcccagctgttcctccaacaatttaagggcttctatgaactccttcttggcagcttctttttcttctccttttgatgtccaaatcttccttccaagatcatatatctattcgacattgagaattaacatgcanatagatcataaagtgtaagaatgagaaaagggaggattaagagataacatatacattttgttaacatagatccactataagatatctatactcat

SEQ ID NO: 207919 - DNA, 511 bp, Glycine max
ctggtctccaagatggttttcaacaaagagtagacctggtgggtgggtactatgatgcaggagatcatgtgaagtttgggttgccaatggcctacagtgtcacaatgcttgcatggggggccattgagttcaacaaggaaatcacggacttgaaccaaatgggacacgcattatgggcaattaaatggggaactgactactttatcaaagcacacactcagcctaatgttctttggggacaggtgggagatggagtttctgatcattactgctgggagcgtgctgaagacatgacaacttcaagaggtgcctacaaaattgatgaacaacaccctggctcagatctggcaggtgaaactgcagctgcattggctgctgcagctatagctttcaggccctacaactcttcttactctaatctcctcctagttcatgcaaaacagctcttcacattcgcagataggttcagaggtctctatgataactccatatcaagtgctcagcaattcta

SEQ ID NO: 207920 - DNA, 463 bp, Glycine max
gcttgccttgccggcagatttgccgtgctacatgtgtgcacgtccgccttctttgggggggggggggggggggggggggggggggggggggggggggggggggggggggggggggggggggggggaggaacaaagaaagggtggacaccattaacccgtttaaacccaaagaaaactgggggggataatgggcaagtttcctaggttttttaaaaccaaaactgggtgggtttgaattaaggggggtacggtttggtttggttttaataagggtggcccaaggggggggagtaatttaaagggcagcattacccccagcgggtttttaaaagtgtaacccctgtggtaccaaagaaggtgggcccaataggttagcgggtaatagcccgtttttccaatgggctaatgccgggacgaattccacagggtttcccccagcctgttttatgcaattcactaacgg

SEQ ID NO: 207921 - DNA, 454 bp, Glycine max
atgtgatattgatataaaaaatgactaggaaagggttgtacatcagtgaccacgcatgaaacatgagaaatgaactacagcctattgatgaacccctcacatcaatctcatgatggaacaatgctggagctacaacatggtggcactgatgatgatcgcagactaaaaatcttttaactggagtcaggtggaggcttacgcatatccttgacgattcctcctacaggctggctctctgggaggatgtgctcatccctaatgggacctgttgggatacaagacactcacgtccaatagctgacccacgtaacgaatctctgccatgttcctcctcgagttccacattccagcgatgtctgggctaacatgattgcagcccaagactttgggaacacttggatggtgtgcctgctgaccgcatcgatacagttgctgcacttgctcttctctgggc

SEQ ID NO: 207922 - DNA, 493 bp, Glycine max
gacttaaaacaattttctcaactaatagaatatggccttgggccagagtctccacaaattgcaaactgcttttactaaatgaaattgactacatatgctgcctcttttttatcctttatttgagcagatcttcccatttgcagtactgccctcctgctaatgctcgataatacctatccctacagtagacaggtcttccatcagcagcctcagcagcagcagctgctagatcatcatcagttatcacctcgactggtaatttaagcagctcctcttttcttaagagctttgtgttaaccttgggagcttgaacagttgatttaatttcttctttggtaaaggtagttcgaaaaaaattctccaatggtgtagcaaagataaatagcataactcctgtaacaagcaatgctcctgtcccaactagagtttgtttcagcaatttaacgactggtttaaccttgtaagagcccaacaatctatcacgagctaggat

SEQ ID NO: 207923 - DNA, 477 bp, Glycine max
  unsure (1)..(477): unsure at all n locations
cacaaggcagaaagcaagctcattctagagttttaaaaatggcagcagcctcctccatggctctctcttccccatccttggctggcaaggccgtgaagctgggcccatcagcccccgaagtcgggagggtcagcatgaggaagaccgtcaccaagcaggcctcctccggaagcccatggtacggcccagaccgcgtcaagtacttgggcccattctctggcgagcccccgtcctacctcactggcgagttcccaggtgactacggctgggacactgctgggctttcggccgacccagaaaccttcgccagaaaccgtgagctcgaagtgatccactccaggtgggccatgctcggggccttgggctgcgtcttccccgaactgttgtcccgcaacggngtcaagtttggagaagctgtgtggttcaaggccgggtcccagatcttcagcgagggtgggcttggactactgggcaacc

SEQ ID NO: 207924 - DNA, 513 bp, Glycine max
ctggtctccaagatggttttcaacaaagagtagacctggtgggtgggtactatgatgcaggagatcatgtgaagtttgggttgccaatggcctacagtgtcacaatgcttgcatggggggccattgagttcaacaaggaaatcacggacttgaaccaaatgggacacgcattatgggcaattaaatggggaactgactactttatcaaagcacacactcagcctaatgttctttggggacaggtgggagatggagtttctgatcattactgctgggagcgtgctgaagacatgacaacttcaagaggtgcctacaaaattgatgaacaacaccctggctcagatctggcaggtgaaactgcagctgcattggctgctgcagctatagctttcaggccctacaactcttcttactctaatctcctcctagttcatgcaaaacagctcttcacattcgcagataggttcagaggtctctatgataactccatatcaagtgctcagcaattctata

SEQ ID NO: 207925 - DNA, 537 bp, Glycine max
gaaattgcctctttcaagaagcatctgagtgcttattatttgtaatatatatagtcactcaagcttctaggatttgtgccagctacatgaaaatgggaagcaacttcaggcttttgagtctttgcctcttggcattgattgcatcaacccatgctcaacttcagcttggtttttatgccaagagttgcccaaacgctgagcagatcgttttgaaatttgtccatgaccatatccacaatgctccatcactagcagctgcattgataagaatgcacttccatgactgttttgtaaggggatgtgatgcatcagtccttctgaactcaacaaccaatcaagctgaaaagaatgctcctccaaatctcacagtaagaggctttgacttcattgacagaataaagagccttgttgaggcagaatgccctgctgtggtctcttgtgctgatatcctcactttgtctgccagagacactattgtagccacaggtggaccatcttggaaagttccaacaggtccaacagatggggtcatctcta

SEQ ID NO: 207926 - DNA, 463 bp, Glycine max
actgaaaaaccgccgaaggcatttcccattgaaaatatatctgtacaacatattaacatgatatactgttaaatcttgtcaaccccagtaaaagctttcaaatagcttctaacctaaaaatgtaatacagtttgtttcctccccaacccccccaaaaaaaaaagaaaaaaaaacttgtcaaccaaatccgaatccttcatttgcttcatgaatggcaagcagtaaccttttttccaaatgttgcttagatggatactctggcaaatctaattgattgaaacaggtatgagcagaaggcaagtgatcagaactcccatatgccttatgtatctgaaacctctgggcacctgaaattccttgaagagcactaaaaccctccaaaggaaccttggatgtgccagtcacaaactgcagcagtctagctttgtcttctttgctgaaaccttgaacaaccttccaaaac

SEQ ID NO: 207927 - DNA, 603 bp, Glycine max
gaccgcgtcggtgacgcaataccgcgtcacccacaataacggtgacgtacaattgcgtaactggcgttgacgttacagtccccactcttcccccttatttatattttcacctctatcctccactaatcctctcctcccccacacacgtctttctctctccaccatgcaccaagccattccctaccgaacctccatcctgaccggaacatgtgacatggcacacgccggaggaatcaaagaattcaacctcgccaatccatccaacgttgccgcaatggtttcggagagcgcagtggtaatcattgggaaacgggggtgctgcatgtgccacgtggtcaaaaggttgttgcaaggtctgggagtgaaccctcccgtgtacgaggtcgacgaggaccacgaagccgccgttgctcgccacctgttcccgcagggcgccgaaacggtgcagtttccggcggtgttcctcgccggcaagttgtctcgagggttggaaagagttatggcaactcatatctcacgtgagttgattcccatcttgaaggatgcctgtgctttgtggctctgactctcactttagctacctacatctgctctttctttctt

SEQ ID NO: 207928 - DNA, 448 bp, Glycine max
catcaaatatacaaaggcacgccttatcaataaagtttatataggaacatttaactatgaagccaatcttttaaaataattagagtatcaaagaagcacaacaggctcattaacgctaccataaaaattaatcttgcagcattcaggaaaatggaaaccagcctcatctaggccagcctttgtaatatgcgggcatgacctcacatccaagtattgcagagacgtgcatttacccacaatgatgcctatacctgccactgtgatctttggacaattactaatcttcaaaatcttcaaactcaatccaggctcctcattgcttaatagctgaaaagcagcatcagtcaactcttcacagcaaccaatgtccagtgcctcaaggtttctgcattgacttaaaacacagctcactgaagaatcagaaatgtttaaacaccaatccatcctc

SEQ ID NO: 207929 - DNA, 516 bp, Glycine max
aacaagagaagatgagtacttaattatgaagagtaaaatgagaaatgactaaggatgcacaagacagaaaaggaacactcaaggaatacatacatggaaattaaaaaaaagaaaaagaaaaagaaaagacacaaaagggatacaaaatacacccttggacacaagcatgcttatctacaattcgatgcatgcccccatggttttggccttctcttccaaacacccccaacaactgtagctgatgagaggaaaagacgaaaaagcctaaattagggaactgcatagacagatcactagcactcctcaacatagaaattattattcttcgggggaaacaccatgcatagcccttgttggcaaattaatcaaggtagctagcttaattgattaattaattaagcgttgctcctgaaggatccaagagccttgatagctgctgctctaaggatgtattggtggtaaaatgcagccactgctgctccaacaattggtccaacccagaatatccactgatca

SEQ ID NO: 207930 - DNA, 517 bp, Glycine max
gtatattcagtcataggagactttcagtatctgttggaattgcaacagctgcttttgcacttgcaattcttgaaggaagcacgcagcccggagtttggtttcctgaagaggtatgtgttgagtacaagtgtgaggtaaagtctcacatcggataaaagtggaaaggttgagcaccatataagtgaggagaagacccataaacctgagccttaaggttttgggttagagtgtggtgtcaggtctcctcatgtggtgactcgtggtccacaggtgtacccctcgaatctgcccaacaattggtatcagagccgatggttcaagttggtgaccggctcagacgagtatgcaaagacttctccttggggggaaggctagcgggcatggcaagaaccgcaggtggacatggctatactcgtggatgataaagacttccccttgagggaaagactacgatgtggaagagactcactatataagcgtattcaattctcaatattattctttatgcaattaaaag

SEQ ID NO: 207931 - DNA, 417 bp, Glycine max
gaaacttccacgaggttttcggtgaaaaccaaatttggggctttgcatcgcaagatttaccctttccaatcaaaattcttctgccttcccctaccaattctttctctcaaccgatttatctgagtgaggggtttggccaatgacgagtggttttggtgaatcaacgagagcgtctgcaccgagcccatcatgctcggggaacagttcaaacgatgccggtgattttgaatgcaacatatgcttcgatttggcgcaagaccctgtgatcacactctgtggtcacctattctgttggccatgcctttataggtggctccaccatcactcccattctcaggaatgccctgtttgcaaggcccttgtgcaggatgagaaattggctcctctttatggaaggggcaaaacacagactgatcc

SEQ ID NO: 207932 - DNA, 482 bp, Glycine max
actgaccgaggaatttaacgctactacatgtgtgtactactacttacttggggggggggggggggggggggggggggggggggggggggggggggggggggggggggccggggggggggaggggagaagatgggggatttgggataaagaaaggaagggaagaaaaaaaaaaataaccccccaaaaaaagattttagataaataaaactagatgatgaatttttttcttaaaaaaaaaatagggaattttttttataaaaaaaaaaaatttttaaaactttttttaataaaactaaaatccccccctaaaaaaaacccatttttaaaaaaacaatttaaaaccccttaaaaaaaaaccccaaatttttcccctaaaaaaaacctgccccaaaaattaaatttcccccttttttatgtgaaaacccaaaaaaaaggaatttctttccacaaaaaaaatctttttttacaaaaacccttttttt

SEQ ID NO: 207933 - DNA, 516 bp, Glycine max
aacaagagaagatgagtacttaattatgaagagtaaaatgagaaatgactaaggatgcacaagacagaaaaggaacactcaaggaatacatacatggaaattaaaaaaaagaaaaagaaaaagataagacacaaaagggatacaaaatacacccttggacacaagcatgcttatctacaatttgatgcatgcccccatggttttggccttctcttccaaacacccccaacaactgtagctgatgagaggaaaagacgaaaaagcctaaattagggaactgcatagacagatcactagcactcctcaacatagaaattattattcttcgggggaaacaccatgcatagcccttgttggcaaattaatcaaggtagctagcttaattgattaattaattaagcgttgctcctgaaggatccaagagccttgatagctgctgctctaaggatgtattggtggtaaaatgcagccactgctgctccaacaattggtccaacccagaatatccactgatca

SEQ ID NO: 207934 - DNA, 529 bp, Glycine max
ccagcctggtgtgttgatccaggtctttgaaggtgaaagagcaaggactaaagataacaatttgttgggcaatttgaactttctggcattcctcctgcccccaggggtgttcctcagattactgtgtgctttgacattgatgccaatggtattttgaacgtctctgccgaagataagaccactggccagaaaaataagatcactatcaccaatgacaagggtagactgtcaaaggaagatatcgagaagatggttcaagaggctgagaagtacaaatctgaggatgaagagcacaaaaagaaggttgaggccaagaatgctttggaaaactatgcatacaacatgaggaacactgtgaaggatgacaaaattggtgagaaacttgatcctactgacaagaagaagattgaggacgcaattgagcaagctatccagtggctagacagcaaccagctcgcagaagcagatgaatttgaggacaaaatgaaggaatcggaaagcatctgcaatcctatcatttgccagatgt

SEQ ID NO: 207935 - DNA, 517 bp, Glycine max
  unsure (1)..(517): unsure at all n locations
ccagcctggtgtgttgatccaggtctttgaaggtgaaagagcaaggactaaagataacaatttgttgggcaatttgaactttctggcattcctcctgcccccaggggtgttcctcagattactgtgtgctttgacattgatgccaatggtattttgaacgtctctgccgaagataagaccactggccagaaaaataagatcactatcaccaatgacaagggtagactgtcaaaggaagatatcgagaagatggttcaagaggctgagaagtacaaatctgaggatgaagagcacaaaaagaaggttgaggccaagaatgctttggaaaactatgcatacaacatgaggaacactgtgaaggatgacaaaattggtgagaaacttgatcctactgacaagaagaagattgaggacgcaattgagcaagctatccagtggctagacagcaaccagctcgcagaagcagatgaanttgaggacaaaatgaaggaattgcaaagcatcttgcatcctatca

SEQ ID NO: 207936 - DNA, 498 bp, Glycine max
aggccagcccttttttttttttttttttttttttttttttttttttcactgtaaaatgtttaatcaattatgttcaattgtcaattttggccactaagttttttactttcattcaacaatctcgaaggaaatgtcatggtttttatcataccagtccgatctagaatgccatatctagcttaaagaacaatgccaggaaaatccataatgaaatagaatagatgaagtgctgtgataaaaattcttcctcgtcatgaccattttcttcatatgaacctaaatgatgcaactaccttctgaactttggaagcatacttgtctgagtcctcttccacatactgtcctgtcacggtatacagtctgttataccaaccatttgatgccatcccaatagctgaatacaaatacctgcgactctcaccaggattttgcagcaaatactcgatgtaataaatcccattagatgattcacaatctatgagtttagcagccacaccc

SEQ ID NO: 207937 - DNA, 529 bp, Glycine max
  unsure (1)..(529): unsure at all n locations
gagatggcattgtttcgctaggaggtccccatatccctcttaagactggaagaagggatggtagaaggagcagagctgatgtggttgagcagttcctcccagaccacaatgagtccatttctgcagttcttgacaagtttggtgccatgggaattgacacccctggcgtcgttgcactgcttggagcacacagtgttggtcgaacccattgtgtgaagttggtgcaccgtttgtacccagagattgatccagctctgaaccctgaccacgtccctcacattctgaagaagtgccctgatgccattccagaccctaaggcggtgcagtacgtgagaaacgaccgtggcactcccatgattctagacaacaactactacagaaacatattagacagcaagggtctcttgatagtggatcaccaactagccaatgacaagaggaccaagccttatgtgaagaanatggccaagagccaagactatttcttcaggagttctctagagccattaccttgctctcagagaacaac

SEQ ID NO: 207938 - DNA, 434 bp, Glycine max
aacagtgtataatgcccatgggccatgatttatttatttagaaagaacaacctagctttatgagtatgaatatcataagcattgtcactgccatcataacagcactcacacgcatacataacataattaacaccatgaacatgcccttctacccaactctaagctacttgcatagtactacatatataatatccttattgaaattaaaaaaaaaacaacagtaacatcggaagattaaaaaacatagcctcttaatcctcccatccccatgaacctgcagtggtctcggttcattgaaccagcccatttaaaggaaaagaccttaattattttttgcataatatattacagattttcttcctcgatcatagacaaggggaggaaaattcaagggtcctgatcatggtgcttgttggcaacattgcactgctttc

SEQ ID NO: 207939 - DNA, 532 bp, Glycine max
attaaatagatttggcaccccattctttcataaatatcaatgaatctcttctcttttcttttctgctctccccatcgatcaactaatgcacgcccgagttatcgtcaagagtcataagtgtaggaatttggccatggttaacaaaatcaattttattcaatcttaagcagcacaacacttcctctggaagttcctcttgcttttgtgcctggatagttaggccaacatcaagtattccatgctttacacggtctcgaagtgaatcaagtcctttccttgatatatagctaaagcgatgtatatccagatctatttcaaagtagttaggtcccttatagaactcgtgttgaggacgtgacaaaactggcttgccattgtaggcatttataagcttcttctcggcagaatacagattaaggtcctctggattaactactccagccaaaatttttagtctctccctatagggaaccaggctttcctttgtataccctttcaccttttctggctcgtcatctggatcatccccata

SEQ ID NO: 207940 - DNA, 408 bp, Glycine max
  unsure (1)..(408): unsure at all n locations
atgtccttattttatgtttactgaataattggagagtagatagattgatgatttgagcgtgcatgggtgagatgataagcacgcaacgcaattaaaaagaattaatatgcaacgaatggatgtgtttgaagctggcctcatatatcaataatggattagatctgattctggctcaacgttcatgacgatcaccacccactactccattccgggaagctctgggtatctggacatatacccagagaggaaagtctctgcctttcaaaacccttacattatgggcttcactgctgtcgctagcattggaggattgctctttggctacgacactggtgttatatctggagcccttctctatatcaaagatgattntccggatgtcaggcacagtaattttctccaggaaac

SEQ ID NO: 207941 - DNA, 447 bp, Glycine max
ctctggaccgagtcaagcggcggcgaatcggcatgactcggcgctgctcccactgcaccaacaacggccacaactcccggacatgcccgtcgcggggagggggcggcgtcaagctgttcggggtgaggctgacggatggatcaatcataaagatgatcgctagcatggggaaccttaacctgtcctcctgctcctcctccgccgccgccgcacatctgcaattccgttcatctccttcttcttgcaacctccccgcggcctcatcgcccaatccaagctccccgagctccgacccgccccaaggctacttgtccgatgaccccgcccacgtctccaccttcgctaaccgccgcggagatagaaaaaaaggagtgccatggactgaagaagaacatcggctgttcttaattaggctccagaagctgggcaaaggagactggcgaggga

SEQ ID NO: 207942 - DNA, 571 bp, Glycine max
ttcgtccttttttttttttttttttttttagccaaaccaagaggaacagaacagaacctcttggtgctatttgattatttaagcttcatttgtttacagttagaaagaataaatattttccaagaattgatctaacctgatctacataccaccatataacttgctactaattggaagattaaatgctagggatcaggaataaaaaaaatgatatataatggtacaaatgaaaagatgagcaaaagaaggcttaattactgctgctgtcttcaccagaccttacaagctcagacagcttgaattgcgttgtccttgccattgtttaaatccgaactaccaaccgggacatttgcatggaatgctgactgccttgagggctctcctaacaactttatggaaagaggggaaggctctctatcacgtacctgtgcttccccaatgcttagatgagacattcccacaagttcgtcaacattaacaggttcctttggaatgactgggattggcttgtggatctgatggtggcatgtctctcctccttaacttcttcaaggggtgaacccaagttgat

SEQ ID NO: 207943 - DNA, 448 bp, Glycine max
caatattccagttgggcacttctaaaactagcacaagaagaagaagcttcaaccccaggaataagcacggtttctaaaatgttttgcaattttcacattattcttctaattgctcttgcacttttggtacaaatatcatctcagctaggctccaaggtagaagtgcttcctggctttgaaagccctcttccttttgaactggaaacagggtacgttggattaggagaaaaagatgatgacatgcaagtgttttactactttgttaagtcagaaaatgatcctcagaaagaccctcttatgcttaggctaactggaggtcctggctgctcttcattttcaagtcttgcctttcaaataggtccacttcgattcaagatagaagagtatgatgggagtgtgccaaattagatcttgaagccacagtcctggacaaaggtttgcaacatta

SEQ ID NO: 207944 - DNA, 393 bp, Glycine max
cagatagtacaaacagttatttgacactactgctttgctcactttaaaatacaggatctttaaacattgacaattcaaaaaataaaaaatcatagacaaatgagcataacattgataacctagatttctgccaacatagcggctgagttacaaaggcatattagctatccatctactgaacatggcaaaaccttcctcaggcttgtactctggagctgtatgtcctgaacccttcacagttgcaaatgtcatttgattcgagtaaatccttgtgtatcctgcaacttggtcttctagaagccatggcctccaatcttccacaatggagtagtttagagccctaatccatgcttgggttgacatgaaaggaacaactgcatcatgatcttcact

SEQ ID NO: 207945 - DNA, 353 bp, Glycine max
  unsure (1)..(353): unsure at all n locations
ctctctctctctctctctctctctctctctctgcttcacttgcttgaagcaatggccaaagccttggcatcagtgctgctgtttctcctcgtagctgtgagtaatgtgttgagctgtagagcttgaacttgaaactcttccaccctcttaccctcaccctcaccctgttcactcccccacaccagcacctcttcacccaccagcaaatgctcctcacccacaccaccaccaccaccaccaccaccctccagcaccagcaccagcaccagcacctgttccttcaccttctcaccacaattaccctcctacccctgcccctgctaagcctnctactcaccaccatcaccatcacc

SEQ ID NO: 207946 - DNA, 432 bp, Glycine max
agtcggcggccgcccttttttttttttttttttcatactagaactatccatttcatacgtactgtcactcattattgtgtatgatcaattcaagcccagagcctacaaacgcaaaaccacaaataaaaatgaagacaaacaaaacaaggccagaaagaaggcaaattagagacaacacagctctatcatataacttaaaataacttgaaatatgatatatccataatttcttgcatttaatggcaattgggctcaaatgcaagaggcccaacagtgtagagcacaaaaggaagcctcttagacaagaaaggcttctcgggcctgagaagagcaccagtgacaccaccatggagatttgaggccttaagcccatagggtgcactaaccaaaaccacgttacacttgtgggccccgtacgtggttatgctcttt

SEQ ID NO: 207947 - DNA, 510 bp, Glycine max
ctgaaacttcctgatagtttatcatctatgagggtttctaggttaatttatacaaatcagggggttgcgattttggctttggcagcaaatgctgttcacaagctttggaaatggcagagaaatgagcggaacactactgggaaggccactgcaagtattcaaccacaactatggcaaccatctagtggaatactgatgactaatgatataagtgatactaacccagaggatgctgtgtcatgttttgcactgtcaaagaatgactcatatgttatgtctgcttcaggggggaaaatttctctattcaatatgatgacatttaagacaatgacaactttcatgccacctccaccagctgcgacatttcttgcatttcatcctcaagacaataatattattgctattggcatggaagactcttccatacaaatctataatgttagagtggacgaggtcaaaaccaagctaaaaggtcatcagaagagaattactggtcttgccttttctcat

SEQ ID NO: 207948 - DNA, 494 bp, Glycine max
  unsure (1)..(494): unsure at all n locations
aacaagatcaacaacaatagactagttcttgaggttgtggtgttggtgaaatttttgtgtggagatgtcaggtggtggatgcagcatagtgtggttcaggagagatctgagggtggaggataaccctgcactggctgcaggagtgagagcaggtgctgtggtttgtgtcttcatttgggctcctgaggaagagggtcaatactaccctggaagggtctctaggtggtggctcaaacaaagcttggctcaccttgattcctatctgagaaaccttggctcccctctaatcaccaaacgttccactaatagtatttcttctctcttggaggttgttaagtccaccggggctacccaactctttttcaaccatttatatgatccgttgtcacttgtgagggatcacanagcaaaggaggttctgacggctcaaggcattaccgtacgttccttcaactcggacttgttgatgagccatgggatgtgaatgatgctca

SEQ ID NO: 207949 - DNA, 443 bp, Glycine max
  unsure (1)..(443): unsure at all n locations
tcgcgatctagaacctcgagccgctcgtgccggcattgcatcaatagctttgagcccatggtcctgaggttgaatggagaatttgcaccatttgggaagctgcttatggcctgattcctacaagttcctcagctgttgatcttccggaaattatagttgcaaccccactacagcctcccgtgctgtcatggaatttgtacatacccctattgaaggtcctggaatatcttcctcgaggaagcccatcagaggcatgtcttatgaaaatatttgctgctacagaggaagctattcttcagaggacatttccacctgagtccactagagaacaaaacagaaaatcaaaatacctagctggcataggctntggctctgcctcaaaaaacctggccgaggcagaacttcgtacaatggttcattcactcttcttagaatcatgtgca

SEQ ID NO: 207950 - DNA, 499 bp, Glycine max
attaatgcccctttcattttctctgcatctgtagtatctatcaccaatcaattccactcttcttcccatcaaacaacaaaaaatcaatctgggaaacaaaaacaaaatgccgtcattagaggaggaactcttcccatcaaccccaggaaagttcaagatcgagcggtcccaccacatgaaccgccaactctatcgctgtttcgcctccaccagcaccatgttcctgtgggccctcttcttaatcgccctcaccgcttcctatctcagcttccaaggcttcgtcgattccggcagccgctacctcaccgcctcctggggcgggatccagtgggagaagcaggtccgcacctccgcccagatccaccgtcaaggcggcatgtccgtcctcgtcaccggcgcagccggcttcgtcggctcccacgtctccctcgccttaaaacgacgcggagacggcgtcgtcggactcgacaacttcaacgactactacgatccgtccctc

SEQ ID NO: 207951 - DNA, 521 bp, Glycine max
cccttcttcttcttgaccaggttctttcttcttctttttttctatctgtgacttaaaacctaccacactaaaaaagaaaaagaaaaaaaaaacccttcccgaataaaaaggaaacaaaacaaaatttattaatttacaggtttgccgtgattgtagccgtaataggaaagataccacttgacgaacttcttcaacccggtttgcaaatcggtcgtgggcttgtacccgagctctctccgggccgaactaatattcgcgtgagtaaaaggaacgtcaccgtttccaggcatgtccacaatattcctcttcgccttcaccttcaaatgccgctccaatatactcacaagagtaggaacagtaaccggcgaagtattccccaggttaaatattctatacggagcgggtccacgcttcttcccacccgacccggtactcttagccgaagtatccaacgacccgacgcaacccttcacaatatcatcaatgaggtgaaatccctagccaggtcgacatgggtttta

SEQ ID NO: 207952 - DNA, 483 bp, Glycine max
  unsure (1)..(483): unsure at all n locations
aaagaagttctaaggaagagggaatatgcagaatacaaggtgctagttgtctatttgcaataacaacatcagcgatccaaccttagtattcttcaacccagagagatttgtaataataaattacaacaacttaaacgatggcaggaggagcttatgtagattcgggaaatgcaaagcaatttgatgggaaggtcacggcattcgtattggttacatgctttgtggcagccatgggaggcttactcttcggttatgatcttggaataaccggaggagtgacttctatggaaccatttctcatcaaattctttcccggtgtttataaacaaatgcaagatgatgttggccatagaagccaatattgcaaatttgacaacgagctccttacactcttcacctcttccttgtatcttgctgcattagtagcttctttctttgcttccaccactaccaggatgatggngacgcagggcctcatgttct

SEQ ID NO: 207953 - DNA, 397 bp, Glycine max
gccctgcagagccgccaaagcaagcctgccctaaaaattgaacagggcagagagcaagggcaagcgagtgaacatgggaacctctgcgaacgctgtcgcaagtggtcgtggcggcgcccctgtccccaaagacgtcgactacgctaattacttctgcacctatgctttcctctaccaccagaaggagatgctctccgaccgcgttcgcatggacgcttacttcgacgccatttttcaaaacaaacgccacttcgctggcaagactgtttaggatgtggggactggaagaggcattcttgctatatggtcggcacaagcgggtgcgatgaaagtagatgcagaggaagcaaccaagatgtcagaacatgcgcgtgcacttgtcaaagcgaataatctc

SEQ ID NO: 207954 - DNA, 391 bp, Glycine max
tgcatatagagtgatcgtgatggcaccaaaggcagagtagtagccagcggagttgttgcccgcggtggtgaagtagtcgacggagggtgacaaggctccggcggagttgtagccaaaggccggattgtagcttccgaaggatggaagcgccggcggagtatggtagtagttgttgagatacacgaagatcgtggtgacatacaagatctacatcttcaaggttctgaagcaggtccaccctgacattggtatctcatgcaaggccatgggaatcatgaacagcttcatcaacgacatcttcgatatgcttgcccaggtatcttctagacttgcccggtacaacaagaagcccaccatcacttcaagggaaattcagaccgcggtcaggctt

SEQ ID NO: 207955 - DNA, 524 bp, Glycine max
gataggaataatatacgtctctgtattagcaactaattccatacaaagaaggatcaacaaatcccatattcttcacttacaaattgctttcaccaaaaagaaaaaataaaccaacacttcaacataaaacatattcctaacagagacacctagatcgaagcgaaggggcataatagtcagttcaagagctagtgaacttggtgacagccttggtaccctcagagacggcgtgcttggccaattcaccgggcagcacaagcctgaccgcggtctgaatttcccttgaagtgatggtgggcttcttgatgtaacgggcaagtctagaagattcctgggcaagcttctcgaagatgtcgttgatgaagctgatcatgattcccatggccttgctagagataccaatgtcagggtggacctgcttcagaaccttgaagatgtagatcttgcatgtctgcacgctcttcgtggatctcttcttcttcatcccttgtacgccggcgcctccctccttcggaagctttttt

SEQ ID NO: 207956 - DNA, 523 bp, Glycine max
ctcttggcatgaccattcaaatgtcttcttttctcttagcttctcttgctgttttctttttcttctcctccttggagaagagttttgcctttcaagcagcaagaaaggaggacacagaaagcaacaatcttcatcaatatactcatcttgttcacctcagctcactccttccttcatcttcttgcagctcttctaccaaaggtcccaaaacaaaagcatcattagaagtggcacacaaacatgggccatgctcccaactaaatgatcatgatggcaaagctaagtctacaacaccacacagtgacattctgaaccaagacaaagaaagggtgaagtacattaactcaaggctctctaagaacttgggccaagatagtagtgttgaggaattggactcagctaccctaccagccaaatctggtagccttattgggtctggaaattactttgtggttgtgggtcttgggacacccaagagggactcgtcactcatttttgacacttggcaggatctcacttggac

SEQ ID NO: 207957 - DNA, 424 bp, Glycine max
gtgaattcagttatttataaacattggcttcaacataagaacttcattacatcacaagacactcgcttgtatttgtacgtataaaaacttcatcaccaattcaagcacctgcagtagccacagctccttgatgagaatgaggcgagaaactttgaggttcatagataccatcctcgtcttcctctgagtcccaaaggaaactagcatatgctgcttgtacatggctgtcttcaggagaggctaggactgctctttcaaaatagctggaggcacgttctaggttgagaagtagttcccaaactaacttcccatactgggatagaacctctccatcattagggtctgcaagtatggcacgggaataatactcctctgctccttcacgggcttggttgcactgatacaaaaaataggcataattcct

SEQ ID NO: 207958 - DNA, 506 bp, Glycine max
cagaagttgaaaaggccaaagaattcacaagggggaagaacaaaagggcggcaatacaatgtctgaagaggaagaggttatatgaacagcaaatagagcagcttggaaatttccagttgcgtattcatgaccagatgataatgttggaaggtgctaaagccaccacagaaacggtagacgcgttaagaactggagcagctgctatgaaggctatgcaaaaagcaacgaatattgatgatgttgacaagactatggatgagatcaatgaacagactgagaatatgaaacagattcaggatgcattgtctgctccaattggtgcggctgctgattttgacgaggatgaattggaagcagaacttgaagaactgcagggtgctgagttggaagaacagcttcttcagccagcaactacagctcctgcggccccagtgcaggtcccagctgggcagcaacctacttcgccagttcccgcaaagcgaacttcggaagaagatgaatggcag

SEQ ID NO: 207959 - DNA, 552 bp, Glycine max
  unsure (1)..(552): unsure at all n locations
gtttatgatgttactgatgaagcatctttcaacaatattaggaattggattcgcaacattgaacaacatgcttctgacaatgtaaacaagatacttgtgggtaacaaggctgatatggatgaaagtaaaagggctgtgcctacctccaaaggtcaagcccttgctgatgagtatggtatcaagttttttgaaaccagtgcgaagacaaacatgaatgtggaggaggttttcttttcaatagcaagagatatcaagcaaaggcttgcagacacagattctaaggctgaacctcagactatcaagattaaccaacccgaccaggcagccaccgggggtctagctgctcaaaaatcggcttgctgtggttcatgaaacaaataacagatcagaatctgcagttagagggtgcagattcaacacttgccctcatatgggtgctatagttattttgatgacatttaaaagtgggagcatgtatttgtccttgtatttcccaactgcaaagactatgttttgaagatagtgctttaaattttttgcttanaaaaaaaa

SEQ ID NO: 207960 - DNA, 541 bp, Glycine max
aagcaaaaaatttaaagcactatcttcaaaacatagtctttgcagttgggaaatacaaggacaaatacatgctcccacttttaaatgtcatcaaaataactatagcacccatatgagggcaagtgttgaatctgcaccctctaactgcagattctgatctgttatttgtttcatgaaccacagcaagccgatttttgagcagctagacccccggtggctgcctggtcgggttggttaatcttgatagtctgaggttcagccttagaatctgtgtctgcaagcctttgcttgatatctcttgctattgaaaagaaaacctcctccacattcatgtttgtcttcgcactggtttcaaaaaacttgataccatactcatcagcaagggcttgacctttggaggtaggcacagcccttttactttcatccatatcagccttgttacccacaagtatcttgtttacattgtcagaagcatgttgttcaatgttgcgaatccaattcctaatattgttgaaagatgcttcatcagtaacatcataaa

SEQ ID NO: 207961 - DNA, 527 bp, Glycine max
ctttagtggtccattaatgcttccaaaccgagcttcagcaaatagtttatcagccccaatcaaatcttctggaggattcagagattccttggatgataagtctaaggctaatctagtgcaaattaaaggacgattttcagtgacatcagaaaatttagatctggtgaaggatattcctgtaagttcagtttcacgccgatcttcacagggatcaccaatgaggaaatctgcgagtgttggtgattggatggtggatttcaaacaaatgcagtcttccaatgattctgccaatatcaatattcctgcatcacttctagtgcctcatcttcacaatctttttcagcagacatctattcaacaggatcttataatgaatctgttgaatagcttgcaaactgccgaggcaattgatacttctcagaatggaaagttaccaccattacctcgcaattcagagaacaatggaagtgctgatacagcagtttcagagagggcaccactactgctgggcagaatttcagaaactc

SEQ ID NO: 207962 - DNA, 429 bp, Glycine max
cgcttcgcttccagacagagcatcagcagcacagcgaagaaccgcttcccgttccgtcactctctgccgctgaagaaaacaaagcaacaacgaagcttcgaaagaagaaagaagacgacgtcgtttccgataaccgcttcaagctccagaacggaagagaggtttttgaagaaaaagcgtacctcgtaggcgttgagcgcaagaacgaagttcaagatttcggcatcgaagagtctctgagcgaatagtcgcagttagctgacactgctggattataggttgtaggctctacttaccagaagcttacttctccaaatcctaggacgtacataggctctggcaaggtttctgaaattaagagagcaattcatgcattgggcgttgaaactgttatctttgatgatgagctgtcagctgggcaattgcgca

SEQ ID NO: 207963 - DNA, 522 bp, Glycine max
aatccaaatcgaaatcggattggatatgcatggctactaactgtagctacaaaccaatttgcactgccatcccaacgtgtcgaacatgatttcaataattacacatacatatgtacatgttatgctgcaaaattagatatattaaagaaagttaaggttgcgatacgcacagttgcctcatgggtgtaagcattcttgcaaaacgcaggggcacatgtgccttgatatatgttccttgctctgtatattcagttttctcaaccattccaacctggtgtatggtgctgagaaggtccccattttcaaatgggaccagagcttccacccaaaccatggagtcctttagcttgtcttgaactgcattacaaaattcttgcaagccattaccacttaaagcagatatgcatacaacatcatctcttttttcagcttctagcctgagtttctggggatcactaactttgtcaaccttgttccagacaatcaattctggaattggcgatacatctagttctgacagga

SEQ ID NO: 207964 - DNA, 341 bp, Glycine max
agcttacccatctgaaacaaatatatgatgctcctgaaagagcagagagcgtgatgggtagtttgggactttttggccgtaaagttgatactttagatcactatgaaaggagtttgggtgatatagaagataatgagagaatggaacagtcctcactagaagcgaaggaacttcaagctgccttcgtctcatttaagacacgattaggtgctgcaatagctttacacattcatgaaagagtcaatcccacggaatggattactgagaaagctcctgagcctcatgaagtttataggcctttctttaccgtttcatttattaaaagatggatcagcaagctg

SEQ ID NO: 207965 - DNA, 533 bp, Glycine max
cacaatgaatgctagtgctcacaaacaaggccttgcaatgacttatactaatgttacaagtttccacactcgttacaaacacattatcaattctaacaatttacaagaaaacaacagacatgcttcatcaaggacaaccaaatcagtgcggtcaaagtgaaaatacattgccttatatacagttgcagccaaggccatacaaatgtagctatgaactattcagaactatgaagaagtggagatctgtgactatcagacctttcagaatatttcactcgcatcagagctggatcattgtatgcattggccaacttgtcataaaattcagacatattatgctcgttttggtctgctctgtccttcttaatcaaacactcagcagaataattcttgaatatagggaagaaccgtttctggcaatactcattgaatagaagtgtgagaattggaagaggaagaatcaatatggatgctagaggaagcttctttaaaccaaaaagaccaatggctattatatgcatcagtatcaatga

SEQ ID NO: 207966 - DNA, 436 bp, Glycine max
cctaacccaagacgagagaatagaggaagcttggggtttgaatcgaatcgaatcgaagcgattcatcgatcgatcgatggctcttgtaggagttgaactgaagcatgcggcggagggcgtaccggatgcgaattgctccgccaagcccaccaagcagggcgagggcctccgccactactattctctcaacatccacgagcatcagctccttcttcgccaaaagactcataacctcaaccgtctcgaggctcagagaaacgacctcaattctagggagaggatgctgcgcgaagaattacagcttctgcaggaacccggctcttatgtcagagaagttgtcaaagtaatgggcaagaacaaagtccttgtcaaggtccacccagaaggaaaatatgttgcagacattgacaaaaatatagacattacaaagattact

SEQ ID NO: 207967 - DNA, 477 bp, Glycine max
ggtcttgaatataaatcttttaaaaatactctataaatgtagtgtgccgtcctaagacacagacaaggaagaactcgaggaaagaatcatgattgggtaaagttaagcaaaacgaaagccaatgccactgtaaattgaaataaccctaatgtgtgttctctgcccatcttcgcaggacaatgtgcaccacaaacatgaaatgagaatcacttccacaacttccgcaatgacatgtttttttcagtctcctttttcatcaccttcgccacggccatctcaaaatcctcctgagtcacgtgtaccctccgctccctcaaagcaaacattccagcttcagtgcaaacagccttaagttcagcaccagatgctccattcatcttctcggcaatcttcttcaaatcaatgccacgcattaaattcattcttctagaatggattttcaaaatatccagccgagactctttattagggtttgga

SEQ ID NO: 207968 - DNA, 466 bp, Glycine max
  unsure (1)..(466): unsure at all n locations
aggccagccctttttttttttttttagagtttgagaattcagttatttataaacattggcttcaacataagaacttcattacatcacaagacactcgcttgtatttgtacgtataaaaacttcatcaccaattcaagcacctgcagtagccacagctccttgatgagaatgaggcgagaaactttgaggttcattgataccatcctcgtcttcctctgagtcccaaaggaaactagcatatgctgcttgtacatggctgtcttcaggagaggctaggactgctctttcaaaatagctggaggcacgttctaggttgagatgtagttcccaaactaacttcccatactgagatagaacctctccatcattagggtctgcaagtatggcacgggaataatactcctctgctccttcacggncttgtttgcactgatacaaaaaataggcataattcctcagaaacaaa

SEQ ID NO: 207969 - DNA, 470 bp, Glycine max
gatgctcatctatgtcggaggccagcccttttttttttttttagagtttgtgaattcagttatttataaacattggcttcaacataagaacttcattacatcacaagacactcgcttgtatttgtacgtataaaaacttcatcaccaattcaagcacctgcagtagccacagctccttgatgagaatgaggcgagaaactttgaggttcattgataccatcctcgtcttcctctgagtcccaaaggaaactagcatatgctgcttgtacatggctgtcttcaggagaggctaggactgctctttcaaaatagctggaggcacgttcttggttgtgatgtagttcccaaactaacttcccatactgagatagaacctctccatcatttgggtctgcaagtatggcacgggaataatactcctctgctccttcacgggcttggttgcactgatacaaaaaattggcataatt

SEQ ID NO: 207970 - DNA, 488 bp, Glycine max
ctcacagaaagcttcctagaactgcttccgaatcatcagttaccaaccccatgaagaagcgtggaggatggaaggccataatctttattttagggaatgaaaccttcgagaggttggcagtgtttgggttatttgccaacttcatggtgtatttgacaagagaatttcacttggaccaagtttatgcttctaacattatcagtttatggtttgggatctcaaactttacccctcttcttggtgcctttatttctgatgcctatgttggtcgcttccgaaccatagcttttgcatcctttggtaccctttcgggtttgatcgtggtgagtttaacatcgtggttaccagaattgcaccctccatcttgtactcctcagcaactagcatctcgtcaatgcgtaagagcaagcagttctcaaataggtgtgcttcttatgggactctgcttcttaaccatcggatctgctggggtaaggccatgcagcata

SEQ ID NO: 207971 - DNA, 413 bp, Glycine max
ctctagctaccttgagacaatggtgagggttagtagtagttgaatgatgctcttaagagcatgtacaatgctgagaaacgggggaagcgccaggtcatgattaggccatcctcaaaagtgattataaaattcctttaggagatgcaaaagcatgggtacataggagagttcgagtacgttgatgatcacagagctggaaaaattgttgttgaattgaatggtagactgaacaaatgtggggttattagtccgcgttttgatgttggtgtcaaagagatagaaggttggactgctaggctgctcccctcaagacagttagggtatattgggttgactacctcagctggcatcatggatcatgaagaagctaggagaaagaatggaggagggaaagtgctgggtttcttttacta

SEQ ID NO: 207972 - DNA, 480 bp, Glycine max
gaagaaatccgttgaaattatggcgaccaatttggtttagcaaacaaaacaaagcacaccagaaaaacatctcctgctaatgctatacttgataaactacgggtctaacacattgatcattacaaccggtgagtttcaagaactgaaatcagagcaaaatcttcaaaggaaactaattaaactagtaaaagaaacccagcactttcccaccaacattctttctcctagcttcttcatgatccatgatgccagctgaggtagtcaacacaatatacccaaactgtcttgaggggagcagcctagcagtccaaccttcaatctctttgacaccaacatcaaaacgcggactaataaccccacatttgttcagtctaccattcaattcaacaacaatttttccagctctgtgatcatcaacgtactcaaactcttcaatgtacccatgcttttgcatcaccaaaaggaaatttatatcacttt

SEQ ID NO: 207973 - DNA, 513 bp, Glycine max
aacatgccaaacgacagcgttctgagtcttttcttcttcgttaccctcttcacatgccttctctctgctaattcccacgatgaccatattttcctaccgagtcaactccatgacgatgactcagtgagttgcactgctaccgacccaaaccttaactacaagccggtgatcggaatcctgacccaccccggcgacggtgcctctggccggctcagcaacgccaccggggtttcttacatcgccgcctcctacgttaaattcgtggagtccggtggtgctagagttattccccttatctacaatgagtcacctgagaaccttaacaagaagctcgatttggtcaatggagtgctcttcactggtgggtgggctgtttctggtccatatttggatactcttggaaacatttttaagaaagctttagagaaaaatgatgctggagaccatttcccagtaattgccttcaacttaggtggaaacctcgtaatagggatcgaagcgagcaaactgata

SEQ ID NO: 207974 - DNA, 451 bp, Glycine max
aggggcaataacaagatataacacattgatatgcagagcattgccctgaaattaagcatcttacaaacatcactgtgcacaaatttttatttcttcaaactacatccccagttcataatttattgtgcataaaatcaaattcaaggacacctcctacagatagaattattcaaagagatacacttgatcatatcctttcccagccgttccaccaaaagtaggtttgtaattgtagatgagattatctcgcactttttgagcatcaagagagttagaggatttcctagcttcacttatgaaaaagttagctgaggactgagtaacccgaattgcatcctctgagagaagggctttcaaagatgtagcccattcaaaagcatttttctctggttgccataagttgacagtcacgggatatttcctaccacgagctgaggaaacgaaagtcttt

SEQ ID NO: 207975 - DNA, 385 bp, Glycine max
cattcatgcaaccactgcttccaatgcagcagaaagtagctctggaacatattgtccctgcgagtatcctagccctccgccagactatacatcctgttcggcagactagtacagcgttgctcggatggaagacagtgacagacacactccgcgcacagactctgtgtacccacagtattaattggctaaagagaggactatatctggagatgcatactatggctctcacatgatgcactatggcgatgccaggcttagcagcgatgctctcttccattatccgggtacagatactgctaacgataatttcactcctgtggatgaatactgcttatggtcaccttgcaagccagtcagccaacgtgatgctgatctcatccatttc

SEQ ID NO: 207976 - DNA, 456 bp, Glycine max
  unsure (1)..(456): unsure at all n locations
ctatcaatggaggcgattaggaagagtaggattcttatattcggaggaactggttacatagggaagtatatggtgaaggcaagcgtctcgttaggccatccaacttgtgtgtacactcgccctcttgatgcacaaactccttcctctaaggcacagctntgcaaggagtgcaactctatgggggtcacactcgtccatggagaacttgagcgtgaccagattctggcagtgagtaaacaagtagacattgagatatgctatcttccataccctcaagtgacggagcaactcaaaaccatagatgctatgaaagctgctggtaatataaagagattccttgcatcagatgtcggggaggaagataatcgagtgaaccctcttcctccgttccaagctgtactcgatgagaaaagacaaatgagaagggcaattgaagcagctgggatcccttatacc

SEQ ID NO: 207977 - DNA, 354 bp, Glycine max
attaagaataaaatcatatttaagtctattaatcatgcataccaaacatttatgccttttcatgttattcaacggccatcgggaggatcacctactttattacaatttattaccaacacgtgcaggggaaaatgtcttcactcaaaagcagcataggcaggggctggaggatcaacatgaaatagttgcaagaagttcatcaatggacgtgtagttataatcaggatatacctgcgaagcttcaaggtcatcttccctaacttggaacctcacaaggccccttttagcaattccacattgatggttcaaaccgcaatattgtgcggagggggcaaggtctgtgataagctgtca

SEQ ID NO: 207978 - DNA, 488 bp, Glycine max
  unsure (1)..(488): unsure at all n locations
tctcagtctctgagtttagcgagctgatgattccgaacgagtgaccttcttcgtttctcgcaaagtttaagtaatcatgggtaaggaaaaggttcacatcaacattgtcgtcattggacatgtcgactctgggaagtcaactaccactggtcactagatctacaagcttggaggtattgacaagcgtgtgattgagaggttcgagaaggaagctgccgagatgaacaagaagtcattcaagtatgcctgggtgctcgacaagctcaaagctgagcgtgaaagaggaattaccattgatattgctttgaggaagttagaaaccaccaagtactactgcacggtcattgatgctcctggacatcgagactttatcaagaacatgattactggtacctnccaggccgactgagctagccttattatagactccaccactggaggntnagaagctggtatttctaaagatggacagacccgagagcatgctc

SEQ ID NO: 207979 - DNA, 563 bp, Glycine max
aaacagttaacaaaacttccttataaattaaatgcaaatttaagacatccctcctcagcagcaaaggaaatggactaaaaccctatggctgcttgtgaatttgaaaatctcagacttttaccatcaaaacaaaaaacagtactcatcaaaaacaaacagcaacgaaaatgttaccgccgatcaagaacccagttttgaaggctacggctacatgaaatcggcggacacttcaaaatataactggtaaaacaaacacctaagactctgcaaagataaactactgtaaaggaacaagtttttttgaaaccacgttgatgatcacatgtgctagcaaaattgccaaaatgcaatcacttcttcttggcggcagcctttgtgaccttggctccggtggggtctttcttctcaacactcttgatgactccaacagctacggtctgacgcatgtccctcacagcaaaacgaccaaggggaggatactcagagaaagtttcaaccaccatgggcttggctggaaccatcttaaccataccagcatcaccattcttcaaaaattgggctct

SEQ ID NO: 207980 - DNA, 312 bp, Glycine max
ctctagctaccttgagacaatggtgagggttagtgtgttgaatgatgctcttaagagcatgtacaatgctgagaaacgggggaagcgccaggtcatgattaggccatcctcaaaagtgatgataaaattccttttggtgatgcaaatgcatgggtacattggagagttagagtacgtggatgatcacagagctggaaaaattgttgttgaattgaatggttgactgaacaaatgtgggggtattagtgcgagttttgatggcggtgtcatagagatagaaggtgggactgctaggctgctgccctgaagaca

SEQ ID NO: 207981 - DNA, 478 bp, Glycine max
gaagaaatccgttgaaattatggcgaccaatttggtttagcaaacaaaacaaagcacaccagaaaaacatgtcctgctaatgctatacttgataaactacgggtctaacacattgatcattacaaccggtgagtttcaagaactgaaatcagagcaaaatcttcaaaggaaactaattaaactagtaaaagaaacccagcactttcccaccaacattctttctcctagcttcttcatgatccatgatgccagctgaggtagtcaacacaatatacccaaactgtcttgaggggagcagcctatcagtccaaccttcaatctctttgacaccaacatcaaaacgcggactaataaccccacatttgttcagtctaccattcaattcaacaacaatttttccagctctgtgatcatcaacgtactgaaactctccaatgtacccatgcttttgcatcaccaaaaggaattttataatcac

SEQ ID NO: 207982 - DNA, 559 bp, Glycine max
ctcgtcactccttgctcttagccctcctcctcttcgccgccgtggccaccgccgcgatggcggtggccgcgtccgacgccgacgacatcctgatccgtcaggtggtgccagatgttggcgaagccgaagaggaggacaacctgctgaacgccgagcaccacttcgcgagcttcaaggccaagttcgccaagacctacgccaccaaggaggagcacgatcatcgcttcggcgtcttcaagtccaacctccgcagagccaggctgcacgccaagctcgacccctccgccgtccacggcgtcaccaaattctccgatctaactccggccgagttccgccgccagttcctcggcctcaagccgctccgcttcccggcgcacgcccagaaggcgcccatcctccccacaaggatctccccaggatttcgattggcgagacaaaggagccgtcactaacgtcaaggaccaacgtgcgtgtggttcgtgttggtctttcagtacgacgggagcgttggaaagagctcattatctggccactggtgagctcgtgagccttagcgagc

SEQ ID NO: 207983 - DNA, 426 bp, Glycine max
aaacgaatcaaaggtacagaagcaacttaaacattttggtatccttttgggtatggcactaccacatccataagaaccaacattgacagtggcacgtatattagtttaattatgcaataactgagacataatcagtggcaagtattcccctgttgcagtttgaaacaaccccaccccgccaatctccatagagagttgcttatcttgcaccatttttaggaccacacatttccttggatttcccacttgtatatgtcaagcatacatacagaaattacatactacataaacaacatggtcttagcagtttcctgatcctatacggagataattttaccagtaccaaatgataaagttcacaacataaatatttatacaaactccccttagtccagtatcacatcacaaccacaatcaggcatatct

SEQ ID NO: 207984 - DNA, 498 bp, Glycine max
ctttcgcaaaaacgcattgtgtttctctctttccgcggcgtagatctgagcagtttgggaaaccctaactgctctcaccactctctttgctttttttcctctccgatcaacgacctctttcgtcgccctaagtcatggcaggacttgcacccgagggatcacagtttgatgctcgtcaatatgataccaagatgaatgagttgcttacatctgatggacaggattttttcacatcttatgatgaggtttatgacagttttgatgctatgggcttgcaggagaatctcctgagaggcatttatgcatatggttttgagaagccatcagctattcagcagagaggaatagttcctttctgcaagggacttgatgttatacaacaggcccagtctggaactgggaagacagcaactttctgctctggaattctgcagcaacttgactatagtgcgactgaatgccaagccttggttttagcaccaactagggagcttgctc

SEQ ID NO: 207985 - DNA, 515 bp, Glycine max
gaaaaaaaaccttgcttgttagaaaggtgcaacaactaccaatacatcaattcagaaaataatgtgactccacattgcaagtactcatcacttgggacattcagacgactcatatgtaaattaaattactacacctattaagaaggtcaaacaaggtttaagagcagaaatacaacaaaaggggcaaaatggaacaagagacattacataacacttacctcagaaaccaactttcctctaatatgatggaacaaaaaaactcatcaaaggagttcagcaacatttgaaggcagctcctcaataatcacattgtaaaacttctggatgtcaaacagcattttttcatcatcccttgtgacaaagttaatggcaacacctttcctaccaaaccttccactacgaccaatacgatggagatagctctcgggctgtgttgggagatcataatttataactagagacacttgctggacatcaataccacgggccaaaagatcagtagttattaaaacacg

SEQ ID NO: 207986 - DNA, 308 bp, Glycine max
ctctccctacctctaccttcggtatgcagctctacttaacgatcctgaccgttatgactatcactcttgatgcggaaagctctgacaccatcgacatccttcaggtcaagatacatgacacggatcgaatgccaccggaccatcatcgtctcacatttgctgtaatgcaacttgatgactgccgtacccttgctgactacaacattcagaaggagcgtactcttcagctcatgctacgtctccgcggcggcatgcaggatatcgctaatacactcaccggcacgaccatgaccctccaagtcgaaagc

SEQ ID NO: 207987 - DNA, 483 bp, Glycine max
cgctaacacacagagtgtgtgtgtgtgatatggcatcgacgtcgtcttctagcgaggaagcaccgatcacttagttgtacatgtaggagtgtttaggttggattgtatggttaagtggttggttctatgtggtctacgatatgctctttcagcgcatcatggcgagtcatttgcacaaccccatgcctctccctcccgtcaacgacctcacctgcattgtcaccggctccaccagcggcattggcctcgaaatcgcaaggcaagttagcacagtctggggcccatgttgttatggctgtcaggtacacaaaagctggtcaagtgttgatccagtagtggcaagttgactctgaaagatagagtattcctctcaatgttgaagagatgcaagtagatcttctctcataggattctgtcacgaggttagctgaagcatggaatgcacgctcagcacccttacataggctcatcaataatgctggg

SEQ ID NO: 207988 - DNA, 366 bp, Glycine max
gtctcaacttctagctcttccaactcctacaacgcttttctgtgcactcatgggcatagtcaagttcggtttctacggatttggaagtattggccgtttggttgccagagtcgctctgctgtgagacgttgttgaactcgttgccgttaacgaccctttcattaccaccgattacatgacatacatgttgaaatacgactgagttcacagacactggaagcatcacgaagtcaccgttaaggtcgagaagtcccttctcttcggagacatggctgtcactgatgtaggacactgaaaccctgtagagatcccatgggggtcaactggagctgacatcattgctgagtccaccggagtcttcaccga

SEQ ID NO: 207989 - DNA, 428 bp, Glycine max
aagaaattctaattaaaaagcaaagtccgatatctttctaactatatatatatatataggcgacaccaacctttctgcctctataccttaatatttcaaatacccagagggagtaacccctccaagcttcaattatctacattatccacattcctagctagctttatccacatctacaaaatagtccttagatttccctctctctttcttttgtataactgagtcatcttagatctcctttcacttccttcaaacaacaaaatcatgggtctgagagacattggtgcttcactgcctcctgagtttcggttttatccgagagatgaggaataggtctgccattacctctacaaaaagatcgcaaatgaggaagttctgaaaggtaccttggtcgaaatagacctccacatatgcgaaccttggcaact

SEQ ID NO: 207990 - DNA, 555 bp, Glycine max
  unsure (1)..(555): unsure at all n locations
gtgaagcaggcagagaagagccatggtgcacgtttccttctaccgaaactatgggaaaaccttcaagaagcctcgtcgtccgtacgagaaggagcgtttggacgccgagttgaagctggtcggtgagtacggacttcgctgcaagagggagttgtggagggttcagtacgctctcagccgcatccgtaacaacgccagaaatcttttgaccctcgacgagaagaacccgcgccgtatcttcgagggagaagcccttctccgaagaatgttccgttacggacttctcgatgagactcagaacaagcttgattacgtgttggctctcaccgtcgagaactttctcgaacgccgcctccaaaccctcgttttcaagtctggcatggccaagtccatccaccacgccagagtcctcatcaggcagaggcacatcagggttgggagacaggtggtgaacatcccatcattcatggntagggttgattcgcagaagcacattgacttctcacttgccagtccacttggtggtggtcgtccagacgtgtgaagagaaagaac

SEQ ID NO: 207991 - DNA, 432 bp, Glycine max
agaaagaacagttcaaaaccatgatatctcaagcacagctttacctcaaaacaagaaacaaggatggcaaaattataacaagtcagaccatttcaaaaatctaaaatgtctaccaacacagataatataaaaaaaataacaaccgcaaggcctaaatatcagtagccattaataatttaatcttcgtcctcctcatctccatctccaccagcagccttcttagcagcagccctttggttctttctcttcacacgtcctggacgaccaccaccaagaggactggtcagtgagaagtcaatgtgcttctgcgaatcaaccctaaccatgaatgatgggatgttcaccacctgtctcccaaccctgatgagcctctgcctgatgaggactctggcgtggaggatggacttggccatgccagactagaaaacgagg

SEQ ID NO: 207992 - DNA, 481 bp, Glycine max
gtacaaaaaagggttacttcagcttccacatatcttgaagaattgatcaatgggcaagtctgtagttgagaagctactttggatggcaattgtgtgcttggtgctgggtgtaatttccattactcccaaggcccaagcagcagtgacatgcaaccaggtggtgagcaacctcaccccatgcatttcttatgtgctcaatggtggcaaaaccgtgcctggcccttgctgcaatgggatcaagaccctctttaacctcgctcactccacaccagaccgccaaaccgtttgcaagtgcataaagaacgctgttagtgcgttccattatggcaagtccaatgtggaccgtgctgctgctcttcctaagcagtgtggggttaacattccttaccagatcagcccttccaccgactgtaccagagtgcagtgaggttaatgatatatggagcggtaactcgagaagagaaggatatacaatatatag

SEQ ID NO: 207993 - DNA, 485 bp, Glycine max
aaaaattaattctttattatacaatgaaattctctgcacaactgccaaacccattgtctagttttatgaggggcgaaaacaagatgaaactgtctatgctgaacaactaacgtatttgcttaactatgattcgatcctataaagcccacttatttctcaaagagttgaccagatgcaactaactcgacactatactgatgaacccacataatcgcagggttcacatgcaatctaaatttgcagttactgcaagtatgatatcctttgagaattcattcctgcatgatacaccttgaggtggattattgccctggagaccaattcctttatatgcggaggaagaactgctctgtttgctccctttagaactgtcaacacccttgcttgttccacggactcactgttgccggcatgcagcgtcaggttgcattgaagcgttatcccgcgatgcatttgtgtaacttcattacttcttagcagtctca

SEQ ID NO: 207994 - DNA, 197 bp, Glycine max
ctctgacccaactgaatatggatcatgtgcctgacgctgcactggtgagccgtgtaacagcgcatttgcttgcatactgcaggctggtggaatacaggaagaaaaggactatccatagcaccgggagacatggcacgctcaaagctgtcaagaccaaaggctgagctactgcatctaattacagagaaggatccctt

SEQ ID NO: 207995 - DNA, 180 bp, Glycine max
cgccgagacacaagaagagggagcgtgtgactgaggctgcgacagcgtgatggtgagcaacaccttccattacatactccaggctgcaggagtacaggaagatcaggaccatacatacgccgggagatagggcaccggcaaagctgtcaggaccacagtggcagatacttgctctaatga

SEQ ID NO: 207996 - DNA, 374 bp, Glycine max
  unsure (1)..(374): unsure at all n locations
accacattcacctgagagcttccaaagcaaaggcttcccttgcagcatccactagctgctgcttcccttggcatgtcagaaatgctaggaaaccccatcaacttcagtggagccacaaggccagctccatctgcttctagtcctgcctccttcaagactgaggctcttttctccaaaaagaaggctacaccaacacctccaaaaaaagctgctgctgctgctcctgccaatgatgagcttgccaagaggtatggtcctgacagaaggatcttcttgcctgaaggtctcttggaccgatccgaaatcccagagtactagaccggagaagtccctggagactatggntatgacccattaggtcttagcaagaagcc

SEQ ID NO: 207997 - DNA, 275 bp, Glycine max
ccaaggaacaaagcaaaatgccttaataatatctcagtgatatgtattgtacattaagattggagaaaaacatgaagatgaatgatttagagagttggagctctctcagcagacccggcaatgacagtgagcaagttgttgccaaaagggtcactgagatgttttgctaggttctcaacaggaccttctccggtgacatatgcttggaagtagaaaccaagcatggcaaacatagcaagtctgccattcttaattcccttcacctttagcagtgc

SEQ ID NO: 207998 - DNA, 482 bp, Glycine max
accacattcacctgaagcttccaaagcaaaggcttcccttgcagcatccactagctgctgcttcccttaggcatgtcagaaatgcttggaaaccccatcaacttcagtggtgccacaaggccagctccatctgcttctagtcctgcctacttcaagactgaggctcttttctccaaaaagaaggctacaccaacacctccaaaaaaagctgctgctgctgctcctgccaatgatgagcttgccaagtggtatggtcctgacagaaagatcttcttgcctgaaggtctcttggaccgatccgaaatcccagagtacttgaccggagaagtccctggagactatggttatgacccattaggtcttagcaagaagccagaagactttgccaaatatcaagcattagagttgattcatgccagatgggcaatgctaggagctgctggattcatcattcctgaagccttcaacaaatatggagcaaa

SEQ ID NO: 207999 - DNA, 416 bp, Glycine max
ccaaggaacaaagcaaaatgccttaataatatctcagggatatgtattgtacattaagattggagaaaaacatgaagatgaatgatttagagagttggagctctctcagcagacccggcaatgacagtgagcaagttgttgccaaaagggtcactgagatgttttgctaggttctcaacaggaccttctccggtgacatatgcttggaagtagaaaccaagcatggcaaacatagcaggtctgccattcttaatttccttcacctttagcagtgcagcttggtctggatcatttgcaagccccaatgggtcaaatggaccacctggatgaagattgtcttcgaagttcaggccattaataattgtgtagtcctctgcacctcccacaagaacaatctcagcaatgacagccacaat

SEQ ID NO: 208000 - DNA, 471 bp, Glycine max
gcagtgccggcgcgcgctgaagtttgctaggttcatgagcaggttcgggaagagttaccgaagcgaggaagagatgagggagaggtacgagatattctcgcaaaacctcaggttcatccgctcccacaacaagaaccgcttgccctacactctctctgttaatcattttgctgattggacttgggaggagttcaaaagacacagactaggcgctgcccaaaattgctctgccactcttaacggcaaccacaagctcactgatgctgttcttcctcccacgaaagactggaggaaagaaggaatagtgagtgatgttaaagatcaaggcagctgcggatcatgctggacattcagcacaactggggctttagaagcagcctatgcaccagcatttgggaagagtatctctctttctgagcagcagctagtggattgtgctggccgtttcaacaactttgggctgtatggtgg

SEQ ID NO: 208001 - DNA, 474 bp, Glycine max
  unsure (1)..(474): unsure at all n locations
agccagcccttttttttttttttttttttagtgcaaagtagcaaagacatgctatcttaattcttataactgataattaaagcggggcgcatcaatacaatacaatacaatatgtaactatgaactatcaatatatgatcgttatttatgtctgtgatacacacaattcaagccatgatattcttacgtgatttacagcaacttctaacttatttaatacatcataccaacccaactaggagcaattttcattatacaatgacacttatctttaaactctgaagcatgacaaggaggtaggcaccagggaccatattcttatgcaatttatgccacaactggataagacgcacaagttgcaacaccacacatgttcttccccaattccatttagaagtagccattctcaccccaactttctccccatgaattntntatgagccaatatgggacgccattttcaactccataccc

SEQ ID NO: 208002 - DNA, 571 bp, Glycine max
  unsure (1)..(571): unsure at all n locations
taggcagcatggaatagaaatacgtgttgcaagaatctttaacacatatgggccgcgcatgaatattgatgatggacgtgttgtcagcaacttcattgctcaagcaattcgtggtgaacccttgacagtccagtctccaggaacacaaactcgcagtttctgctatgtctctgatctggttgatggacttatccgtctcatggaaggatccgacactggaccaatcaaccttggaaatccaggtgaatttacaatgctagaacttgctgagacagtgaaggagcttattaatccagatgtggagataaaggtagtggagaacactcctgatgatccgcgacagagaaaaccaatcataacaaaagcaatggaattgcttggctgggaaccaaaggttaagctgcgagatgggcttcctcttatggaagaggattttcgtttgaggcttggatctgacaaaaaaaattaacttattttcgctccttttatatctagtcaaaatattcagataataagtgggatggattattctattaagttctcctatntttccttttcataattatgatac

SEQ ID NO: 208003 - DNA, 444 bp, Glycine max
aggccagcccttttttttttttttttttttttttttttttttttttttttttttttttttttttttttttttttttttttttttttttgggaaaccagagccccaacccgatgggggaaacccaaaacccgggccccccacctcctaaggatcaaaaatatgaaaagggaaaatgggaaaacccaaaagaaaaaccccccccacttattaacggaaaattttgaccagattaaaaaggggcgaaaataaggcaaactttctgggcaaaccccagccccaaaggaaaaaccccctccaaaaaaggaagcccctttcggaagttaacccttgggacccaagcaaggaattccaatggcttaggaaaaagggagtcccctggcggggatccccaggagggggccccactacccttatccccccatggggagaaaaaaaccccctcac

SEQ ID NO: 208004 - DNA, 500 bp, Glycine max
atttcccgaaaggctaaaatatccattgcacctttctcttcctccgatggctaatctctcactcttgttcttcggtctcctcctattctccgctgccgtagccaccgtcgaacgaatcgacgatgaagacaaccttctgatccgtcaagtggtgccggacgcggaggaccaccacctgctcaacgcggagcaccacttctccgccttcaagacaaagttcgccaagacctacgccacgcaggaggagcacgaccaccgcttccgtatcttcaagaacaacttgctccgcgccaagtcgcaccagaaattggacccctccgccgtccacggcgtcaccaggttctccgatctcactccgtctgagtttcgcggccagttcctcggcctgaagccgctccgccttccctccgacgctcagaaggctccgatccttccgaccagcgaccttcctaccgatttcgattggcgcgaccatggagctgttaccggcgtcaagaatc

SEQ ID NO: 208005 - DNA, 531 bp, Glycine max
aaagccaagttccccatttattatcaatatccaagactaggtttcccggattaaacaaaccatatacaccataatatccctgtaccacttcataatatgcttgcgatacaaaaaacatgttccaaaagctctgacaagtaaaaataaccaaaaacccattattctttggcggataaaaatgcgattgaagtgaacattaccccttccccctcttttctcccccaaatcttagtttcaaaagactacaagcactgcagcacacaataaaaaccctactatcaacacaccagttcatcccactttgtaaaagttaacttttcctgaagagttgcacaaagcacccaatgtcaagttcagtaataagccttgcgaggattgttcaggggattgggtctgtaacggtagccaagcatcatccgctttttgtactgctcatatatgtcatcctcagcactcacctctccaggttcctgagccccaacccccaggttattcttcttaacattaccggccatgataggatccgcaata

SEQ ID NO: 208006 - DNA, 300 bp, Glycine max
gtgtgatcctatagaatttggatcatgtgtctcaggctgtaatgatagtccgagtaacatcgcatttgagtgcatactacaggctagtgtaatacagaaagaaaaggactatgcatgcacgggaaaagatggcacctggaaatctgagatgaccatgattgcagctactgcatgtaactacagggaggtagccctagaggatgaactgatggctgcatacgtagtgtagaaagggactcttgcagctgctatcaatgctgttagtatgcagacatatggaggaggcgtgtcatgcccata

SEQ ID NO: 208007 - DNA, 461 bp, Glycine max
agaggtcctaagtccatataaatttttatacatgcgcacactgaaaggtaaactaattaaaggtacagaagcaactgacacatttgggtctccttctgggtctggcacttccacatccataagaaccaacattgacagtggcacggataaaagttaaataatgcaataactgagacttaatcagtggcaagtattcgcctgtcgcaggttgaaacaactccatatggccaatctccatagagagttgcttatagtgcaccatttttaggaccacacatttacttgcatttccgacttgcatatgtcaggcatacatacagaatttacatactacatatacaacatggtcttagcaggttcctgatcctatacggagactattttaccagtgccacatgatgaagtgcacaacgtagatattggtactaactggccttaggccagtactacgtcacagacac

SEQ ID NO: 208008 - DNA, 459 bp, Glycine max
aggtactgcgttaagggagcagactcagatggctcgtacgaagcaaaccgctcgcaagtccacaggaggctaggctcctacgaagcaacttgcaaccaaggctgctcgtaagactggaccaactactggtggtgtgacgaagcccgaccgttatcgtgctggtaccgtagctcttcgagagagtaggatataccagaagagtaccgagcttatgatccggacactgcccttacagaagctggttcgagaaagggctcaagactcgacgactgagctgcgagtgcagagccacaccgtgcttgcattgcaagaagcggctgaggcgtaccttgaagaactctgtgaagacactagcccgcgggccattgacgccaagcatgtgaccattatgccgaatgatattcagctgacaggaaagattcgaggcgagcgtgctagagatggaagctggaaagatga

SEQ ID NO: 208009 - DNA, 525 bp, Glycine max
tttttcctctcttcactttcactctctctctctctctcagccatcatcatgggagcagtgattctcccagatctcggcaccgagattttgattccggtctgcgccatcattggaatagggttcgccctcttccagtgggtcctcgtctccaaggttaagctctccgctgccagagacgcttcccctaacgccgccggcaaaaatggctacaacgattacctcatcgaagaagaggaaggcctcaacgatcacaacgttgtcctcaaatgcgccgaaatccaaaacgccatttccgaaggagcaacctctttccttttcactgaatacaagtatgtgggaatcttcatggtggcttttgccattttgatattcctattccttggctctgtggaaggattcagcacgagctaccagccttgcacctatgatcaaactaaaatgtgtaagccagctcttgctactgctgttttcagcaccatatctttccttgcttggggtgtcacatcgcttatttctggattcctt

SEQ ID NO: 208010 - DNA, 453 bp, Glycine max
agaaaattgaccacgcggaagagatggtaaacatcatcgtcatcatacaaggaaaattttcgcaacagactcagcctaatcaagttgtcttaaaactacatgagacaaaatatactttgtttcaaggtgggggaggaaaaggtttcaaaaacaatggaattgacatgacagatgagttaaagactaacacaaaaacgagaaggcattggtaaagggacggcttttccttgttctgtcgttgtagaaaaatgatggacgatactctttttctatcaaatcctttagatcttgaagagtaggccaccatgtgtagcaaagaagggagcaaacacaagagactcaaccgccatgagcttaataaggatgttaagtgaaggtccagatgtatcctttagagggtctccaatggtgtcaccaataacagctgccttgtgacaatctgacccttttgga

SEQ ID NO: 208011 - DNA, 400 bp, Glycine max
atgtgtttgcctcttgttctatgctgtcgagtacggcacaaaggcaactaggggggagtgttcaagaatttgttcattgcaaccgtgagaaatcaaccccctacacatgtatggatctagctagccaatttattaataaggcacatattgggaagcccaaaatgcaatatgtcactcggatttaggttccacccaaccgatgaggagctgattcttcactaccttattgaagaggtagcattcatacccttgagcgataccattattggtgaggatgatatctacaacgttgatccatgggacttaccacctaaggccacctttggggagaaagaaaggtatcttttcagacctagagaccgacagtacccagatggtgcaaggatcaacagggcatttt

SEQ ID NO: 208012 - DNA, 491 bp, Glycine max
gcatgaagatttaactatgcatgttttactattagttcctgcaatagtctttgtgcttgtatgcataaaagaaatagaagacacattcaagttttcaacttcagccgagtgcaccacccccacggtcagacacaaggttattaaaatgggggtggggaaaacttgatcttccaagtgaaacaaacattttaaagacgggaagatgattttgtagaccttggatctgtactatattcatacgcaccaatacctcggtatcttccaagtcttgcagcattaacatactgcacaagtggagggcacggtgcatatttgctgacaccaaagccagcatgaaaaactctcattattgacaagcacacatcctatccaatgaagtctgcaggctctaaaggacccactggatggttagtacccaccttcattcctgtgtcaatatgcggtacgggtgcaacacccctgtagagagcaaaaaatgctccacctatcat

SEQ ID NO: 208013 - DNA, 495 bp, Glycine max
gtctcatgcaagcacttgctgtcctagacttgagctgtaacatgttaagtggaccaattcctcctatcttgggcaatttaacttacacagaaaaattgtacttgcatggaaacaagctgacgggcttcatccccccagagcttggaaatatgtcaaagcttcactatttggaactgaatgataaccatttaagtggacatatcccacctgagcttggaaagcttactgatctgtttgacttaaatgttgctaacaacaatctcaaggggccaattcctagtaatcttagctcatgtaaaaatctcaacagcctcaatgtgcatggaaacaaattgaatggatcaattcccccttctttgcagagcttggagagtatgacctctttgaatctttcttccaacaatcttcagggtgcaattccaattgaactgtcacggattggtaatttggatacattggatatttcaaacaataaattagttggttccatccctt

SEQ ID NO: 208014 - DNA, 383 bp, Glycine max
aaataatatacatgattcttgaaattgattttcatttcaaaatcctctcactcactcactgtttcgagagattacttctccaaacttgaggaagagttgagcatctgaagtgctcattgaggggcatattactaagtgtggggttttgaggatcgcatactcatccacgttgcatggtactttggcagatggattagaagcaggtggttggccagctaggtgctttggtgggatgcttgatggcacgtgactttcgcgtacacgtgtcagttcgagcattgctggcctatcagatggctgccgctatgtgcataatagagcaggctgagtaaccctggttacagctcctaggaccttgcatgtggcagttacgttgggatcaa

SEQ ID NO: 208015 - DNA, 526 bp, Glycine max
  unsure (1)..(526): unsure at all n locations
gccagagtgatgtaaaggctgggggtgatgtgtgtggtggagttggcattcttggcattgcttgggcctttggtggcatgatcttcattctggtgtactgcactgctggaatctcagggggtcacataaacccagcagtgacatttgggctcttcttggctcgcaaggtgtctttgattagagcaataatgtacatggtggctcagtgcttgggagccatatgtggagttgggttggttaaggccttccaaaaggcttactacaacaggtatggtggtggggccaatgagctcagtgaggggtacagcacgggtgttggattgggtgctgagatcattggaacctttgttttggtctacactgtgttctctgcaactgaccccaagaggaatgctagagattctcatgtgccggttntggctccacttncaattggctntgctgtgttcatggttcacttggcaaccatcccagtaacaggcactggcattaaccctgctaggagtctaggagcttgttgcatgta

SEQ ID NO: 208016 - DNA, 513 bp, Glycine max
ctaatagattttacttccaatatatcaaaaaaaagctcatcaattctaacaaggaaatacaaaggaaagtgcttcgaagtactaaagggtctttactatttaccaaaggcttacttttcttgaaagaacctttaatctgcagaggatcaaagcacaaacagcaccatattattattattattgttgcaatatcaactttttttgcctccaattatcttttttttaccatttccactaaccccccatgaagaggaaattgactcaaatagtggggttgctcctgaatgatccaagagccttagcagcacttgctctcaatatgaattgatggtagaaggctgcaattgctgctccaataaagggtccaacccaaaagatccaatggtcatcccaagccttctgatggttgtacatgacagcagctcctagactcctagcagggttaatgccagtgcctgatactgggatggctgccaagtgaaccatgaacacagcatagccaattggaagtgg

SEQ ID NO: 208017 - DNA, 548 bp, Glycine max
  unsure (1)..(548): unsure at all n locations
gttgttgtaactcgttcttcttcttttgttgttctgtgtttgtgtttgttttttctctcacctgaaaatgtcttgctgcggtggtaactgtggttgcggaagctcctgcaagtgcggcaacggctgcggaggctgcaagatgtacccagacttgagctacactgagtcaaccaccaccgagaccttggtcatgggagtggcacctgttaaggctcaatttgagggtgctgaaatgggtgtgcccgctgagaacgatggctgcaaatgtggaccaaactgctcctgcaacccctgcacttgcaagtgaggtgttgggagagcaagcttcaagcagagatagcccttaattaggaataatgataaactattaatgtgtagctaaaaacttatgtattatgtctgtgatggttttcgtgcactctggtgttttgtgttaaacaaacatccttagaataaagtggtcatgtcttgcctttcagcaagttcaagtgttttggacttgtgatgggtgtgttaagctcatggntgcttcttttttttttttttta

SEQ ID NO: 208018 - DNA, 525 bp, Glycine max
aaacaagaggggtttgccttgtgccgtttgtgttgttttcgggacgaagaagaagatggtgtcaggttctggaatctgcgcaaagcgggtggtggtggacgcgcgccaccacatgctgggtcgtctagcctccatcgtggcgaaggagcttctgaacggccagaaagtggtggtcgttcgctgtgaagagatttgcatctcgggcgggctggtgaggcagaagatgaaatacttgaggttccttcgcaaacgcatgaacaccaaaccctcccatggccccatccacttccgtgccccctccaagatcttctggcgcaccgttcgtggaatgataccacacaagacaaagcgtggggaagctgctcttgctcgtttgaaggtttatgaaggaatccctcctccatatgacaagaccaagagaatggttgttcctgatgcactcaaggtgttgaggcttcagaagggacacaagtattgtgtgctgggcaggttgtcatctgaagttggatggagctactatgatac

SEQ ID NO: 208019 - DNA, 509 bp, Glycine max
atacaaaacacacaattaaataaaaaacagcttccaagatgatcagatatcaaatctatgatccaataacaaagcaacctcaagcaaaattgaaaggtagttcaatttggtataagtggcataaaaaatttcaaacactaacaaaaactactcaatacttaacaggagcaagaacatcaagttgggaaccgagcttctcttcagcaaccttctcagctttcacccttaatttgttgagttgcttctttctctcgtaaaccaccgctgccttctcctttctcttcttctccagctccctaatggtatcatagtagctccatccaacttcagatgacaacctgcccagcacacaatacttgtgtcccttctgaagcctcaacaccttgagtgcatcaggaacaaccattctcttggtcttgtcatatggaggagggattccttcataaaccttcaaacgagcaagagcagcttccccacgctttgtcttgtgtggtatcattccacgaacg

SEQ ID NO: 208020 - DNA, 502 bp, Glycine max
cggtgctcaaagaaatcttccgcactgatggtgagcaagccctcaagtttccaccacctcatgtcatcaaagttcgtgagtctgaatggatgactgatgaagaatttggaagagagatgcttgctggtgttaatcctggcatgattcaacgccttcaagagttccctccaaagagcaagctagatcccacagagtttggagatcaaactagtacaataaccaaagaacacttggagatcaaccttggtggactcaccgtagaacaggcactgaaaggtaacaaattgttcatattagatcaccatgatgcattcataccgtttatgaatttgatcaatggcctgcccactgcaaagtcttatgccacaaggaccatccttttcttgcaagacgatggcacattgaagccattagccattgagttaagtttgccacatcctacgggacatgagtttggagccgatagtagagtagtcttgcccccagccgcagtcaacagcgc

SEQ ID NO: 208021 - DNA, 454 bp, Glycine max
ttttttttcttcttttttttttttttttttttttttttttttttttttttttttttttttggtttttttaagggtcatttttgttcctttattcaattttgaattaaaaaacacaaactggggccaaacccggacatcccccaggggcacaggggaccataaaaaaattaaaggggaaaaaacccccaaggggcaccaaaaaaaaaaagggcccccaacccccccggaagaaaaagaaacacccccccccgggggaccacaaacaaaaaaaacacagggggggggccacccctctataaaaaccgaaaaagaaacccgccccacacccccacctgggaaaaaaaaaaaaaaaaacatgccccccccccccagggggggccccacccccccacaaaaaaaagaaccccaaagggggggagaaaacccccaccaccacacgcgcccccaggggggg

SEQ ID NO: 208022 - DNA, 483 bp, Glycine max
  unsure (1)..(483): unsure at all n locations
gaaccttgagacatcatgaagatttcaagttccaagcaattggctgtgggatttgcacttggaaatgaaggataggcaacgttggagagctgaagaggatgctttacttcgtgcatatgtcaaacagtatggtcctagggaatggaatctcgtgtctcagcgcatgaacacacctcttaacagggatgccaagtcatgcttagaaaggtggaagaactacctcaaacccggcattaaaaaaggatctcttactgaggaagagcagcgtctagtcatcaatcttcaagcaacgcacgggaacaagtggaagaaaattgcagcacaagtccctggtcgcactgcgaagaggttagnggaagtggtgggaagtgttcaaagagaagcagcaaagggaaaccaaggggaatagctgcactattgacccaattagcgatagcaagtacgagcatatccttgagagttttgcagagaaactagtgaaag

SEQ ID NO: 208023 - DNA, 501 bp, Glycine max
gtatgaaaagatagggatattaataaccatatgtaacaacatttttcagaataatgacaggaacaaaactactatgactataaagttcatatcatataaattcaagacataataagtaaaagcaaactagatttcccaattgtgaatggtgtcactctatcttccatttggttcagtgagccttgatctgcaccctacctgttctagaaacttagtaaggcgcaagtgttttgcagcccattgttcagccaacttctgctccttgctttctgcatctcttctcaaccctgccaactgctccctatattctgcttcaattctatccaatgcagctgtttgctcctctctcagagctttgatcttcgcttcaatttcctccatcttctccctccttcggccggcctctcggactccaactgcagctccaccctacttaaccgccatgccgcctctttctatgttcggcaaagcatgatgcacttcattcactccttgagcact

SEQ ID NO: 208024 - DNA, 397 bp, Glycine max
ggagtgtctttgtttcctttcttgccctgtatgatatgagagcttgattcgttgccttcaaatcctgcaaggccagaggaagcaatcaactcaaacgacaccatgtctggaactatgtctcctaaaggttctttcaagaagaaagcaatcaatgcctctaacatgctgaggaattctttgaccagaaagggtacgcgaagcagtaaggtcatgtccgttgaaattgatgatgtccacgatgctgacgagttgaaaatagttgatgagttccgtcaagctcttattttggacgaacttcttgctgcagaacacgacgagtatcatatgatgcttagattcctggaggccaggatatttgatattgacaaaacaaagcaaatgtggtctgaaatgctca

SEQ ID NO: 208025 - DNA, 549 bp, Glycine max
  unsure (1)..(549): unsure at all n locations
gttgttgtaactcgttcttcttcttttgttgttctgtgtttgtgtttgttttttctctcacctgaaaatgtcttgctgcggtggtaactgtggttgcggaagctcctgcaagtgcggcaacggctgcggaggctgcaagatgtacccagacttgagctacactgagtcaaccaccaccgagaccttggtcatgggagtggcacctgttaaggctcaatttgagggtgctgaaatgggtgtgcccgctgagaacgatggctgcaaatgtggaccaaactgctcctgcaacccctgcacttgcaagtgaggtgttgggagagcaagcttcaagcagagatagcccttaattaggaataatgataaactattaatgtgtagctaaaaacttatgtattatgtctgtgatggttttcgtgcactctggtgttttgtgttaaacaaacatccttagaataaagtggtcatgtcttgcctttcagcaagttcaagtgttttggacttgtgatgggtgtgttaagctcatggntgcttctttttttttttttttta

SEQ ID NO: 208026 - DNA, 549 bp, Glycine max
  unsure (1)..(549): unsure at all n locations
attttattaaccgcttctacaaataagctatccgtgacacatgatgaagcagaggactatgcttctttgatcatgaaatttctagacaagaaaaacaaaggctacattgagatatctcaaatggggtctctattcaaggcaacanatctatcaaattcaaaggcacattctccaatgaaacaagtatcatcagtaggtagcagcacacacaatgttcttcataacactagcggtgacttttgtgaagaacaacaagaaccaatgtcaaggactgaagttttgttcagaacttattggagacgtgcttggattgttctggtttggttgcttgcatgcttgggattgtttgtgtggaaatttgttcaataccgccatagatcagggtttgaagtcatgggttattgtcttcctactgctaaaggtgcagctgagaccttaaaactcaacatggctcttgttcttcttcctgtttgtagaaacacaatcacgtggctccgcanacaccgtccgatcaactctgttgttccattcaatgacaacattaacttc

SEQ ID NO: 208027 - DNA, 557 bp, Glycine max
gtcggcgatggtggcacaggaaagacaacctttgtgaaaaggcatctcaccggagaattcgagaagaaatatgagccaaccatcggtgtggaggttcacccattggattttttcacaaactgtggaaagattcgattttactgctgggatactgctggacaggagaaatttggtggcctcagagatggatactatatccatggacaatgtgctattatcatgtttgatgttactgcccggctaacatacaaaaatgttcccacctggcaccgtgatctttgcagggtctgtgagaacatcccaattgttctttgcggtaacaaggttgatgtcaagaacaggcaagttaaggcaaagcaggttacattccacaggaagaagaatttgcagtactatgagatttcagctaagagcaactacaactttgaaaagccattcttatatttggccaggaaacttgcaggtgatcctaacttgcacttcgtagaatctcctgcattggctccaccagaagttcaaattgatttagctgcacagcaacagcacgaggctgagct

SEQ ID NO: 208028 - DNA, 527 bp, Glycine max
gatcataattgattcagatcctcgaattcacatccaaaaatgtcaacactacaacccccaacagcacatacggtagcatacaaataccaacactcaggaagacagtccacaaacactcaagccctctactcaaaagattcatcatcatcgtcaggaaggggctgactagcagctgcaagaagctcagcctcgtgctgttgctgtgcagctaaatcaatttgaacttctggtggagccaatgcaggagattctacgaagtgcaagttaggatcacctgcaagtttcctggccaaatataagaatggcttttcaaagttgtagttgctcttagctgaaatctcatagtactgcaaattcttcttcctgtggaatgtaacctgctttgccttaacttgcctgttcttgacatcaaccttgttaccgcaaagaacaattgggatgttctcacagaccctgcaaagatcacggtgccaggtgggaacatttttgtatgttagccgggcagtaacatcaaacatgataatagc

SEQ ID NO: 208029 - DNA, 546 bp, Glycine max
taattttgtgcatgggttcccctttgtttgtgtctccatcggtcttacaattgggaaagttcctacagttggcgttgtttacaatccaataattaatgagcttttcactggaattcgtgggaaaggtgcttttctaaatgggaaccctataaaagtatcatcacaaactgaactaatgagcgctcttcttgtgactgaggttggaacaaaacgtgacaagttaacaatagatgcctgtacaaataggatcaatagcttgcttttcaaggtgagatcccttcgaatgactggctcctgtgctttaaacctttgcggaattgcatgtggaaggctggatgtatgctttgaacttggctttggaggtccttgggatgtggcaggcggtgctgtcattgttagagaagccggaggtgttatatttgatccgtctggtgcagattttgacatcacatctcagcgggtggcagcttccaaccctttcttgaaggatgcccttgttgatgttctgcaccaaatcgtgtgagaagcttactattaatcaatgac

SEQ ID NO: 208030 - DNA, 524 bp, Glycine max
ctgcaatttttttttttttttttttgcaaccaagggatgtatatataaaaataacaaagtcgcccgtaacgtacatatataccagaaacaaatttttcacgacatatgatattacaaatgactaaaacttctagataacaacgaacacaagctatataatgaattcccacactaccacgcagttcaaaattattgcataccaataatttcaagaacccttattaactttcactttcaaagggattggtacaacaatatcatatgctaataaatataatcttaagatgaagaagcaggtttgggagatgggttgaaaggaacctgctcagcgcatgtaaggatttcatggggcccagcctgtgctcgaccaacacctagaaggtcaagataatactggtgatgggaaacgatattgatcatcgagtccacatcaccttgtccacaaacaccatccccatacagaatgttcattgtagtgccaaatccaggacgccgatcatccatagtatcattcttgctaggct

SEQ ID NO: 208031 - DNA, 311 bp, Glycine max
cagataccattacatatggaagaatatacattgttaaaaccgctttacctacatttcaatgtgcgtgtggtttaaatgccatgtacgattggttagactacttgcgagcacatttagagggggaatcaatagttccacagatgcactcaataaaattagccccctaccagagctcaaggatatctttcgcactgatggcgaacacctgctcaagtttgcaccacctcatgtcagcgaagttagtaaacactgcatggatgactgatgattaatcaggaagagagatgcttgatggcgttgatgcatgccta

SEQ ID NO: 208032 - DNA, 456 bp, Glycine max
ttattttttttttttggtgacatagagaaatttgatctgacattcatagatcagaatatcagacttacatacgggtgaacatgatacgggtgaacatgataggagcacaatactatacataaaaactgacacaacaccctattagatatgaaaaactagatagcatccaattacaaaacttaagcatacataagaaaattatgcacacataagtttgcacgtacatctgccaatgagaggtacgttggaaggaaagaaaaccacacaccacacaccacacactctcattagatagagatgctgttgggaattcctctgaaagtaaggtcttccccactggtaggaagaaacacagtgtaaggcatctgcgccggtgcattacggatcctaaagcttgaattcttgttcctccctgagatattgacctcaatctcctttaactagggtccaaactta

SEQ ID NO: 208033 - DNA, 353 bp, Glycine max
agaagaagctttatataccgatgaaagaataccctggttacaatttcattgggcttattattggtcctcgaggtaacacccagaagcggatggagaaagaaactggtgctaaaattgtgattcgtggtaagggatcggtgaaagagggtaggcttcagcagaagagggatttgaaacctgacccttcggagaatgaagatttgcatgtgttagttgaggcagagacaccggagtcgcttgaggctgctgcgggtatggtggagaagctcttgcagcctgtggatgaggtattgaatgagcataagaggcaacagcttaaggagcttgctgcgttgaatgggacgatcagggat

SEQ ID NO: 208034 - DNA, 469 bp, Glycine max
gtgaaaacggattggagcaaggccccattcacagcctcatacagaaacttcaattcccaaacttcttcctccactggccaatcactggacgccacggggcaggcaaagatccgttgggtgcaaaagaattacatgatttacaattattgcactgatatcagacgtttccctcaaggccttcctccagaatgctccattgcatgagaatatttaattcaatgttgcatatcattataaaatgatcctcatgaacgtgacacacatgtgttgcctattacgttaatttactttcttgtgtaaattaatgcaactaaaactgttattattgttggtttgtgctttgttgagcactactccattgtttgtggcgaaagataattatagcgtgcaaaattatattcatggcagtgtatatgtgctgaaattgtaaagtattttcattaataaaattgttggagttttattattc

SEQ ID NO: 208035 - DNA, 432 bp, Glycine max
gaataataaaactccaacaattttattaatgaaaatactttacaatttcagcacatatacactgccatgaatataattttgcacgctataattatctttcgccacaaacaatggagtagtgctcaacaaagcacaaaccaacaataataacagttttagttgcattaatttacacaagaaagtaaattaacgtaataggcaacacatgtgtgtcacgttcatgaggatcattttataatgatatgcaacattgaattaaatattctcatgcaatggagcattctggaggaaggccttgagggaaacgtctgatatcagtgcaataattgtaaatcatgtaattcttttgcacccaacggatctttgcctgccccgtggcgtccagtgattggccagtggaggaagaagtttgggaatcgaagtctctgtatg

SEQ ID NO: 208036 - DNA, 563 bp, Glycine max
  unsure (1)..(563): unsure at all n locations
cggacacacaaaaaaagaaagtaaaaaagaaaaccctagaggagaagaagccaaaaaaaagaagccaaaaaaaaggctccaaagatgggtttcaaaagctcttctcttctatgcctagctcttttgcttgcatgctcttcggctattcatgcctttgacatcacacaactgctaggccaatatccagagttttccacattcaacaaatacctaacggaaaccaagctcgcagacgaaatcaacagccgcaacaccatcactgtcctcgccgttgaagactcagccatgaattccattgctgccaagtccccagaagccattaaggccatcattagcacccatgtcatccttgacttctttgatgagaagaagctcatggaagctcaagctaatagccaacagttgacaaccctattccaggcctcaggcattgcagtgaaccaacaaggcttcctcaaggttgcactcgtcggcgaaggcgagatncgccttcgctcggccggagtggcgccccagtcgacgccaccgagctcatgaggaccgcaccagcgagccctacaaca

SEQ ID NO: 208037 - DNA, 540 bp, Glycine max
  unsure (1)..(540): unsure at all n locations
agtcttcgaaggaactggtgccttggcactctgtgctggcacaggtgactttgcaaccggtgtcggaatgggtgccttggcaccttgtaatgatgacataggagctttggcaccctgtgcagcaacgggagcattggctccttgtgaggattgtgcaccagatgatgaggctggggtttgtgaatcaacacctgggactaggatgggtttggtgacttggagaatggagatgttgtagggctcgctggtgacggtcctcatgagctcggtggcgtcgactggggcgccactcacggccgagccgaaggcgatctcgccttcgccgacgagtgcaaccttgaggaagccttgttggttcactgcaatgcctgaggcctggaatagggttgtcaactgttggctattagcttgagcttccatgagcttcttctcatcaaagaagtcaaggatgacatgggtgctaatgatggccttaatggcttctggngactcggcagcaatggaattcatggctgagtcttcaacggcgaggacagtgat

SEQ ID NO: 208038 - DNA, 429 bp, Glycine max
gaagcagaagggttcctcactctcttcatctgattgaacaaaatgtacacctcgaggaagaaaattcacaaggataaggatgccgagcccactgaatttgaggagacagttggacagtacttgttcgacttggagaacaccaatcaggatctgaaaagtgacttgaaagatctctacataaaccaagctattcaaatggatgtggctggtaatcgcaaggctgtagtcatctatgtgcctttcagattgaggaaggcattccgcaagattcatcttcgacttgtcagagagttggagaagaagtttagtgggaaggatgttgtcttgattgccacaaggaggatcgtgcgaccgccaaagaaaggctctgctgttcagcgaccccgaacccgcactatgaccgctgtccatgatgccatgctggaggat

SEQ ID NO: 208039 - DNA, 419 bp, Glycine max
  unsure (1)..(419): unsure at all n locations
ggagtgtctttgtttcctttcttgccctgtatgatatgagtgcttgattcgttgtcttcaaatcctgcaaggccagaggaagcaatcaactcaaacgacaccatgtctggaactatgtctcctaaaggttctttcaagaagaaagcaatcaatgcctctaacatgctgaggaattctttgaccagaaagggtaggcgaagcagtaaggtcatgtccgttgaaattgaggatgtccacgatgctgaggagttgaaaatagttgatgagttccgtcaagctcttattttggacgaacttcttcctgcaaaacacgatgattatcatatgatgcttagattcctgaaggccaggaaatttgatattgagaaaacaaagcanatgtggtctgaaatgctcaaatggaggaaggagtttggtgc

SEQ ID NO: 208040 - DNA, 469 bp, Glycine max
gtactagatattgatttattctgtacggacataataataggacaggctttgcataatgtgcagagcgccatagccctatatatactatacatagagagtaagtcctatcctaatagagaccaaaattctgatcagcataatttatatattttgagcattatgcttatattctggacgttttgaatatttactagttcgcatattgaacatttttgtaagagggcatttgggaagtctcctgaaaggcagaaactaaaatctaattccccgttaatgtctggacctcttgttagggcatccacggatttgctctttaaaagaagaaaaatctcttgttcttcttcgtattctttttgtcaagataagccgaaagctcttcttgcttaacaagtgaagcctccagagccttcttggtagccaaaagttggttctccaagtcatctgctcgagttataagtgcattcagcat

SEQ ID NO: 208041 - DNA, 385 bp, Glycine max
gattaatatcaaatctcaacctcaatcattatttaatggggaagtaaaatgcgagaacaaatctatctatttgctatatgcctatcccatcaatattgcaaacaatttaaactacttatcctcactcttatcccccaactccatcccaaaagatagggactgggaaacaatccttaaatttgcaaaacttatcacacattgtcagtgattacatattggtcacatatatgatgctgcatatcataccttcaggcgttatcaatatattaactgatatactaagacttaacctcaatgaatgcatgttgggaatcgcaccctacatttcccaaaaggctttctgaaatctgaagcccaatcacgtgaaggatggcatcaatccatt

SEQ ID NO: 208042 - DNA, 490 bp, Glycine max
gattaatatcaaatctcaacctcaatcattatttaatgggtaagtaaaatgcgagaacaaatctatctatttgctatatgcatatcccatcaatattgcaaacaatttaaactacttattctcactcttatcccccaactcaatcccaaaagagagggactggtaaacaatccttaaatttccaaaactcatcacacattgttagggattacatattggttacatatatgatgctgcatatcataccttcaggggttattaatatattaatctatatactaagactaaacttcagtaaatgcatgtttggtatcgcaccctacatttccaaaaaggctataagaaatctgaagcaaaatcacgtgaaggatggcatcaatccattcacagtttcatctagggaaacgatgcttggtgagtccaataaagtaggcttccttatccagtattgctgaaacctctgccttgcatactccttatagtcaaaatc

SEQ ID NO: 208043 - DNA, 476 bp, Glycine max
cgaagaaggtattgacgtcgatgatgaaaatgaaattggtgaaaacattactgcttctcctttgtgtgaaactcttctgttatgcagtgattggtgctcctcaaacttgtcctgctaacaatgaggataaatgcggcgattcagatgaatggaaaggggagtttttccctgacattcccaaaattaaatatgagggtccgtcaagtaagaatgtgctttcatttaaatggtataatgcagaggaggaaattcttgggaagaagatgaaggattggttaagatttactgttgcattttggcatacattccgtggaacaggtgctgacccatttggtgcacctaccaaatactggctatgggaagatggtaccaattcattaaacatggctcatagacgaatgagagctaactctgagttcataagcaaactccgtgttgactttaggtgtttccacgacagggatatagcccctgat

SEQ ID NO: 208044 - DNA, 529 bp, Glycine max
gaaactaaaattaattaactcaagcatgctcaaagccagggaagctatgcatcacgtagttttatacataagctaacatgcacttcaccaggcttcgtatccacctagcagataacagcttcacacttatattttcccaaggaaaacgaagcaggcataagtcaatcttaatttccttttattagtaaacctaattataccgaattgttcctaatataatagacgaaaaatagccaccacacacggctagattctactttctacagaacagattggaggatcatctcggctagctcctgtttcgcagaagcaacctttggttctccccattccttgaccttcttctcaagcagttcaaagtcagccttaccagcctctatttgagccccaatttcagtgtcaaaactctgataacgcttacgaacaagctcagcaagagaaccatcctcaatcaacttggcagcattcctcaggccacgggccagggtatccattccaacaatgtgggctatgaacaagtcttcaacat

SEQ ID NO: 208045 - DNA, 544 bp, Glycine max
gccggatttctccaactcggtgaaactcaagtacgtgaaactagggtaccaatacctggtgaaccacattctgactctcactctcatacccatgatgatcgccatcttcatggagattctacgcttaggccctgaagagatcctgaacctctggcactccctccacttggaccttgtccaaatcctctgctccgccttcctcatcatcttcatcgccaccgtctacttcatgtccaaaccccgcaccatctacctcgtcgactacgcctgcttcaagccacccgtcacctgccgcgtccccttcgcaaccttcatggaacactccaggctcatccttaaagacaaccctaagagcgtcgagttccaaatgcgtattctcgaacgttccggtctcggtgaagaaacatgtctccccccagcaatccactacatccctcccaagcccaccatggaggccgcccgaggagaagccgaacttgttatcttctccgccatggattctttgttcaacaaaacaggtctcaagcctaaggacatagatatt

SEQ ID NO: 208046 - DNA, 484 bp, Glycine max
gcgacgccgctcctaaccctaacgcgactaccaaaccctccgtctacctccaagacacggaggagctgaagcgagtcttcagccgcttcgacgctaattgcgacggcaagatctccgtcaccgagttggacaacgtcctccgctccctcggatccggcgtcccgccggaggatatccagcgcgtcatggacgacctcgacaccgaccacgacggattcattaacctctcggagttcgccgccttctgccgctccgacaccgcggatggcggcgacgccgagctccacgatgctttcaacctgtacgatcatgacaagaacggccatatctccgccacggagctctgccaggtgctgaaccgcctcggaatgaagtgctccgtccaggaatgccacaacatgatcaaattcgtggattccgacggcgacggcaacgtcaactttcccgagttcaagcggatgatgagcaacaatcgtgaaaatgc

SEQ ID NO: 208047 - DNA, 489 bp, Glycine max
atagacacaaagatatacacatatagggagaggctgaaggaggggcatcagatccctactttgtataaatggggttgtctttctaaacaaccccatcacatcattaagagggggggatcgatccttgatttgtgaatttgcttgcattagcaagatcatatatattcattcatatacacaattacatatcaagatcacattttttttggtgttcttgatctcataaacaacatggagggtcagaacaagaagtacatctcatctgaggagctgaaggagcacaacaagtcaggggatttgtggatttcaatccaagggaaggtttacaatgtttcagattgggcaaaggaccaccctggtggagaggttcccttgttgaaccttgcaggccaggatgtgactgatgcattcatagcataccatccaggctcagcatggaagtatcttgatcccttcttcacagggtaccacctgagggatttcaaggtc

SEQ ID NO: 208048 - DNA, 343 bp, Glycine max
acacaacatatataattttattatagaggctctgctctgtattcaaacctcactcatcaattacacagctcaaacaatacaatgataataaataatggtaggaataaagtatatggtaaatgatgaatcaataatacaataagaaacttatggtagcaaccataaacatagtactacatgtgaatttaaatgtcacggtttcttctacattcaagtggaagctgagggtagcggcttctgtcagtgcactagtctgagatggtgtatttcctgcgcacccacctgagccatctccgttgagaagcatcaagatcatgaaactgtgcttgatcccaccacctct

SEQ ID NO: 208049 - DNA, 449 bp, Glycine max
cgtgtatgtatgtagtccatactctggactctctcttcttctctttgcttctcttctttctctctcacgcaacaatggctcatctcttcagagacctctcattgggccactccaagagagactccacgccgccgccgccgataatgcctcccaagccctccgccgtcatcgccgccgacgacctcccctctccgctcggccagctcgccgcctccctctccgattccgacctcgcattaaccgcctacgagatcttcgtcgccgcgtgccgcacctcctccggcaagcctctcagttccgctgccaaccactcctccaccaattcgcccagtcagaactcgcctaactcgcccgcgctccagcgatccatcaccttcaccggcgccagcaaggtcaagaaggccttcggcctgaaatccccaggttctgcctccagaaagagccctggc

SEQ ID NO: 208050 - DNA, 458 bp, Glycine max
ctctcaaacagaatgggaagtgctggaagaactgattatggtgcatacacctatgagaatcttgagagagagccttactggccatcagagaagcttaagatttccatcaccggtgctgggggttttatcgcatcacacatagctcggcgcctcaagacagaggggcattacgttattgcttcggattggaagaaaaatgagcacatgactgagaacatgttctgtgatgaattccatcttgttgatctcagggtcatggataactgcctcaaggttacaaagggggttgatcatgttttcaatcttgctgcagacatgggtgggatgggttttattcagtctaaccactctgtcattatgtacaacaacacaatgattagcttcaacatgattgaggctgccaggattaacggcattaagaggtttttttatgcctctagtgcttgtatctaccctga

SEQ ID NO: 208051 - DNA, 478 bp, Glycine max
  unsure (1)..(478): unsure at all n locations
cagcttttccctcgttgaaatgaaaatgggttcttctttgtggactttgtgtctaattttggcttcactagcctcttctgcattctgtgcctttccacggaggccagtggatgttccattcggcagaaactacgttcccacttgggcttttgatcacatcaaatacttcaatggaggttctgagattcaacttcatcttgacaagtacactggtactggcttccagtccaaagggtcatacttgtttggtcacttcagcatgaacataaagatggttcctggcgattcagctggcacagtcactgctttttatttatcttctcaaaatgcggagcacgatgagatagattttgagttcttggggaacagaacaggacaaccttacattttgcaaacaaatgtgttcaccggaggcaagggtgacagagagcaaagaatctttctctggtttgatccaacanaagcataccacagatac

SEQ ID NO: 208052 - DNA, 507 bp, Glycine max
acacaacatatataattttattatagaggctctgctctgtattcaaacctcactcatcaattacacagctcaaacaatacaatgataataaataatggtaggaataaagtatatggtaaatgatgaatcaataatacaataagaaacttatggtagcaaccataaacatagtactacatgtgaatttaaatgtcacggtttcttctacattcaggtggaagctgagggtagcggcttctgtcagtgcagtagttgtagatggtgtatttcctgcgcacccacctgagccatctccattgagaagcatcaagatcatgatactgtgcttgatcccaccacctcttgccttgtgtagcacagaactttgcattcactgaagcttcacacccatcaacgtggaaccctttgtattctgctatgaagggtgctttggaccaatctgttttctccaaccaccccttgtggcccagtcatcagcattccacaagctgttgtacaccttcatgg

SEQ ID NO: 208053 - DNA, 522 bp, Glycine max
  unsure (1)..(522): unsure at all n locations
gtttcttctttggtgtgcacactaaagatggtttagccatgggcttgcttctcaataccaagggtgccatggcactgatcatgctaaacattgcttgggatagagcgattttttctgtacctacctatgcggttatggcttcagctgttcttctaatgactgtagtagtatctcctgtcatcaatgcggtctacagaccaagaaaaagattcgagcagaataagctaaagactatacaaaaactaagagtcgatgcggagcttcgaattctagcatgtgtccacaatactcggcaagccacaagcatgatcagcataattgaaacttttaatgccactagacttacccctatacatgtttttgccatgtaccttattgaacttactggacgtgctgctgcccttgttgctgcacatatagagaagcctagtagccaacccggagaacaaaatctcaccaaatcacaggcagagttagaaaacattgccaatgcatttgatgcanttggagaggcatatgacg

SEQ ID NO: 208054 - DNA, 375 bp, Glycine max
gaaaggaggattcgctgagaaattaacttttgaaatcacacgggttacaacgtacaaataatttgaaagagtttgacgatttttgttgggggagggggggttgatatgggcctggcactcacactgcagcttcatttggatgctcttctgtgcatggagctaaccttctaggttatgctaatggcacagcccgaggaatggctccaggtgcaaggattgcagcctacaaagcgtgttgggttggtggttgcttcagctcacatattgtgtcagctattgattaagctgcggctgatggaccgaatgtgctttccatctctctgggtggtggagactcctcttattacacagattgtttatcagtgtcagcatttg

SEQ ID NO: 208055 - DNA, 313 bp, Glycine max
ggaggttgaagctctctcggatttgagatcttttcaaaggaagggccacctagtgacaaacccatatttttaccattcctgtatgaaacctcatacattgatgaaaaccatctctaccctttagatgaccctactagcgatggctacatcttcatgtttaccaacagctgtttcctgatactgaaccctagcaccaacagagtggtacggacctacggcgtgctctacggtgatttccggaactaccaggctttcgtaatggcttccatactgcctattaaactgggtgggactgagctaagttgagccttca

SEQ ID NO: 208056 - DNA, 539 bp, Glycine max
gttcatggttagccagacaattggcagtgttttgtgctgcaaatgtggaattccaatgcaacccaatgctgctaatatgtgtgtcaagtgtctgcgatcggaagttgatattacagaaggactgctgaagcgtcttgtgctggtgcattgccctgagtgtgagagttacttgcagccaccaagaagttgggtcaagctgcagctggaatcaaaggagttgctgacattttgcttgaagaaattgcagaagaatttgaattcgaataaagtgaggttggtgcatgccgagtttatttggactgagccccattccagaagggtaaaagtcaaggtcaaggttcagaaggaggttctgaatggagcaatacttgaacagtcttatcctgtagagtatgttcaacaagagcatatgtgtgaatcctgttctagggtccaggctaatcctgaccagtgggttgcttctgtgcaactcaggcaacacgtttctcacaggcgcactttcttttatttggagcagctgattcttgaacatggtgctg

SEQ ID NO: 208057 - DNA, 493 bp, Glycine max
cgtgactttatcaagaacatgattactggtacctcccaggctgattgtgctgtccttatcattgactccaccactggtggttttgaagctggtatttctaaggatggacagactcgtgagcatgctcttcttgctttcacccttggtgtgaagcagatgatctgctgctgtaacaagatggatgccactaccccgaagtactctaaggctaggtatgatgaaattgtgaaggaagtctcttcctacttgaagaaggttggttacaacccagacaagattccatttgtgcccatctctggtttcgagggtgacaacatgattgagaggtccaccaaccttgactggtacaagggaccaactctccttgaggctcttgaccaaatcaatgagcccaagaggccctcagacaagccactcaggcttccattgcaggatgtctacaaaattggtggtattggtaccgtgccagtgggacgtgttgagactggtgtcg

SEQ ID NO: 208058 - DNA, 445 bp, Glycine max
ataaaatcttcgttataaattaaatgcaacttaaaacatccctcagcagcaaaggaaatggactaaaaccctatagctgcttgtgaaattcgaaatatctcagactcttcttaccatcaaaacaaaaaacagtactcatcaaaaacaaacagcaatgaaaattgaccaccgccgatcaagaacctagttttgaaagttacggctacatgaaatcggcagaaacttaaaaatataacttaaacaaaacacctaagactctgcaaggataaaactactataaaggagtaaccacgatgatgatcacatgtgctagcaaaattgcccaaatgcaatcacttcttcttggcagcggccttggtgaccttggctccggtggggtctttcttctcaacactcttgatgactccgacagccacagtttgacgcatgtccctcacagcaaaac

SEQ ID NO: 208059 - DNA, 572 bp, Glycine max
ctactggctgctgatggaaggagacacataatttccactcctcaacttgctatctacactttctctctttctttttcttcaataataattttagtcacaatattagtatttaaggagctaaatagcaatggctgcaataaccacaaaagaacaacaagtagtagtaaactatatgagtgaagagttgcaaacgatttttctgtccaacttggatgaggcacccgctagacggcgtgctcgtgaggcttttaaggatattcaacttgccattgatcattgcttgtttcggttatcatcagatggggtgaagacgaaagaggtttatgaagtgaactccagaggattaaaaatattctctaaaagttggcttccagaaagttctcatttgaaagcaatcatttgttactgtcatggttatgcagatacttgcacattttactttgaaggagttgcaaggaagttagcatcatctggatatggagtatttgcattggattaccctggatttggcctttctgatggtcttcatgggtatattcctagctttgaaagctagtgaatgatgtcatcga

SEQ ID NO: 208060 - DNA, 492 bp, Glycine max
gaggcagcaaccacgcgtctgtaaattgctattcaagcattgaacattaaagtagaaatttcattgttttatctaacttcatttaccataccagttcccctaataaaacatgaacacataaactgaaattaatgcctacttttgtggcgaaccaatataccaacaaggtgcttaatatttgttttttctgctgctatgctcatcaagccaagatataatatcaccaagcacgtgaaatatagtttcatcaggttcaccttcaagtagagtatggaaagcatccttatagaggcagagtttcttgtccttcactttagctttctcatacaaagccttactagctgatggatcagtaattatatcagcctctccatgcatgatcaacaatggcagagaaacttcttccaaacgctgttctagctcctgtgtggctttcaacagctccaatgcagttcccagtcttggtttatccttgtagagtaacacgttata

SEQ ID NO: 208061 - DNA, 466 bp, Glycine max
gtcatgtacccaatacagcaccgcaagtacagagatgggattgacaatctgttggttctcttgattggaggaattccaattgccatgccaactgttctgtctgtcactatggctattggttcgcacaggctttcgcagcaaggcgctattacgaaacgtatgacagctattgaggaaatggcaggaatggatgtcctctgcagtgacaaaactggaactctgaccctgaataagctcagtgttgataaaaacctgattgaggtttttgccaagggtgttgagaaggactatgttatccttcttgcagcaagggcttctaggactgagaatcaggatgctatagatgctgcaatagttgggatgcttgctgatccaaaggaggcacgagctggtatcagggaggtccactttcttccattcaatcctgtggacaagaggactgctctaacttacattgattctgatg

SEQ ID NO: 208062 - DNA, 511 bp, Glycine max
aaaagtaaatcctatcaaccacgttatttggtatggaatagaagagtaaaccattcagattttgactgacaaaaggaccttcatcctaatctaaagacggattaacttaggtcttcattacatttgttgttcttgttcttggataagcaccaaagtgtgttctgcttgaaggttgtccaaattccttaaactgtataatgctgttggattgtatcaatgtcaagtcccttcagcttcactactgattcaacatgtcctttcagagtatgaagctccctgagccttgcaacctcggcacgtctcttagcttgctcagcaatctctgaaagctccctgtaactgttcttgtcattgaaaaggttggttgtttcaggtggctgaagaccatgaagagtcctctgagcagttgcccactgtgcttctctctcttctttgccatagtctttctttgtagtgaaggcagtcttggtctccaaaagattatcccaagccttcccactcaggacgtagc

SEQ ID NO: 208063 - DNA, 445 bp, Glycine max
gtgtaagctctttcttctcttcttgtgtatcttgtgcaccgccattgttgacgatggcgagttcatgtcgaagctcgcgaaggcgctaaggccgacatcgtcggggtggactgggagcagcttctgcgactggaagggcgtgaagtgcaacgccaaccgcatcaccacaatcaacatcgcttcgcaatcactcggcggaacgcttcctccggatctgaactcactctccagaacaacgcgctctccggcgcattgccttcacttgccaacctctccatgctcgaaagcgtgttccttagcagcaacaacttcacctccgcccccgatggttgcttccagggactcaccagcttacaaaccctcagcatgaccgataggatcaacctcgctccatggacgattcccgtcgagttgaatgataacaacaaccttgtcaaactcgaac

SEQ ID NO: 208064 - DNA, 471 bp, Glycine max
gtgtccattacatatttgataatttatagtcactcaaaacggccactatttgttttaaaatccagtagttcttcaccaaacttcttcttcttccttcaatcttcatcttccaaaacagatctcaatttttttttttaaaaggaaacagatctctgttcactcattaacatttaacaccacacctcaatggtacccgaaaacccgaagccgttctgattgttgagccacatatcctgaatcgcagatctagcgaaggatttgggtaagccaccggtgaggttgttgtaagagagacgaagctcctgcaaactcacgaacttgtcgaatacatcaggcaaggtaccgatgaggtttgcgtttccaagttcgagtttgacaaggttgttgttatcattcaactcgacgggaatcgtccatggagcgaggttgatcctatcggtcatgctgagggtttgtaagctggtgagtccc

SEQ ID NO: 208065 - DNA, 468 bp, Glycine max
tgaatgatcaatcatccgaggatattttaagaactgaacttaaagcagaatgtttggtgacaagtttattaagagagaagctgtactctaaagagctccaagttgagcagatggaagctgaacttgctacagcagtaagaggaaacgacatacttagatctgaggtgcaaaatgcgttagataacctttcaagtgtaacccacaagttgaaggaccatgaacttcagatgttgaagaaagatgagagtagaaactgccttcaaaatgatctgcaagagtctaacagggaattgacaatcatgaggggaaaactgcccaaagtgacagaggagagagattatatgtgggagcaagtgaagcaatatagcgagcagaatatgctgttgaatgcagaggtcaatgtattgaagaagaagatagagacacttgaagaaaacaacctcgagaaggaaggtcaaatatccatat

SEQ ID NO: 208066 - DNA, 518 bp, Glycine max
  unsure (1)..(518): unsure at all n locations
aaacagaagcatgcccgcatctccttatcccacacctggtgcccttctcatgggagatgccttcaacatgcgtcaccctttaaccggagggggaatgactgtggctttgtctgacattgttttgctaaggaaccttcttagacccctgcatgatctgcatgacgctaatgctctttgcaaatatcttgaatcattctacaccctacgcaagccagtggcatctacaataaacacattagctggggcattgtacaaggtgttttgtgcatcccctgatccagctagtaaggaaatgcgccaggcatgttttgattatttaagccttggaggtgttttctcagatggaccaattgctctactctctggtctaaatcctcgtccattaagcttggttctccacttctttgccgtggctatatatggtgttggtcgcttactcataccattcccttctccaaaacgaatgtggattggagctagattgattcccgtgcctctgctatcattntccccattat

SEQ ID NO: 208067 - DNA, 319 bp, Glycine max
agaacattaaaatggaattaaacagaataaaaggaaacagaattcgacattaaggttaatgggctacgacaagaccttctctactgaccgagactgttgacttgacattcaagttaagcatgcatgggtttggacatcagcaatttgttgggcgaatataccgaatatgcgcaagttaacagatacctaactgaaaccatgctatcggaccaaatcaacagccataacgccgttacagtacttgcccttgacgacgccagaatggcttacctctacggtatgtcgcacgacgccgttaaggccatacttagcacccatg

SEQ ID NO: 208068 - DNA, 470 bp, Glycine max
agattaccaaaaattacgaccaaggaaacgcagattctgttgatgaggaaatacaagctctattgaaaaagttaaattttataccaacatcggttttcacaacggacttgccttacgtggattttctggatcgtgtacataaggcagagctgaagcttagatccaagggtttatgggatgtacctcatccgtggctcaacctttttgttccaaaatcaaggataggggacttcgacaagggtgtgttcaagggcattcttggaaataagacaagtggacctatcctcatataccctatgaacaaaaacaagtgggaccagcgaagctcggtggtgacaccagaagaggatgtgttttacctggtggcatttctaagatcggcattggatactgagacgctggagtacctgactaatcagataccgtcaaattcttgaaatctggcatgatatagagatcaaggtaaaaca

SEQ ID NO: 208069 - DNA, 315 bp, Glycine max
cagcacaaagcgggttactgtctgatcaagctaccatctctctctctctttcttagtgccttcttgccagaaggtaaaatggcccaagacacttgcctattaacctctggatcagtgaacgaggggcaccctgacaagctctgagaccagatctgcgatgctgcgctcaatgcatgcttggagcaggaccctgacagcaaggttgcctgtgaaacctgcaccaagaccaacatggtgatggctttcggagagatcacaatcaacgccaacgtggactatgagaagatcgagcgtgacacatgcaggaacattgga

SEQ ID NO: 208070 - DNA, 453 bp, Glycine max
gagagaacatttttttttgtttcatcatataaaatatatatgttctgaaagaacacatacaagtacacaaaaaaaagggggaaattcataaaaaaatacagaaaaaaaaaaacagaattgagtaagagggaaggaaacatagagaaaattttagcaatcagataataagaagccagtagtagtgcaaaagtcccttgccaagagtgttggaaccccttttagttaagcaggtaccttctcccccttgagtggcttcaccacttcccatgtgaagtcagggtcatctctgccaaagtgtccatatgcagcagtcttcaagaacctgccatttccacccctcttgagatcaaggttgatggagatcatgccaggcctgaagtcaaaactctccttcacaatgctgaggatttccttgtcagggatcttcccagtgccataagtgtcaacaaacac

SEQ ID NO: 208071 - DNA, 323 bp, Glycine max
cacaagtcacattttttggcttttaaaacagagagagagagagagagagagagagattacaaagatcagaatcagacaggctagcttagctccatgtctgactcactcttaactttctattctctttcagccattcttgctcttctgccaatcttcatcttcattctcatcaaaagaaagcaaagcaaacccaggctcaaccttcccccaggtaacatgggttggccatttcttggggaaaccattggctatacgaagccttattctggccccacagtaggggaattcatggagcaacacatagcaaggcatgggacagttta

SEQ ID NO: 208072 - DNA, 496 bp, Glycine max
cggaaatatttttgatttgtatggaatgccattggagctaggaacttcaaattcttcacgtagtttgatttagatcaaggtgtgactctgttattggctaggcttggagttattacatatttggggtgaacttactaactaatttttctcaaagcaaagagtgggcttggactctaatgggtaggcctttggggaagtcgacaaaagggtaggcaaaagcttgatccgtatcagccaattcccaatggtagttgagaatgagatggtgaatgaaaacagccatttcaagcttagctaactctgatcctgcacataatcgtggtcctcctccgaacggaagaaagttgttgtttgctgtgttcttgcttgaacaacttccaccacgactaccattgttctttatagctaacatctttcacagccttcctgtggagaaacctcacaacatttcccaacctaagtgtctcgttcacaacacaatgagtaaaatccattc

SEQ ID NO: 208073 - DNA, 362 bp, Glycine max
aggaaataaaaattgccttcaatataataaagagggttcccttttttaataccagagattagaacataagaaagggatggggataattaggggtgccggatacaaattaatagatgacacttcaacttatgtaagatgatttgagccccaaattttggattaagagtgagcacagggactggagcatgtgcataggtgggagaaagctcaaatgaaaagcgttgttagagtaatgacaaaaccaactttgcttttaataaagcaaaattttgggctaagcacactttaggaccccattcaaatgggaaaaacacaacttggccttttggtgcctttgctactccttcagcaaaactttttgg

SEQ ID NO: 208074 - DNA, 494 bp, Glycine max
gtgggcatggattctctactggcgaactatgcctcttcagatgaagaagaagatcaacaacaaccatctccacccaaaacgacttcgttttcctctcttcctcagcccaaatcttctctctttcaatcccttcctcaacccaaatcctgtcctttttcttctctatttcaatctcttgctccacccaaacaaccttccagcgaaagcgcttcactccctaaccctaaccctaaccctaaccctaaaccccaaatcgaagaaccacggcccaaacgcgtcgtgcaattcaggcccccaatcatccctctcccaaaccctacccaactcgacgatgacgacgacgacgaagaagaagagcgaaacagaagaaagaacaagttagagtcctccacgcaaacctcatcggtcaaatccttcctcgccagcattccggctccaaggaacaccgccactctcggcgttcaagcaagttccggttcaggccggagatccat

SEQ ID NO: 208075 - DNA, 488 bp, Glycine max
ggaagaagaaggagcagatgggtaatccacggaaaccgagtaccgccgacgagcttcacacggcggcaaggtccggtgatctcatcgccgttaactcaattttggcttcaaatcctttggccgttaattccagagataagcattccagaacaccgtatcctgctcatttcctcacttcttttcttcctctattaattaattcaattttattttttatgtaaactcaacgcaatagaaaccctaacaattaaattctttcaattagtcgttgttgttgttctagataacaaaacacagtagctggaattgaaaattacgttttgctggttattataatgatatgattcattgcagcatctgtgtctttcgctctttttgatctgtgcattgcatattctacctatcttgtttgaaccattcattttatgaaatcactacatcataatcacccctattagagaaggcttacgtgttccttagcacagaga

SEQ ID NO: 208076 - DNA, 479 bp, Glycine max
attccaatatattccattctctctgtgtatttccctacctctcccttcaagatgcagatcttcgtcaagaccctcaccggcaagaccatcacccttgaggtggaaagctctgacaccatcgacaacgtcaaggccaagatccaggacaaggaaggaatccccccggaccagcaacgtctcattttcgccggaaagcaacttgaggacggccgtacccttgctgactacaacattcagaaggagagtactcttcacctcgtcctccgtctccgtggtggcatgcagatcttcgttaagacactcaccggcaagaccataaccctagaggttgaaagctccgacaccatcgataacgtcaaggccaagatccaggacaaggagggtatccccccggaccagcaacgtctcatcttcggcggatagcagctcgaggacggccgcaccctcgccgactacaacatccagaaggaatcaaccct

SEQ ID NO: 208077 - DNA, 455 bp, Glycine max
taaacaataaaataaaataaaacagaagagaaggaaacagaagtaaaaaaaaaataaaatgggttacacaagatcttctcttctgtccgtggctcttgtcttggcattctgttcaagcattcagggtttggacatcaccaaattgttgggcgaatatcccgaatatgcacagttcaacaaatacctaactgaaaccaagctggcggaccaaatcaacagccgtaacgccgttacagtccttgcccttgacgacgccgcaatggcttccctctccggcaagtcgcaagacgccgttaaggccatccttagcacccatgtgctcgtcaacttctacgacgagaagaagctgatggaagccgaaggtagtcgcaccaaggtcgaaaccctattccaatcctccggtgtcgccaagcccaaccagggttacatctacgtggcgctcatcaacgaggggg

SEQ ID NO: 208078 - DNA, 488 bp, Glycine max
gcaaggcctattgaacaataatgcaaacacagcttcattgaatatggatccaacagtttcatcagtggattcaattgtgtcagtcgcatctccattgcatatgaatgctactattcaatcctctggtcatgttagcagccacactgaggttgatgaagttgagttcttaaacaactgcagggatgctggggtggttcacattcttggaaacacagttgtgagggcaaggagggattcaagattccacaagaaaatagctgttgattatatatatgcatttctgaggaagatatgcagggaaaatagtgtgatcttcaatgttcctcatgagagtctattaaatgttggtcaggttttctatgtatagcctctaaacctcttggtaatttttgcgtgaacattgggtttataggcacattcaatcagaagcatgttaaaatagttaatatgtagttaataataataaaaactgtattgaaatctatgtt

SEQ ID NO: 208079 - DNA, 517 bp, Glycine max
  unsure (1)..(517): unsure at all n locations
gcagaatctacaaagggataattccttccaccggccagcttgtggccgtgaagcaactcgaccgaaatgggatccaaagcagtaaggaatttctggctgaggttgcggagctaagtctcttgcaccatgaaaatctggtcaatctcattggttattgtgctgatggagatcaacgtcttttggtctacgagttatttgcttcgcgtactctagaaaaccgtctttttgagaaaaaagcggatgagagcccattaaattggtttgaaagaatgaaaatagtagcggctgcttctaaaggactagagtacttgcatgagacttcgaagcccccggttatataccgggacttgaaagcgtcgagcatcttggtggacagtgatctgcttgcaaaactatgtgatgttggcatggccaagctttctggtggagacaagatgaacaatggacctncaagacttatgggtacctatggtcactgtgctcccgagtatgtaaaagctggtcaactcaccttgaa

SEQ ID NO: 208080 - DNA, 567 bp, Glycine max
  unsure (1)..(567): unsure at all n locations
cagcacaaagcgggttactgtctgttcaagctaccatctctctctctctttcttagtgcctccttgccagaagttaaaatggcccaagaaactttcctattcacatctgaatcagtgaacgaggggcaccctgacaagctctgtgaccagatctccgatgctgtgctcgatgcatgcttggagcaggaccctgacagcaaggttgcctgtgaaacctgcaccaagaccaacatggtgatggttttcggagagatcacaaccaaggccaacgtggactatgagaagattgtgcgtgacacatgcaggaacattggttttgtctctgatgatgttggtcttgatgctgacaactgcaaggtcctcgtcaacattgagcaacagagtcctgatattgctcaaggtgtgcacggccacctcacaaagaggcctgaggagattggtgctggtgaccaaggtcatatgttcggctatgccactgacgagactcccgagctcatgcccttgagccatgtncttgccacgaagctcggtgccaagctcaccgaggttcggaagaacgggacatgc

SEQ ID NO: 208081 - DNA, 424 bp, Glycine max
gagagaacatttttttttgtttcatcatataaaatatatatgttctgaaagaacacatacaagtacacaaaaaaaagggggaaattcataaaaaaatacagaaaaaaaaaaacagaattgagtaagagggaaggaaacatagagaaaattttagcaatcagataataagaagccagtagtagtgcaaaagtcccttgccaagagtgttggaaccccttttagttaagcaggtaccttctcccccttgagtggcttcaccacttcccatgtgaagtcagggtcatctctgccaaagtgtccatatgcagcagtcttcaagaacctgccatttccacccctcttgagatcaaggttgatggagatcatgccaggcctgaagtcaaaactctccttcacaatgctgaggatttccttgtcagggatc

SEQ ID NO: 208082 - DNA, 452 bp, Glycine max
  unsure (1)..(452): unsure at all n locations
cgnacacaaattaagaaactttattaacttgtgaaaatgtaagatatcacagtatatagtatcagttacatacattacagtaaaaacatttattctttagctagctagcctctggtatcatatcatattatctatatttgtttcacgtacgaaacattttgtactcccaaacacaaaaaaacaaagatcattattccttggattgatgagggtgatgatcgctccaacaataagatggaagaacgcgccgttgcaacaacttgcatgcatgggcggcacaagagagagagattcgatgaatgaagtaagtaagtaataatgcgatcgatcacataattgtgcaagcagaggtgttttcttcacagaaatattcatcgcaacggctcacgtaacaaggcctgctcccaccgtaactatcataaacaggccttccataataagcgttataacat

SEQ ID NO: 208083 - DNA, 492 bp, Glycine max
acaacctttaaccatcacattgtcaacaaattcggcaagaattcatttttttgggaaggtaccaaaccaaaagtggtaatcactgaccctgagcaaatcaaagaagtcttcaacaagatccaagactttgagaaacccaagttgagtcctattgtcaagttgttgggctctggacttgcaaatttagaaggcgagaaatggcgtacacatcgaaagattattaaccctgctttccatttagaaaaattgaaggttatgttaccaatatttcttgaatgttgtgacgatatggtttccaaatgggaaaggttgttgtcttcaaatgacaaatccgaaattgatgtgtggcctttccttcaaaatttaacatgtgatattatatctagaacagcatttggaagcagttatgaagatgggaaacgtatatttgaacttctgaaagagcaaactggacttatgatgaaattgcagaacgcttacattccaggatgg

SEQ ID NO: 208084 - DNA, 486 bp, Glycine max
caagcagatcaatctctctctctctctcaaccataatagtcatgggtttgaaggaggattttgagcagtatgctgagaaagcaaagactttgccaccgactcaatcaaacgaagacttgcttatcctttatggattgtacaaacaggccaccgttggacctgtcaacaccagccgtcctggaatgttcaacatgagggacagagctaaatgggatgcatggaaggctgttgaagggaaatccaaggacgaagcaatgggtgattacatcattaaggtgaaacagctgctggaagcagctggcttgcctgcttgataacattgtcatgccttgctttctgattctgtgctagaagttcacaacagtttggaaataaacaattgcagcgtttgaagcttttattatcataatcatatttatttctaatgatttagacatgttgcttttgagtttagttatctgtatcactgttattggaaatgcctgt

SEQ ID NO: 208085 - DNA, 463 bp, Glycine max
ggacaaataaatcttatttttccattgataataccatggaaaatttcatcagtaatgcatatcataaaaaaaatatccgataaattctatgttagctatataaatgacaaacataggcagagtaactaaaagactaaaaccaacagaaagagacgtgacaaaaattacttgagcacggtaactgaagatgcccacatagataaagagccgccatccaccaaatctctgatcacacactcacttcttggatttcttcagtgcttgagctggctgggatgctgttgcaggtgtagtaatttgtgctgctgatggcctctctcctggaccttgggccaagcgctcctccctccgagcatttttcctctccctgctagccttgttcttggcacgcttcgcctcaaactggtcagacaatgtcttttctcttgccttctcagccttggacttgtgtatgctctccatc

SEQ ID NO: 208086 - DNA, 472 bp, Glycine max
ccactacgtacacgcacattctcctcaaagacaacaatggcaccaacagccaagactctgacttacctggcccaggagaaaaccctagaatcgagcttcgttcgggacgaggaggagcgtcccaaggttgcctacaacgaattcagcgacgagatcccagtgatttctcttgccggaatcgacgaggtggatggacgcagaagagagatttgtgagaagatcgtggaggcttgcgagaattggggtatattccaggttgttgatcacggtgtggatcaacaactcgtggccgagatgacccgtctcgccaaagagttctttgctttgccaccggacgagaagcttcgttttgatatgtccggcgccaaaaagggtggattcattgtctccagccatctccaaggggaatcggtgcaggactggagagaaatagtgacatacttttcgtacccaaaaagagagagggactatt

SEQ ID NO: 208087 - DNA, 363 bp, Glycine max
  unsure (1)..(363): unsure at all n locations
ggaggtcgtagatcttttagctatgagttctttccaaaggaagggcaacctagtgacaaacccatatttttcccattcctctatgaaacctcagacattgatgaaaacaatctttacccttttgtccacctttctagtgatggcaatctcttcatctttgccaacaaccgttccctccttctcaaccctaccaccaacacagtggttcgcacctaccccgtncttcccggtggttcccggaactacccggctttcggcatgtcttccatcctccctataaaactcgatggcactgagctaagtagtgccttcatcaaggtagaggtccttgtatgtggtggcaacagccatgatagtttcatc

SEQ ID NO: 208088 - DNA, 310 bp, Glycine max
aacaaacgtaggtgggatattagagtactattattaatgggacacaattgagttcaacacaaaccgaacttatttttaagggacattattacagacccattaaacatcaaagttcttcaaatgttttgggaacacatccaacattacacaacgagcttaaaaccccccacggagaccgaggacaaggtgaagggttgattccttctggatgttgtagtcagcgagggtccttccatccttgagctgcttgccagcaaaaatcaacctctgctggtccggggggaagccttccttgtcctgaatcttggcc

SEQ ID NO: 208089 - DNA, 477 bp, Glycine max
  unsure (1)..(477): unsure at all n locations
agagcttttgcttttctttctgcgcgcttttcccaattaagtagttcttccttttctcaaagcaaaaaatgttcatcgagagtttcaaggttgagagtcctaacgtgaagtacacagagactgagattcagtccgtgtacaactatgaaaccactgaacttgttcacgagaacaataatggcacttatcagtgggttgtcaagcccaaaactgtcaaatatgaatttaaaaccaacacccatgtccctaaactaggggtaatgcttgtggggtgggggggaaacaatggctcaaccctcactggtggtgttattgctaaccgagagggtatttcatgggcaacaaaggacaagattcaacaagccaattactttgggtcgctgacccaggcatcagctatcagagtggggtctttccaaggggaagaaatatatgctccattcaagagcctgcttncaatggtgaaccctgatgatg

SEQ ID NO: 208090 - DNA, 478 bp, Glycine max
aagcacaaaatacttcgataactttatattattttacatgcatgcatagcatagatagcctgctctcaaattagtcagcaggaacaaagatagagagatccaacgatctttaaatttcacatttgccataaatatataacagaaaagagggtatgggatatgagttaagttttgatctcattcaactacagtatcccaaaccattactcttaagactttgaacttcacttgtactccaggatcatgttgttctcaggagctaatccaacacaagcccttaggatgttttccagcatagctcgctgctttgacagtgcattaaccactggcgtactcggtggaaccagaggggccttggtcaggtaactgaggatggtcgcaactgggtggaatgagtggaactttccctcattttcagctttaaactcgattcgagtgctaagctcagcaagaaggaccaagtccaagataataggag

SEQ ID NO: 208091 - DNA, 475 bp, Glycine max
gaaaaaaaggacggacaaatatctactataacaatcaataacaagtacattagcaagtattcaagccaagtacatcagcgagtatataaaaatccaaaaactcgatccccctccacaagagaaaacatcaaaagtccaaaaaagagctaatgctcctccaacaagtaacaccactggtttcagaaaccgatttattcagacctctcattttttgctcgagcaagacactaaatcgcagctaaacataaacatacggtaataatgtgaagacaagctactttgaagtaacaccttaaagagacttcttggcaacgaatacaagaagatcaatgacacgtgagctgtatccccactcgttgtcgtaccaagaaacaagcttcacaaagttcttattcaatgcaattccagcctttgcatcaaaaatacttgatctgctatcgccgataaagtcagtggagaccacatcatcttcagt

SEQ ID NO: 208092 - DNA, 400 bp, Glycine max
ggcgcccttcaatttgctttgtgctcactcatttatctattataaccaaacactctttttcatattcggccgcttcttattgtgcttgaactatctgtgacgagcataatggccaagagagcagtgcttttgtctggactaatgagcgtgccctcggtcatggatgcggccatacgcccagcaaagaaccctttttgcgagacgggtgctgtctactgagaaccttgccgagctggttttgagacctgagcaaccacctaccttggcggtgctgagataatgttgcaatgcacgagcaggcttaccaaccaggttgtgttcaccacgaaggggtacactggctcaactggagcctacacaatgtacgtggaccaggagcacgcacatcaaatatgcagtg

SEQ ID NO: 208093 - DNA, 487 bp, Glycine max
caaagcatcccccccaagctacaagcacccaaaggggaggaataataataagcctaacttctaaggccaaaaaaaaaaaaaaaatagcaaatatgtcaggaaagatcattatctcggctgtttctctcatcctggtggtgggtgtggcaatcggcgtggtggtcgccgtgaacaagaagggcgaggatcctgcagttgaatcccaccaaaaatacgtaggggtcatatgccaaaacaccgatgagaaaaagctctgccatgacaccctgagctccgtgaagggcatggacagcgctgaccccaaggcctacatcgccaccgttgtgaaagccaccatggacagcgtgaccagggccttcaacatgagcgacaggctcaccacagagtacggtggcagcgataacggaaccaagatggcccttgacgactgcaaagacctcttgcaatcagccatcgagagcctccagctcagcactgacatggttca

SEQ ID NO: 208094 - DNA, 492 bp, Glycine max
ataaaagaatagtttattataacgacacaaaatagactacatcatcctcatagtccaggatagatcttgatgtaataatataattaagcagggtcggtccatcaacatatataacatgataatatgaaaatgtcgagataagactccacatcaagattgaattaaatagacattagaaaacccgaatcgaaagtagattaataataacagtcttactgaaattaattacgtaattaattctcattgtcgaactcctcgtattgcctgaggacctcagcacagccagaagcaacctcctgagacatgaagcccatggcattggcgaacctatcatcggatgcaatgccgatgtagcgggtgagaataaccacagcttcgtcgcggcccggggtgacttccttgcattgagggtgagggctgcttacacgcttggcactggatatttgatctgcgtgatcctcgtgcacgtacattgcgtatgctccagttgag

SEQ ID NO: 208095 - DNA, 463 bp, Glycine max
ccacattcaaatccaaatggccctttacattacactaataattggcctcctagtaaacaccctagtactctataaatagcatttgcatgcaccttagtcttcaccaaaatactcctcttggcatcttgtgttgtgtccctcttttaagctatttccttctcttaacacaattggttgtgccaattgccatagtcaccaaccaattaacaaaggtatatatatcatcatatcatcaccaaatgaaaaatattgggttgttttttcttgtggtggtggctacttttgtggtggcagccacagctggtagcttttaccaagactttgaaataacgtggggtggtgagcgtgccaaaatctatgagaatggaaaccttctcacactctcccttgacagagcctctggctctggctttcgttccaaaaaagagtacttgttcggaaaaattgacatgcagctcaagct

SEQ ID NO: 208096 - DNA, 488 bp, Glycine max
gtggtgagtgaattgcagagtcggcaatggtatgtgtatgagcgtagtcacacttgaattgaattgaagctctgttccttcatgtgacgacaatctccaacgtcatctgagctctcgtatattccccagccatggccgaaaaggtcaccataatgaggctcaaggttgatcttcagtgccacaaatgctacaagaaggtcaagaagattctctgcaaattccctcaaatccgagaccaggtgtacgacgagaagaataacatcgtgaccatcgcggtggtttgctgtaaccctgagaagctcagggacaaaatttgctgcaaaggttgtggtacgatcaaaagcattgaaattgttgagcctcccaagcccaaaccaccacctcaaccagaaaagcccaaggaaccagagaagccaaaagagccacagaagccgaaagagccagagaagccgaaagagccagagaaaccgaaggagccaccgaagcct

SEQ ID NO: 208097 - DNA, 442 bp, Glycine max
aataaaactccaacaattttattaatgaaaatactttacaatttcagcacatatacactgccatgaatataattttgcacgctataattatctttcgccacaaacaatggagtagtgctcaacaaagcacaaaccaacaataataacagttttagttgcattaatttacacaagaaagtaaattaacgtaataggcaacacatgtgtgtcacgttcatgaggatcattttataatgatatgcaacattgaattaaatattctcatgcaatggagcattctggaggaaggccttgagggaaacgtctgatatcagtgcaataattgtaaatcatgtaattcttttgcacccaacggatctttgcctgccccgtggcgtccagtgattggccagtggaggaagaagtttgggaattgaagtttctgtatgaggctgtgaatggg

SEQ ID NO: 208098 - DNA, 485 bp, Glycine max
caaccacagtggcgaaagagcttcttcctctgctgctgctccaacaacggtgtcgttttgcacttcctctgccaatgtcgaagctcgcattctcagattcgtctattccctctaccttttgaatcccttctatctcctcaacttcttctttgcccgtctcatgagagggaagtctcttgctgattgatgacatggagcagtatgaaatacttgagcaaattggaaaaggtgctttcggttctgctcttcttgtgaagcataagcacgagaagaaaaaatatgtgctgaagaagattcgccttgcccgccaaactgagcgctgtcgtaggtctgcacacctggagatggagctcctctccaaattaagaaatccatttcttgcggagtataaagattcatgggtagaaaaaggttgctatgtgttcattattataggctattgtgagggcggagacatggcggaagctataaagaaagctagtggt

SEQ ID NO: 208099 - DNA, 274 bp, Glycine max
agaaaacgttggtgtttcatagtggcagagctcctgatgggaaaaggactaactgggtcatgcatgagtacaggcttgttgaagaggagcttgagagggctgggtctggatcctctcagcctcaggatgcgtatgttttgtgtagagtgtctcacaaaaataacataggacccccaaatgggcaacggtatgcgcccttcattgaagaagagtgggatgacgcatcgggaatggttccaggggcaaaccttggggttacccgttttttggccac

SEQ ID NO: 208100 - DNA, 490 bp, Glycine max
gcaacactataggcgaaggactttaggttgggatttgggaattagggttattcgcgtggcgaagatgattgaggtggttttgaacgatcgattggggaagaaggtgcgcgtgaagtgcaacgacgatgataccatcggcgacctgaagaagcttgtggcggctcagactggcacaagagccgacaagatccgcatccagaagtggtacaccatctacaaggatcacatcactctcaaggattacgagatccatgacggcatgggtctcgaactctactacaactaaacacaacaaggtgtgttttatgcgtaatatactatgtgctgggaatgggataagcgctaaatgtaattctgacttgcgaaagttcccatgatttgaaataatgtacatctccaaatgatattgggtattatataccgttgacagcttaagttgctttgttatataacctatatctgatgacttgtttggcttgttgctaagctt

SEQ ID NO: 208101 - DNA, 496 bp, Glycine max
  unsure (1)..(496): unsure at all n locations
gaaaaattagctgtgtcacatatagcataagcaaattcactgaaataatttcaccaattaaagctgtggcactctcaagggaaagagagaaagatgctgccaatatcaagagactacttgaggaaggggacttggtgatttgccctgaaggcacaacttgtagagagcctttcctcttgaggttcagtgcactatttgctgaactcactgataggattgtcccagttgctattaacacaaagcaaagtgtgttctacggaaccacggtttgcggacacaagttgttggacccgtactttgtgttcatgaatccaatgccaacatatgagatcactttcttgaaccagcttcccaaggagctcacatgcagtggagggaaatcagctattgaagttgcaaactacattcanagggttcttgcagggactatgggatntgagtgcacaaatttgactaggaagagcaaatatgccatgcttgcaggcacagatgggac

SEQ ID NO: 208102 - DNA, 521 bp, Glycine max
cacaaaggtgatagctggaaaaggtgtcctttgtgctttgtgatgatatctgccaaggatttatataccttgcacatcacaaatgtaaaacagtatcaagtaggagataatgttgagttcacctttttaacacggaaaaaggattcctttactctgtcacttaaaaataaacgagagacaaataccacatcaggtgtcgatggagatatctgtgatcccttttctaagttcactcttatatcagatgtagatctctcagtgaagcatgcaatatccgatctagatggttggctagccagagctgattcaggtcttgttgatgacctggagaagcttccttatgtttgtgctgcaatgcaacaattagaacagaggaagaggtattggagtgagcacaggtctcatgacagtgaaaaatcttctatgattattgattgtggacaccagataccatcaacagttgcaaattctatggatactgatgatgaatactgttctaatggatcaataacttcttcttc

SEQ ID NO: 208103 - DNA, 482 bp, Glycine max
  unsure (1)..(482): unsure at all n locations
ctttcttttcttctcgcagagcgaaatcccaatcccacacaaatggcatgctcagccacctctgcttctctcttctccgcaaaccccacacctctcttctctcccaaatcctgcctctccctccctaacaactctctccacctcaaccctctccccacgcgcccttctctctccctcacgcgcccctcgcacactcgccgctccttcgtcgtcaaagcctactccagcgagcttccgctagatggaaacacgcgaccggatttcgaagcagaggctgtagttgaccagtagtctatcaacgtgaaactatctgattacattgggaagaaatatgttgtgctcttcttctacccgttggacttcactattgtttgtcccacagaaatcactgctttcagtgaccggcatgcagagttcgaggcactaaatactgagacattgggtgtntcagttgacagtgtgttctcgcaccttgcatggat

SEQ ID NO: 208104 - DNA, 535 bp, Glycine max
  unsure (1)..(535): unsure at all n locations
agtacacttcaaaatccagcatgcatttattagtatattcccataccctgcggctcaaaatttaaggacttacaaaacattaagaaacaagacccttttgcaattcacactgactgatacagatgcagatagccactcttaactatctagtatcctagctacaccgctgcaaagtagtctttgctaagtttagggtctggtttcatggacttctccccaggcttccacccagcagggcaaacttcatctgggttctcctgcacatactgtaaggcctggagagttctctttgtctcgtcaacacttctaccaattgccaagttgttaatggtagaatgctgaataaccccttccttgtcaataatgaacaaacctctcaatgcaattccctgatcaggaatgagaacaccataagatttcgatatggatttggtgacatcagaaatcaaaggataattcaagtcaccaaggccacctgactttctatctgttnggatccatgcaaggtgcgagaacacactgtcaactgaaacac

SEQ ID NO: 208105 - DNA, 612 bp, Glycine max
  unsure (1)..(612): unsure at all n locations
gcactcataataattaaaacaaagaaaaacaacacatacctgttggtacatgccaacaacttgcgttagcctttaaccggaaggagaatgactgcggcttagtctgacattgaacagataggaaccttcttagacccctgcatgatctgcatgacgctaatgctctttgcaaatatctagaatcattctacaccctacgcaagccagtggcatctacaataaacacattagctggggcattgtacaaggtgttttgtgcatcccctgatccagctagtaaggaaatgcgccaggcatgttttgattatttaagccttggaggtgttttctcagatggaccaattgctctactctctggtctaaatcctcgtccattaagcttggttctccacttctttgccgtggctatatatggtgatggtcgcttactcataccattcccttctccaaaacgaatgtggattgcagctagattgatttccggtgcctctgctatcattntccccattatcaaggccgaaggaattagacaaatgttcttcccagtaactgtgccagcgtattacagaacacccnctaccaattnggaagataaatacacatcttggaagg

SEQ ID NO: 208106 - DNA, 521 bp, Glycine max
cagtcagataaaacttgtccttccaaaatattcaaattaaatactataaccttcatgccacatcctatgtctatggctaaagttttaatagttttaagtcagtcactgctgtttttatgccaaaacaaattaacagaagaacaagcagcatttacacatttccaacagcaagaggcattttgactttggccttaggtgtttgctaattttatttatgtagccatctaaaatactgagatcttaggtcaaagcatccatccaggaataaatccattgacttgttgagcttgagttgtggcagctagctgctgctctgaggcttcagggatgtacctgtagtcagaacctatctgcaatgtggggttgcactccaaaggctggaagaagccttgagagtgagcattttgggttccatatggcatactttgctcaccagcttcccatgtttgcctatactggtttcttgaattgatttcttccagcttcatggtcaaagatctgtttgcttcaccaacatatgc

SEQ ID NO: 208107 - DNA, 363 bp, Glycine max
tctcagaggactcagtatgtccactcctccaagtggtttcttcaatgccatcatgtagacttattaaagaatcattgcagaggagaatttccatgaactttgactattatatcagtgcgagtactgactttgtgttattagatgagacaactttaatcaatatcattaagcatccagatctgacagtaacgtctgaagagaaagtccttaatgcaattctaatgtttggcatgaatgcaaaacagttgtttgggtgggaagtggtggatcagttaatggaaaattcaaaaccagaactcctttttggtgagaggcttcagttaatctatgacttgttgccatttgtgcgatttccactactac

SEQ ID NO: 208108 - DNA, 295 bp, Glycine max
agaaccacaaccctttatccatgacttgattcaaataatttagtcaataagcaaaccataatgtacatgaaggagctggaattgtattttaggaaggtatggtattggcatggctaggctttaaaggaagtagccatacaattccaagtaacaaatgcagaaattccagggattgggggcatcggggggggttcctgtgagcacaacccggaaatacctgaagggaaacaaagcgttggggccaattatgggccaagaggcaaactggccaggtttacatatactccgatcattt

SEQ ID NO: 208109 - DNA, 471 bp, Glycine max
ctgggttgcagggaaaaagaaaaataaaatgggttccgataataccaacttggagttcttgaaggagatcggtttgggctcctccaacattggttcttacattaatggccaatggaaagccactggttcttctgtcacttctgttaatccttctaacaatcagagcatagctcaagtgactgaagcgactttgcaagattatgaggagggattgcaagcttgcagtgaagcagccaagacatggatgactattccggcaccgaagagaggtgagattgtgagacagattggtgaagcattgagggccaagttggatcctttgggtagactggtgtctcttgagatgggaaaaattctcccagaaggaattggggaagttcaggaaattattgatatgtgtgattattgtgttgggctaagcagacaattgaatggatcaattataccatcagaacgtccagatcatatgat

SEQ ID NO: 208110 - DNA, 495 bp, Glycine max
cttagaagcaaatgctggcatggtatcccagattcgtgtggcaagaccacctgctgaaggacggggaaggaatcaattgcttccacgttattggcctaggattaccgatcaagagttgcaacaaatatcaggagattcaaattctacgattgtgccactctttgaaaagatgcttagtgcaagtgatgctggtcgaattggtcgcttggttttaccaaaagcatgtgctgaagcatatttccctccaatctctcaaccagagggccttcctttacgaatccaagatgtgaaaggaaaagaatggatgtttcagtttagattttggccaaataataacagcaggatgtatgttttagaaggtgtaaccccctgcattcagtctatgcaattgcaagctggagatactgtaacatttagccgtatggaccctgaggggaaacttataatggggtttagaaaggcaacaaattctactgcagtacaggaaacactacc

SEQ ID NO: 208111 - DNA, 472 bp, Glycine max
  unsure (1)..(472): unsure at all n locations
gtttgttgttgtaactcgttcttcttcttttgttgttctgtgtttgtgtttgttttttctctcacctgaaaatgtcttgctgcggtggtcactgaggttgaggaagcttctgcgagtgcggcaacggctgcggaggctgcaagatgtacccagacttgagctacactgagtcaaccaccaccgagaccttggtcatgggagtggcacctgttaaggctcaatttgagggtgctgaaatgggtgtgcccgctgagaacgatggctgcaaatgtggaccaaactgctcctgcaacccctgcacttgcaagtgaggtgttgggagagcaagcttcaagcagagatagcccttaattaggaataatgataaactattaatgtgtagctaagaacttatgtattatgtctgtgatggttntcgtgcactctggtgttttgtgttaaacatacatccttagaataaagtggtcatgtc

SEQ ID NO: 208112 - DNA, 480 bp, Glycine max
agctttcaagagacaaactgttttgaaaaatgggatccaaggttgttgcatccgttgcccttctcctctccatcaacatccttttcatttccatggttagctccagcagccactacgatccaccgcccccaccttgttacgtccctgctcctttaacaccaccaccatcattgtcaccaccaccgtcattgtcaccaccaccaccgtcaggacctagttgtccggatctgagtgtttgcctcaatattttagacgggtctcccgcggatgattgttgtgccctcatcgctgatcttgttgaccttgaagcctctgtgtgcctttgcatccaactcagggtcctcggaatagtaaaccttgaccttaatttgcagttaatattaaacgcctgtggaccaagctacccgtcaaacgccacttgcccccgaacctaagaacagaatatgtatggcactaatcaccatattacttcgtatcatg

SEQ ID NO: 208113 - DNA, 421 bp, Glycine max
ctctcaagtccaacctacccctttttcttctcccaccaacttcaccgtcttcttcctcgatcatgtctcacttcaagggcaagtaccatgatgagcttattgccaatgctgcttacattggcactcctggaaagggtattcttgctgctgatgagtcaacagggacaattggcaagcgtttggccagcatcagtgtagagaatgttgaatccaacaggcgtgctcttagggagctgcttttcaccgctcccggtgctcttaaatatctcagtggtgtcatcctctttgaggaaactctctaccagagcacagctgcaggcaagccctttgtggaagtcttgaaggaggctggtgtgcttcctggcatcaaggttgacaagggcacagttgagcttgctggcactaatggagaaaccaccac

SEQ ID NO: 208114 - DNA, 518 bp, Glycine max
  unsure (1)..(518): unsure at all n locations
agagaacgagaaaaagacatcgagaaagcaatgctggaggctgagagggaaagggaaagagaaaaggataggatggctgttgatagagcaactttagaggctcgtgatagggcatatgctgaatcttgtgaaagggctgcatttgaaagagcaactgtggaagcacggtacaaggcactggctgaggccagggaaagacttgagaaggcatgtgctgaggccagggataagtcaaacattgataaagaaactatagaggcaagactgaaagcagaacgcgctgctgtagaaagagcaactgcagaggctcaagaccgagctatggaaaaattaaagaatgaaaggactgcatttgagtccagagaatggttagcgagatctgtatctgacaatttttgcggaagaccagactcttcatcctccgatatgctggatcctgagtttcagaacttaagctctaccacaggttccagacatccatattcactttatgngtgctgcctcttntcttagagatc

SEQ ID NO: 208115 - DNA, 466 bp, Glycine max
gacccaataatagtagttatgatttgtatatatcagaacaacaaaatatacataaactgtaatttttttccagccagtgatcagattttatttctatcataattctaagtgttttggaaacacattgggcgccaatacagaataatcaaaagggagaacttaatttctctcccttttcaagccttctccttagatggaactgtcccatctgtgcctgcaagcatggcatatttgctcttcctagtcaaaattgtgcactcaaatcccaaagtccctgcaagaaccctttgaatgtagtttgcaacttcaatagctgatttccctccactgcatgtgagctccttgggaagctggttcaagaaagcgatctcatatgttggcattggattcatgaacacaaaagacgggtccaacaacttgtgtccgcaaaccgtggtttcgtagaacacactttgctttgtgttaa

SEQ ID NO: 208116 - DNA, 546 bp, Glycine max
  unsure (1)..(546): unsure at all n locations
gtgctcattggaagatggaagtgtaatcaagcctttatatgagcagtcatttacaattccaagattcaaaaagcttcaacttgagccaccggagattgttgaaatacaggctaatgatggcactacattgtatggagctctgtataagcccgatgcttcaaagtttggacctccaccttacaaaactatgatcaatgtttatggtggtccaagtgtacagcttgtttgtaactcttggcttagtacagttgatctgagagcacaatatttgagaaaccaaggcatcttagtttggaagttagacaacagaggaactgcgagacgggggttgaaatttgaaagctatttaaaacacaaacttggtcaaattgatgctgatgatcagctaaccggagcagagtggcttgtcaaacaagggcttgcanaaggtggtcacattgggttgtacggatggagctacagcgggtatctctctgccatgacactgtcaagatatccagatttcttcaagtgtgcaatagcgggcgcccctgttacatcatggga

SEQ ID NO: 208117 - DNA, 509 bp, Glycine max
gatagccagaagagtttctttttagggtgtgaagtgggcaaaaatagccatcaaagtagctttaaggcaagaagaaataaaaccaactattgggtaaaaaaaaacttgagaaactactctggccattcaaccaaagatggaataacaagttattttacagattcctctgaatgaagtcccacatcctcccttccatgtaaactcgatcgctatgacgccttggcatgtgacgttcatctgggaaaactattaactcatacggttttccagctgccacaagtgcattgataagtcttgcagtgtgcctgaagtgaacattctcatcaatcatgccgtgcacaagcaacaaccgccctttcaactgctgcacttggttcataacagaaccgctttcatatcccaacttgttttcagatggcaaccccatgtacttctctgtgtaaaacgtgtcatatccgtcccatgatgtaacaggggcgcccgctattgcacacttgaagaaatctgga

SEQ ID NO: 208118 - DNA, 482 bp, Glycine max
ctctctcccctacttccaaaacccttcttcacttctccagttcccattgctgcaacagctacctcatattgttccgaatggaatgatattgccgggtgatacccttgcttaacgatgaagatgtcactggttcaacttcgacctctcttgacaaggcgagggttcagcacaagctctgagaaccttgttgcttctgtgctctttgagagactgccagtggtcattcccaaaattgaccctgtagtttatgcatttcaagaattctcgtttcgatggcgacaacaatatcaacgcagatatcctgatgaatttctagacaaatctgatgctaggggtaaaggtgattatcagattgactatgtgccagcaccaagagtcactgaagctgacaaaaacaatgatcgaaggtcattacaaagagctcttgatagaagactctaccttctactctatggtaatgcatatggtgctacaagcgggaa

SEQ ID NO: 208119 - DNA, 462 bp, Glycine max
gaactctaaaacaagactagttggtgaactggtaagatagatatccaaacataattgtcaataaaattgggcaaatttgggatgttaagtgtaacttcaaattgaaatcttcagttatgcccagaaaaactatgctagcttgatcttctttcaaggtccctcactgtcatttagagctaatttgcaatagtttcaactaaacaactatcctccattgtcatcagctaatgatcatcttgtttaaaaactcagcttgctcgggaaaatactccatcagttcatcctttgtcacccagacatgatcctcacattttccgatgttgaatttgtttttggcaataacttgagacttgaagaagaatctcttaaaagatgtggatctagactggtcttctgtaggctgaacaaccatatgggccattggagcatttccaacaaaatatgtgttagaaagatctccta

SEQ ID NO: 208120 - DNA, 360 bp, Glycine max
ctctctcccctacttccaaaacccttcttcacttctccagttcccattgctgcaacagctacctcatattgttccgaatggaatgatattgccgggtgatacccttgcttaacgatgaagatgtcactggttcaacttcgacctctcttgacaaggcgagggttcagcacaagctctgagaaccttgatgcttctgtgctctttgagagactgccagcggtcattcccaaaattgaccctgtagtttatgcattttaagaattctcgtttcgatggcgaccacaatatcaacgctgatatcctgaagaatttctagacagatctgatgctaagggtaaaggtgattatcagagtgactat

SEQ ID NO: 208121 - DNA, 478 bp, Glycine max
gaactctaaaacaagactagttggtgaactggtaagatagatatccaaacataattgtcaataaaattgggcaaatttgggatgttaagtgtaacttcaaattgaaatcttcagttatgcccagaaaaactatgctagcttgatcttctttcaaggtccctcactgtcatttagagctaatttgcaatagtttcaactaaacaactatcctccattgtcatcagctaatgatcatcttgtttaaaaactcagcttgctcgggaaaatactccatcagttcatcctttgtcacccagacatgatcctcacattttccgatgttgaatttgtttttggcaataacttgagacttgaagaagaatctcttaaaagatgtggatctagactggtcttctgtaggctgaacaaccatatgggccattggagcatttccaacaaaatatgtgttagaaagatctcctaagactgatttcaatgc

SEQ ID NO: 208122 - DNA, 415 bp, Glycine max
  unsure (1)..(415): unsure at all n locations
ctctcaattgntttctacataatacaaacctctctaagttttgaagcttattatacccaatctcgatatgcagatcttcgcgaaaaccctaactggcaagacgaacaccttggaggtggagtcctttgacaccatagactgcggggaggccaaaatccaagacaaggagggcattcctccggatcaacagcgttaaatcttcgcctgaaaacagttcgaagacggcagaacccttgccgactacaacatccaaaaggagtccacgctccacctggaactacgactgcgtggaggcatgcaaatcttcgtcaaaacccttactggcaaaacaatcacgctagaggtggagtcctccgacacaatcgataacgtgaaagccaagattcaagataaggaagggattcctccggatcaa

SEQ ID NO: 208123 - DNA, 467 bp, Glycine max
acataacgaagaaattatattaataaaattgaagtacacatcattaacaagattccacagtaccgaaactagacagggacaccacggagcctaaggacgacagagaaattggaaaaaggaaagagaaattattattagaactgaaacatctcattagcaagattcaactgaactagaaatcaccaccacggagcctgaggacaaggtgaagcgtggactccttctgaatattataatctgcaagcgtgcgtccatcctcaagctgcttccctgcgaagataagacgctgctgatccggtggaatcccctccttatcctgaatctttgccttcacgttatcgatcgtatcagaactctccacctccagagtaatcgtttttccggtgagcgtcttcacgaagatctgcatccctccgcggagacgaagcaccagatgaagcgtcgattccttttgaatattgtaatcg

SEQ ID NO: 208124 - DNA, 549 bp, Glycine max
cacaaggaaaactatccatacaatgtttttattagactagtcacggaaacaatcttgaaaatcagacaaaaaaaaatgataaaacctacatataatacataatggagtaacatataaagccaagctgtatacattaactgccacatcccccacccccaaggaacttgtaatagaatgggaggggagagagaataatactaaagatacaacaattctctgctatgttatacttgattgggccattacaaaatatataaatttcagacacaatacgttgacctgtgaaggaaattagcatactgtgcgcccatagcacaaacaagcaaggtaaaggttttttgaccatttttccttaacatgtgtgcttggaaattgagatgtacgcagagtttcctgggtttcatctcctggcctgcgcctaggaatgctaagtataagagcagattgatcccatgtagcagcccgtgctgtaatcctataaccattatcccatcgtctgtggattccctcactaggatagagaaaatcaagttcaacaacctgatcact

SEQ ID NO: 208125 - DNA, 479 bp, Glycine max
ctccatattatatcaactggagctggggaacctagactctactcgctctcgtccccgccggagatccaccatggacgcaactctgcgcgcacagcacctctacgattggtcccgagaatagaaattaactgatcgccgaaacccctgccgagatatactcacttcggataaagtaaaccactgtacccaagccctcaaccttctgaaggagaaacttcactatccttaagtgatcactgaggaggaaccacactcgcatgcgaacaagataactccccctgagatgagaagaggatgcaccgcctcgtatgacgccctcaatttgagcaaaaaccgatgcacggacgttttggcatttaacaagaacagggtggttctcaaagcaagtactgattataagcctgaagcacacgggtatatcaatgcaagccttatatccacctcatccgctggaaatgtgtgccactttatagccacac

SEQ ID NO: 208126 - DNA, 498 bp, Glycine max
ccacgtccctctctcccacaatggacctccatcgccggccgccccacgccgccgctgacgacggagccatccaccacaagaagaggagggactcctccacttcctctcccaaggcctccgacgcgctccctctccctctttacctcaccaacgccatcttcttcacgctcttcttctccgtcgcctacttcctcctccaccgctggcgcgacaagatccgcagccacacccctctccacgttgtcactctgtccgagatcgccgccattttctccctcatcgcctccttcatctacctcctcggcttcttcggcatcgacttcgtccagtccttcatctcacgcgcctcccacgactcctgggacctagacgacgccgtaacagctccctcccccgcaattaccaaattgccctcacgggatacctcaattattttctccgaggacgacgaggagattgtgaactccgtcgtcgagggcgtcacgccctcctacgcgc

SEQ ID NO: 208127 - DNA, 448 bp, Glycine max
aacaaacaaagacattttcatttgggatagaaaaatattattatccaataataggcatcctacaaatacaattaaagtataagaaaaagggcaagcaaagtagagaagctgtataaaacggcaaaaattaattaattaaaaatgaagtgaggcaattttcactcaatgatggattggataacacctgcaccaacggtcttgccaccttccctaatagcaaacctcattccctgttcgcaagccacaggcacaatgagctccaccaccatcttcacacggtcaccgggcatcaccatctgcgactcttcatccctatcgttggtgatagccgtaaccttcccagtcacatcggtggtcctcatgtaaaactgaggcctataccctgcaaagaaaggtgaatgtctcccaccttcttccttcttcaaaacatacacaatcgctgagaact

SEQ ID NO: 208128 - DNA, 468 bp, Glycine max
  unsure (1)..(468): unsure at all n locations
ctcggaggcactccatactcaactcttccacactccaagagtgggaacagaatctcgatacgtctcatttaccagaaatggtttttggggaaaacactttgagtctgaaacacttgagcagtggcaccaacattcattttaatgcatttgatgctctacgtggctggaaacaggaagcattgccgccagttgaagttcctgcggcggctaaatggaaatttagaagcaagccctctcagcaagtaatacttgattacgactatacatttacaacaccttattgtggaagtggcactatggagattgataaagatccgaatgagggagagagagagacttctaaggaaaccagtgatatccattgggaagactgcaaggatcaaatngatgtagttgcactagcatccaaggagccaatacttttctatgatgaggtagtgttatatgaagatgaactcgctgataatg

SEQ ID NO: 208129 - DNA, 477 bp, Glycine max
tgagaaagagacttgtcaggaaggcatttgatatgattcaagaccttgctgaaagtgaaaataaagaggactacaaaaaattctgggagaactttggtaggttcataaaattaggttgcattgaagacactggaaatcataagcgcattacaccattattgaggttttacacttccaaaagtgaggaggaacttaaaagcctagatgattatgttgaaaacatgggagaaaaccaaaaggctatcttttacctagcaactgacagcttgaagagtgcaaagactgctccatttttggagaaattggttcaaaaagatattgaggttctttatttggttgaacctattgatgaggttgccattcagaacctacagacctacaaagaaaagaaatttgttgatatcagcaaggaggatttggaattaggtgatgaggatgaggtcaaagagagggaaaaccagccagaataccacctac

SEQ ID NO: 208130 - DNA, 458 bp, Glycine max
gaaagatcttggccatggatattaacagggagaattatgaattgggtttgccagtaattaagaaagctggtgttgaccacataattgaattcacagaaggtcctgctctcacaatactcgatgaaatggttaaagatcagcagacccacgggagctatgacttcatctttgtggacgcagacaaggaccactacctcaactaccacacgaggtcgatagagcttgtcaaagttgtgggagtgatcgggtacgactacaccctatggaacggctctgtggtggcacccccagatgctcctctcaggaagtacgttagatactacagggacttcgtgctcgagctcaacaaggcactcactgttgaccccaggatcgagacttgcatgcttccggctggtgatggattcactatatgccgtctgatcaagtgatactgacttctgataatacacaatcgt

SEQ ID NO: 208131 - DNA, 502 bp, Glycine max
caaaaagtcactgcaataaaaaggttgtgggggcaagagtgttctaccatggatatgaagcagcaattggtagaattaatgagcaaaaagagtataagtcaccaagagatcaagatgggcatggcactcacacagcagctacagttggaggctctcctgtgcatggagctaaccttctaggttatgctaatggcacagcccgaggaatggctccaggtgcaaggattgcagcctacaaagtgtgttgggttggtggttgcttcagctcagatattgtgtcagctattgataaagctgtggctgatggagtgaatgttctttccatctctttgggtggtggagtctcctcttattacagagatagtttatcagtggcagcatttggagcaatggaaggggtgtttttggttcatgttctgctggaaatgcatgacctgaccctgccagcctcaccaatgtgtcaccatggatcaccacagttggagccagcacaatggatagg

SEQ ID NO: 208132 - DNA, 465 bp, Glycine max
gcaaaataaacacaaagcctcgttaacagcaaggtggtggtgtctatcaagaaaacaaagttacatcccctcccctgtttgcacaggtttgaccaatacaccgaattactaaaattgatatgaaggaacactaggaaaaacaaaaagcaaaattccaaacgattattattctgggaagagtcgaagcacaatactcattaacaagaaaattcggttgtacccataaaataccgattcctacccgcacttagattgatcagtacttgtagtcctcaacatggaggctctctgaggcaccatcagcaagctttgagttacccttgtaggttcccagagttgcctctgagttggccttggctcttaccaaaagggcttcctgagccttcttcacattctcctcttttccactccatgccttaagggtgctctgttgaagtgcccttccaaaggagaaagagagtgacc

SEQ ID NO: 208133 - DNA, 520 bp, Glycine max
cttatttgtatacggtgagctgaatgccttgctctttgtaaccttggtgcttgcagtaattttcaggttagagcatataaaaataagggaattacgcagtcaagcgaaagtaattggaaccttagtaacctttgctggggctttgttaatgacactatacaaaggccctcaattcgacctatttcatcattcaaacacaacccaccaacaaggtggaagccacactcagaatcactcacactgggtcgcaggaactctcttcatttgcctgggttgcctggcttggtcttccttctacatattgcagtccataacggtgaaaaggtaccctgcggaactatcactctcatcgttgatatgcttggcgggtgctttgcaaagtgccgtggttgctctgattgcagatcataaccctcgagcatgggctatcggttttgactacagcctctacggtcctctatacactggaataatgagttcaggaatagcatattatatacaagggttgggtatgcaaagc

SEQ ID NO: 208134 - DNA, 389 bp, Glycine max
atccacacaaactcagggtagggcagagagagagagagagagagagagagagagagagaatgggagggtgggctatcgcggtgcatggtggcgctggtgtcgaccctaatctcccactcgagcgccaagaagaagcgaaacaacttctcacgcgctgtctcaatcttggaatctctgctctaaattctaatcttcccgccatagatgtcgtcgaacttgtggcgagggaattggaaacggatccgctgttcaattcgggccgtggatctgccctgacagtaaaaggaacgggggagatggaggctagcatcatggatggtccaaaacgacgatgcggcgccgttgtgggtcttaccaccgttaagaacccgatctcggttgcatcgttg

SEQ ID NO: 208135 - DNA, 396 bp, Glycine max
ggggggtctaccacaagtctttttttaagagaaagacaacaaagttcccattttattatttcacatttttttctaattcttaaaaacaagggtaccattttttatctaaatcgggccccagcagaaagaccctacactacagtggaacatggtacaaaaatccaaaagttgcatcgaaacaaccatgaaggaaaataatgaagcttttcccagattccgacctccatgaagccattttcaggggcacagcccctaaacatgccattgcaattgaaaccataagccacttccccagcgttggacacagcaatgagaccagccattcctttattgagacggggcttgatcacaaaatccacgggttcttgaagcttcaagcctttgtatttcataacc

SEQ ID NO: 208136 - DNA, 304 bp, Glycine max
acaaaaactcgctgtccttctccatttctcgtcgcaccttttcctcttctctctctttctctctttctagttcgtgttcttcgtcgcaaatccgaagtaggatctctctcgttctttctctaagtttttcgcgatggcgtctaagcgaatctcgaaggagcttaaggatttgccgaaggatcctgcaacatcttgcagtgccggtcctgatcatgaagatatgtaccattggcaagctgcaactatgggtccttcagaccgtccctatgcttgaagtgtaatcctagtgactattgcatatcct

SEQ ID NO: 208137 - DNA, 482 bp, Glycine max
ccaacacgacgagactgtcaccaatgacgaaattgctgctgacctcaaagagcatgtgatcaagcctgtgatcccagagaagtaccttgatgagaagaccattttccacttgaacccttcaggccgttttgtcattggtggccctcatggcgatgctggtctcaccggccgcaagatcattatcgatacttatggaggatggggtgctcatggtggtggtgctttctccgggaaggaccctaccaaggttgataggagtggtgcttacattgtgagacaggctgctaagagcattgtggcaagtggacttgccagaaggtgcattgtgcaagtgtcttatgccattggtgtgcctgagcctttgtctgtgtttgttgacacctatggcactgggaagatccatgataaggagattctcaacattgggaaggaaaactctgattgcaggcctggtatgatctccatcaaccttgatctcaaga

SEQ ID NO: 208138 - DNA, 415 bp, Glycine max
aaaacaaaagcctttggataatttaaaaataattttaacatagatttcaatacagtttttattattattaactacatattaactattttaacatgcttctgattgaatgggcctataaacccaatgttcacgcaaaaattaccaagagggttagaggctatacatagaaaacctgaccaacatttaatagactctcatgaggaacattggagatcacactattttccctgcatatcttcctcaaaaatgcgtatatttaatcaacagcttttttcttgtggaatcttgaatccctctcttggcctcacaactgtgtttccaagaatgtgaaccaccccagcatccctgcaggtgtttaagaactcaacttcatcaacctcagtgtgggtgctaacatgaccagaggattgaattg

SEQ ID NO: 208139 - DNA, 440 bp, Glycine max
tgaaaacccaaagtgcttctctcctctgtctttttctctctcttgctatccttttggctagtggcactgctgcaagtgcaactccaagaagcgcagtgccaagccaccatgtttcaacattcaacagaagcctttttccttccacttttctctttggaattggatcttctgcttaccacgcagaaggagcagcaagtgtagatgggagaggaccaagcatatgggacacctacactagacagcatactgaaaagatttgggatcatagcaccggtgacatgggagctgatttttatcatcgatacaagggtgacataaaaatagcgaaagaaattgggctggactctttcagattctctatctcatggacaagaatattcccaaagggcaagggagcagttaaccctcttgggttaaattctacaacaatgtcatcgatg

SEQ ID NO: 208140 - DNA, 459 bp, Glycine max
gagaacgtaaaaagagtgataagattattattaattagcattcttcctcaaaatgaacctctagaactcatggccactataatgaaccggtggtattttacttcgacatgccatttggcattatttatttgataaaatgatctcttgattacatccaacacaagtgatatacgatgaaatctagggaaataaacaagaaaaacactagacatgtcaaaggaacactaaattcagatcacttgagaaggaacttttgcaaccaaaaagcagagaacttggggtatcttttcaagttgttcttgtaatccacatatatgagcccgaatcgaactgtgtaaccagcatcccattcaaaactgtccgaaaatgaccatgcataatagcccttcaaattaacaccttccttgatcgcttgaagaaggaatttaagatggccatcatggtatctaatccttatac

SEQ ID NO: 208141 - DNA, 488 bp, Glycine max
atttggttcaatcaaatcaatgatgttgaggaggaggggttctgtgacctccttctattccaaattcatcgattctcacaatcttaattgtgggcgttcctcttcgaatccccatcgcgtcgccgcttctgcaacttcattcgatatctcttccgcttctgcgtctaaagctacgaccgactttgtgtcgttgacccgccactatggaaggtgctattgggagctctccaaagctcgtctcagcatgcttgtggttgcaacatctgggactgggtttgtcttggggagtggtagtgctgttgatctttcggcactttcttgcacttgcttgggtaccatgatggttgctgcatctgctaactctttgaatcaggtgtttgagatcaataatgatgctaaaatgaagagaacaagtcgcaggccactaccctcaggacgcatcacaatacctcatgcagttggctgggcatcctctgttggattagctg

SEQ ID NO: 208142 - DNA, 457 bp, Glycine max
aatcgaaataaattatctaatttttattaaaaatattatccggagacctccaaagataaatgcaaagaataacaaattgtcacacggactatgaccctcaacatgacaaacgctaacactcaattaataatgtgagcattgatagatatttggtttaatttcaagctttcatgaagttaagtgcatgaggaacatggagagccttcaaccagtcagttccaccgttggaaccagcctggaggaattgggcaggggtgaactgagcagcttcttgctggctaatgagaccgcggtaacccttccacttgatccttccgttaacgttggcaccaggtccatcgttgttgtattcagcatagtacagggtgtcttcgaagtgttcaccggcccatgggcaccatccttccgggtgaaggaagtcacccacggtggattccatcacaattgtccttgagaa

SEQ ID NO: 208143 - DNA, 457 bp, Glycine max
  unsure (1)..(457): unsure at all n locations
tgcgaggtggctattaatgcggtggatgaggagtcgaggacgtcaccggaggagacgaagatcggagcgcgtgtgaaggtgaaggaggcgggtttgaaggtgtaccacgtccccaaagttggggagcttgacctaacgggtctggaaggcgagatcaagcagtacgttggcctctggaacggtaagcgaatctccgccaatcttccttacaaggttcagtttctcaccgacatccccggtcgtggtcctgtcaagttctttgcccacctcaaggaagatgaattcgactatctttagtcactgtactgcactgcactgccctgcacgtcactttgtgtatgatgatttgaagaaggtgtagcctgaatcctttctaatatttnttagtaggtgtccctgtacttgttgggtaaagcaatggtatcctttcgcaaatctgtctttttgacctactatg

SEQ ID NO: 208144 - DNA, 410 bp, Glycine max
cccgctacaatttgctttgtgctcactcatctatctattgtaaccaaacactcttcttcatattcgtcggcttcttattgcgcttgatctatctgtgacgagcattatggactctagagcagtgcttttgctggctatgagcgtccttcccgtcatggtctgcggccattacgcccaccataagaaacctttttgcgcgaagggtatgtttactgagaaccttgccgtgcaggttttgagacctcagcaaccacctacattgccggtgctgagattatgatgcaatgcacgagcagggttaccaaccaggttgtgttcaccacgaaggggtacactggctcaactggagcatacacaatgtccgtggaccaggatcacgcacatcaaacatgcagtgccaagcatgaaag

SEQ ID NO: 208145 - DNA, 451 bp, Glycine max
agtaatacatgaagctgtcgacttcaatttttttcttggttcaacagattcatgttttagcattacaaacagtgggctatttgattgcataccaagtctgttcttttacttaatcatacacaggtattaaatgttcatgcaaatgctacaaagcacctttaaggggatggataccacaaccatttttattcaccaacaaagggacgtgcactctcaacacgctccctttacttccccaagaagatgaggaatcacttttcaagcttacgcttcacggaaaatctgccaaaaccacacagttggcacaccaaaacctactacctattttgcacattcattccttgggcgattcttgcttatgctgctgaaccagcttggtcacatatgtccaacagatccagagtctctggaactgacagctcaggacgaagctttggaccatcataatgac

SEQ ID NO: 208146 - DNA, 299 bp, Glycine max
tcgagtttcacagcgaagtcgtaggagggttttaaaagatggagaacatgcctagcttctggcaattgggcgatgaacttcgtggacacttaaaagcattggaggatcacaaatggttaatggttgcgttgaaattggcggaacatacgagattgaagggggagcgtgtgaacaaccttgatctttgaagggccccattgaaacaaggtcaagggataaatttgggttccaggaatagaacaaatttgagtctcttaacttaagcatgttgaacctggactctaaatttactgagaatg

SEQ ID NO: 208147 - DNA, 425 bp, Glycine max
gcgccctttttttttttttttataagaaaaaaagtcatttgcatataattaattgtccaccgttttccacatgaataatagagaaaagaaaagtacaaacacaaatattttgaagaaaaaaaaataaaaggaaaatatcgattgcttttaaatgcattagcaggtgccactcaatgatgaccaatcatcactagggtgcagaagaagcaacggtggtcttggtccacgattgtgtgattatcagaaaatcagaatcacttgatccgacggcatatagggattccatcaccaaccgggagcatgcaaatctcgatcctggggtccacagcgagtgccttgttgagctcgagcacgaagtccctgtagtatctaacgtacttcctgagaggagcatctgggggtgccaccacagagccgttccatag

SEQ ID NO: 208148 - DNA, 394 bp, Glycine max
atttcccatcttgtgagaaattgttattgatggcgcgctgaaacttgttggattgcccatggaactgttacatggggtgtgagtgtggatccttatgtcatgatcatcattgctcggtgatgtgctcatgatgcctatatcatcctggtccactgcatgaaagatcagactagggtctaatgcatcagatggattaacatgaccgctgccataatgaaacggagtagctttcaccaacctcctagctgtgtattaaccaacttcttccggtaatagatggtaccatggtatttgtatagctctggaattgatcgttcgagctgctttgactattttgaggatccagtgtagaatttgggttgccaatacatctattcgtctattatatgtatat

SEQ ID NO: 208149 - DNA, 515 bp, Glycine max
aactagccaatagctttggtaggatttacgctgtgccattgataccttatgttatacaaattatttcatgtattacacatgctgtaagcaacgaacttttggggaatggggcagatacaggttaaaacttgtgatgaagcattccaacaaaattactagacaatataagcaaaactatatgtggaagaaactaggagtgaccccttacacctgcttacctttacacctattcataatttaacattacatatttatatatttagacgaataaatgtagcgccataccttattccccacaggttacaaagaatattacaagcagcacttgctttcctttcctttgctgaccaaacttcactatgctatctatcgtcggtatccgttggccagaacaggaatcctcaccttgtgccctctgctccctttcatcaaaacctctccaaaactataccttcctgtcaccgagcgcactggtagtgacaccaaaaactggcgcgatgcgcctgctttgatag

SEQ ID NO: 208150 - DNA, 295 bp, Glycine max
atttccaccaaacccgtttgcgttgttgtttgcgaataaatggcaactaagaggagcgtgggaacgttgaaggagggagattcgaaggggaagatggtattcgatgacggtcagatctgaacgtgcctttggatgacaaccttagcatcaccgatgacactagagtccgtgctgctgctaccaccatcaagtacttgactggatatagtgctaaagtgatcctttctagccatttgggacgtacaataggtgtaacagctaaatacagtttgaagccttttgtgccaaggctgtc

SEQ ID NO: 208151 - DNA, 479 bp, Glycine max
aaccaacaaagtaaactcatttggaaatgaacattgttcaagaacaattagatcaaagctcaatgcaacaccaaggatgccacaaaaccctcttattttgaaacctatcctatattaagcctctacaggagcaagagctcgcagctctcattgtaccttaatccactgttggctgaaacccaaccataataataatataaagcacaaacttcaaaggaacgaatgatttttgctcaagcatcatcaagagcaaggacaccagggagttgctttccctcaagaagctctaagctggcaccaccaccagtggagatgtggctcatcttgtctgcaagtccaaccttctccacagcggcaacggagtcacctcctccaatgatggttgtcactcccttcccactcagctctgccagtttcttggctatagcctctgttcctgtggcaaacttatcaaactcaaaaacacccattggtccatt

SEQ ID NO: 208152 - DNA, 484 bp, Glycine max
ggacaccaagcagtggcacttcgcgtgcaaggtgatcgttcagtgttctttgattgtgctatgcgcggttaccaagacacattgtatgcccacgcccatcgtcagttctaccgcaattgcgaaatctctggaacaattgatttcattttcggatactccaccaccttgatccaaaactcgaagatcttggtgaggaagcccatggcaaatcagcagaacatagtggtggcagatggcacagggcaaaagaacatgcccacaggaatagtcctccataactgcgagatcatgccggaccctaccctcttggcagaccgcttgagcgtgaagacttacttggccaggccatggaaggcattctcaagggcagtgttcatcgagaatgttatcggggacttgattcagccagatggttatattccatggaacccaattgaaccaaacacacaggattgctacttcgctgagtttggcaacactggac

SEQ ID NO: 208153 - DNA, 440 bp, Glycine max
gcagccaataataaagacagtgccacttattttcatttataatagaggcaaatataaggtatacatagatgagccagctagctaataagacataggcaactgaacacaacacatgatatccccacaaaggataaatcataagacgtacaaaagcacaaaggtaaggactattattaattcatggcccttaaaaaatactaaaaacaccaagggggcatgcaaatgatacatatgtaattattattaattaagcaagaatctccttcaaaggcttggcctcaagttttgccttctgatcaagttcttgcaaatgcttttcattctcaaggtcctgcaaatgcttttccttagccagcttcttcatccttgcaatctcaatgtccttgctcatcttcctcctgtacatttcagcaaaagtgattggttcctccatcacaggc

SEQ ID NO: 208154 - DNA, 500 bp, Glycine max
gtacaaaaatatcactgtccttcaaatggcagcactcatgggaatgcgatatatatattatgtatatatgattttttttctctataaattaacaaaatcagattagtgggttaccccttgttcttttgacaaatttgaacttggctgattcttggcgcattatattatagaatttgggtcaatatatgcccagagcatctctgaattcgcttccctttgcttctacttcactatactactactctaaccaccaccatcttaccagttacacggcttaagttccatagtttgtcatcttgaaccctggttggatgagtaccatagctttttctggcatattaatatcttctgcatgtcactgccattgtcagtatcttctttacgacattcccaacgcatacccttaccaatggtagtgatagcatctgtaaaataactggattcacgaatgattgcatacccccaaggccgtaagaatcgatccatttccagcaatacat

SEQ ID NO: 208155 - DNA, 458 bp, Glycine max
gggaaataagaacttttgcagctaaatttatttaagatttaagatatcttatacattgaaactgtcatgtgaaggtaccatccttacagcaggcagatcttgttaatacaacactttgaacccatgtcagccagactaacatctctctttcgggctgcaaaatcgcattatttgtgcagtttcatttgcaaggatagctttctagccaaagtttattccctgagctaatggtagttcacttccataattgatggtacatgtagaacgccgcatgtattgcttccacgagtcacttcccgcctcacggccaccaccggtcgccttttctccaccaaaggcaccaccaatctcagctccatttgtaggtatgtttgcattcactataccacaatcactacctcgtggcccaatccacttgaatatagttccaggtctttgggtaaagatgactacttaat

SEQ ID NO: 208156 - DNA, 554 bp, Glycine max
  unsure (1)..(554): unsure at all n locations
tttcaactctctctctccccccctctttctctcacacacaaatgtctaaaataacaataacctctccaaaacactgtgctgacaaagaaggactaaaaatcaagaactacaagaagatctacttcactttctcagcatttttcatcacaatcctactactaatacttgttatatggctcatcctccaccctgcaaagcctcaattctccctcaaagaagtcgacatcttccaacttaacctttcaggcccaaacctcaactcctccatccaactcaccctcctctccaaaaacccaaaccagaaagttggcatttactacgacgagattcaactctatgcaacctacaagggccaacaaattactggtgatacccctgtgccacccttttatcaaggccaagaagagagtaatctcataacagcttctttggtgggaaatgctttacccgtggctccgtctcttggctatgaacttggtcgtgatcaaattgttggaagactagtnctgaatctcanagccaatggaaaagctcgttggaaagtgggaacatgg

SEQ ID NO: 208157 - DNA, 392 bp, Glycine max
  unsure (1)..(392): unsure at all n locations
gggccccggnnngaagtgtatgcacgttagaagagcaccgacgnnggaatgcacgtcgtacgcgagcctcagaattgggttcgagctccatatcatatcaactggagctggggaacctcgtctctactcgctctcgtccccgccggagatccaccatggccggcaacttcgccaccggcaccgtcaccttctaaggattgagtcccgagaatttgaaattaattgctccccgaaacccctcccgagatatacttacttcggatcaggtcaaccactgtacccaagccctgaacctgttgaaggagaagcttcacgatcctcacgtgatcactgaggagttcccacacttgccggcgaacaggataactccgagtgagatggagaagaagaat

SEQ ID NO: 208158 - DNA, 425 bp, Glycine max
ggctgtggaaccagcaacagccataaaccatttgttctttgtcaagcacaacctctcccttgacatcactcctcagtccatccaaacccagatgatatggttcaacaggtacctggagagccaggactgccaagagtcaaagtgcaatgattttgatgacactctattttggtttggggagattggagtcaatgactatgcctacactcttggatctaccgtctcagatgaaaccataaggaagcttgcaatcagcagtgtctcaggagctttacagacattgcttgagaagggtgccaagtacctagtagtgcagggtttgcctctaactgggtgcttgacattgtccatgtacctggctccaccagatgatagggatgacattggatgtgtgaaaagtgtcaacaaccaaagctactaccaca

SEQ ID NO: 208159 - DNA, 376 bp, Glycine max
aagaaaaaccgggtttaaaaaaatccacttcccccaaaaaatccccccttttgaaacccaaaacccgtggggggggggccctaatggcccaagaaaaattttttctcccaaatacccatggaaagagccgggttgggtttttaatcttaaaaaacaaaccgggggtggctggaacacatgatttttgctccccctgggactagaaaaaaagcccaaccccccccccaaaagggaataaatggggtttgaatgaaatcgaccgggcaattttaaaacactgggggcgttgcaaccctgggagggtaaagcggggtttacaatggggaaaaacccaatttttgggcgaacccccaaatctttaaaaaaaaaacatcgg

SEQ ID NO: 208160 - DNA, 474 bp, Glycine max
caaacacttccatccatcaccctttctctctgcttagggttttgatcgcatcggatcttcactctcttctccgatctcaaaatgcccgccgtttatggagctcgcttgaccaccttcgaagactccgagaaggagagtgaatacggttacgttcgcaaggtatcaggaccagtcgtcgttgcagatggcatggctggggctgctatgtatgaactcgtgcgtgttggtcatgataatctcattggtgaaattattcgtctcgaagggaattctgctaccatccaagtttatgaggaaactgctggcttgatggttaatgatccggtgttacggactcacaagcctttatccgtggagttgggacctggaatactggggaatattttcgatggaattcagaggcctttgaaaactattgctaaacgatctggtgatgtctatattcctcgtggtgtctctgttccagcactcgac

SEQ ID NO: 208161 - DNA, 524 bp, Glycine max
ggctgcttctggtaatatcatagcacaagagggtgaagctgagcgtggcaacactgtcaaatcctctggtatctctctctactatgcgatgccagagggtgatttgaagaatttcaaaggggaacgtgaagggaaggagttccttataaatctcattgactcaccagggcatgtggacttctcatctgaggtcacaaccgcacttcgcatcaccgatggagcacttgtggtggtggattgtgttgagggtgtctgtgtccagaccgaaactgtgctgagacaagcccttggagaaagggttaagcctgttttggctcttaacaagatggataagtgctttcttgagctcaatcttgatccagaggaggcatacctaacactccaaagggttgttgagagtgtgaatgtaatcatgggtaactatgaagatgctctacttggagatgttaaggtgtaccctgagaagggaacggttgccttttccgctggcttgcatggatggggctttacactcaccaactttg

SEQ ID NO: 208162 - DNA, 362 bp, Glycine max
gaggggcaaggggccaaaaccttttttgaaaaaaaaaaaaaaaattaccgcccccccccccacttttcatggggccaaaaaaaaattcccccatttgggaacctaaaaagggggccccaaacccccacaaagggaaaaatgggtaaataacccctttttttttccgaaggggacaacccccccccaaaggggggggtcccgggccccgggggaaaaaccgccccaaatcccagggaaaaaacccccctggggggaaacccccccccccaaatggggcccccaggggtcccccggaattgaaggcccccacccccggttaatatccccccacacaaaaaaagggggggcccgcccccttaatt

SEQ ID NO: 208163 - DNA, 478 bp, Glycine max
gaagaagatggtgtccttgaagcttcagaagcgcctcgccgctagcgtcctaaagtgcggcaagggcaaggtctggcttgatccaaatgaagtcaatgaaatctccatggccaattctcgacaaaacataaggaagttggttaaggatgggtttattatcaggaagccgactaagattcactctcgctcccgtgctcgtcgaatgaaggaggccaagagaaaggggcgtcactctggttatggtaagcgtaagggtacaagggaggcaaggcttcccaccaaaatcctttggatgaggaggatgcgtgtcctcaggcgcttgcttcgcaagtacagggaatcaaagaagattgacaagcacatgtaccatgacatgtacatgaaggtgaaaggtaatgttttcaagaacaagagagtcttgatggagagcatacacaagtccaaggctgagaaggcaagagaaaagacattgtctgac

SEQ ID NO: 208164 - DNA, 491 bp, Glycine max
taggttaaaggagtgcatgttatgaaaaagggcatcctcccatgtttctggcgagctcctatcgataatgacaaaggaggaggttcagccagttatttgtccaggtggaaagcagctggaatggactgcctccactttattactgagagctgttctgtgcaaaatattacggagaactcagttagaatattggtggtttttcttggtgttaccaagggcgaggatggttctctctccaaccaagacaagtcaaaggttttatttacaacagaaatggcatatacaatttatgcttctggggatgtcattatagaatgcaatgtgaaaccaaaccctgatcttcctcctttgccacgtgtgggaatcgagttaaatgtggaaaagtctttggatcaagtaacttggtatggaagaggaccatttgagtgttatccagatagaaaagctgcagccctggttgcagtctatgaacataatgttagtgagttgca

SEQ ID NO: 208165 - DNA, 490 bp, Glycine max
aaaggaagaaatatgattttttgtcataaaaaatgtactgtatgaaattccactgtctataaggatagaaatacataatttgcactgaaaaaagggagcaaacgtacatatcattagacagaacagtgaaacacaaggactgcagttaaatataaaaacttccactttgtatttcacgtttcaatggaagtatttccaatatcatcgtcccaaatcaccatccatattttgcttgtgtttcagctttggtaagcatgccctttgcacgccgctcagtgagtttcatttcgttttgtttcatatcaaagtacaatgaaccaatttgatgcttcctcttgtgcagctttgtaggcttcccctttgtcgaagcaggctgataagtgggtccgaatgcaatcccagttagcttggcctgatcctctcttggccggtttttaatcaactctttttgcttcacctcaatcacttcagttggaatctcatgcctccc

SEQ ID NO: 208166 - DNA, 492 bp, Glycine max
ctctcaatcgttttctacataatacaaacctctctaatttttgaagcttattatacccaatctcgatatgcagatcttcgtgaaaaccctaactggcaagacgatcaccttggaggtggagtcctctgacaccatcgacaacgtgaaggccaaaatccaagacaaggagggcattcctccggatcaacagcgtttaatcttcgccggaaaacagctcgaagacggcagaaccctcgccgactacaacatccaaaaggagtccacgctccacctcgtcctccgcctccgcggcggcatgcaaatcttcgtcaaaacccttactggcaaaacaatcacgctagaggtggagtcctccgacacaatcgataacgtgaaagccaagattcaagataaggaagggattcctccggatcaacaacgtttgatcttcgccggaaaacaactcgaagacggcagaaccctcgccgattacaatatccagaaagaatcgac

SEQ ID NO: 208167 - DNA, 439 bp, Glycine max
aacttgaacactctctttttgatattgatattaagagacacattggtagggcatacatacaaacagagagtacatgtttttagttgatcacgtaaaaaattacaaaagaacatacaaataacaaaataggaggaagaggagagaaacacacagagtaagagacgtggaaagttatggatattagacatattataagggcaacgctcaaaaaacttccagcatagagcagtggaatgaattacttaggccttctcccacttgaggggtttgaccacttcccatgtgaagtcagggtcttctcttccaaagtgtccataggcagcagtcttcaaaaacctgttatttccacccctcttgagatcaaggttgatggagatcataccaggcctgaaatcaaagtttttcttcacaatgttgagaatctccttatcatggatct

SEQ ID NO: 208168 - DNA, 294 bp, Glycine max
gacggtgtgaagtagatgtgtgcggaaaatcgaggaatcaaaattagggttcgaaatagcattgaggagaaagaagaagaaggatgtggcacgaggcgaggaggtcggagaagaaggtccaccacatgatggacgcggctcggaagagagcgcaacgacgcgccgcttacctagccaagaggcgcggcgatcctcaacaatctattcagctcgtctggctttcgaagccgaacctatcgcgacgacgctctctaccaagccacgcacgatcagcagggcctgataccttggaat

SEQ ID NO: 208169 - DNA, 462 bp, Glycine max
cacacttctcacattgctgtgaagttttctgaaatcttgaccaagattgacaggcgatctggtaaggagcttgagaaggagcccaaatttttgaagaatggtgatgctggtatggttaagatggttccaaccaagcccatggtggttgaaactttctctgagtatcctccccttggtcgttttgctgtgagggacatgcgtcagaccgtagctgttggagtcatcaagagtgttgagaagaaagaccccaccggagccaaggtcacaaaggctgccgccaagaagaattgattgcattttggcaattttgctagcacatgtgatcatcaacgtggtttcaaaaaaacttgttcctttacagtagtttatctatgcagagtcttaggtgtttgttttaccagttatattttgaagtgtccgccgatttcatgtagccgtagccttcaaaactgggttcttgat

SEQ ID NO: 208170 - DNA, 573 bp, Glycine max
  unsure (1)..(573): unsure at all n locations
tgagggtaaccaatatgagttaagtgacacaaagtacacagaagaaggatacaacaacaagtatcacaactcctatcagaacaactacaacaacgatgctgccaatgacaaatactcctacaacaacaacaacaacaacaaaaattacaatgctcacaataacaggtacaatacttacaacaacaatgctgttagcaggtacaatggtgagaggcaaggaatgagtgacacaaggtttttggagggtggaaagtacttttatgacgttggcgcggagaagtacaatccaacaaactatggtgactcgtctagggaagtgaacactaacaattggtacaacaacagaggtgtcaactacaatggataccagaaccaggaggagtttgaagatgagcataagaactttgagccatgagcttggatcactggcaaagtgaagaattcaccatacttaattttgagtatccactatgggtgtttaatgtttttaaagagctttagattcaagaaaacacaaagttaaaggatatgttaactatgaaaggcttttattntaatttttacttagtagta

SEQ ID NO: 208171 - DNA, 524 bp, Glycine max
taaacaataaaataaaataaaacagaagagaaggaaacagaagtaaaaaaaaaataaaatgggttacacaagatcttctcttctgtccgtggctcttgtcttggcattctgttcaagcattcagggtttggacatcaccaaattgttgggcgaatatcccgaatatgcacagttcaacaaatacctaactgaaaccaagctggcggaccaaatcaacagccgtaacgccgttacagtccttgcccttgacgacgccgcaatggcttccctctccggcaagtcgcaagacgccgttaaggccatccttagcacccatgtgctcgtcaacttctacgacgagaagaagctgatggaagccgaaggtagtcgcaccaaggtcgaaaccctattccaatcctccggtgtcgccaagcccaaccagggttacatctacgtggcgctcatcaacgagggggagattgcgttcggttccgccgacgacgtaccgaatgcacctttcgaggttgtgcttgtgaggtccgtga

SEQ ID NO: 208172 - DNA, 576 bp, Glycine max
cttgatcccacactctatggtgatcaaaccagtaccataacaaaagaacaattggagattaacatgggaggggtcacagtagaagaggcacttagtactcagagattattcatattagattaccaagatgcattcatcccatatttgacgaggataaacagcctacctactgcaaaagcttatgccacaaggacaatcctgttcttgaaagatgatggtactttgaagccacttgctattgaattaagcaaaccacatccagatggagataatttgggtcctgagagtatagtggtgttgcctgcaactgaaggtgttgatagtacaatttggctattggccaaggctcatgttattgtgaatgactctggttatcatcagctcgtgagccattggttaaatactcatgcagtgatggaaccatttgccatagcaaccaataggcatctcagtgtgctccaccctatttataaacttctttatcctcactaccgcgacaccataaatatcaatggacttgctaggcagttcctgattaatgcagatggcattatagagaaatctttttgcccgaaa

SEQ ID NO: 208173 - DNA, 508 bp, Glycine max
aaagaacttatcaaaattttcttcaacatcaccattacaaaaattggtgataaactcaaagaaactaatattttgcatgaggttgaggaggaacccagagccaagatggcacttgacacttgcaagcaactcatggatctttctattggggaattaacaaggtcacttgatggaataaatgagtttaacctcataaatgttgacaaaatcctcatgaatttaaaagtttggcttagtggtgcggttacataccaagatacttgcttggatgggtttgagaacaccactagtgatgctggcaaaaagatgaaggatttgttgacgataggcatgcatatgagcagcaatgcccttgccattgtaacagatttggctgacactgttaacgattggaatatcacaaaatcatttgggcgtcgcctacttcaagattctgagcttccgtcatgggttgatcaacatagacttcttaatgaaaatgcaagtccattaaaacgcaagcctaatg

SEQ ID NO: 208174 - DNA, 588 bp, Glycine max
  unsure (1)..(588): unsure at all n locations
gattgatcgagagaagagaagatgactacacgcttcaagaagaacaggaagaagagaggccacgtgagtgccggccatggccgcatcgggaagcaccggaagcaccctggaggacgcggtaatgccggaggcatgcaccaccaccggatcctctttgacaagtaccaccctgggttcttcggcaaggtcggaatgcgctattttcacaagctccgcaacaaattctactctccgatcctcaacatcgacaagctctggtccctggttccgcaagaagtgaaggacaaggcctccaaggagaacaaggcgccgctgatcgacgtcacgcagttcgggtactttaaggttctcggaaagggtgttttgccgcagaaccagcccgttgttgtcaaagctaagcttatttccaagatcgctgagaagaagatcaaggaggctggcggtgctgttgttctcaccgactgattntatagacggtatcgctttttcaacgatttatggttttttttttgatatggtctgatacgtttcgtttggatgacgttgtgttagtcaatgctacattaggattaaataaggtttattttt

SEQ ID NO: 208175 - DNA, 519 bp, Glycine max
gtgaaacaagctccaaatattctcacaattgccttgaaaagatttcaggtctgagtaatttgatctggatgatcttgccaagttgttgagagatgttttaagtaatataaatatcagttcttatgatttgttctaattttgccttcttgaaatgtgcctcgagtgtaaattgtatgggtgttagtttaccatgactatgcaccatactgtacgattacattatttctttttcctgctagtacttataaaggattgaatactacttgaatgttttttgaatttgtcaacttttctcatgatttttctggggcattgtgaacatgcagagtgggaggtttggaaagcttaacaagagagtaactttccctgagactttagatcttagtccttacatgagtgaagttggagatggatctgatatttataagctatatgctgtcgtagtacatattgatatgctgaatgcttcattttttggtcattacatctgctacatcaaagatttctgtggaaactggt

SEQ ID NO: 208176 - DNA, 290 bp, Glycine max
atagcccaagccctatacaaccaaaccctaacacacacccatttgattcagtttccatggctagcctcaaggttgcatttttggctgcagtgctctgcatggttgtggtgagtgcacccatggcacatgcagctatcacgtgcgggcaggtgacgaatagcctgatcaattgcatcggttacctccagaacggaggaacgccgtcgtcgggatgctgcaacggagtgaagagcctcaatgccgacgccaagaccaccgccgaccgccagacggggtgcaactggcttaag

SEQ ID NO: 208177 - DNA, 545 bp, Glycine max
  unsure (1)..(545): unsure at all n locations
gttcgatgaaaagtaggtgataagcaaacaaagtctctggaaaacgcgattcttcttctgttgagagatgaagctcattgcactgagttctacggttcggcgcgctctgctcaatggtcggaaccaaaactgtaaccgcctaggttcggcggcggagacgaggctactctgcgctggcggcgcgaatggagggttcttctactggaagaggacgatggcttcgccggcggaagcgaagtttccggagaaggagaaggccgaggctgagaagagcgtggtggagtccagttattgggggatttcgaggccgaaggtttcgagagaggacgggacggagtggccttggaactgcttcatgccttgggagacttatcgtcaaacgtgtccatagatcttactaagcatcacgtgccaaagaattttctggataaagttgcttacaggacggtgaagctcctcagaattccaacagatttattttttaagagacgttatggttgccgtgcaatgatgctgganaccgttgcagctgtccctggcatggt

SEQ ID NO: 208178 - DNA, 520 bp, Glycine max
agattaccaaaaattacgaccaaggaaacgcagattctgatgatgaggaaatacaagctctattgaaaaagttaaattttataccaacatcggttttcacaacggacttgccttacgtggattttctggatcgtgtacataaggcatagctgaagcttagatccaagggtttatgggatgtaccttatccgtggctcaacctttttgttccaaaatcaaggataggggacttcgacaagggtgtgttcaagggcattcttggaaataagacaagtggacctatcctcatataccctatgaacaaaaacaagtgggaccagcgaagctcggtggtgacaccagaagaggatgtgttttacctggtggcatttctaagatcggcattggatactgagacgctggagtacctgactaatcagaaccgtcaaattctgaaattctggcatgatatagagatcaatgtaaacaatacctgccccattcactacgcagcaagagtggaggaccactatggtgatag

SEQ ID NO: 208179 - DNA, 377 bp, Glycine max
attcaacactcatatccttatcctgtttctttcaatggaagtcatttctgcttctagcttgaatcccaacgctccgatgttcgtgccactcgcctatcggacggtggaggatttctccgaccagtggtgggacctcgttcactcctccccctggttccgcgactactggctccgcgagtgcttccaagatccccagttccaaaacgacgacgctttcgacttcgactttgacctagatctccaagatgaagatgaaagggaacgaaaggaagggaaggaggtggtgtcgttggggctgctgaaatggcgaagctgtggaggaggatgggcccaggcgccgaggtatgtggaaaaggcccccaagtttgtgaagccca

SEQ ID NO: 208180 - DNA, 458 bp, Glycine max
gcaatatctttatgatgatagtgggaggcgttaccttgatgcatttgcgggaatagttactgtttcttgcggacattgccaccctgaaattttgaatgctatcacggagcagagtaaacttctgcagcatgctacaaccatatatctacaccatacaataggtgactttgctgaggcattggcagcaaaaatgcctggaaaccttaaggttgtttattttgtaaattctggttcagaagcaaatgaattagcaatgatgatggcccgtttatatactggtaatctcggtatgatttctttgagaaatgcatatcatggggggagttctagtacacttggtctgactgctctgaactcgtggaaatacccaattccagagggccatgttcatcatgttatgaatccagatccatatcatggagcctttggtacagatgctgctagttatgcaaatgatg

SEQ ID NO: 208181 - DNA, 467 bp, Glycine max
ttagagaaattgaggaatcaaaattagggttcaaaatctcattgaggagaaagaagaagaaggatgtggcacgaggcgagaaggtcggagaagaaggtccacgacatgatggacgcggctcggaagagagcgcaacgacgcagccgattacctcgccaagagacgcggtgatcctcagcaatccattcagctcgttggctttcctagccgaacctatcgcgacgacgctctctaccaagccttacaggatcagcagggcctgataccctggaatgggaaacaggatgtattgatagaccgattagatgggcgtgctctacttgatttcgttcgtgaatctagtaacaggctcgcttccgaagaagtctgaacactaagaatagttatgaagagttagacaattctgaggcttatcgggaattaataaagcatcgacgtataggatgtcgtaactgatgacgagggtt

SEQ ID NO: 208182 - DNA, 449 bp, Glycine max
ccgttacctaaaactcattctttacctgcaactatttggattgctgatatgtgttaataccatatttactgatattggcgcattcctttgagaaagttactaattcctagatagaggcaaaaatgttgggaattttcaaggagaagttggataaagcacccaaagagctgaacagtccagcttcattgaattcatgcactaatcctaagctaagtcacgaaatccttcacgatttcatgtcctgcgattcctccaatgctttctcaatgtgctttgggaatgaagctttgctagcctattccccttcgaacaagccctgcattcatcacaggttgtttactggtttggataacatatactgagtattcctgggtggactgcacaaccttagcatgctcaacaagcagtaagggctatcaaagggaacaaatgaagccatgtttatcact

SEQ ID NO: 208183 - DNA, 561 bp, Glycine max
gacatggtcctaaagtctggcctgagatgaatataaaatggactaatcttcttctggcttgttttcttcagaatcatgggggttacacagagttacaaattgctgcaaatggaataacttggtttcttcagtggcttctctctacctctcacctgaaatcaacttgtaatcttcatgagcttgcattgaattgatactttgataaagatggatgggaaaaaatctctacaaataactagaagtggtactggtgcttatgatgatgatggacatgccaaaaggactgggaatttgcagagtgctgtagctcatatcattactgctgttattggttctggtgttctctctcttgcatggagcacttctcagttaggatggattggaaggccaattgcattgctttgttgtgcaattgttacctatatttcttcattcctcctgtctgattgctacagaacttctgatcctgtcactgggaaagaaactactcttacatggatgctgatatagtttacttggttataaaatgacatgtgtatctgggtttcttcaatttttgac

SEQ ID NO: 208184 - DNA, 343 bp, Glycine max
cacacacactctcatagctgtagcggcgtcactaagatcggagaatgaatggctatgactgacgtcgttgctgctctttacactgctccttaccggaaccctagctctcatccaggcgaagaaatccgaaggacgatctgaaggatgagacccacaaggtttactttgatgttgacattaatggacaagaagcaggtcgtatcgtaatgggtctttacgggaaggcatgaaccagacactgcagataactttcgcgcactttgcacacgggaaaagggaactggctaatgcaggaaagcctctccattacaaaggtcgctcaacatatgcaaccattcctagc

SEQ ID NO: 208185 - DNA, 414 bp, Glycine max
ccaaaatagatacctctggattataaggaaacagactttcatcacagatggaatgggtaccacaatatctcctcttctggccgaggctcttggcctggcatcccgatcaggcattcacggtttggacatcaccaaatggttgtgcgaatatcccgaatatgcacagttcaccaagtacctaactgacaccaagctcgcagaccaaatcaacagacgaaacgacggtacagtccttgcccatgacgacgccgcaatggctttcctatacggcaagtcgcaagacgccgttaaggccatccttagcacccatgtgcttgtcaacttctacgactataagaagctgatggaagccctaagtagttacaccaaagtcgaaaccctattccaattcttcggtgtcgccaagcccaatca

SEQ ID NO: 208186 - DNA, 500 bp, Glycine max
caaacttctttcactctttcgcttctgaatcttcaacaatggtgctcgaggcgacgatgatctgtatcgacaattctgaatggatgcgtaacggagattactctccttctcgatttcaagctcaagcagacgctgtcaatctcatatgcggtgctaaaacgcagtctaatccggaaaatacagtgggagttctcacaatggctgggaaaggcgttcgtgttttggttacccctacccgtgatctggggcagaatctttacctggcatgcctggactaaatttaggtggtgaggatgaacctacctgcttgccattcaggtggcccaatgggttctaaagcatcggcaaattaaaaggcaccagcggaggataatggccttggctggaagtcctgtcaagcttgaaaggaaaatgctggagatgataggaagaaagttgaaaaggaatattgttgaactggatatggttaattttggtgaagaagatgaggggaagacaga

SEQ ID NO: 208187 - DNA, 547 bp, Glycine max
cttggcagattattagaagagaagaaaagattaaaatgttggaatatcgagagaacaggttgcaaatggaaccattaaaattcagtagtgcttattcatcaaatgaggaattagattctctggaatttaggaaggtggtgtgcaaaggatattttgatgataaaaaatcaatctatgtgggaccacgttcaagaagtatttcaggaatcactgaaaatggttactatatcataacacctcttatgccagttcccaattgtcctgacagtgtgagttttccaattttagtcaacagagggtgggttccacgtagttggaaagacaaatttttagaggcttcagaagatgaagatttggaagatgctcttacttccccttctcacgatgatggaactaaatcttggtggagattttggtctagaaagcctgttattgaagatcaagttgcatctgctacacctatagaagttgttggcgtagttcgtgaaagtgagaagccaagcatatttgtttctgcaaatgatcccaaggctatcagtggttctat

SEQ ID NO: 208188 - DNA, 602 bp, Glycine max
  unsure (1)..(602): unsure at all n locations
gaaattgagcagtgcagagactcctgaacgtcaacggctatggcagcttcttcctttacaacatcttccattctcttcccattcacaactagttctaaatcccctccttctcaactattcccctcttttccttgcaaacatcataccctccgtctcagacccgtctcagtctcagccgcttcaaccccaaccccctccatccaagccgacaaatccccggtctccgccactccctccaagcttctcccctttcggattggtcacggctttgacctccaccgattggaacccggttatcccctaatcatcggtggaatcaacattccccacgatagaggttgcgaggctcattccgatggtgacgttctgcttcactgcgttgttgatgcgattctaggggcgctaggtcttcctgatattggccagattttccccgattctgatcctaagtggaagggttgtgcctcttccgtcttcatccatgaatctgtgagacttatgcatgaggctggttatgagaatgggaattagatgctacatngatacttcagagggctcaaactagcccacacaatgatgctatcaatgccaacttatctgca

SEQ ID NO: 208189 - DNA, 537 bp, Glycine max
agaaggtggagtgatggccttcaccaagcagttgaggcaaaggaagggttgccaattcaaaatgaaactgtaacgctggcttctatcagttaccagaatttctttcttcagttccccaaactttgtggtatgactggcactgcagcaacagaaagtacagaatttgagagcatttacaagcttaaagttacaattgtgccaacaaacaaacctatgataagaaaggatgaatctgatgtagtttttagggcaacttcagggaaatggcgtgcagttgtagtagaaatctctaggatgcacaaaaccggtcgcccggtgcttgttggcaccactagtgttgagcagagtgattctttgtcagagcaattgaaagaagctggaattccgcacgaggtacttaatgcaaaaccagataatgttgatagggaagcagatattgtagcacagagtggtcgtcttggtgcagtgacaattgctaccaatatggctggtcgtgggacagatataatccttggtggtaatgcagaatttatggca

SEQ ID NO: 208190 - DNA, 480 bp, Glycine max
tagctatctatttatctatagcaagtgcgtcaagagacacgtggtaccctagctagagtgccattctgtggtttctttctttctttctttctgcatcacatcacaatttgcattgcctcgtgtcctttttcttctttgctctccaaaaatctcacacacacaggtatctagcaaatgggttctcaccaacaagaaccatggctattggagaatgggaaaccaagggttttgaccaaggagaccaggcatggccgttctgcacacagaatgtcctccacctttttgcgcaagaaatctagccgaactcttgtctcaaaggttccatgtgccactctcagaaactttctttcaaatttgcaagaggttattcttggcaccaagctttccattctcaatcctgctaattcagctgccatcgttgctgaatgctttggctttggaagaccttggatttttatattaagcttacttggacttaca

SEQ ID NO: 208191 - DNA, 544 bp, Glycine max
  unsure (1)..(544): unsure at all n locations
ctcctctcctacggcgtcagagtcggcattggcatactcctcctcgccttcaagcttgttggaggacaatcctactcctctctcctcgatctcaagctaatatgattcggtggaatggttgaagcttttgtaggtttcagttgttgtcaggtacagaacctaatgagttcacttttgctaccgtgcttacttcatgtataggttcttcgggttttgtcttagggaggcaaatccactctcatatcataaaattaaattacgaagcacatgtttatgttggaagctcactccttgatatgtatgccaaagatggtaaaattcatgaagctcgaggcatatttcaatgcttgcctgaaagagatgtagtttcttgtactgccattatctctggatatgctcaactgggtctggatgaagaggcattggagctatttcgccggttgcaaagagaaggaatgcaatcaaattatgttacttatactagtgttttaactgcactttctgggcttgctgctctagatcatggcangcaagtgcacaacca

SEQ ID NO: 208192 - DNA, 555 bp, Glycine max
gaaaaggaacacacattctcattctctcacactttctttctccaatcccaattccaaaccctaaccaatttccatggcttcctcggagatcgaggtggattcatcatcatcggtctccaaacccaacaacgaccagccttcaatcctcgacatctacaccgcctctgctcacggcgactttaacaaattgagaaccttcgtcgaacaagacggcgcctccgtctctcttcccgattctaacggctattacgctcttcaatgggcctcgcttaacaactttcacgacattgcgcactatctcattcagcatggggcggatgtcaatgctaaagacaacatgcaacaaacggcattgcactgggcggcggttcgtggttcaactctagctgctgatgtgctcgtggagaacggtgctcgggttgaagctgcatacgtaaatggataccgggcagttcatgttgctgcacaatatggacaggcagcttttcttaaatcatattggtattaagtaccatgctgattatcatgtgcctgattatgatggatggagtcctc

SEQ ID NO: 208193 - DNA, 459 bp, Glycine max
tttgctttctctcctttgcactttcctcctcttccttgtgatttttgtttgcatcggggggagaaactgagacacagaggatgagagagataattagtattcatataggacaagctggaaatcaggtggggaatttatgctgggagttgcattgccttgagcatggaattaaccctgaaggcaccatgcctagtgataccttaaatggtgtagcacatgatgctattaacactcatcttcagcgagaccggatccggtaagcatgtgccaagggctttatttgttgatctggaacctagtgctatctgatgaaatcacgaactggtcccttacagacaatctgttaaaccctgagcaaataattgttggccaggaagatgctgctaataacttctcatggggacactacactgatggaatagaaatagaagaactatgccatgatcgaatcagaaaatt

SEQ ID NO: 208194 - DNA, 491 bp, Glycine max
tggataacctttatgggctggtgctagagcccagagttgaaaagcaaagaacagacagcacttactagtccaacagcgacggctgaacctctttgttctctctgtctaagaagaagaagaagaagaagaagaagaagaagaatcaaatatccttgagccagacatgtacaggaacgctgcttcacgtcttagggtcatcagtgcccgttcgtgcagcagcagcaggatacctgccagtgccagatttgcaagttccgttgccacacaacaatcctcttctggtttgggtggtttatttggatggctcactggagaccgatccagttctttaccatctctggatttcccgcttccgggcgttacacttcccccttcattgcctgattttgttgcgcccggaaaaactattattactacactcccaaatggactcaaagtggcctctgaaacattaccgactcccactgcgtcggatggcttatatgtagatt

SEQ ID NO: 208195 - DNA, 531 bp, Glycine max
gttttaactctaagccatggctcttcccctgttcctcctctgcttcatgctctgcatttcactcacacaccaaacgattatgttacccctaacacactcaatttcgaaaacccatttcaacagtacccaccagcttctcaaatctacctccactcgctcagcctcacgcttccaccgccaaactcatcataactccgtagtctctctcccactttcttcaggaagcgactacaccctttccttcaacttaggctcacacccttctcaatccataaccctttacatggacacaggcagcgacctcgtgtggttcccatgcgctcccttcgaatgcattctctgcgaaggcaaattcaacgccacgaagcctcttaacatcacgcgctcccaccgcgtctcgtgccagtcccctgcatgttccacagcacactcctgcgtctccttccacgacctctgcgcaatcgcacgttgtcctttggacaacattgaaacctccgattgctcttctggcacgtgtcctccctttactat

SEQ ID NO: 208196 - DNA, 590 bp, Glycine max
cttgcttctttcaacaacttatcattgtattgtcttcaaactttgcttcttccatactttcttctttttccttagccatcattgattgttgcctttcttggctttaaaatggagttcgaggaccgcttcagacaccaggctcagagaccaaaatatgactgccttctttttgatttagatgacactttgtatcccctcaaatctggtcttgcaaaatcatgtctccaaaatattaaagactacatggttgagaagcttggcatacaccctagcaaaattgatgacttgtccaacctcctttacaagaattatggaacaactatggctggtctaagggcaattggatatgactttgactatgatgaatatcacagttttgttcatggaagattaccttatgagaacctaaaaccagaccaagttctgaggaacctgttgctgagcctaccctatagaaaacttatcttcacaaacgcagacaaagttcacgctgcgaaggcgcttaacaggcttggattagaagactgctttgaaggaatcatatgctttgagacccttaatcccatcacaagagcattgttttgatgatg

SEQ ID NO: 208197 - DNA, 472 bp, Glycine max
aaccaacaaagtaaactcatttggaaatgaacattgttcaagaacaattagatcaaagctcaatgcaacaccaaggatgccacaaaaccctcttattttgaaacctatcctatattaagcctctacaggagcaagagctcgcagctctgatgggagcttaatccactgttggctgaaacccaaccataataataatataaagcacaaacttcaaaggaacgaatgatttttgctcaagcatcatcaagagcaaggacaccagggagttgctttccctcaagaagctctaagctggcaccaccaccagtggagatgtggctcatcttgtctgcaagtccaaccttttccacagcggcaacggagtcacctcctccaatgatggttgtcactcccttcccactcagctctgccagtttcttggctatagcctctgttcctgtggcaaacttatcaaactcaaaaacacccattg

SEQ ID NO: 208198 - DNA, 512 bp, Glycine max
gcacatgctggtctccggtccggttagggcatttctgggaccttaaatcaccaatttctcacccaatcaattccaattaagctgagagtgtttctgatctatatgtgatgggtgctccgaagcagaaatggactgcagaagaggaacaagcacttaaagccggagttgtcaagcatggtgttggtaaatggcgcaccatactgaaggatccagagtttagtagtgtcttgtacctgcggtcaaatgtggatctcaaggataaatggagaaatctgagtgtgatggcaaatggatggagctctagggaaaaatctaggttatcagtcagaagggtgcatcaggtcccgagacaggatgagaactctatggctatcactgctgttgctccaagtgatgaagaaattgttgatgttaagcctcttcaagtttctagagatatggtgcatattcctggtccaaagaggtctaatttaagtttggataaacttataatggaagcgatcacttgcttg

SEQ ID NO: 208199 - DNA, 473 bp, Glycine max
ggtttctgaggaaaccaccactggtgttaagaggctatatcagatgcaggcgaatgggactctactcttccctgctattaatgtcaatgactctgttaccaagagcaagtttgacaacttgtacgggtgccgtcactctctccctgatggtctgatgagggctactgatgtgatgattgctggaaaggtggctgttgtggctggatatggtgatgttggcaagggttgtgctgctgcattgaagcaggctggtgctcgtgtcatcgtgactgagattgaccccatttgtgcccttcaggctctcatggaaggccttcaggttctgaccttggaggatgtagtttctgaagctgatatctttgtcaccaccacgggttacaagggcatcatcatgatttgaccacatgaagaagatgaataaccatggccttgtttgaacattggtcacttagacaatgagatcgacatgctgg

SEQ ID NO: 208200 - DNA, 423 bp, Glycine max
ggacagaaacacataatttagtatttaataaagcaaaagcaaaatgcacacacattccccaaacaaaacatgcttattcaacccaaattggtttcatatcacagaaaccaacaggatgtcttcctccttacccgtcccacccactcgaacagaaattctacggaaattaaaaataaaaaaagctaaacttcttttacctcaaatctgaaaagtctaacaacaaaaattcaaaaataggaaaattaaacaatcaatccgcttcattaaacccaaggagtctttccctcatttttcgttgataatcccaatttcttaggacctgtaatgagcaagcttgtatggacccttaacaggcacactgatgtaatcagcctgggccggtcttagcttggtgagcttaacttcaagtttgccaaggtgaaa

SEQ ID NO: 208201 - DNA, 480 bp, Glycine max
  unsure (1)..(480): unsure at all n locations
ggtttctgaggaaaccaccactggtgttaagaggctatatcagatgcaggcgaatgggactctactcttccctgctattaatgtcaatgactctgttaccaagagcaagtttgacaacttgtacgggtgccgtcactctctccctgatggtctgatgagggctactgatgtgatgattgctggaaaggtggctgttgtggctggatatggtgatgttggcaagggttgtgctgctgcattgaagcaggctggtgctcgtgtcatcgtgactgagattgaccccatttgtgcccttcaggctctcatggaaggccttcaggttctgaccttggaggatgttgtttctgaggctgatatctttgtcaccaccacgggtaacaaggacatcatcatgattgaccacatgaagaaaatgaagaacaatgccatntgttgcaacattggtcactttgcaatgagatcgacatgctggggctggag

SEQ ID NO: 208202 - DNA, 467 bp, Glycine max
ggacagaaacacataatttagtatttaataaagcaaaagcaaaatgcacacacattccccaaacaaaacatgcttattcaacccaaattggtttcatatcacagaaaccaacaggatgtcttcctccttacccgtcccacccactcgaacagaaattctacggaaattaaaaataaaaaaagctaaacttcttctacctcaaatctgaaacgtctaactaccaaaattcaaaaaaaggaaaattaaacaatcaatccgattcataaaaccgattttggctttccctcactttccgttgataatctcaattacttagtacctgtaatgagcaggcttgtatggaccctcaacaggcacactgatgtaatcagcctgggccgggctaagcttggtgagcttagctccaagtttgccaaggtgaagtgcagccaccttctcatcaaggtgcttgggcaaaacgtaaactt

SEQ ID NO: 208203 - DNA, 341 bp, Glycine max
gaggccctagatattattgaagctgccggaggctcctttcacttagtcaactgccatgtgggtcaaaacattcaaggcgcatcattctctgaacttgacactggcgcagatcacagggctgaggtggatcgaatcattgatgctttaactgctattgctcatacaactgaacatgatggatgatcagatctagattctagtcaaatttcacttacacttggtaaagttgaagagaatggcatatagaatgaatctgaccccagaaagaaggctgcggatctaattcttggagctggtctggactgacaaccagctgctgagatgtgatctatcattcggaa

SEQ ID NO: 208204 - DNA, 491 bp, Glycine max
tcttaagccattggattcttctagaaagaggaaaagtaggagcagagggtatgggactagatccgtggctgagactattgcaaagtggaaggaatacaacgaacacctttattctggcaaagatgatagtagaacaactccaaaggcaccggctaaaggttcgaagaaagggtgcatgaaagggaagggaggacctcaaaactctcagtgtaactacagaggagttaggcagaggacatgggggaaatgggttggtgagattagggagcccaatagaggaagcaggctttggttgggtaccttctcttctgcccaggaagctgctcttgcctatgatgaagctgctagagctatgtatggtccttgtgcacgcctcaattttcccggcatcacagattatgcttcttttaaggaaatcgtgaaggaatctcccatggccgcatcgtcctcttgttcttcggcagaaactggcacatctgacactactacta

SEQ ID NO: 208205 - DNA, 363 bp, Glycine max
ggctgggagactgataatgttgaagaaatagctttaaagatttctcaattgccaaaagcatcagaaaaacataaaaggattactgttatcacccaaggtgcagatcctgtttgtgtcgctgaggatggaaaagtaaaatagtatcacaggatacaatttttttttgatttgtggaattactcttgttcctacctggttcagcacagcctgctcaatctcctcctcttgttttttctctttttgtttttttataataaaaagattcagtttttttgtgttgtcgctgatacctatttgcatcttgtgttctgggtcaatgctgtcatgttctctgcaaattatggcttcaatccgtgctctggg

SEQ ID NO: 208206 - DNA, 429 bp, Glycine max
  unsure (1)..(429): unsure at all n locations
cagccttgaagctcattggaggtactctggctgaccacacattcttgtttcttggtgctggagaggcaggaactggaatagcagaactaatagctcttgagatgtcaaagcagacaaagacacctatagaggagactcgcaagaagatatggcttgtagactcaaagggtttgattgttggttcaagaaaggcttcacttcaacacttcaagcagccttgggctcatgagcatgagcctgtaggcagtctcttagaagctgttaaggtaatcaagcctacagttntgattgggtcatcaggagtgggaaaaacatttacaaaggaagtaattgaggctgtgacttctataaatgaaaaacctcttgttctggctctctccaatccaacttcacagtctgagtgtacagctgaagaggcttatcaatgga

SEQ ID NO: 208207 - DNA, 443 bp, Glycine max
ttttttttttttttttttttttttttttttttttttttttttttctttttttttttttgtttttgggggaagaaaaccaaaatttcataatacaaagcattatatggtttattacgaccaaagctaaccgggttttgccccataacaaaaaggttactttacccgcaattttggggatttcactgaaaattgcctaaaacccctcactttggcctaagtttcctaaaacaacttacacgtgcccccaaaacatgggtttattcccgcccaaggcaagggacttgccccataattcacctatagtttctgggcacgggggaatccctgcagctctaaacctacttgacaagattctggggccctgggaacccaatggcccagcctacgctctatgccttggcagctacacttgcggggatgtcagctgcaaattgcttggggtt

SEQ ID NO: 208208 - DNA, 517 bp, Glycine max
gacccaaaataataagatattttcattatttagcaaactcctacatgcaagacgataagaattacagtgtttccaacagatactattttcttttacataaaaagcatctaaacactgatatacatatattaaaataaaataaaaacatctaagctttctttggagacttggtagccttggatggagattttggttccttagcaacctgagtcttcttaggtagcaaaacagggttaatgtttggaagaacaccaccatgagcaatggtgacaccagcaagcaatttccccaactcctcatcgttccttacagccaacagcacatgtctcggaataatcctgttcttcttgttgtcacgtgcagcattcccagccaactcaagcacctcagcagctaggtactcgagaactgcggccaagtaaacgggagcaccggtaccgacacgctgggcgtaccttcctttcttcaaataacggccaattcttccgacggggaattggagaccggccttgacgga

SEQ ID NO: 208209 - DNA, 505 bp, Glycine max
caaccactcttaatttctctctgccttgctcatttacacacctctccaacctttcactttcagctttatttgaatccctctctctcctttccaaatggccagcgttgaggttgcacatcaaacaccaacaacagttccagaaaatgaaacaaccgaggtaatcaagacccaggaaacaaccccggaaccagtaccagccactgaggctcctgcaacagaacaagcagcagctgaggttcctgctcaagaagaacaacaagcaactgaggttcctgccccagaatcaaccaccgaagcaccaaaggaagaaaccaccgaagcaccaacaacagaaacagtagaaacaacaactacagaagaagccaagccagaggagcctaaagaagttgcagttgagaccgaggaggtggtgacaaaggagacagaggaagagaagccagcagcagaagagaaatcagaggagaaaactgaagagtgaaagaagaagcagagagcctaaagaaac

SEQ ID NO: 208210 - DNA, 530 bp, Glycine max
cgtaggttttggtaatcattacccaaaacacgtccaccatagaggagcatctgtaccgaagaacaagatcaagtatagctgtaaaggtggatggaaatggagggacacttctaagccaaacccaaatacaattgttggtgccatggttgccggtcctgacaagcatgatggcttccatgatgttcgtacaaactacaattacacagagccaacacttgctggaaatgccggtttagttgctgcactagtggcattgtcaggcgacaaaggcacatctattgacaaaaataccattttctctgctgttcccccaatgtttcctacaccgccaccaccttcagcgccatggaaaccataagctcatcgtgccattggttatttctttctagcaagtaccccagatgatatgagtgcaccgttaaccttcgttgtttgtatcaacttgaagatagggtaattttgagaaaaaaaagctggagaagtggagcttggcactgaatatagctggctggggcaatgatcgactcaga

SEQ ID NO: 208211 - DNA, 461 bp, Glycine max
gcagaaagcaagctcatcctagagttttaaaaatggcagcagcctcctccatggctctctcttccccatccttggctggcaaggccgtgaagctgggcccatcagcccccgaagtcgggagggtcagcatgaggaagaccgtcaccaagcaggcctcctccggaagcccatggtacggcccagaccgcgtcaagtacttgggcccattctctggcgagcccccgtcctacctcactggcgagttcccaggtgactacggctgggacactgctgggctttcggccgacccagaaaccttcgccagaaaccgtgagctcgaagtgatccactccaggtgggccatgctcggggccttgggctgcgtcttccccgaactgttgtcccgcaacggggtcatgtttggagaagctgtgtggttcaaggcccggtcccagatcttcagcgagggtgggctggactac

SEQ ID NO: 208212 - DNA, 509 bp, Glycine max
gtaaaaagcaagtaacattaagttggattgggatacacaagataattcacattatctgaagtacattgcaataacatatacttcaccaaacacaaatctaaaaactctcaaaagtccacaagtcatccttttctttcatgctcacttgccggggacgaagttggtggcgtaggcccaggcattgttgttgactgggtccgcaaggtgatcagcaaggttctccaatggacccttaccggtgacaatggcctgaacaaagaacccaaacatagagaacatggccaatctcccgttcttgagttccttcaccttaagctcagcaaaagcctctgggtcatcagcaaggcccaatgggtcaaagctgtcaccagggtagattgggtcagtgacctcaccgaggggcccaccagcaatacgataaccctcaacagcacccattaggataacttgggtggcccagatggcgaggatgctctgggcgtggacaatgcttgggttgccccagtagt

SEQ ID NO: 208213 - DNA, 483 bp, Glycine max
ggctaaccaaccctgacactccttcttctccgcttcctcttcgatcatcgcttcagaatgccgccgaagttcgacccctcccagatcgtcgacgtcttcgtacgcgtcaccggcggtgaggtcggcgcggcgagttccctcgccccgaagatcggtcccctcggtctctcccccaagaagatcggagaagatatcgccaaggaaaccgccaaggactggaagggcctccgcgtcaccgtcaagctcaccgtgcagaaccgtcaggccaaggtcacggtggtcccatccgccgccgcgctcgtcatcaaggccctcaaggagcccgagcgtgaccgcaagaaaacgaagaacatcaagcacaacggctacatctcgctagacgacgtcatcgagatcgctagggttatgaggccgaggtcaatggcgaaggacctcagcggcagcattaaggagattctcgggacgtgcgtctccgtcggatgc

SEQ ID NO: 208214 - DNA, 436 bp, Glycine max
ggggccaaaaaaaaaactaatcagcccataaaaaaaatatcttttgaaacccttatttaaattatccaaagggggaaaaaaaccttaaacaaaacgttcgatagttcccccaaatttattttaaaaagaacccgaaacgatctgaaaaaagaccaaagaaaaagagagaaagagagtaacaaagccttcctccttaatcgagaggggccttaacattcccatggggaatctcctggtgaaagtccttgggaacctttccattaacggggcatccgacggaaacccccgtcccgagaatttccttaaggctgcccctgagggccttcgccattgacctcgggcttaaaaccctagggatctcgatgacgtcgtctagcgaaaagttgcccgtgggcttgaaggtcttcggtttcttgggggcaccctcgggctcctt

SEQ ID NO: 208215 - DNA, 381 bp, Glycine max
ctcttgaccttgtgatatctctctcttttaatttctaggatcaaaccaaaaaatggtcttagaagagagtgtagtgcatgatgtgaggctatcctcagttgggccgggccgggccaccgggtcggacgtattccacaacccgggtggcttggacttggccatgaagcttcactaccttagagtggtgtacttctttgatagtgaggctgcacaagacctaaccatcatgaaaattaaggatggcatgttcactttgttcaaccattacttcatcacctgtggccggttccggcgatcggattccggtcgacccttaatcaagtgcaatgattgtggagcaaggttcattgaggccaagtgcaacaaaaccctagatgagtg

SEQ ID NO: 208216 - DNA, 489 bp, Glycine max
ctcttgaccttgtgatatctctctcttttaatttctaggatcaaaccaaaaaatggtcttagaagagagtgtagtgcatgatgtgaggctatcctcagttgggccgggccgggccaccgggtcggacgtattccacaacccgggtggcttggacttggccatgaagcttcactaccttagagtggtgtacttctttgatagtgaggctgcacaagacctaaccatcatgaaaattaaggatggcatgttcactttgttcaaccattacttcatcacctgtggccggttccggcgatcggattccggtcgacccttaatcaagtgcaatgattgtggagcaaggttcattgaggccaagtgcaacaaaaccctagatgagtggctagccatgaaggattggcccttgacaagttgctcgtctttcaccaaggcattggcccagaactatctttttctcttcctgtttgttccaggtgactaaatttaagt

SEQ ID NO: 208217 - DNA, 379 bp, Glycine max
ttcgtttttttttttttccaataaaccatactttttgcattaaccatcaaagtatcattacatcatcttaattttataaaattattgttgaacctatcattgataggcatgtattatttagtatataatgagttgcgtacaaagcctagatctcaggaataaaatgaacctgcattgtatttttcaagatggaactgtactaagatgattggagtatattcacatcacctccgtatggtaccttccattcaaaattcaaaaccaaattagctccacagtactccaaattaagctaagccaacttatagccagggcaaatccttcttccaataccatagggcataatcttaatcactttactttcaggtatattaaaccc

SEQ ID NO: 208218 - DNA, 550 bp, Glycine max
gattggaaggccttaaacatacctccaccactcactgactcattcttaattcctagagttgcccatatagaactctttgcagcctcacttggatcatcaattctcaacgttttgggaaccaaaacacccccgtttcttggctttgaagcttcttctttaggcaaagagtattgcttaatcatgtcaccgtcgcgcgagtgcttccccaaagttggagaatttggactggagcttcgagactcgaggtttgaagcagatgaatgtgaggaaaacaatggaacattccaattccctggcatgccacagttccaaaatgtagcaggatagaatggtaggggaaatcctgaaggacacatagcaggtggaggaactggagaattccatgtatagggccaagaaacaccaggaatacatggaagttgaggaaggaaaccatgattttggggcactgattgttgttggaaggtgtttttggtattttctcccttggaacttgaaactgtgatggaggatgtagttgaagagtcattaccattttccccacttttgc

SEQ ID NO: 208219 - DNA, 500 bp, Glycine max
  unsure (1)..(500): unsure at all n locations
tccaactttgattctaatgctacgttctgaagatgctggtgttcattatgaagcggtcggtgtgattggtaatttagtccactcttcccctaatataaagaaagaagttcttctcgctggagctttacaaccggttattggattacttagttcctgctgctctgaaagccagagagaagcagcattgttacttggacaatttgcagcaactgattcagactgcaaggttcacattgtacagagaggtgctgtccaacctttgatagagatgcttcagtctcctgatgtacagctcagggaaatgtctgcttttgcattggggagattggcccaggacccacataaccaggctggtattgcacacaatggtggcttagtgccgctgctcaagcttcttgactcanaaaatggctctttgcaacataatgctgcttttgctctatatggcctngcagataatgaggataatgcgtctgatttcataagggtaggtggagttc

SEQ ID NO: 208220 - DNA, 469 bp, Glycine max
  unsure (1)..(469): unsure at all n locations
gagaatggctcccaagggtttaacctttctggctgtgttaatatgcgtttcagcactgtcactgagtccttctgttgcgggggaagggcaaaataatggccttgttatgaacttctacaaggaatcatgccctcaggctgaagacatcatcacagaacaagtcaagcttctctacaagcgccacaagaacactgctttctcctggctcaggaacatcttccatgactgtgctgttcagagttgtgatgcttcactgttgctggactccacaagaaggagcttgtctgagaaggaaacagatagaagctntgggttgagaaatttcaggtacattgagaccatcaaagaagctttggaaagagaatgccctggagttgtttcatgtgctgatatcctcgttctctctgccagagatggcaattgttcgctaggaggtccccatatccctcttaagactggaagaagggat

SEQ ID NO: 208221 - DNA, 489 bp, Glycine max
acatatataatatccttattgaaattaaaaaaaaaacaacagtaacatcggaagattaaaaaacatagcctcttaatcctcccatccccatgaacctgcagtggtctcggttcattgaaccagcccatttaaaggaaaagaccttaattattttttgcataatatattacagattttcttcctcgatcatagacaaggggaggaaaattcaagggtcctgatcatggtgcttgttggcaacattgcactgctttctgacctcaccctttgtgccagtgagagggttgttctctgagagcaaggtaatggctctagagaactccttgaagaaatagtcttggctcttggccattttcttcacataaggcttggtcctcttgtcattggctagttggtgatccactatcaagagacccttgctgtctaacatgtccctgaagaatatgttgtctagaatcatgggagtgccacggtccgttttcacgtact

SEQ ID NO: 208222 - DNA, 471 bp, Glycine max
tttgacaacaaatgaataatttttatgaaaaatcaacaacagtttaagaaaaaagtagtacaatttttttaaatgtaaaattgtaggattcatgcacccacaaacaagaaacaagaacaaattgcttatatttctaaacgagttgaccacaatccggtcaacaaactggatgccccaaggccctacgttattattcttcttctctactattccatataaaaaaagatcaccacacaaagaactccacgttctgatggcatatatatatatagtctataggcccttcatagtggcccaacatcagtgatatggctctggctttggcagacccttcactacgccacaaagcaacgcgtactccgggatgttgtactcgtccctcagagaacgctcaggagttagaacactgatgtacaaattgtgtcccagtagcgattctcagcaagctcggacctcaagttcacacccaac

SEQ ID NO: 208223 - DNA, 523 bp, Glycine max
cacactgtaagtaaataaaatcgaaatttagacaagacatcatgggtggggtaacatcgttactaatgttgctatgtctcttcgcaggggctatgtcccctgtgaagggtgaagacccttacttttttttcacatggaatgtcacctatggcaccctttatccagccggtgtgccccaacaggttattctaatcaacaatgaattctctgtacccaccatctatgacgccatactcatgaatatctgctatattgaattgctgatccttgccaagcccttgcttttccattgggccgctgtccagcacaggatgaatagttggaaagatggtgtcgtcggcgccaattgccctatccaaccaggcacagactacacgtaccacttccaggtgaaggaccaaatcggtagcttcttctactaccctagcctagggttgcagcgtgctgccggaggcttcggcggcctccgcatcaacagccgcctcctcatcccagtcccttatgctgatcccgaggatgacta

SEQ ID NO: 208224 - DNA, 486 bp, Glycine max
ggagaagtgaatgctgagcttcttgacacccaagtgaatcctgctgtgtgggaaattagtggacacatggttttaaagaggaggaaggattatgatgaggcgtctgaaggcaatgcttggaggcttcttgctgaggtgtccctttctcaagagaggtttcaagaagtcaatgatcttgtttttgaagccattggctgtggtgaattggaggatgtcaatgttcaaagtgtcaaaaaagaagttgatgcagtcagcacaagcgaacaccctactgtggtggtggtggctggttcacaagaatgtgtggttctacagtaacaaggctcttgtattttgaacaaattcagaaaatctgcagtgttttaagaataattgctgaaatgtgtcaccgtttaagtcatactattgccttgtgcttgagccttatggtcgtgtgtgttgaatgtatatgcttttatctgcctttatgacactttcatgtgaaag

SEQ ID NO: 208225 - DNA, 512 bp, Glycine max
ctgttacaagaatataaagggcacactaataaggttagtctgcagatgcctgaaactgattttagcacttcctactttttaatgttctgcatatagccttgtttaaagatacaggaccaggtgcaagttcccaaagaatttgggatacaagttgagattcactgtcacttatatatcttcatttctggactattatttagcggttcctgcaattgttcattcttaaagcattttcttgtgtgatttaacttttaagtaactttacatgttacaaactttttaaatattcgtcgtcttcttctttttttttttaatatttgaccatttctatccctcagtcttacaaattggattgctgccttaccaatacggatgctcatgtaactggtggctctgaggatggcttcatctatttttgggatcttgtagatgcatctgttgtttcaagattcagggcttatacctcaatggtaacaagtgttaggtatcatccaaaggaaaactgcatggta

SEQ ID NO: 208226 - DNA, 479 bp, Glycine max
ggttaaagtggcttgaaaggtttgcttatgtgaacaccaccatctatccagtcactgccattccccttctcatttattgtatcttgcctgctgtctgtctgctgactaataagttcattattccacagatcagcaaccttgctagcatatggttcatctccctctttctgtccatctttgctactggaatcctggagatgaggtggagtggtgtcggaatcgacgagtggtggaggaatgaacagttttgggtcatcggtggtgtctcggcacatctctttgctgttttccaaggcttgctcaaagtgcttgctggaattgacaccaacttcactgtcacctccaaggcctcggatgaagacggagactttgccgaactatacatgttcaaatggaccacccttcttattcctccaacaacccttctcataataaacttggtgggggtggttgctggcatctcctatgccatcaacagt

SEQ ID NO: 208227 - DNA, 545 bp, Glycine max
atcacaggaaacactcactgagatgtatacatacaaaatgtgaacctgggaatagcttataatacatagctactccagaaaactggaaggcacgttagtattacaaataaaacaataccacaaagttcggttctagtttgttctcttatgcatcttctataaacaactgcacataacttaaacataacggctacaaaacaacaattataattacaacccaaaacacaatacactacacttgtcttttggtcttctagcagttaatgccacactcctcaacatcaggaccagtgacccttgtggtgaatggatcaattctaacccacaagagtgagaaaatggatgcaagcagaacggaccacaccaccacaatggttggtgttctgttttggcgccccatgagacctttgaagaaagggtatagatggatgatcacccaaaatgcaaagaaaagcttaccaaagaggggtccccaagattggtagccactgatgatggcatacgagatgccagcatccacccccaccaagtttattatgagaagg

SEQ ID NO: 208228 - DNA, 415 bp, Glycine max
aaattgcctgtttcatagatgagacccacacggctttattgttctgtacataatcatgtgccttgtactatacatgaatattataaggcaaagaacctttacaacatggtgccaaacacgaacctagtttcatcccatactcgaatgtcatgcgcttcgatatcgcctggcactctgttgacattcaccatcagagactaacctatttcgctacaaagagctaccataaattcaaggtccccaaggttccctgatgcgttcatcacgtggaacacattcaatgcttgctaccctgttgcagaaacacctggcctacaaactgacaacccaatctctcataaaatgcttgtaacttctgacagcaaacccactgtatccttggcacacagctcaaggctcacaccctcgctgactc

SEQ ID NO: 208229 - DNA, 471 bp, Glycine max
catcattgtcccaactctctcttataagttctaatacacatttaatttcctaaggtgcttcctttccctctaaggtttaattattcgttttggacctaccaacaaacaaacagtgaagcctttgtttttattaccttacttacacctctctatggtctagaccaaataaaaataaatgtctggaagtgcagatctgcagctacaagtgtgcttaagctgacactctccgagtggagaacattcacaagtgagtgaggctaatggatcttgaatccagcaagtgttgggacacatcaaaggactcttggaagacaattctgctcttgtgctaccaaagccttggtgtggaatatggggacttgagcattttttcattgtatgtttacaccagcacatttgttgaagatattgaacattctaagaccaagaagagattttggggccctttctttgttttttgactctgacact

SEQ ID NO: 208230 - DNA, 387 bp, Glycine max
gtttttgacatcatgagacatttgtggactattattaatgacaccgtgttcttaacaggaggcctatgcttacacagggatataatagtgacttggctacacactcaaaggcatctactgcaatgaaagagcacgtacacaaactggcagttattggagcaatggtcacacactggcacacttatccaggtgtgagtaaccgtcatactccagtaaagctaacatacacatctctccgtcattctgttgatgacatcatgacggaggatgcaagtctgaaccatctatacattgtcggagtatccaacgacagctcatgcagtatagtcatgaatattctaggctgtactaaccattggcacttccagcatatatcccatcatgccc

SEQ ID NO: 208231 - DNA, 369 bp, Glycine max
gattggagtacgaatgacccgatataagggtaataccctacattacattcttatactgcacatggaaagagatcatctttgggaacttacaaagggggaactgagataaatgaggaaggcaataacacatatgtgcggtattcagccaaagcccacattggaaaaatatgtccatcgaatgagtcatgaaccaagctgttactgaggtgtactccaagagtgtcttgtaggggccaatcgccatcttctaactgagaattcatgacataactttgctgcgtgatgaaggggagttggatctctctgaggctgcttagcatgaattagagccatcagaagcccaagatgtatgtacaacatttgatcgac

SEQ ID NO: 208232 - DNA, 405 bp, Glycine max
cacaacaacactctctcttctcgctctcggctttgcgctcttcactcactctcattgattcattttcaccgttcatggatccagtaagcgtgtggggcaacacgcccttggcgacggtggatcccgagagccatgacctcatcgagagggagaagcgccgtcaatgccgtggaatcgagctcattgcctccgagaacttcacctgcttcgacggcatcgaggccctggtgcgcgctcttacaaacaaatactccgagggcgtgcctggcaaccgctgctacggcggcaatgaatacatcgaccagatcgaaaacctctgccgctcacgcgccctccaaggcttgcacctcgacgcccaatcctgtggcgataacgtccagccctactccggctccccggtcaact

SEQ ID NO: 208233 - DNA, 490 bp, Glycine max
ataaagaaaggcagcacgtattatgtcaattgttaagtaagaaaaaaaatatgatatcaatcaggctaacaaaattaaacatgaaatcatcgacaaagaaacttcaaacttttgaattgaaacaccatggcgataaaccctatcactcccaggaaaggaagacacatatttcctttttctacatttctgcactttgtgacgaacttgagtgacacaatttagtagaaagcggtatggttgaacctaatccttggacttaatttcagataccaggaagccaggcttgtctaacaaggcagagaacttttcaacatcagctttgagatcttcaatagccttgttgatgacgagacccttgctgaaatccttgacaagttcgccatgctccttctggatcttcagtgagagagtgacagcacggtgatggaactcaccaatctgctcaaagtctgtgtcaaccaaacccctagaagtcatggctggggcacca

SEQ ID NO: 208234 - DNA, 530 bp, Glycine max
  unsure (1)..(530): unsure at all n locations
tcttcttctcttaaaagagcctttgctttttctttaggcctttccgaattaagtacttgtttcattttctctcgaagcaagaaaaatgttcatcgagagtttcaaggttgagagtcctaacgtgaagtacacagagactgagattcagtccgtgtacaactatgaaaccactgaacttgttcacgagaacaagaatggcacttatcagtgggttgtcaagcccaaaactgtcaaatatgaatttaaaaccaacacccatgtccctaaactaggggtaatgcttgtggggtggggtggaaacaatggctcaaccctcaccggtggtgttattgctaaccgagagggtatttcatgggcaacaaaggacaagattcaacaagccaattactttgggtcgctgacccaggcatcagctattagagttgggtctttccaaggggaggaaatatatgccccattcagagcctgcttncaatggtaaaccctgatgaatgtgtgtttggggatgggatatcaatacttgaacctgc

SEQ ID NO: 208235 - DNA, 527 bp, Glycine max
ggataacttgatattattttattacatacatgcatagatagcctgctctcaaataagtcggcaggaacaaagatagagagattcaacgatcttcaaatttcacatttgccagaaatatataacagaaaagaggggtatgggatatgagttaagttttgatcacattcaactacactatcccaaaccgttactcttaagactttgaacttcacttgtactctaggatcatgttgttctcaggagctaatccaacacaagccctcaggatgttttccagcatagctcgctgctttgacaacgcattcaccactggtgtacccggtggaaccagaggggccttggtcaggtaactaaggatggtcgcaactgggtggaatgagtggaattttccctcattttcagctttaaactcgattcgagtgctgagctcagcaagaaggaccaagtccaagataataggagcagctaacagtgaatcctcacatgtgttgtgcaacacaattgtgttctttccacccatgaatatc

SEQ ID NO: 208236 - DNA, 330 bp, Glycine max
gtgacactcactaagctcagggttatatcgtcaaccttagtggttttgtacaacatgtgccagcacactatgtggtccggtgaccatcccaatgcatgaaagcacgttcttgcccgtgccggctgaacgctctcaccaaaccgggcctagttccttcagatactcgctctatggctctggcgcttttggggacagcacggctgttactttaactccggcggtcggtggcgctgcgccaactgtgacttgtgatgacccctgatctgctactgctgcggaaggagcccaccgctgtccctgggagaggttaacctgttcaacaatctggac

SEQ ID NO: 208237 - DNA, 350 bp, Glycine max
aacactttcgagttcgaactaagaaaaaaaaaaaggaaaacaaaatggtttcgtgggtgagaggcaagtgcgtcggtaacggcgcgtttggggttgtgaacgtggcgatttcgaaaagagataatcgcgttttcgcggtgaagtccgtggattgtggaagggggctttctggtcatcaggtggaggcgttggagaacgagattgggattctgaagcgggtggcttcgccgcacgtggtggcttatctcggagacgatgtcacgtgcgaaggaacggcgtcgttcacgaatcttcatctggagtacatgccaggtggcaccgtcgctgacttggaccgcgctgacgtggac

SEQ ID NO: 208238 - DNA, 642 bp, Glycine max
ccagtcggcggccgccctttttttttttttttacattaagaatattaaattacacaacatgaaatttttacaatacaagctgtaaatgctgaatattcctctattcctacccaacttttcccacccacacccataccgacagctccaaccaccaccccctccagcggtgttactcccacccaactttcctattccccgatttacccctacagaatccgaatattccataccagtccccgccacattgtgaaactcccaatttaccccttctttgctcgaaccaacaccatcacactcacacgtacatgctccttcctctatttctgtttctgttcccgttgtcgttggttttccgttggactcaatttccctcaccactatccaaccctgcgtttcccaatttaccctcgactctgtcgcaaatttactaattctattgttaataactgatttttcttcgctgttggtaaattttataaacacgtcttcttgatgatcacggtcgttacaatctgactcggagttgagctccgagtcaacccagtcgagaacgcagcgaggcgacgattcagcaaccgcgtagtatggaagcaaaaatggatgctgcagcagctgatcgcagctccaccgttcactatgttc

SEQ ID NO: 208239 - DNA, 430 bp, Glycine max
aacgtctctctcacaacggttttccattcgaaaatctgcgttcagaactccaatcacgaggagcacttgttgctgcaactgcatgcaataatgtcgttatccgattctgaaacgccgtacggcggtggaacggagtacaagcctttccgccatatcagccgcgatcggttattaattgaaatgcttagatcggcaaagtcacctgattcgaaagcttggaaggtgctaataatggataaagtcacggtgaaagttatgtcacattcatgtaaaatggcagatattacagaccaagaaatttccttggtggaagacctattccggagaaggcaaccattaccatctttggatgctgtttatttcatgcagccttctaaagagaatgtggtcatgttcctgtctgatatgtcttggagggagcccctgtata

SEQ ID NO: 208240 - DNA, 529 bp, Glycine max
gaagaaaaaacccaagcacagtatagcatgggaaggtacaaaaggtcaaatgtgggtgtacatgactacatgatttcaggtgtaaatttatttgttataacaattgaacacacaaaaaaagtatccatatcaagcatggcaacccgacattaaatctcgctaaatgtatttttttttcatgtcgccctaggcaagactatgtgatttttcaaatggaaaataatggataatcatcatctaaaggtttctagaagctttggaatcaaataacttgagacaatgcgatttgtcttctccgtaggatgaaatgcatcccaaaacacgtacttttcggcgtctgtgcatgtaagtggattcttgtcactgcacaagtagctcatctcaaatgttcctgtcgaacaacacgccttctctacaacctcaaatccatatgtggaaggttttgtgatgatatcattgacgatggaatatgcatttgccgacaacgctttcaaccgtggaagctccctattaagcttcgtgatcacat

SEQ ID NO: 208241 - DNA, 483 bp, Glycine max
  unsure (1)..(483): unsure at all n locations
ggtaaggaaaagactcacatcaacattgtcgtcattggacatgtcgactctgggaagtcaactaccactggtcatttgatctacaagcttggaggtattgacaagcgtgtgattgagaggttcgagaaggaggctgctgagatgaacaagaggtcattcaagtatgcctgggtgcttgacaagctcaaggctgagcgcgaaagaggaattaccattgatattgctttgtggaagtttgaaaccaccaagtactactgcacagtcatcgatgcccccggacatcgtgactttatcaagaacatgattactggtacctcccaggctgattgtgctgtccttatcattgactccaccactggtggttntgaagctggtatttctaaggatggacagactcgtgagcatgctcttcttgctttcacccttggtgtgaagcaaatgatttgctgctgtaacaagatggatgccactaccccgaagtac

SEQ ID NO: 208242 - DNA, 546 bp, Glycine max
  unsure (1)..(546): unsure at all n locations
ataaaacttcgttataaattaaatgcaacttaaaacatccctcagcagcaaaggaaatggactaaaaccctatagctgcttgtgaaattcgaaatatctcagactcttcttaccatcaaaacaaaaaacagtactcatcaaaaacaaacagcaatgaaaattgaccaccgccgatcaagaacctagttttgaaagttacggctacatgaaatcggcagaaacttaaaaatataacttaaacaaaacacctaagactctgcaaggataaaactactataaaggagtaaccacgatgatgatcacatgtgctagcaaaattgcccaaatgcaatcacttcttcttggcagcggccttggtgaccttggctccggtggggtctttcttctcaacactcttgatgactccgacagccacagtttgacgcatgtccctcacagcaaaacgaccaaggggaggatactcagagaaagtttcaaccaccatgggctngggtggaatcatcttaaccatacctgcatcaccattcttcaaaaatttgggctcct

SEQ ID NO: 208243 - DNA, 466 bp, Glycine max
  unsure (1)..(466): unsure at all n locations
tgtcagtgtcagagtttccaatgaacttgggcttggacatccaagagctgccaagtactctgtctatgtgatagtctttcagtcacttttcttgggaatctttttcatggctattattttggcgactagagattattatgccattatttttacaaacagtgaggttttgcataaggccgttgcgaaactaggatacctcctttctgtgacaatggttctaaacagtgttcaaccagtggtttcaggtgttgctattggaggtgggtggcaagccctggtggcctacatcaacataggttgttattacttatttgggcttccactggggttcgttcttggttatacagcanatttgggggttgagggaacttggggtggaatgatatgtggaattgtactccagaccttgctgctcttgttgatactttacaaaaaccattggaagaaagaggtggaacaaacagct

SEQ ID NO: 208244 - DNA, 532 bp, Glycine max
ggaaaaataacgaagtttttttatcttcaccatctcatcagacaccacagctaaactatgttctgtacctaattggaagagagcaacattacatgtaaaatggacagactaggaacacatgaaaaaaagactttgagaacttgactcgagtggaggtggaagatatacaagattatgcagaagccactatcttatcaactccaatgtcttgtccactccatatccgcatgcgttcagctgtttgttccacctctttcttccaattggttttgtaaagtatcaacaagagcagcaaggtctggagaacaattccacatatcataccaccccaaagtccctcaacccccaaatttgctgtataaccaagaacgaaccccagtggaagcccaaataagtaataacaacctatgttgatgtaggccaccagggcttgccacccacctccaatagcaacacctgaaaccactggttgaacactgtttagaaccattgtcacagaaaggaggtattctagtttcgcaacggcttatgc

SEQ ID NO: 208245 - DNA, 498 bp, Glycine max
ttataactaggtatttattttctcatatgctcttcttaaacttctctttggtagtgtgttcacatacatatctacttattgttattattattgtcaccacatacaataatgggttccattagtaacaccgaggttcataatcatcacaatgatgatgacgacgatgatcatcgtcatcgggtgaatttctcgatccagagaggatttgggacaaaattgaaggaggcattgaaggaaacattgtttccggatgatcccttcaggcagttcaagaacgaggagaagccaatggggagggtgatgaaaggggtgcaatacttcatcccaatctttgagtggctccccacttacaattttcgcctcttttgctctgacttgatcgctggactaaccatctcaagccttgccattcctcaaggcattagctatgccaaacttgctgacctttctcccctcattgggctttaatccagctttgtcccacctttgatctatgct

SEQ ID NO: 208246 - DNA, 506 bp, Glycine max
gggaaaagtcattaatttattagcgaatattttctcaattccacaaatatatagttgtataataatactattctataatacaacattgatttgggcaaccgaaaggctaattaattaactacttaggcatgaatttcttcttaaaccacctcttgagcattatttgcagcctttgatgaacgaagtgtatattgacttgccatcactgcatcatccaatattagataaaacgactccttcccaattttctcaacaaacttggacattaggatcttctcgaggggctccagccttggggtgacgggcgttaagtttaagtgtatagtgggggaatattttaattaactcgtccaatcctttaatagcagggagaccaatggctgtcactcctgacaaattaagtatgatgtgctcaactacatcttcagtagagctttcctcacttcgaatatacctcataatcctatctttgacgtatatagaatttgccaagtaaacgggagaac

SEQ ID NO: 208247 - DNA, 441 bp, Glycine max
cttgttcctaccagtcccactgggtattcttttttactttgcatcttcttcatcatacatgcatgatgaagattttcaacccctctgaatgctttcttcggaacgtggtatgtccatccgataccatcttcctgaaaagcatcaatctttcccatctgggtgtttcccatctctacctattcagaatgtccattctctcctggcccaattagcagctacactacaccccaatacaacactatacttcttctcctatggatccacaaaaccaacacccccctaacccgagaagcattatcttcaacaagtacgagatggggcgggtcctgtggcaaggaaacttcgccaaagtctaccacgcccgaaacctcaacaccaacgagagcgtcgccatcaaagtcatcaagaaagagaagctcatgaaagagcgactcgtgaagc

SEQ ID NO: 208248 - DNA, 462 bp, Glycine max
aaagtgaacaacaatgttttcacttttccatgatttgcgggattatttttgctagtatatatatatactactgtagtgtagtatattcaaatcaaacaccgtcacaaactccacagtccaaatttacatagtatgtatgaaatcaaattaagcaaatcaaagacaaactaaattaaaccacgaccatgatggatcatagaaagtactagtactataaaaaaaaaagacacagaaatgagaaatgacttagtaactactgttggagttattattagtatcaatcaccctgccagcttcaaacaatgtctttgagggaaggcctcacttgctcctcacagaacttaacatactccaacgtatctccggcagacttagtaaactccgccaccgacaccttcggcgccacctcgaaaacctccaccgtcatcgccagcttacccttcctacccttctacgtcccct

SEQ ID NO: 208249 - DNA, 419 bp, Glycine max
ctcgcgaaagcgccaaatcccaacaatacccacacctcactcaccctaatgcccaaattccgttattcaactttccccctcaccacctccttcacacctcactcaccacggtggtgcgttaaaatcactggtcgcaattttcctctttcttaaccgcaccatgtcgaataggaagttcggattcgaagggttcggcataaaccgccaatccacctacagcttcgagcgatcccagccccctcagcgactctacgtacctccctccgcgcgccacggccacgaccactacgaagacaccgacatcgacaacatcgacttcgacgacaacaacaacgacgacgggagcaagaataacaacggtggcggcaacgacgacgacgacgaaatcgaccccttggatgccttcatggaggggattc

SEQ ID NO: 208250 - DNA, 490 bp, Glycine max
ttttttttttttttttttttttttttttttttttttttttttttttttttttttttttggttttggttttaaaaataggggattgaaaaccgggcccttttttattcaaaaaaaatcaattcttgacttgacccaaatataggaacattgatacctttgacaggggggccattcaatggggcaccaaactttttatcccaacctggtggcccccccctttttttagggttaaaactggccgggttcttttgaccaggatttaccccaaaaacttgaccgggggaatttcccggtgttgtacccggattgggggaaacaaaattccgacaaatttttatgtccccgccaattgatcccccgggttcaaaacccgggggtgccggtcccttattagcagccatgcttgaattgcgccccaatccttgattctggaagtttgatgaagccgcaacaaaggtccccttaaatggggacatctattcctggtccc

SEQ ID NO: 208251 - DNA, 429 bp, Glycine max
gagtaattgcggaatcagctagaattttctaataatggccaaagacgttgagcaggttacagagcaaggtgaatactccgcgaaggattaccatgacccacctccggcgccgttgatcgacccagatgagctcactaagtggtccttgtacagagccgccatagctgagttcatagcaacactccttttcctttacatcaccgtgttgaccattattggctacaagagacagagtgacaccaaaatccccggtaacaccgagtgcgacggcgttggcattttgggcatcgcttgggccttcggtggcatgatcttcatccttgtttactgcaccgccggcatctctgggggacacatcaaccctgcggtgacattcgggttgtttctgggacgcaaggtgtctttggtgagggcgttgttgtacatgat

SEQ ID NO: 208252 - DNA, 571 bp, Glycine max
aggtaaaatttggctaatgatccaccacattatataaaaagggaacacatgatgataaatactggaagaaagaaagaaattaaataaaaaaaaaaaacaaaacaaaagggatacaaatacacccttgacataaaagcattcttatctacaaattcaagagccccaaacccacggtatttggcttttgccccaaacccacgggtaagcagaaaagccaaaaaggaaggaactccaagaattgaactgaaacactgttattgttttgggtgacacaggacaaatgatcataatttaggtagtggagattattaattaagtgttgctcctgaatgatccaagagctttgattgcagcagctctaagaatgtattgatggtagaatgcagccaccgcagctccaacaaacggtccaacccagtaaatccattggtcgtcccaggctttgtcgttgttgaagatcacagctggtccgaaactccttgcagggttaatgccggttccagtgacagggattgtagccaagtgaaccatgaagacggcaaacccaaatggaagtggtgctacacaggaa

SEQ ID NO: 208253 - DNA, 488 bp, Glycine max
cgaagagaatggctcccaagggtttaatctttttggctgtgttatgcttctcagcactgtcactgagtcgttgtcttgcggaggataatggacttgttatgaacttctacaaggaatcatgccctcaggctgaagacatcatcaaagaacaagtcaagcttctctacaagcgccacaagaacactgctttctcctggctcagaaacatcttccatgactgtgctgttcagagttgtgatgcttcactgttgctggactccacaagaaggagcttgtctgagaaggaaacagatagaagctttgggttgagaaatttcaggtacattgagaccatcaaagaagctttggaaagggaatgcccaggagttgtttcctgtgctgatatcctcgttctctctgccagagatggcattgtttcgctaggaggtccccatatccctcttaaaacaagaagaagggatggtagaaggagcagagccgatgtggta

SEQ ID NO: 208254 - DNA, 533 bp, Glycine max
agcagcactcacatgcatacataacatagtaatggacaccatgaacatgcccttctacccaactctaacctacttgcacagtacttattgaaataaaaaattaaaaaacaaactatcaaacaagagtgacatcggaagattaaaaaacaaagcgtcttaatcctcgcatccccatgaacctgctgtggtcttgatcggttcattgaaccaatcaaccaacccatttaaagaaaaacaccttaattattttttgcataatatcttacagatttcttccacatagagaaggggaagaaaattcaaggcccaaattaagcgggaagcaattaaggctcctcatggtgcttgttggcaacattgcactgctttctgatctcaccctttgtgccaatgagagggttgttctcagagagcaaaggaatggctctagaaaactccctgaagaaatagtcctggctcttggccattttcttcacataaggcttggtcctcttgtcattggctagttggtgatccactatcaacaagccctt

SEQ ID NO: 208255 - DNA, 442 bp, Glycine max
tgtcagtgtcagagtttccaatgaacttgggcttggacatccaagagctgccaagtactctgtctatgtgatagtctttcagtcacttttcttgggaatctttttcatggctattattttggcgactagagattattatgccattatttttacaaacagtgaggttttgcataaggccgttgcgaaactaggatacctcctttctgtgacaatggttctaaacagtgttcaaccagtggtttcaggtgttgctattggaggtgggtggcaagccctggtggcctacatcaacataggttgttattacttatttgggcttccactggggttcgttcttggttatacagcaaatttgggggttgagggactttggggtggtatgatatgtggaaattgttctacagaccttgctgctcttgttgatactttacaaaaccaattg

SEQ ID NO: 208256 - DNA, 570 bp, Glycine max
  unsure (1)..(570): unsure at all n locations
ggaaaaataacgaagtttttttatcttcaccatctcatcagacaccacagctaaactatgttctgtacctaattggaagagagcaacattacatgtaaaatggacagactaggaacacatgaaaaaaagactttgagaacttgactcgagtggaggtggaagatatacaagattatgcagaagccactatcttatcaactccaatgtcttgtccactccatatccgcatgcgttcagctgtttgttccacctctttcttccaattggatttgtaaagtatcaacaagagcagcaaggtctggagaacaattgcacatatcataccaccccaaagtccctcaacccccaaatttgctgtataaccaagaacgaaccccagtggaagcccaaataagtaataacaacctatgttgatgtaggccaccagggcttgccacccaccttcaatagcaacacctgaaaccactggttgaacactgnttagaaccattgtcacagaaaggaggtatcctagcttcgcaacggccttatgcaaaacctaactggttgaaaaataatggcataataatc

SEQ ID NO: 208257 - DNA, 496 bp, Glycine max
gagaaacagactcgctgcttagtttatgagcttgtccctaatggaagtgtcgaatctcacttacatgtagctgacaaggtaactgatccactggattggaattcccggatgaagattgctcttggtgcagctcggggattggcctatctacatgaagattcaaatccatgtgtcatacatcgagacttcaaggccagcaacatcttgttggagtacgattttacacccaaggtctcagattttggattggctagaacagcactggatgagagaaacaagcacatctccacacatgttatgggaacatttggctacttagctcctgaatatgcaatgactggccatcttctggtcaagagtgatgtttatagttatggagttgtactccttgagctcctaactggagaaagcctgtggatttgtcacaaccaccgggtcaagaaaatttcgtgacatgggttcgtccacttttacaagtaaggaaggcttgcaatga

SEQ ID NO: 208258 - DNA, 460 bp, Glycine max
ttcacagctgaagagctacgtcgtattatggactataagcataatatccgtaatatgtctgtcattgctcatgttgatcacggaaaatcaaccctcactgattctcttgtggctgctgctggtattattgctcaagaagttgccggtgatgtccgtatgactgatacccgtgcagatgaagctgagcgtggtattaccatcaagtctacaggtatctcactctactatgaaatgactgatgaagctctcaagagttttaagggagagcgcaatgggaatgagtatcttatcaatctcattgactcccctgggcacgttgacttctcatctgaggttactgctgcactccgtattactgatggagctctagttgtggtcgattgtgtggaaggagttttgtgtcccaactgaaactgtgctaagacaagcccttggagaaaggattaggcctgttctgact

SEQ ID NO: 208259 - DNA, 577 bp, Glycine max
  unsure (1)..(577): unsure at all n locations
gaaccaacaccgatgcaaaatcctattagagcaaaaatacatcgatgcaaggaccaaataacagcattacaacattcacgggcaaaaccacaaacaaaactaacagaaattaaatctaaagtagcattgttcacaagagaaaataaattcgactaagttcaaagtaaaataattcatgaaacaaatttaaagcttgtcttcaaactcggagagaggagtcatctgttccttcaagcccttcctcttgcgaatgtcagtgacaagctgtgcagcttgtgatccagcctccaatgggtcagaagacatcatgtcccagtgatcaaacacacattgtgggaaggcctggcctgatgttgcagccctcaatgtgctcgagaaaccaaaggactcgatgacagggaggtatgccttgatgttgtatagtggggtacctggcctctgcatttcctcgaacacgtgtccacgcttctggttaagaacactgtagattccaccaagagcttgttcaggagcctgtatttcaccaggtagacaggctcaagaagcctgggttnggcagtaatctgggaagcataga

SEQ ID NO: 208260 - DNA, 582 bp, Glycine max
caaaagcatatggcgtatttatacaattttcttgctttctctctccttgggtacatccttggccattctatcattatgggtatcgtgaggaacagaattaatgggaaaaaggcttattaacaagggctacccactctggacttcaccaggtcgactgcatagcaagtaagccttcctacataatgtcctaccttagcggcgatcatgccttctcttgagaataccctcttagccgacccatgccccgattgcacaaaaaatgctccattcatgtacacatcgataatagatctccactgccaattagcccatacgtgttctggagcgtattccctctttagaatctgtctatcgaattgactgtcaggggcattaaaacggtcaccctcactgataatggcggggtccttgctaccaccaatggcatacatttcccagtgagcgtagtcattatttaccgaatggacaaaaccatatcgaactctgggcatcctctgaactaaacttttgcccaaacggttgaatgccaaggtgatttgcatgagcttatcatcaggataactgccactggcaccaaacaac

SEQ ID NO: 208261 - DNA, 440 bp, Glycine max
ctcgcgtaacgcatgcgtttcttcactcaatcggagcccagcactgatctatttggaactcttcgaggtctgtggttttactgtactcaatttgataaattaaggcaaagacgatgaccaagaagaagaatcccctggtgtttatggatgtgtccatcgatggggatcctgttgaaaggatggtttttgagcttttctatgatgttgctcccaagactgcagaaaactttcgtgcattatgtacaggagaaaaaggtatcagtccaaatactggaaaatcactgcactacaagggttctttcttccatcagatcataaaaggttccattgtgcatggtggagattttgtcaatcgaaatggaactgctggagaaagcatatatggttcgaagttcccagatgagtcacctaagctaaagcatgatgctaccggactttta

SEQ ID NO: 208262 - DNA, 590 bp, Glycine max
gattgatcgagagaagagaagatgactacacgcttcaagaagaacaggaagaagagaggccacgtgagtgccggccatggccgcatcgggaagcaccggaagcaccctggaggacgcggtaatgccggaggcatgcaccaccaccggatcctctttgacaagtaccaccctgggttcttcggcaaggtcggaatgcgctattttcacaagctccgcaacaaattctactctccgatcctcaacatcgacaagctctggtccctggttccgcaagaagtgaaggacaaggcctccaaggagaacaaggcgccgctgatcgacgtcacgcagttcgggtactttaaggttctcggaaagggtgttttgccgcagaaccagcccgttgttgtcaaagctaagcttatttccaagatcgctgagaagaagatcaaggaggctggcggtgctgttgttctcaccgcctgatattattgacggtatcggtttttcaacaattaagggtttttttatgtttggtctgatacgtttcgtttggatgacgttgttgttagtctatcctcaattaagatttaatttaaggtttatttttt

SEQ ID NO: 208263 - DNA, 459 bp, Glycine max
aaaaaaataaaaccttaaattaaatcctgaaatgtagcatagactaaacaacaacgtcatccaaaacgaaacgtatcagaacaaaacaaaaaaaaaaccctaaatcgttgaaaaagcgataccgtcaataaaatcaggcggtgagaacaacagcaccgccagcctccttgatcttcttctcagcgatcttggaaataagcttagctttgacaacaacgggctggttctgcggcaaaacaccctttccgagaaccttaaagtacccgaactgcgtgacgtcgatcagcggcgccttgttctccttggaggccttgtccttcacttcttgcggaaccagggaccagagcttgtcgatgttgaggatcggagagtagaatttgttgcggagcttgtgaaaatagcgcattccgaccttgccgaagaacccagggtggtacttgtcatagaggatccggtggt

SEQ ID NO: 208264 - DNA, 432 bp, Glycine max
aaaagagcgcgtgttttatttccctcaaggacatattgagcaggtggaggcgtcgacgaatcaggtggcggaccagcacatgccggtttacgatctcccacccaagatcctttgtcgggtcatcaacgtgcagctgaaggccgagcccgacacggatgaggtgtttgctcaggtgactttgcttccggagccaaaccaagatgagaatgccgtggagaaagagccaccaccacctccgccaccacggtttcatgttcattctttctgtaagactctgacggcgtccgatacgagtacccatggtgggttttctgtgctgagacgacatgctgatgaatgtcttcctcctctggatatgtcgaagcagccacccacacaggaattggtggctaaggatcttcatgcatatgaatggcgatttaaacatatctt

SEQ ID NO: 208265 - DNA, 444 bp, Glycine max
ctggggattgggtttatgtttgttatcttttacattgtgctttttattaacgggacaaagttgttgacgccaaagaacgtgaaggaccaaaacgccggaacctccataaacaaaggtggtgtcacccacacagacaccggcaccatatgccaaagcaacagcttagggggaggagtaaccgacacagccactggccccccccgccgtaagagcttcatgcggcccatgggggcttcttaggcggaaaaccccggaaaatggcaaaggggggaaaaaaacggcccccgaaccccaaataccccccttgaaaaccccccgagccaagaaaaaggcccccccaaaaaggggggaatgtgatgcccccccaagaaccccaggctcataaaacggggggaactgtaatgactgaagaggcttttcctcgggcaggggtaaaactcgagg

SEQ ID NO: 208266 - DNA, 441 bp, Glycine max
attatattatctttttttttttttattactttggtttgggaacattttttttatctttttcaaagggggaaccatgtaaatcactgagtagattcaccgccgaatgaacccaacttgaaaaccctaaacaacagcggcaaccaatgcgtaacagacacaaacaccaacatcttatcccagggagccttctaaccctctgtaagcccggataccgcaaagggcctgatctgaacggagatgctcctaaaaaagaaacccaccaacacagactgcgaacagggccaaaaaaggagggggaaccccggaatggggaaaaaaacatcttaagagcttgccaccgttgaaagcaaggcacgaagcctgcaaaatttcccctaaaccggaagcgcccactggcattacaggacccaaaaacctcaaaaactgaagccccaagggggg

SEQ ID NO: 208267 - DNA, 498 bp, Glycine max
  unsure (1)..(498): unsure at all n locations
gacagaaacaaaaaccaaacttttccatatgtaaatatttttagcatagaattggataacattaacatcatatttctttgaacagattctcttgtaagcatcatttcacatgatatgataaaattacaacaaaaattctgataaacataactgggcaaaaatgaaggaatgcgctttgagcaagaaccataaccttatgtcggttattcaggggaggacattacaactgataagtacaaattgccaacccaagatgtattccaatcctttgtgactatagctcttctatctccaattcaaatttttaactcttctgatcagggtggaatgggcgtataaatgcagaattcatttgccaaacttttagtgaggctgtcacagtggcctcggtagcattgttgaacaagaacaacctagcagctccatagattgcctttngtggataaacccgagatgtcacaaccgtccttccaccttgagcaaagctttcaacaatag

SEQ ID NO: 208268 - DNA, 426 bp, Glycine max
ggctatatatatatatatatatatatatatatatatattatgggacaaattttcattttgaaaggccaaatatatacaaaaaacaaaaacataaaagcatttcaataacaatatatcaactatgctccctgcttttatttcttctttaacacccttttcttaatagcttttttttttcttctcttattcacgccaatgaacaatgagaatttttctccctttgcactaggaaatctataaacaacttgtagtgggttgtccaattattccttggcagtgctggttctttgccctgatgatgccattagcacagcaacagccacaataaacataaacaacatactccctagcagtatatatggccttcttgatgaatttctggactccccaaacagaaccacgccccaaaaagtgcttacaagtgga

SEQ ID NO: 208269 - DNA, 492 bp, Glycine max
ggactgttcagtttgttgattggtgtccaactggattcaagtgtggtatcaactaccagcctccttctgttgttcctggtggtgaccttgccaaggtgcagcgggctgtatgcatgatcagcaacaacactgcagttgctgaggtgttctctcgcattgaccacaaatttgatctgatgtatgccaagagggcctttgttcactggtatgttggtgagggtatggaagaaggagagttctctgaagctcgtgaggatcttgctgctcttgagaaggactatgaggaggttggggctgaaggagcggaagatgatgaggaaggagaggactattcataaatgaaggttttattatcaatgtaattgtttcgagtaaaaagggtatatgcttcgttacattaccctgaaccagtattgttcgttcctttttggttttactcctgtgtgatatagttctcattattcaaactgtgaagtgatatcatcattatgc

SEQ ID NO: 208270 - DNA, 459 bp, Glycine max
ttttctgtgacttttttttttttttttttttttttttttttttttttttgaagcataaggatgatatcacttcacagtttgaataatggaaaactttatcacacaggagtaaaaacaaaaaggaacgaacaatactggttcagggtaatgtaacgaagcatataccctttttactcgaaacaattacattgataataaaaccttcatttatgaatagtcctctccttcctcatcattttccgctccttcagccccaacccccttataggccttttcaaaagcagcgggattctaacaattttatagagaacccaccttattccatacccttaccaacataccagtgaacaaaggcccttttggcatacatcagatcaaatttgtggtcaatgcgagagaacaccttaacaactgcagtgtttgtgctgatcatgcatacagcccgttgcaccttggcaa

SEQ ID NO: 208271 - DNA, 406 bp, Glycine max
ggaccagcaagaatagtggttctgctacctgcaagcgtgggtttgttcagttctgttatgagcccatcaagcagattattaacacttgtatgaatgatcagaaggataagctgtggcctatgctgcaaaagcttggggtcaccatgaaatctgaggagaaggacctcatgggtaaagcattgatgaagcgtgtcatgcaaacctggcttccagcaagtagtgctctattggaaatgatgatatttcatctaccctcttcatcaacagcccagaagtatcgtgtggagaacttgtatgagggacctcttgatgatcaatatgcttctgctatcagaaattgtgatcctgaaggtcctctgatgctctatgtcttcaagatgattccaacatctgataaggggagaat

SEQ ID NO: 208272 - DNA, 408 bp, Glycine max
caagcaaaattcgcaaaataataatttgaaccaacaccgatgcaaaatcctattagagcaaaaatacatcgatgcaaggaccaaataacagcattacaacattcacgggcaaaaccacaaacaaaactaacagaaattaaatctaaagtagcattgttcacaagagaaaataaattcgactaagttcaaagtaaaataattcatgaaacaaatttaaagcttgtcttcaaactcggagagaggagtcatctgttccttcaagcccttccttttgcgaatgtcagtgacaagctgtgcagcttgtgatccagcctccaatgggtcagaagacatcatgtcccagtgatcaaacacacattgtgggaaggcctggcctgatgttgcagcccttaatgtgctcgagaaacc

SEQ ID NO: 208273 - DNA, 586 bp, Glycine max
tcgcgatctagaactattagagactgaaataacaaaaaagcaatggatctcagagagggtcaaactcaaccaattttggatcctaaccaaccctctcatgtatatcatctggctttggatattggaggatctcttgccaagttagtatacttcacaaaagatgatgatcatttggttgatggcgaggagggaatatctcatagaaaggctttggaaaaatccaatggcagtaagcaatatcctgttctaaatgggaggctcaattttaagaaatttgaaacaagcaagataaatgattgtatagagtttatcaagtccatgaaacttcacattggaggtagtcagccacaagaaaatcctggaagtcagtcaatagctattaaggccacaggtggtggggcgtacaaatatgcagaccttttcaaggaaagactgggaatcatttttgacaaggaagatgaaatggattgtcttgttgcaggagcaaattttcttcttgaggtggttcaccaggaagcatttacctatatgggtgatcaaaagcaatttgtgcagattgatcagaatgatctgtatccctatcttc

SEQ ID NO: 208274 - DNA, 441 bp, Glycine max
tttgctttcttcctcaaaaccaaacatgtcgaacacatgcggcaactgcgactgcgctgacaagactagctgcaccaagggaaacagctatggtgttattgtagagactgagaagagttacatccagactgttgtcatggatgttccagcagctgagcatgatgggaagtgcaagtgtggcactaactgcacttgcacggactgcacctgtggccattaaggaatatgtatgaaaatgtaattgccatgtgtttggcaatacaaatatccaaataatgtaatcttcgcatgaataaatgtgtgtgctgttatcctacttcaggtcttggtagtcatgccatctgaataatttaaggtcctgtctagttaatatacaaccaatggtgtggcattctatggtttattagactaaacaagcgtaaatttaccgtcaataattcc

SEQ ID NO: 208275 - DNA, 458 bp, Glycine max
actacgcctttttccatacagttttactatactctttagacccggtttatttttctctttcgaactatcatggtttttgcccaatcagtataccgcggataccccagtacaaactcgtcatcgtcggtgacagcggcacaggaaagacaacgtaagtgaaaaggcatcataccggggaaaccagatgaatacaaccaaccatgagagaggtcatacgagattgatgacagcagcggacagattcgcttctactggtgggagacagctggacatgagaagctaggaggccccacacatggagatcatatacatgggcaatgcgcgattataatgggtgaagacactgcccgtctaacatacaaaaatgtccctacctggcaccgggatctttgccgggtctgtgaaaacatgccaattgtgcttttgaggaacaaggtcgatgtcaagaacaggcaagt

SEQ ID NO: 208276 - DNA, 558 bp, Glycine max
acttacaccacttgctgaacgtgtgagcttcatcacagaacaagttgccttttacactggtcccacagtcggaggacttctgaatgctacatgtgggaatgttactgagctcataatagcaatatttgcccttagcagtaacaaaattgctgtggtcaagtattctctgttgggttctattctttcaaaccttcttctggttcttgggacctctctattatgtggtggcattgcaaaccttaaagtggaacaaaaatatgacagaagacaagcagatgtgaactcacttatgctgttgttgggattgttgtgctacttgcttccaatgctgttcaaatacagtggtgcctcagctgctctcactgtagacccttcactccacttgtcaagagcttctagcattgtgatgttgattgcatatgtagtctacattgtctttcaactgtggacacacaggcagttatttgatgccgaagatgagggtgaggatggtgaggacggtgaagaagaacaagctgtgattggattatggagtggcaattgcttgtttggtaggga

SEQ ID NO: 208277 - DNA, 534 bp, Glycine max
caagaagaaacaagcattaatagaatttttatttctcacacaataaatacaagagattctgcaaactgaaaaagggatttcttactaaagcaaactcaaacaagaacaacttccactcatttggcatctaccgtagtagaacaggatcaaaagcagctctctgatagaacacacgtatgtattatattgaacatcttgcacagtggttcatttctcacagctattgcaacttaaaatacttgcaaagcttctgcaaattccaaactttctttttctcccttctttatggatatgacaaagtgatcagatcatgaaacaataatcaatccattgaatttgaatctgatttttggtttggatcgatgccaccattcttcatcttaggaagggacaacaaataggccaaagcctactaattaagcgcttaaaactgcattagtggttggtttaagtgtgatgttagtatcatcagcttgattatcaaagggtgctctttgtacgaagaagcatgccccaataacaatgtagcacagc

SEQ ID NO: 208278 - DNA, 534 bp, Glycine max
tttggctttgagaccattcctgaagagtgcgttgaagcaacaaaggaatacatccatggcgaacaatatagatcagactccaaaacagttaaccaacaagcttacttttatgccagagacctcgaagtccatcccaaggacacatttgtgttcagtatagatggcaccgtactctctaatattccatactacaaaaacatggatatggggtggagaaatttaactcgaccttgtatgatgaatgggttaacaagggcaatgcaccggcactgcccgagactcttaagaattacaacaagctggtgtctcttggcttcaagattatattcttgtcaggaagaacactggacaaacaggccgtaacagaagcaaacttaaagaaggctggctaccacacatgggaaaaattaattctcaaggatccacaagatccttccactccaaatgcagtttcatacaaaacagcagcgagagagaaactgataaggcagggatacaacattggtgggatcattggagaccaatggagcgatc

SEQ ID NO: 208279 - DNA, 538 bp, Glycine max
  unsure (1)..(538): unsure at all n locations
aagaaccggaagaggaaaaactagaaaagatcccaacagtgagaagccgagcgattttgtttaccttccaagagatgaagcatttggtcacttgaagtcatcagattttctcgcttatggaatcaaatctgtatcccaagatgtcttgcctgtcttgactgatgcattcgatggaaatattttgagccttgagtttgataattttgctgaagtgcacaaactctatgaaggtggagttacactacctacaaactttcttagcaagatcgcccctataccagtgatcaaggaaatttttcgaactgatggcgaacagttcctcaagtatccaccacctaaagtgatgcaagtggataagtctgcatggatgactgatgaagaatttgcaagagaaacgattgctggtttaaatccaaatgtcattaagattatagaggagttcccactaagtagcangctagatacttcaagcctatgtgatcatacctgtantatagcanaagaacatttggagcctaactangtgggctcactgtga

SEQ ID NO: 208280 - DNA, 588 bp, Glycine max
  unsure (1)..(588): unsure at all n locations
gtccttacttatatgcggatgatctgattgaagtcttgaagaaaaaacatgcttctggaacgtataaaaacctagtattttatctggaggcatgtgaatctgggagtatctttgaaggtcttcttcccgaagatatcaatatttatgcaaccacagcttccaatgcagaagaaagtagttggggaacatattgccctggggagtatcctagtcctcccccagaatattcaacctgcttgggtgatctgtacagtgttgcttggatggaagacagtgacagacacaatttacgaacagaaactctgcatcaacaatataaattggttaaagagaggactatatctggagattcatactatggctctcacgtgatgcagtatggtgatgtacggcttagcagtgatgttctcttccattatttgggtacagatcctgctaatgataatttcacttttgtggacgaaaactccttatggtcaccttcaaaaccagtcaaccaacgtgatgctgatctcatccatttttgggataagttccgcaaagctcctgagggttctctcangcaaaatgcagctcagaaacaagttt

SEQ ID NO: 208281 - DNA, 543 bp, Glycine max
tgttttttttttttttttttttacaaataataaatacaatgtcgccattaatattaaacaataactttgacatcataaattcttccaaaataattatacaaaagtgacaagggaaaacccgatctgccagttgcctactgaataaaaacacacatcattactatgtgttggcatacacgcatgaccttgtgccttgtcatgagtgaatattccaaagcaattggtcctttatgcctccttaatccttatgccacaaaatgctatcatcccttgaaagttgtaattgcttcttcagaaatagatttatacaaaggtagttgcaatatctatttgccaaactaaaaatgtaaagacccttcttcccaatcctagtagtgtcccaattgtatttacaaaggcgggacaaaatatgtatatacaagtacaatcatatagcataatgtaacaataatcatactttggtctttactggtgcacattacaggaattattatgcactgaaacccctttgcagagaactccaaggattggaaggaatagaga

SEQ ID NO: 208282 - DNA, 361 bp, Glycine max
gcagtcctcttcgctctccgctcacgaaaaacacaaatctcgcgccgattggataaagcagctcaacgatcctctcgaggccatcgatcccgagatcgccgacataatcgaactcgaaaaggcgcgtcaatggaaggggttcgaacttataccttcggaaaatttcacgtcgctgtcggtgatgcaagcagttggatcggtgatgacgaataaatacagtgaaggatatcctggtgctagatactatggaggaaacgaatacattgacatggctgagaccttgtgtcagaagcgtgcacttgaagcttttcagctggatccagcaaaatggggagtcaatgtgcaatcattatctggatcc

SEQ ID NO: 208283 - DNA, 513 bp, Glycine max
aagaaatcaacttttgacatggacaattctgaatacatgactgaggatcgcaaacaacaggtcctaaaccaccaaatagaagcataatgttgatcacttcacagtttgaataatggagaactatatcacacagcaggagcaaaaacaaaaaagaacgaacaataatggttcagggtaatgtaacgaagcatatacccttttaactcggaaacaattacattgataacaaaaaaaagccttcgattatcaatagtcctctccttcctcatcatcttccgctccttcagctccaacctcctcatagtccttctcaagagcagcaaggtcctcacgagcctcagaaaactccccttcttccataccctcaccaacataccagtgaacaaaagccctcttggcatacatcagatcaaacttgtggtcaatgcgagagaacacctcagcaactgcggtgttgttgctgatcatgcatacagcacgctgaaccttagcaaggtcaccaccaggaacaac

SEQ ID NO: 208284 - DNA, 453 bp, Glycine max
catatccatttggtattatcgttattatcccacaggtatccaagaaaagtcttggcggcatccaagcttggaaaatacgttggttcaaggaaaatctgagtcaacgagtcagccgaatcgcaactcaacccaactcggttaccgttagcctctgaacttcccatcaccaccgtcaacacctgcttatacgcgtagaagaatctcttcatcgccgtctaaatcgcctgcattgcctgcaacaagtgaaccttctcgaactcgctcttcgaaacgtagagcttcatcgccgcctcttgaatccttggtcctccctttggatccacctacacctgcaatatctgcggcaccttgtgcctcagatctctgcacatcttcgtcagttccactaactcattcgatctgaagcagaacgatgccgtttcgccgctcgaggatttcaccgagagttgattc

SEQ ID NO: 208285 - DNA, 473 bp, Glycine max
  unsure (1)..(473): unsure at all n locations
ctaactgctactcgctcatcccgtggaggtttcgctctctcagtttcttttccccaaattggtttttcatctaacaatttactttgcagaaccgtaaccctaaccccttcccctaccttgtaaccttcctttcgatccttcacctcgcagataatgggagaaacaaaggacgaagcatacgaggaagagcttctcgattacgaggaggaagacgaaaaggcccccgactccgccggagctaaagtcaacggcgaagctaccaagaagggctatgttggaattcacagttcgggattcagggacttccttctgaagccagagcttcttcgggctattgtggactcgggatttgagcatccatctgaagtgcaacatgagtgcataccacangcaattctcgggatggatgtaatttgtcaagcaaaatctggaatgggaaagactgctgtctttggtctctctactctgcagca

SEQ ID NO: 208286 - DNA, 530 bp, Glycine max
  unsure (1)..(530): unsure at all n locations
agtctgcggccgccctttttttttttttttttttttttttgtgctcaaaaagagctctgaaatctgaagttaatattcaaatgatcaaagttgaaaaaaatgcacacacatgacctctatttatagcctaagtgtcacacaaaattggagggaaattcaaatttcacttgaatttgaaattgaatttgtggagccaaactttggagccaaaatttcactaattatgattagtgaattttagttatggttcagcccactaatccaagatcaattccaagattctccactaagtgtgcttaggtgtcatgaggcatgaaaagcatgaaggacatgcacaaagtgtgactatatgatgtggcaatggggtgtagtaagcaaatgctcacctncccctctaaaatttaattggattgggcttctaccaattcaattaaatttatttccaaccacacacatcaaatatccacttagtgcatgtgaaattacaaaactacccctaatacataaactagtctaggtgccctaaaata

SEQ ID NO: 208287 - DNA, 476 bp, Glycine max
cactcaataacaactaaattttaggtaattcacttgtatagaagaggttagaattcctaccaggtatacagtagctttctcttagtgcaacctgctcatggagtacaatttgtagatccttgaacaagttattctgtataaatcgattggtgtcaaaatttacaaatcaaaaacaaataaaagaatctgcatcactacttgtttgattttgctgagtagctaaaaattcagttaaagcatttcaagaaaatgtctgcattagtccctttccttccagtaactgttggaatcatgagaactctaacccacattaggtaaactacatcttgaagattctgctccacccaacaaccccatgggactagagattatctttaaaccactttaaagctccatttgccacagatccagcaaagtccttcaatttattccatacatcgttttcatcttctgatttttcagttttttcttcgact

SEQ ID NO: 208288 - DNA, 510 bp, Glycine max
  unsure (1)..(510): unsure at all n locations
ctcagacaacccctcatttttatttacagaagcagcaacaatgtaaaatgggaacggccatggtggggaccgaatctaatccgccaaaattagctagcaattgtctctacatgtaccaaacataacccagaaaaaacacctcccaattaaataaatccaaacaccttctaccccctaaccaaatatcccttctatccctacaaaactgctggctgctttttagctctctctgaaacagcctaaaaaacagattaattttttaagaaaggaacatttgtcaatcacaagaattgcatttacaatcaatttccctcaatcaagctcttcaatctattacgggcctcttcagacaaactgcaagctttgaatcttctccttnggggtggacatgattcaacaatgctttcaatgggcgacaagcatacaacaattacagtgagattatctgatgtatttaggcgcaatgcttccttgactagctctccggcacattgctgtgggtcatcatgc

SEQ ID NO: 208289 - DNA, 538 bp, Glycine max
  unsure (1)..(538): unsure at all n locations
cacaaggcagaaagcaagctcatcctagagttttaaaaatggcagcagcctcctccatggctctctcttccccatccttggctggcaaggccgtgaagctgggcccatcagcccccgaagtcgggagggtcagcatgaggaagaccgtcaccaagcaggcctcctccggaagcccatggtacggcccagaccgcgtcaagtacttgggcccattctctggcgagcccccgtcctacctcactggcgagttcccaggtgactacggctgggacactgctgggctttcggccgacccagaaaccttcgccagaaaccgtgagctcgaagtgatccactccaggtgggccatgctcggggccttgggctgcgtcttccccgaactgttgtcccgcaacggggtcaagtttggagaagctgtgtggttcaaggccgggtcccagatcttcagcgagggtgggctggactacttgggcaacccaagccttgtccacgcccagagcatnctcgccatctgggccacccaagttatccctaatgg

SEQ ID NO: 208290 - DNA, 343 bp, Glycine max
tgttttctggatgttaagggatactgtcgcgaagagaggagccacgaagggcttggaatgggtggttctcttgtctaccaaaaatttgccaagacttgtgactgcggttcacctagatcaactctgaagtgctggaaagaggaagatgaagaagagtagttttcttaagtgtctttattatgtccttgcgaaaataagtccggttttccagacagtgattgcttttctttggtgttctttcccttttatgttagaccattgttagggcgtttggaccttttattgttctactattaccatttgaacatcgaatggattttaataaatcactttgtatgcgtgc

SEQ ID NO: 208291 - DNA, 590 bp, Glycine max
caatttttgttcattcagagctttactcactcctttgcacgtctcaatctgagtcttcacttcattgtttttgtgattctctgtctcaataatggcagcacgcttgcaatctgcagctgtactttgctggtgttccctatagggaaagatgaaattgaagtctaagaaaggatggaaatctattgtaccacttcgtttgaaaggaaaatcagcaacccattttttgttatttcgcaaagtcaattctgctggctatggacctggcaaaacaccagtttatctgaatgtgtatgacatgacacccatgaatggttatgtgtattgggctggtcttggtatccatcactctggtgtagaagttcatggtgtagaatacgcgtttggagctcatgactacccaacaagtggtgtttttgaggttgaacctcaccaatgcccaggcttcaagttcaagaagtcaatattcataggaaccacatctttggattctactcaggttagggagttcatggaacgccagtcagcaagatacaacggtgacacatatcacttaattgtcaagaactgtaaccacttctgcaaagacatct

SEQ ID NO: 208292 - DNA, 566 bp, Glycine max
  unsure (1)..(566): unsure at all n locations
aagaaaggcaagtaccatttttatcaatcttatcacccttttgcattgcacctacaaaagggccaccccttcttcccttctcaacttgtacttcatctaattcaatactacaacttctgaatcacttagttgaattgaattatcttcaaaatgagagaaatccttcatgttcaagctggtcaatgtggcaaccaaattggaggcaagttttgggaggtgatgtgtgatgaacatgggattgatgccactggaaattacgtaggcaattcccatcttcaacttgagagggttaacgtgtactacaatgaagcaagtggaggacgctatgttcctcgagctgtgcttatggaccttgaaccagggaccatggatagcttgcgttctggtccttttggaaaaatattcagacctgataatttcgtgttcggccaaaatggagctggtaacaactgggctaaagggcattatactgagggagctgagcttattgattctgntcttgatgttgttcgaaaagaagctgagaactgtgactgcttgcaggggttccaaatttgtcactcact

SEQ ID NO: 208293 - DNA, 481 bp, Glycine max
tgccgtcaagacactgtccgtattattcccgagtcgacgagtctactactccggggccgccctttttttttttttttaatgtcttggaaacatgcatttatcataacagttactatacctagagcttaacagtaagagtaaccttgtttgaacgaaaagtgtgaaggtgacagcctccataaggaagacgaaattcacaattcatatgtataaatcagcaaaccttgctaggaaattaagcacaaatttcaggtcaagtcagcagctttcgtgcaatagtaaagtcctgatcaacttcctttctggatgcttcccaaagtcgatgttcaatccccaatttcctcagttcagaaagtccctgctcagcatcaacggcatcatgtgaggtaggtgaatgcccacttcgaccaatccaaaaccgaagacgttctttggcaatgtcctccttttaccatgagccttggctcttctccaaaaatat

SEQ ID NO: 208294 - DNA, 578 bp, Glycine max
gcttctccttcttttgggaaaagattaacaataaaagtgtggagtactgttgatagcaaagatgtttgggatcttcgacaaggggcaaaagataaaggggacagtggtgttgatgccaaagaatgtgttggacttcaacgccataacctccatcggtaaaggtggtgttattgacacagccaccggcatcttaggccaaggcgtcagcttagttggtggagtaattgatactgccacttccttcttaggccgtaatatctccatgcaattgatcagtgctactcagactgatggcagtggaaatgggaaagttggaaaagaagtctatttggaaaaacatcttccgaccttgccaacgttgggagcaaggcaggatgcgttcagtattttctttgaatgggatgctagttttggaattccaggagcattttacatcaaaaactttatgactgatgagtttttcctcgtcagtgttaaactcgaggacattccaaaccatggaaccattgaatctgtttgcatctcatgggtttacaactttcaggagtacaaaaagaatcgcattttctttgcaatga

SEQ ID NO: 208295 - DNA, 518 bp, Glycine max
acaaagtgaaagtgagaacacactttattatatgaaaaccgagagcatccaaatacaatagtgcagaagttcaggcaataattacgcatagacatgcataaagtctatgttattcagaagtacaacatagataaggaaaccacaaactctttttaattagatagagatactgttgggaattcctttgaaagtcaacccttcctcacttgaacgatggagcaaagtgtatggcagctgaactggcccagtccggtttctcagacttggatcactgttccttgcattgatttttccttcaattccagtcagtttgcttccaaaccttttgaaagcttctaatgccttcttatcagtagtccaatttggagtctccctctctccaaggtatatctcatcagaagcatgccttgacaatatctctatcactgaaagatcaataagggtctcaaacttgggtgtgattgttctcagataagccttttgaggattcttcaccatctcatcatactctggggttc

SEQ ID NO: 208296 - DNA, 341 bp, Glycine max
tccatgttcatatggcactggaaaactccacaaggagggaactaaggcagaggaaacttagaggaggaggcaaatgtcaagcctccaaccccattgacgcttgctggagatgcaataaagactgggccaatgaccggttcaggctagccaagtgcggcaaagggttcggaagacgggccaccggcgggctcggtggtcccatctatgtcgtcaccgataattccgatgacgacatggtgaaccctaagccgggaactatccgtcacgctgtcacccaaaaaggccccttgtggatcatcttcggacacagcatgatcatcagtttgaggcaagagctgatg

SEQ ID NO: 208297 - DNA, 495 bp, Glycine max
cgattaattatggaaaggtagctaggcattaatctgcgttaaaaacagaatccattaatagaaaaataattgtccaacttcaactagctcaaacactcgagtctccaaaaacaggagaagatctacacccctgaagcaaataatcttttccttttcttaaaaggaagaaaaaagaaaatcctgaaaacagagtgcacctaaaatgaaactaagcccaaaatttatctggggggatgatgatactaaacagggcgccactttaaaataaagattcaaccatttcaagtttctcgccttggcctccgacgcgcagcattagatgcttcctctttctggttctccttctctttggttccttcattctctccactaccttggttattggaagcttctgtgcgttctggtttcttctccacctttgcaggtttcttgccaccaaatatgagtctgaagaaaattgacacgaagacaaccagaacagctacaagaattcca

SEQ ID NO: 208298 - DNA, 289 bp, Glycine max
aacaacctaaacaaaggggatgttgcccgcaaagaagacgtggaaagggtcctccgcggttccgactgcgtattccaccttgcggccttcggaatgtcaggcaaagagatgctccaatttggtcgcattgatgaagtcaacataaatgggacttgccatgttatcgatgcttgcctccacctcggcatcaaaaggcttgtctactgtagcacaaacaatgttgtctttggcggtcaacagatcatcaacgggaatgagacattgccctatttcccaattgatcaccatg

SEQ ID NO: 208299 - DNA, 474 bp, Glycine max
tagtcggcggccgccctttttttttttttttttttttttcaggaatgacccaataacagtcgttatgatttgtatatatcagaataacaaaatatacataaactgtaatttttgtttttttaccggccacaatgataagattttatttctatcataattctatgtgttttggaaacacattgggcaccaatacagaataatcaaaagggggcttaatttatccctctctcttttcaagccttctccttagatggaactgttccatctgttcctgcaagcattgcatatttgctcttcctagtcaaattggtgcactcaaatcccaaagtccctgcaagaaccctttgaatgtagtttgcaacttcgatcgctgatttccctccactgcatgtgagctccttgggaagctggttcaagaaagtgatctcatatgttggcataggattcatgaacacaaagtaggggtccaacaac

SEQ ID NO: 208300 - DNA, 446 bp, Glycine max
accatcaaaacaaaaaacagtactcatcaaaaacaaacagcaacgaaaatgttaccgccgatcaagaacccagttttgaaggctacggctacatgaaatcggcggacacttcaaaatataactggtaaaacaaacacctaagactctgcaaagataaactactgtaaaggaacaagtttttttgaaaccacgttgatgatcacatgtgctagcaaaattgccaaaatgcaatcacttcttcttggcggcagcctttgtgaccttggctccggtggggtctttcttctcaacactcttgatgactccaacagctacggtctgacgcatgtccctcacagcaaaacgaccaaggggaggatactcagagaaagtttcaaccaccatgggcttggttggaaccatcttaaccataccagcatcaccattcttcaaaaatttgggctcct

SEQ ID NO: 208301 - DNA, 334 bp, Glycine max
cctaataagaaaacaaataattccaattcatatatgaacatttttgcctccttatttcttgaaaatgtggaattggaattccccgaggaattccgatctcatttcctttggcttcaggataggcctaataagaaaacaaataattccaattcatatatgaacatttttgcctccttatttcttgaaaatgtggaattggaattccccgaggaattccgatctcatttcctttggcttcaggataggcctaataagaaaacaaataattccaattcatatatgaacatttttgcctccttatttcttgaaaatgtggaattggaattccccgagg

SEQ ID NO: 208302 - DNA, 465 bp, Glycine max
cgcgctttagagtacctacatgaagtttgttcaccatctgttgttcataagaatataaagtcggccaacatattgcttgatacagattttaatcctcatctttctgacagtggattggcaagctatattccaaatgcaaaccaggtattaaacaataatgctggatctggatatgaagctcccgaagttggtttgtctggtcattatactcttaagagtgatgtttatagcttcggagttgtcatgttggaacttcttagtggacggaaaccgtttgatagctcaaggccgaggtctgagcaggcgttggttcgatgggcaacacctcaactccatgatatcgatgctttggctaaaatggttgatcctgcattggaaggactataccctgtgaagtccctttctcgatttgcggatgttattgctctatgcgttcaggcggagccggaattccgaccacctatg

SEQ ID NO: 208303 - DNA, 269 bp, Glycine max
gggacctaggaggtcagcctggtcttcgctcaatctgggagaaatattatgaagaggcacatgctgtaatatttgttgttgatgcttcttgtccgtcacgctttgaagatgcgaagtcagcactggaaaaggtgcttctgcatgaggatctacaaggagcccctcttttgatattagctaacaagcaggatattcctgaagcagtatcagctgatgagcttgctcgatatttggatttaatgaagctggatgaaagagtttccatgttt

SEQ ID NO: 208304 - DNA, 506 bp, Glycine max
gaggcagcaaccacgcgtctgtaaattgctattcaagcattgaacattaaagtagaaatttcattgttttatctaacttcatttaccataccagttcccctaataaaacatgaacacataaactgaaattaatgcctacttttgtggcgaaccaatataccaacaaggtgcttaatatttgttttttctgctgctatgctcatcaagccaagatataatatcaccaagcacgtgaaatatagtttcatcaggttcaccttcaagtagagtatggaaagcatccttatagaggcagagtttcttgtccttcactttagctttctcatacaaagccttactagctgatggatcagtaattatatcagcctctccatgcatgatcaacaatggcagagaaacctagcaattgaaattcttcagtggatttcattgacacacggaaaattccaccagaaacatgtgcaatagctcaagaaagtgttaccttaaaataacatgtgcaatag

SEQ ID NO: 208305 - DNA, 476 bp, Glycine max
attccttcaccacctcagccgagcgggaaattgtaagggatgtgaaagaaaagctttcttacattgcccttgactacgagcaagaactggagacagccaggaccagctcgtctgtggagaagagctatgagttgcctgatgggcaggtcatcaccattggcgatgagcgtttcagatgtccagaggttctgttccaaccatccatgattggaatggaagcttcaggcattcacgagacaacatacaactccataatgaagtgcgatgttgatatcaggaaggacctctatggtaacattgttctttcaggaggaacaaccatgttccctggtattgctgacagaatgagcaaggaaatttcggcattggcacccagcagcatgaagatcaaggttgtagcaccacctgagaagaaatacagtgtcttgatcggtggttctatcttggcatctcttagcaccttccagcagatgtgg

SEQ ID NO: 208306 - DNA, 480 bp, Glycine max
ttttttttttttttttttttttttttttttttttttttttttttttttttttttttttttttttttttttttttttttttttttttttttttttttttttttttttttttttttttttttttttttttttttttattttttaaaaaacagatatccacaaaaaacaaaaaaaaaaaaaagggggaccaaaagaaagaaaaaaaaaaaaaaaaaataaaaaaaaaaaaagccccccaaaaccaaagggggaaaaaaaaaaaaaaaaaaaccccggggggggattttataaacaaaaccaaaaaaaaaaaacccccacacccccaaaattttttaatgaaaaaaagacactattacccccccacccttttgaaaaggggctaaaatattacaaaaaaaaatccccccccaaaaaaggggggaaaaaaaaaaatacccccataagggggggaaaaaaaaaaattttccccccacggagttttt

SEQ ID NO: 208307 - DNA, 421 bp, Glycine max
cccccccccaaggaacaggacaatttaatattttattattaacccccaaaaccggcttttttttgttcaagacgggaaaaaccccttaaattttgggctttgcaccaaccggaaaacggggggagggaataaaaaaaaacatggaacacccctggccggttgggggccccacccaacaggggcccaccctttgtcccaatcaagggggaaaaggggggggggcccaatccctcctaaaaaaggcttaactgttcttttccttccaagggggaaaaacctgcgggttttgctcagggcttccaaaaaaggggggggtctgcaatcagggaaaaaaccccgtgggggcccatgggggaagggggcctttggcccaaaaaaaaacccttcccgggtttctggggggcccccccaaccctaaaaa

SEQ ID NO: 208308 - DNA, 582 bp, Glycine max
cttgtttctttcgtttctttgttgctctttctctagctagctaagtccgttcgtgatcgaaaagagaaaaagatcatggaagaaagtctagtaaaaaaacatgaagaagatagagtagtaagatggggtgtttatagtgaagaactgagaaggatctgtgaaatagcagggcctatggtggcagtggtttcttcccaatatttgctgcaagttgcgtcaaccatgatagttggtcatttaggtgaactctatctatgtagcgcagacttagccatttccctatcaggggtcactggtttcagtcttcatatgggaatggctagtggactggaaacaatttgtggacaggcttatggagctcaacaatatcaaagaattggaatgcaaacatacactgctatattctctctcatattggtttctattcccgtgtgtatcctttggatcaacatggaaagcatactagttctcataggccaggaccctctaatttcgcatgaagcatggaagttcacaatttggctagtttcagcactttttgcatatgcaattcttcagccggtagttcgatatttccaagtc

SEQ ID NO: 208309 - DNA, 413 bp, Glycine max
gggacagctaaaaattgtgtgtttaaactaggtgacagggtaaaatatagttcatcttctgggggcttgtatcagcttcagacaatttcttcaaagggtccagctaatggaagtcgggggaaggttgtcttactttttgatgataatcccttgtcaaagattggcgtaagatttgataaacccatacctgatggagttgatcttggaggtttgtgtgagggtggtcaaggatttttctgcaatgtcaccgatcttcgattggaaaacagtggcattgaagaacttgacagattacttattaatacattgtttgaggttgtggttagtgagagcagaaatgcacctttcattttgttcatgaaagatgcagagaagtctatagtaggaaatggagatccattttcatttaaaag

SEQ ID NO: 208310 - DNA, 599 bp, Glycine max
  unsure (1)..(599): unsure at all n locations
tttcattccaaaatcttcatattcatcaaactcatcaaaatgaatctgtaccactcctccaccaccaccaccaccaccaccatcttcaccgtcatattcctcctccttgcaatattattcactctcacaccccacaaggccaacggtgccacgtgtcaccctgaggaagaagcgggcctgttgggcttcaaatccggtatccgatccgacccgttcggcctgctcagttactggatatcgggtacggactgctgcacatggaccggagtagaatgccactataacagcacccgggtccaaagatcattcttaacgggtcaaaaacccgaaaccatcttatcgggtaccatcttacccaccctctcaaaactcaaactactcgatggactctacctcataaacctcatcaacatttcgggtcccttcccaaattttcttttccaacttccaaatctccaatttatctatctagaaaacatcaatctctcgggtcgaatacccgataacatcggtaaccttacccgactagatgtactcagtttaactggtaaccggctcatcngacccgtaccgagctcaataacccaggtgactcagct

SEQ ID NO: 208311 - DNA, 483 bp, Glycine max
gaggcgaagaagatgggtgtgcagatggagtgaggcttgttcagcttctaatagcatgtgcggaagcggtggcttgtcgtgacaaatcacacgcttccatattactatccgaacttaaagcgaatgctttagtgttcggatcctcattccaaagagttgcttcctgtttcgtccaaggcctgatcgagaggctcaatctgattcagcccatcgggcctgctggccccatgatgccctccatgatgaacatcatggacgtggcctcagacgaaatggaggaagcattcaggttggtttatgaactgtgtccgcacatccagttcggacactatttggctaattccacaatattggaagcctttgagggtgagagttttgtccatgtcgtggacctaggcatgagcctgggtctacgacacggacaccaatggagaggtctgatccagaatcttgccggtcgtgtaagcggcgaacgtgttcgtc

SEQ ID NO: 208312 - DNA, 530 bp, Glycine max
ctgaaaccaaagccacaagctgcgacatcagaaagacattggcgagaatggaagacagtattgaccacttggctttcgagaggaacaaggcgcagttcgatgttgacgagatgaagatcgtttgggcgggttctcgtcaagactttgagctttccgatcggatttctcgccttgttgccagcgatccggccttcagaaaggatgacagaaccacgcttggtaggaaggagttgtttaaaaacaccttgagaaaagcagcttatgcatggaaaaggatcaacgagctccgtcttaatgaacaggaagcttataagctcagatcctttgtggatcaacctgcttttacggatcttcattggggaatgtttgtgcctgctatccaaggacaaggcactgacgaacagcagcagaagtggttgcctctagcttataggatgcaaataatcggttgctatgcccaaactgaacttggtcatgggtccaatgttcaagggctagaaacaactgcaacatttgatcccaaaacagac

SEQ ID NO: 208313 - DNA, 512 bp, Glycine max
agacatcaagtatcgttaatgtaataaataaatgagtttgttccagttccagttccagatacacctaattgcgatggtaattactagctggcaaacacaactttattaagagttgtaaatcagaatagtctgggtaaatttcttagatgccaaaagcatcattgccacaaaattaactacagcctagcattacgtagttgctgcttaagcatcggttgaatatactctttaaagccatcaggaacaactgaatcattcaaaggatccttccatgcctcctcgtacaacttcggatacacatttccatcgtaacgtccaagaattgaaccaaggtagtgatcagtgtagttaaatgcatcaacaagcgcaattgcattaggacgaacctgtgaatacaagtttctcagctgctcactggcaagtgatccttggtttgggttaatgcagccagtggaaagaaaatcacccagatgcttatgaagtagaaaccaagcataaatgctgcaaagaac

SEQ ID NO: 208314 - DNA, 538 bp, Glycine max
  unsure (1)..(538): unsure at all n locations
gaaaacaatttcgttaagatgtttaacggagaaaaacgatcctcaatttacagatttttctctccagtttctatcctaaaacagtatacgagggcaacagcaccaaggaagactggggatagctcagaaaagcagtgcaaatagaacaaacgagttccttccaatgccaaccacagctatttccttcatataagccggccaatatatcccaactagcctaacaagaatctgaacacatcgcttaaagaaataatcccttccacacgcttgctgccagcctccacagccacaagtctcctaaccccaggattagccaaccgctccatcactttgtaaagcgaatcagatctcaaacacatgtgacatctgtgaccattgtaaagcccataaggagaagttgcatcttgtcccaaaagcaatgcctggtgaatactaatttcatcgagagatatcctagcataagctntatctttagccaatgcagtaatatcacttcttggataaatgtcaagtaacgaatcattattatccacaatcg

SEQ ID NO: 208315 - DNA, 566 bp, Glycine max
aacaccatcatctacaacgcctcgatccacacagttctactctacgctctaaaccctctctctctctctctctcgatctatcatggctttgcccaatcagcaaaccgtggattaccctagtttcaaactcgtcatcgtcggtgacggcggtacaggaaagacaacgttcgtgaaaaggcatcttaccggtgaattcgagaaaaaatacgaaccgaccattggagtggaggttcacccattggatttcttcacaaactgcggaaagattcgcttctactgttgggatactgctggacaagagaagtttggtggcctcagagatggatattatatccatgggcaatgtgcgattataatgtttgatgttactgcccgtctaacatacaaaaatgtccctacctggcaccgggatctttgccgggtctgtgaaaacatcccaattggtctttgtggtaacaaggttgatgtcaagaacaggcaagtgaaggcatagcatgttaccttcccaggaagaggaattgcagtattatgagatttagcgaaagcaactacatttcgagagcctt

SEQ ID NO: 208316 - DNA, 402 bp, Glycine max
  unsure (1)..(402): unsure at all n locations
tgtgaatcaagaaccgctctgctatggctgctctgcaatacttggaatcgctgcgtaattcgcaccctgagctctccgattggtacaattcgctggcggatctgtaccagaagaagctctggcaccagctcactctcaagctcgagcagtttgtggctctcgccgtcttccaggctggtgatgctttaatacaattatatcacaatttcatcacagactttgagacgaaaatcaaccttctcaagcttgcacattttgctgatatagtttctcggcagtattctgaaaaagaagctgctgttggttatcttggaggggtcattcagaaacttcaagacactagggagcagcgcatagaagaacctattctttacattaagatgcaaatagcantattcaagc

SEQ ID NO: 208317 - DNA, 301 bp, Glycine max
gtgctgaggtagttaaccaagtcataaaagaggttggagggaagattactcggcaaccagggccaattcctggccttaatacaaaaaccacttcgtttttagatccagatggatggaaaactgtcttggttgacaacgttgatttcttggaagaactgaagtgaagagcaagctttatatgaaataagtagtcctgctgcttttgtatgaataagttgtctcgcattttatcattgtgcgttttgtatcagtaccagtcatcaacttgttttcttgcttttatgggttcttttgttgactt

SEQ ID NO: 208318 - DNA, 470 bp, Glycine max
ctaaaaaaaatctaaagcttcgctaacttgtacatttcccaacgtactcacgggaaagcttacacaggctgacatgcacacagaaccacacatgcaatagacaaagaaaaacagagaaaataattaaaaagatgctatggcaatattgcatgactttgaatacaaggcagatcagaaaattatgtagtttgaacaagtataccaatattggccctcatagagtcataggacaattatgttgtccttggcctttgggtatacaacaacttgatgaaagagaaacgaaagaccattccttcactacatcgatcttctcaacttgtttttattcatgcatgagttatgcaattccataataattaattatatattaactaactatctgcacacttgaatccatctggtggggtcttgcccagtcaatgagaagctgaagagcaatggggatgatgatatgatgtaagaatctt

SEQ ID NO: 208319 - DNA, 333 bp, Glycine max
cccaattcttccccctccacccacccagcatatctctctattcctatttattagcacccctcacattaccttgtgtcaccaactactttgactcctttaccataccattacaataattatcaaacctaaccagtaaaaatggtgaccgtggaggaaatccgcaacgctcagcgttcccatggacccgccaccatcttggccttcggcaccgccacgccgtccaactgcgtctcccaagccgattaccctgactactacttccgcattaccaacagcgaacacatgactgatctcaaagaaaagttcaagcccatgtgtgaaaagtccatgata

SEQ ID NO: 208320 - DNA, 557 bp, Glycine max
gcctcttcgggtgttctgcgtttttgcgaatccgatttggcctcaattccgccattcctttttggattcgtctttttttttcttcttcttctttttcatggaccgcagagtctatcaccatcgtcctgctcctccggcacatgcttctccccctgaatactttgtcctccaggggaacacaacttataaagacgatctatatttaaggaagaggacagggatgcgtcggtggctttgttgcacatgtcaggtggaagagtcttacccatcaaatgaaaatgagcacctgaaaagcccaaggaattatggagatggaaatcaaaaaggctcaaaggtgtcagctcctgtcaagcctgaaacacaaaaggcacctccacctattgaagctccagccttatctttagatgagctgaaggagaagacagacaactttggttcaaaggcattaataggtgaaagatcgtatggaagggtgtattatgcaaccttaaacaatggaaaagcagtggctgtgaaaaagcttgatgtttcatctgaaccttgatcaaataatgagt

SEQ ID NO: 208321 - DNA, 566 bp, Glycine max
  unsure (1)..(566): unsure at all n locations
gtggtaagtaaatagtagtaacctaacccttgcgtttgcgagtgaggctgaggttgggtttggaaggcaaaggctggtgttgtcccaatccaagagagaagtaaagtaaagcaaaggaatggcgaacatagacatcgaagggatcttgaagcagcagcctgatgatgggcgcgttccgaagacgaaaatagtgtgtactttgggccccgcttctcgatccgtggaaatgactgagaagcttcttagggctgggatgaacgttgctcgtttcaatttctctcatggcacccacgactatcatcaggaaaccctcaacaatctcaagactgctatgcacaacactggtatactctgtgccgtcatgcttgacactaagggacctgagattcggactggttttctgaaagatggaaaacctattcaacttaaggaaggacaagaaatcaccataactactgattatgacattaagggggatcaggagatgatatccatgagttacaagaagctgcctgtccacttgaagcctgnaaacaccatattgtgctctgatgggacgattactc

SEQ ID NO: 208322 - DNA, 464 bp, Glycine max
  unsure (1)..(464): unsure at all n locations
gaaagaattcgagctttctcatttggaaacatgtgaagtctgtaccggtactggagcaaagataggctccaagatgagagtatgttcaacttgtggtgggaggggtcaggtgatgaggactgaacaaacaccttttgggttgttctcacaggtttcagtatgtccaaactgtggaggggatggtgaagtcatatctgaatattgccgtaaatgcaacggtgaaggacgaatacgggttaagaaaaatattaaagttaaagttcctcctggtgttagctcaggcagtattctaagagttacaggggagggtgatgctggaccaagagggggtcctccaggagatctttacgtatatcttgatgtgcaagagatacctggaattcanagagatgacattaatctcgtctcaatgttatcaatcagttatctagatgctataccgggggctgttgtgaaggtaaaga

SEQ ID NO: 208323 - DNA, 557 bp, Glycine max
ctataatgcctctagtactgactttaatgtttggaaagatctttgaacatttttcatattttttttgtttctaaatctgaaatgtatctgagcctcaaaaaatacttgctctacctctgccactttctgagtacaatacaacactgccatggctgcctcagtctccactattggagctgtcaacagagctccactgagcttgaacagctctgaagctggagattcggttcccagttcagccttctttggcacaagcttgaagaaggttactgcctcaagggtccctaacgtcaagatttcttctggaagtttcaaaatcgttgcggcggagaaagagattgatgagcaacaacagacaaacaaggacagatggaaaggtcttgcctatgatatttcagatgaccagcaagacatcacaagaggaaagggtatggctgattccctcttccaagctccacaggagactggaactcactatgcagtcatgagctcttttgagtaccttagcactggacttaaacagtataacttgggataacaacatggacggtttttac

SEQ ID NO: 208324 - DNA, 463 bp, Glycine max
gtagtaaaacaccttctattatttgaagccacaaagttcagcagaaccacaatgaacaccaggaaatattaattgattatctcaagtgttttttttagtagtgagacaatgtaactcaaaattataaaggataacaatccaatatgaacaagataaattatttgattatatcaagtcatagcttctcttcaagtggagaatgcttaggttctcagggtgtgtataagcaggttccatcatcacttcttgcagttgggtcgaagtttgaggcatttggatcagtacaaccttcaggaacgggaatttttacttgctgggctgctttgccatagaaagttcctcttttgatggcatcctgattagcatcaccaagagcagcctcgttcaagtacttgtctgccagttgtactctcttcacattctcttgttcttggacaagcatgttaccatactccaagagctt

SEQ ID NO: 208325 - DNA, 493 bp, Glycine max
gttctttgtctcgcaatcttcactattttcaccgagcatttgcattccacattgaatatggctgaggctacacaatctaatgctgagttattggagtggcctaagaaagataagcgccgcttcctgcatgttgtgtatcgtgttggtgatcttgatcgcaccattaagttttatactgaatgttttgggatgaagcttttgaggaaaagagatattccagaagagaaatatgccaatgcttttcttggatttggccctgaacaatcccattttgttgtggaattaacatataattatggggtgacctcatatgatattggaactggctttggacattttgctatcgcaactccagatgtttacaaattggttgaagacatccgggctaaaggtggaaatatcaccagggagccgggtccagttaagggtgggaagtctgctattgccttcgtgaaggatcctgatgggtatgcttttgagctcatcaaagatc

SEQ ID NO: 208326 - DNA, 412 bp, Glycine max
accaaatatattgaagtactgttggatatcactgtagactgtctagaatctcaaccaaacaggcaaacacatcagagaaaccatactgaacactactacttcactgataaacacgagctgatcacttattcatataatagcattagtactatgaaaagccagaactctttactccagctccttcagaaaatcttgattgtcaaccaaaacagttttccatccatcaggatctaagaaagaagtgatctttgtgttaaggccaggaactggtcctggttgccgagtaatcttccctccaagctcttgtgtgactatgttgacaacctcagcactcttgtatacatcatcagtaccaatagcaacctgtgcataagcatttcccttggtgtattcagtgacaccataagtatat

SEQ ID NO: 208327 - DNA, 469 bp, Glycine max
cttgtaccattggtgtgattcgaattcacagggatactgcaactcggaggacgaaatcagctagcattgggacaactgcagagattcgacaatttgggcgtctgggggatggttctctgaatgtggttacccgtggacaacaacgatttcgcctaagacggtcctggactgatgtggaaggagtgccttatggagagattcaagttattgaggaagatctgccactcagaattccaagggatgcttttggcaaatcagcaccattgagtaatatgccctgtagccaaggtgtctcacataatttgtctccaaagtattcccatgttaacatgcaaaggtcaaaaaatgaggaaaatgattcagaaccaaattcagaagagagttttgagagtgagctctcactgatgggaaggaaaatccatctattcagttgtggctccaagtatgtgcatgatactatggatgaatc

SEQ ID NO: 208328 - DNA, 446 bp, Glycine max
catcctcatccaccttcgttagatttccccctcaacattttttgtttttctctccatcccaattatcgccacctcctctttcttcaaatttcaatctcagaggatgggtggtgaggaattgtgtttgatggagaactcagggaaagggaagaggctgtggaagaaggtgaagtaccagctggtggagtaccactccttgcccggttatttgagagacaacgagtacattctcggtcactatcgatccgaatggcccatcaggcaggttttgttgagcgcattcaccatccacaacgaaactctcaacgtttggacgcatttgatcgggttcttcatatttctggcattgaccatatacactgccatgaatcttaattcgctacagcagtttcctgacatgctcaagaaggccgacctgcacaaattacaatcagaaatcttgacgt

SEQ ID NO: 208329 - DNA, 499 bp, Glycine max
aatgtcttggaaacatgcatttatcataacagttactatacctagagcttaacagtaagagtaaccttgtttgaacgaaaagtgggaaggtgacagtctccataaggaagatgaaattcacaattcatatgtataaatcagcaaaccttgcaaggaaattaagcacaaatttcaggtcaagtcagcagctttcgtgcaatagtaaagtcctgatcaacttcctttctggatgcttcccaaagtcgatgttcaatccccaatttcctcagttcagaaagtccctgctcagcatcaacggcatcatgtgaggtaggtgaatgcccactccgaccaatccaaaaccgaagacgttctttggcaatgtcctactctataccatgagccttggctcttctgcaaaatatgtcagccaagccttcttgaaaagaacatcctcagattcctctggactcaattcaaatgcttgcataaacctagggtccccaggtgatttaatatc

SEQ ID NO: 208330 - DNA, 490 bp, Glycine max
actagtcggcggccgccctttttttttttttttttttttttttttttttttttttttttaaaaggggcaaaacaaaagtcataaagtagcattaacaaacaaaacccacagcaagcaaattagaaagaaagaaaatccgaaaaaatttgacttgaggccaccacaccttgcaagatagacatatataacacaccgcatggcatatacaaagggttttctgatgcagccatgggttagtactcgacctcggcctcgtggtcattgacggcggtggcattttgatactggtgatactcggccaccaaggcattcaagttgctctcagcctaagtaaactccatctcatccattcccttgccagtgtaccaatgcaagaaggcctttcttttgaacatgaccgtgaactgctcggagacgcggtgaaacatctgctgaatggaggtggaatcccccatgaagggggaggacatggacaaacccgtgggaggga

SEQ ID NO: 208331 - DNA, 489 bp, Glycine max
  unsure (1)..(489): unsure at all n locations
atttgctttttgttttatttcattgcaaccatgtttggctatgcagcagcaataattgcagcaatcctcttcttccaatacttcttccataggagacgatgttgcaaacaccccattttgacagaataccctatcattggcatgctaccacaattactcttcaatttatggcgtgcccatgattattcaactcaggtgttgcaacgacatggtggcactggtgagttcattggaccttggtttaccaacatggactatttggtcacttgcgaccccatcaacgtccaccacatgctgagcaagaatttccacaactacgtcaagggacccgagtttcgtcacatttttcaggccttcggagacgggattttcgccgctgattctgaagcatggaagtacagcagggatctcttccattctctcttaaacagaaaagcttcgaggtttttgtagcgaanaccattcacaacaaggtgcataatggtcttc

SEQ ID NO: 208332 - DNA, 480 bp, Glycine max
atcaaagacgccccataaggggccagatttattcagttgcccgcttatcttgattcccttattttgccacaatcaaacacacaagtgagaatgctttaacagtttgagacttgggaaagtccaaatgaactaccaagtaagaatacaattatataacggaaattacagcctgggcatttgccttcaactacacaataacttggacttttaaaatatttaatatcattcttttgtgacagccaccttcgccttcgcctcagaggaataatcatgccgcaatttgcgtgaaagttggtataagcctgtccctgccattgcaatgtttacactaaacaggttccaattttttggggtgattacagtgctgtaacgagaccagataattccagtagctgtgaccgctatttgctgaggataggaaagtttctcgggtggttttgagaaatcagcaatgttggcaatgctgatgccccaattaaa

SEQ ID NO: 208333 - DNA, 438 bp, Glycine max
  unsure (1)..(438): unsure at all n locations
gagagacgcttcgcaaatctcaatcgaatctcagaaaaatgagagaaatcatcagcattcacataggtcaggccgggatccaggtcggaaactcctgctgggaactctactgcctcgaacatggcatccagcccgacggcatgatgccttctgactccaccttcggtgtagcccacgacgccttcaacaccttcttcagcgaaaccggatctggcaagcacgtcccccgtgctgtcttcgtcgacctcgaacccaccgtcatcgacgaggtccgctgcggcacctaccgtcaactcttccaccccgaacaactcatctccggcaaggaagacgccgncaacaacttcgcccgcggccactacaccgttggcaaagagatcgtagatctgtgcttggatcgcgtncgcaagctcgccgacaactgcaccggcctacaag

SEQ ID NO: 208334 - DNA, 442 bp, Glycine max
caccaattctccaccctctcattgaaaaaaaaacaaccaaacaaaaaaaatcaatcattttattttatttttctacgaaaatggttgatttacattggaaatcaaagatgcctagttccaaaacaccaaaactctctctctccgacaacaagtccttaccctctttgcaactacccttccggaccacagatatctctgccgccgctccttccgtttgcgccgattacgactactatctccgtcttcctcaactcagaaagctttggaactccacttgatttcctaatttggacaaccgaaccggtcttaaacccattttggcaagcttttgaaatcacggtccggtttctttccattgatctctccgatcccagaccttactccaaccacagagaatggactcgccggatagagtctctcatcatgcatcaaattgaaatca

SEQ ID NO: 208335 - DNA, 556 bp, Glycine max
  unsure (1)..(556): unsure at all n locations
atgagggtaaccaatatgagttaagtgacacaaagtacacagaagaagaatacaacaacaacaacaacaagtatcacaattcctatcagaacaacaaccagaagtactacaacaacgatgctgccaatggcatatactcctacaacaacaacaacaacaattacaatgctaacaataacaggtacaatacttacaacaacaacaatgccgttaacgggtacaatggtgagaggcaaggaatgagtgacacaaggtttttggagggtggaaaatactttcatgacgttgccgccgagaagtacaatccaacaaactatggtgactcatcaagggaagtgaacactaacaactggtacaacaacagaggtggcaactacaacgggaaccagaaccagcaggagtttgaagatgaacatgagaacttcgagccatgagcttggatcattggcaaagtaaagagttcactatacttttgagtatccactatgggtgtttaatggttttattgtgctttagattcangaaaacacannagtaaaggatatgttaactatga

SEQ ID NO: 208336 - DNA, 538 bp, Glycine max
ctcagtctctgcgcgtgccgctgaggattgcgaacgagagacctatctcgtatactcgcagagtttaagatatcatgggcaatgaaaaggtatcacatcaacattgtcatgattggacatgtctactttgggaatgtaactaccactgtgaacttgatctacaagcttggaggtactgacaagcgtgtgattgagaggcccgagaaggaggctgccgttatgaacacgaagtcattcaagtatgcctgggtgctcgacaagctcaaagctgagcgtgaaagatgaatcaccattgatatgtgctttgcggaagtttgaaaccaccatgaactactgcacggtcattgatgctcctggacatcgtgactttatcaagaacatgattactggtacagccaagacgacttgggctgtccttattattgactccaccactggtggttttgaagctggtatttctaaggatggacagacccgtgagcatgctcttcttgctttcaccctaggtgtgaagcaaatgatctgttgctgtaacaag

SEQ ID NO: 208337 - DNA, 531 bp, Glycine max
tactcctgatatcagaaaaagaaaaaagaaaaaaatgtctctagtgactgcagagatcaaagccaaagcagaggtgtatcatggagatgaactctgccaagagaagtcaaagttgctgctaaaggaggtagggctacctaatgggcttttgccattgaaggacattgaggaatgtgggtatgagagggatagtgggtttgtgtggctgaagcagaagaagagcacaaaccacaagtttgagaagattgggaagctggtttcctatgctcctgagatcactgcctatgttgaggttggtaagatcaaaaagctcactggtgtgaaaaccaaggagctcttggtttggatcacactcagtgagatctttgttgatgatcctcccactggcaagatcactttcaagactccttcggggctcttcaggacattccccgtctcggctttcgagattgaagagccagttaaggaagttaaggaaaaggaggaagaacacaaggaagtgaaacaggttaaggaagaactcaggaagtt

SEQ ID NO: 208338 - DNA, 497 bp, Glycine max
agtaattaatattagtatttattatttatatacaacacgtgagactcccaatctctaagcatggacactaaaagggtaagaaactctaaatctaaaccacttaatccctacaacaccacacttaaaccgtggtagagagctcaatttggttcccttctgaattgctatcccctttgtcatggacctgaattggcttgtaggtgtacaatttggcacaaaccaagtagtaaataagattgagaaactgcaatatggtgataagccagtaaaagtactccaacttccctttgttgaggttgttgtcagggagccaatttgacccattagacccagcactgaacttgtggaccaaagtaaccataatggtactcacatagttcccagcagcgatagcagtccaaaataatgccatggcagtgctcctcatactctcaggggcctggtcatagaaaaactccaagtgtccaattgacataaaggcctcagccattccatga

SEQ ID NO: 208339 - DNA, 540 bp, Glycine max
ggcggggctgcggtgcggcgcgtggcgcgtggcgggggaggcgaacaacctgggcggctggaggacgattccggaggaatgcacggagtacgtgaaggagtacatgaccgggaaggggtacgcggtcgacctcgaaatggtctccaaagaggcggaggagttcgcgaggagtgtgcctctcggcggcgacgggaaggacgcgtggattttcgacatcgacgagactctcctctccaatctcccctattatgccgcacacggatacgggcttgaggtctttgaccacgagaagtttaacaattgggtggagaagggtgtagctccagccattgaacccagtttaaagctctatgaagatgttttgaatctgggattcaaggttattctactgacaggacggagtgaaaggcacaggagtgtcactgttgataatttgatcaatgctgggcttaaggaatgggaccagcttatactaagatactcagatgatcaagggaaacgagctgtactctacaaatcagagaagaggagtgagatgga

SEQ ID NO: 208340 - DNA, 437 bp, Glycine max
atgaattatttgcaatgatattcagtatacgaattgatccactttcgttatgtacaattcaaacagcaattatttgcaaatgaatgagacatttactatggaatgtaatacatgggatttggaagcttgaaggaccgaacagatactgaagaacctaataaatcgctccactggtcaccagaatttccaagaatcctgtatccatctttctccatctcactcctcttctctgatttgtagagtacagctcgtttcccttgatcatctgagtttcttagtatgagctggtcccattccttaaacccagcattgatcaaattatcaacagtgacactcctgtgcctttcactccgtcctgtcagtagaataaccttgaatcccagattcaaaacatcttcatagagctttaaactgggttcaatggctggagctacacc

SEQ ID NO: 208341 - DNA, 516 bp, Glycine max
  unsure (1)..(516): unsure at all n locations
aagattttatccaattgaaattttaaaaatgactgggataaacttaagaattcaattattgaaattgaataagtaaacaatttaattggattggtcgaatggtatcaaaaaaatggagtactaactcccatttcttatttattattgaattaaccgatcaacttgctttgttatcgaacatttctttttgatttcaaaaattttccggaaaaaatttgaatctatttttatatgcgaatcaatcctactacttctggtcctgaggtttctgcgcttgaaaaaaaaaatctgggacgtatcgcccaaataattggtccggtactagatgtagcttttcccccaggtaagatgcctaatatttacaacgctctgatagttaagggtcgagatactgttggtcaacaaattaatgtgacttgtgaagtacagcaattattaggaaataatcgaattagagctgtagctatgagtgcgacagaaggtctaatgagaggaatggaagtgatngacacagga

SEQ ID NO: 208342 - DNA, 438 bp, Glycine max
ggataacttgatattattttattacatacatgcatagatagcctgctctcaaataagtcggcaggaacaaagatagagagattcaacgatcttcaaatttcacatttgccagaaatatataacagaaaagaggggtatgggatatgagttaagttttgatcacattcaactacactatcccaaaccgttactcttaagactttgaacttcacttgtactctaggatcatgttgttctcaggagctaatccaacacaagccctcaggatgttttccagcatagctcgctgctttgacaacgcattcaccactggtgtacccggtggaaccagaggggccttggtcaggtaactaaggatggtcgcaactgggtggaatgagtggaattttccctcattttcagctttaaactcgattcgagtgctgagctcagcaagaa

SEQ ID NO: 208343 - DNA, 424 bp, Glycine max
gctcaatctacatacattataactggcacagacactaacaatgacggaacgataaatgaagcctgtgatgatgcacgatgcctcagggccttgccatcttggcatgctgacagctgcttaagcctctaaagcgctatcgcataccacgctattgaatgcattgctcggcacgcagactcaaagaccctggccatctaaaatatgctcgagcataccgcaaggctacggatagtctgacaccgctacatgcacctggcgagctcgacgcctagactctcagtacataccctgctcatgttatgcatgttatgtcatcatctaagtccaatgagaacttacatctgctgtacgacacctataccactgttcgtacacactcagtatcgtctgacaatgcttatatccagcttggtgcagatcgctc

SEQ ID NO: 208344 - DNA, 501 bp, Glycine max
gtgctggggcacattctcactctcgtttaccaagagcgagatatctatttagatctctgaaaaacagagtttcatttcaattcagtcttattattagggtttgccgattgagagagaaagagaaatgggagaacgaaaaggaatcccaatggctttggggctcttggcgatgatcctcttcttcattgcttcctcttcctctcacctcgttcgcgcttccgatgacgccgacgacgcgatcttctacgagtcgttcgacgaggattttgatggacggtggattgtatccgacaaggaggattacaatggtgtctggaagcatgccaagagtgatgggcatgatgattatggacttcttgttagtgaacaagccaggaaatatgctatagtcaaagaacttgccgagtctgtcagtcttaaggatggaacagttgttcttcagtttgagactcgccttcagaatggcctcgaatgtggtggtgcatatattaaatatcttcg

SEQ ID NO: 208345 - DNA, 412 bp, Glycine max
  unsure (1)..(412): unsure at all n locations
gcgtgctcggtgctgcccaagttctacgccgaagacgtgcacccggagagttggagagtgttcaactctttcgggaagcgttacattgtcacggctagtcctagggtgatggtggagccgtttgttaaggcgtttctcggggctgacaaggtgcttgggactgaacttgaggccaccaaatcggggacgttcactgggtttgttaagaagcctggtgtgcttgttggggagcataagaaagtggctctggtgaaggagtttcagggtaatttacctgacttgggtctaggtgatagtaaaagtgattatgacttcatgtcaatttgcaaggaagggtacatggtgccaagaactaagtgtgaaccactaccaagaaacaagcttttaagtccaattattnttcatgagggta

SEQ ID NO: 208346 - DNA, 297 bp, Glycine max
aacaaatgaacccataaaagcaagaaaacaagttggggactggtgctgatacaaaacgcccaatgataaaatgccagacaacttattcttacaaacgcagcaggacctacttatttcatataaagcttgctctccacattagatcttccaaaaaatcaacggttgtaaccaagacagttttccatccatctggatctaaaaacgaagtggttttttgaataaggccaaaaattggccctggttgccgagaaaacatccctccaacctcttttatgacttggttaactaccttacaac

SEQ ID NO: 208347 - DNA, 393 bp, Glycine max
cctcggggaattccaattccacattttcaagaaataaggaggcaaaaatgttcatatatgaattggaattatttgttttcttattaggcctatcctgaagccaaaggaaatgagatcggaattcctcggggaattccaattccacattttcaagaaataaggaggcaaaaatgttcatatatgaattggaattatttgttttcttattaggcctatcctgaagccaaaggaaatgagatcggaattcctcggggaattccaattccacattttcaagaaataaggaggcaaaaatgttcatatatgaattggaattatttgttttcttattaggcctatcctgaagccaaaggaaatgagatcggaattcctcgggggtaccgagctcgaatt

SEQ ID NO: 208348 - DNA, 272 bp, Glycine max
  unsure (1)..(272): unsure at all n locations
aacatgtacattaatgaatatgattatatataatttaattaattaacaaaattataaacataaattattaatatatgtattattataatttaaataataattaatattataanaaagcggacgttggagtcatttacgggattacgagctaaatagtcggaaggacgacctttattttaattaattaatttttttttttttattattttttaatattaaatgaaaatttattgggggaattttggggtggtaataaaaattaaatatttttt

SEQ ID NO: 208349 - DNA, 604 bp, Glycine max
gattccttgaagatacacaaacagctgatggttcatggtatggaaattggggagtttgcttcacttatggctcttggtttgcacttggaggtctagcagctgctggtaagacttacaccaattgtgctgccattcgcaaagccgttaaatttctacttacaacacaaagagaggacggtggatggggagagagttatctttcaagcccaaaaaagatatatgtacctctagaaggaagccgatcaaatgttgtacatacagcatgggctcttatgggactaattcatgctggacaggcggatagagaccccatgcctcttcaccgtgctgcaaagttgctcattaattctcagttggaagagggtgattggccccaacaggaaatcacgggagtattcatgaaaaattgcatgttgcattatccaatgtacagagatatttatccaatgtgggctctagctgaatatcgaaggcgggttccattgccttccactgaagtttaatttagaatggtttgagcacgaaaaggcaaaggcattttcattaagattgaggcatattaagtgtgtgtaatcaagcttaatcaattttttcatattcctat

SEQ ID NO: 208350 - DNA, 531 bp, Glycine max
agtttagctacttacctcaatctttctcatgggaaagtttgccctagccaatatcctcttggtccttctcttgaacttgagcactttgctcaatgttcttgcttgtccctattgcccttacccttctcccaagcctccaaaaaagcctcccgttgtgaaaccaccggttcacaaaccaccaaaaccatgtccaccacccaagtcatctccaaaaccaccccatgtacaccctccctatgttccaaaacctcctcactaccctaaaccaccagttcatccacatccaccccatgtcccaaaacctcatccaaagcctccagtgcatccccatccaccttatgtcccaaaaccaccagttgtgccagttacaccaccatatgttccaaaaccaccaattgtgaaccctccctatgtcccaaaaccgcctgttgtgccagttacaccaccttatatccctaaaccaccagttgtgacaccaccatatgtccctaaaccaccagtggtgccagttacaccaccatatgtccctaa

SEQ ID NO: 208351 - DNA, 568 bp, Glycine max
tccaaatacaaacatggcaatgaagaagttcttgtgggttgttctgtccctttctttggtccttggagtggccaatagctttgattttcacgacaaggatttggagtccgaggaaagcctgtgggacttgtacgagagatggaggagtcaccacacggtttcgcgaagccttggtgacaagcacaagcggtttaacgtgttcaaagcgaatgtgatgcatgtccataacaccaacaaaatggataagccttacaagctgaaactaaacaagtttgctgacatgaccaaccatgaattcaggagtacctatgctggctcaaaggttaatcaccatagaatgttcagagacatgccacgtgggaacgggaccttcatgtatgagaaggttggtagtgttcctgcttcagtggattggaggaagaaaggtgctgtaactgatgtaaaagatcaaggccattgtggtagttgctgggcgttttcaactgttgtagctgttgaaggcattaaccaaatcaagacgaataagctagtctccttgtctgaacaagagcttgtggactgtgacacc

SEQ ID NO: 208352 - DNA, 534 bp, Glycine max
gtttttcctgcgctagaactgtcggctattcccgggtcgctcgacgagctactagtcgcgccctttttttttttttttttttttttttttttttttttatcttcaaagtgatcaaatcatattgcaatctggactctagttgatctattgctatctatataaatgctttaaagtaaagttatcattttgcatgaaactcttggccatagaaaggagattacatgagaaattgctagcactcaaatcatataaaatatttatttctttgggatgtaataagcataaatatattgatggatacactggcattgaatctgagatactaatagaaaacaacaaccaaagctaattagagtatgattttgtgggaagcattcaaacttcaaagttcatctttaggagatgatgaaggtcctgttggattattggaggagtttttgattgggtaggaagccaacatagctatgccacaaagtccctcctttttagatatgttcctttgcattctgatgtaaccctgttctccccattctg

SEQ ID NO: 208353 - DNA, 601 bp, Glycine max
caactatgatcaagtcactgtcccacaatccaaaaaacgccaattccaccgcattcacaaggcactttgccaaaaaatctggtgtttttatcaagatcatggcttctgctacacccacagcagctcctatcacctttggattcaagaatttgttggaaacattcactgttgatgtgcatagagcagagaacaggccactgaatgtgcccttaatagccccttttaccattgctacctctagattggccaaggtggagaacgtggccataagggttgagttgagcaatggttctgtggggtggggcgaggcaccaattttgccttttgttactgcagaggaccagaccactgccatggccaaggcttctgaggcatgtgccttcttgaggagatgtcctgcactcactttgggttccatgttgggggagattgctggtattcttccagggcatcaatttgcttcagttagggctgggatggagatggcaataattgatgctgttgcaaataggattcgtgtgccattgtggaggctttttggtggggcttcaaataccataaccactgatattacaatcccaattgtttcttcagctgaagc

SEQ ID NO: 208354 - DNA, 530 bp, Glycine max
aggaatcgcaacagcaaaagaaggtggtctcattgtttgtgatacttccaagggtttgctcaaggttacagaagaagatggttttagtgttcttgtttcacacgtaaatggttctcagttaaggtttgcagacgatgtgatagaaggctcaaacgggaatgtatattttagtgttgctagtacaaaatttgatcttcaagattggtatttggatgtgttagaggcaagacctcgtggacaagttctcaagtacaatcccacatcaaatgagactgttattgttcttgataatgttgcatttgccaacggcgttgcactctctaaggacgaagattatcttgtggtttgtgaaacttggaaatacaggtgtttgaggcattggttagaacgagcaaacatatgcacaacagatattttcattgaaaaccttcctggtgcacctgataatatcaatcttgctcccgatggatccttctggatcgctttgatttcagttgacttctgaaggatttgagtttgttcacaacttc

SEQ ID NO: 208355 - DNA, 485 bp, Glycine max
gttcgagacccttattgacatttcagtgatagagatattgtcaaggcatgcttctgatgaggtctaccttggccaaagggataatccaaattggactacggattcaaaggcattggaagctttcaaaatgtttggaaactgactgggatctattgagggacaaatcacacagaggaacaatgatccaagtctgaaaagccgacatgggccagttcagcttccatacacattgctccatcgctcaagtgaggaagggatgagtttcaaaggaatttccaacagtatctccatctaaaatgtgtgtgtggtttgcttatctatcgtgcttctgaataaaatagacaatacttgtctatggttattattggctgtatgtctgtatttggatgctctcgatcggcttgcatgtaataagagtgttttcactgtcactcttgattccgatcatcttaattattgttactagtaataatgtggaagctgta

SEQ ID NO: 208356 - DNA, 450 bp, Glycine max
caaaaacaattgctctattatttaacctagaattaacaaacgtacagcttccacattattactagtaaacataattaagatgatcgaaatacaaagtgacagtgaaaacactcttattacttgcaaaccgatcgagagcatccaaatacagacatacagccaataataaccatagacaagtattgtctattttattcaaaagcacaatagataagcaaaccacacacacattttagatggagatactgttgggaattcctttgaaactcatcccttcctcacttgaacgatggagcaatgtgtatggaagctgaactggcccatgtcggcttttcagacttggatcattgttcctctgtgtgatttttccctcaatttctgccagtttgtttccaaactttttgaaagcttccaatgcctttgaatccgtagtccaattgggattatccc

SEQ ID NO: 208357 - DNA, 472 bp, Glycine max
gtggtgccttatcgctgtggttttcatcgtcttccttctcttatatttcttttttttttttttgtcttcgccgcacgccgaaacaatggccggaaaaggagagggtcctgctatcggaatcgatctcggaaccacctactcttgtgtcggtgtgtggcaacatgaccgagttgaaatcatcgccaacgaccaagggaacagaacgacgccgtcttacgtcggcttcactgataccgagcgtctcatcggtgatgcggctaagaaccaagtcgccatgaaccccatcaacaccgtcttcgatgccaagaggttgattggtcgtagattcagtgactcctctgttcagagtgatatcaaattgtggccttttaaggttattgctggtgctgctgacaagccaatgatcgtggttaactacaagggtgaagagaagcaatttgctgcagaagaaatctcttctatggtgctcatc

SEQ ID NO: 208358 - DNA, 409 bp, Glycine max
aagtaacaatctcattcttgctttattgaggcctgtcatgcgattcacaatgcttcaactgttgaagaatttgagatctcattcccaaggaagggcgatcagtgacgctgatatcctgtactggctgaacttaccaatgaacaacagagttagaacttctcacatctagagcttcgagcagaagagcttgactactgaactcttgacacttgagcttctgagtgctgtctatcctaaggctgtccatctgcacctggtcatcatgggtctacgctatgatgagacgaggttgaacgcctcttatatatacagcgttgcacactagctgcggcgttctatacacgtgatacctcatgatattacggcggttaagcagatgatgatcctcactcttgcggtcagcataatg

SEQ ID NO: 208359 - DNA, 391 bp, Glycine max
gtaaaaagcaagtaacattaagttggattgggatacacaagataattcacattatctgaagtacattgcaataacatatacttcaccaaacacaaatctaaaaactctcaaaagtccacaagtcatccttttctttcatgctcacttgccggggacgaagttggtggcgtaggcccaggcattgttgttgactgggtccgcaaggtgatcagcaaggttctccaatggacccttaccggtgacaatggcctgaacaaagaacccaaacatagagaacatggccaatctcccgttcttgagttccttcaccttaagctcagcaaaagcctctgggtcatcagcaaggcccaatgggtcaaagctgccaccagggtagattgcgtcagtgacc

SEQ ID NO: 208360 - DNA, 387 bp, Glycine max
ggaacaagggcgcataatttattaaagccacgaaagagaaaacaacatagtgaagtctcttacatgacttgttgacacacagctgaaacaacataaagtgaagctagtgcccctatttgaacgcatcttattacatatagatagataggagcaagctagattgccgagcggagatggaactactgaatgtagtacaggggatttggacgctgactggtcctgctttcgcctctgtggcctccgaggagatcgctccattggtctccaatgatcccaacaatgttgtatccctgccttatcagtacctctctcgctgactgatttgtatgaaactgcatttggagtggaaggatcttgtggatccttgagaattaatttttcccatgt

SEQ ID NO: 208361 - DNA, 548 bp, Glycine max
  unsure (1)..(548): unsure at all n locations
cttcatgagacatcacagagtcagtctatcatatcagacttagacaagtacttagaagaaccaatctttccacgcaattccgattttaacatattgaactggtggaaagtccacatgccaaggtacccaattttgtctatgatggcacgtgatgttcttgggactccaatgtcaactctggcgccagaattggcatttagcactgggggcagagtgctagattcttctcgtagttcactaaacccggacacgcgagaggctttgatatgcacccaagattggctccaaaatgaatctggaaatctaaatccatctccaatccattctgctctacctcttctcatcgaatgaagttaattttttcaaggtcttattgaagaagcatcttagaattgtcgaggtctcctttgaagtgatctagcctttgcaaatattctgtgaagatgcatngtatattctagaaataccatgtagattnttaaatattatagatctnctttctataagtggtntaatggactagcacacggctgaatctgatttggaaa

SEQ ID NO: 208362 - DNA, 493 bp, Glycine max
aaaagttaaaacatgcatgattgcatttattattttggtttccattatactaacacaactctctttattaatgacaaatacaaatacattcagccactccaaatacatgacttaagcatacacaactgattaaggaatctggttccttcaatttcacatttatttaaaaccaggaacagtacttaagcaaccatagggtccttagatagagatactgttgggaattcctctgaaagtcaatccctcctcactagaaggatagagcagagtgtaaggcattttagctggcccatagcggtttctcaatgtctcatctttgttcttctctataagcttcttttcaatctcttcaagcttctttccaaacctcttaaatgcctctaatggaccggcatcagaagtccagtagtcaccaccatctctctgcccaaggtagaactcatcagatgcgtgccttgacaagatttctataactgtaaggtcaatgagggtc

SEQ ID NO: 208363 - DNA, 495 bp, Glycine max
ctcaacgttcgtcaaatcggtggaagaaatcccttacaacatctccgtaattcagatcagtaaggttctcccctctgccgcagcggaagcccctgcacccgcacccacccaacaaaacctcaccaacattatgtcaaaacacggttgcaaagtcttcgccgacactctctctgctcaacccgacgctctcaacaccttcaatgacaacctcgacggtggcttaaccgtcttttgccccctcgacgacgcgtttaaagcctttctccccaaattcaaaaacctaacaaaatctggtaaggccgcgcttcttgaattccacgctgttccggtttaccagtccaaagctactctcaaatccaataacggacttcagaacactctcgccactgatggcgccaacaagtttgacttcaccgttcaaaacgacggtgaagatgttactctgaagacgaagcttacaactgccaagatcaccgacactttgattgatgaaca

SEQ ID NO: 208364 - DNA, 561 bp, Glycine max
gcataacatccacatgatttttaattaaaaataaaaaatacacaattttgttgcaggaatgagagggcaacccttgggactataatcttgagaagccacttcggcttccaaaatagtatcccgacttccagagcaaaacacaaggctaataatacaacttgaataacaagatacatgcaggcagaagaaaaatgtttctagtatgtcacgatagaccaaataaaatttttattgctgactagtgacttgtgtgctaagggttctaagtgcgtacataatccctatggctgcataaacatcccctaccggaatcacaaattcacatcagttggaggagtgtatactagcacatacttactagttacataacagcagagtattcaaccactgttcgttcatagatgcatatcaaatcaacaaccttgaaggtcacgccacctgagataaactaaccctgcccgataatgagcgtatgccccagccaccaccaatatatgaaacaattggtgactgtgtccggcaatgtcaaatttcccaggcatccatcgttctggaaatcta

SEQ ID NO: 208365 - DNA, 490 bp, Glycine max
cagtttttcttctgactgggagtggcaacgcaatttcatccactctgcaccttatcagtatggtttaatctcccttttttttttgttgaattaaatgaatgcagatcgtggtgaagctcaaaaaggaagcgctgagacatttttccgaaaagtaaagttctggaaagaagatgctgagggagatgctccacctgtttttaatatagacggtgtgaactacttccacgtaaaggttgctggattgctatttgttgctactactagagtcaatgtctccccttctcttgttttggaacttttacaaagaattgcacgtgtcatcaaagattaccttggtgttctcaatgaagattcctttagaaagaacttcgtgctcgtttatgaattactggatgaagtcattgattttggttatgtgcaaacaacatccactgaggatttgaagtcatatgttttcaatgagccaatagtgattgatgctgcacggatg

SEQ ID NO: 208366 - DNA, 519 bp, Glycine max
gagaaaagagccaaagaaaattgcagtactccaggtgcactctgtgttctacctctgtatgccatgcttcctgcagcagctcaacttcgtgtatttgaagaagtcggggatggagagcgccttgttgttgttgccacaaatgttgctgaaacatctttaacaatcccagggataaagtatgtggttgatactgggagagaaaaggtgaagaattatgatccctctaatggcatggagacatatgaagtacaatggataagtaaggcatctgccgcacagcgtgcaggcagatctggaagaactggacctggacactgttaccgtctctattcttctgcagcctttagtaatgaatttcctgagcactctcctgccgaagttgagaaagtacctgttcatggtgttgtccttctcttgaaatccatgcatattaaaaaggttgcaaacttcccatttcctacttctcttaaagattcttctctgcttgaggctgagaattgctttgaagctcttgaagca

SEQ ID NO: 208367 - DNA, 522 bp, Glycine max
  unsure (1)..(522): unsure at all n locations
agaagtataataaggtaataaagtgtatagtaagaataatgaataaattataataaagtagataagtataagttattaaaaaattatattataattaatttattagaanagatggggttgtagtcttttangggttacgagataaatagtaggaggaagcactttatatttttatatttttttaattttttttaattattgtaaaaataaaaggaaaattattatgggggaatttgggggtgtaaaaaaaagggattataagagggaaaatttatattaaaaaaaaaaaaagggggaaaaagttaaaaaaaaataagaactgtttaaagaaaaaggtaaatataatggtggaagagatatatttgttttgttggggagaagaaaataaaaaatatttttgtatttagatagatgtataaagagggaaaaaaaaataattgttttgataaaaaaaaaaaaatttatttttggggaggggaagcggttaaaaactttttgggaaaggggggtattttatttttc

SEQ ID NO: 208368 - DNA, 547 bp, Glycine max
  unsure (1)..(547): unsure at all n locations
ggtgatttggatgaattgaaccctaggagcaacataacaactgggcttcaagcatcacaagttgacaatagaggtagtggacttaccgttgcagctgagcgagtatctgatgatggatacaactggagaaaatatgggcaaaaacatgttaaaggaagtgaatttccacgcagttattacaaatgtacacatcctaactgtgaagttaagaaactatttgaacgctcccatgatggacaaatcactgagataatttacaagggaacacatgatcatcctaaacctcaaccaaaccgccgttactctgctggaactataatgtctgtgcaagaagacagatctgataaagcttctttgactagccgagatgacaaaggatccaatatgtgtggccaggggtctcacctggctgagcccgacggtaaaccagagttattgcctgtagcaacaaatgatggtgatctagatggtttgggggttttgtcaaacccgaataatgatgaggttgatgatgatgatcccttctcaaagcgaagaanaatggacg

SEQ ID NO: 208369 - DNA, 574 bp, Glycine max
  unsure (1)..(574): unsure at all n locations
gctgaacccgtttcgctttcaatcgaagggaagaacaaacattcaattcatggcagctgcaaagcttcaagctttatggaatcacccagctgggcctaaaaccattcacttctgggcacctacctttaagtggggcatcagcattgccaacattgctgatttctcaaaaccacccgagaaactttcctatcctcagcaaatagcggtcacagctactggaattatctggtctcgttacagcactgtaatcaccccaaaaaattggaacctgtttagtgtaaacattgcaatggcagggacaggcttataccaactctcacgcaaattgcggcatgattattcctctgaggcggaggcggaggtggctgtcacaaaagaatgatattaaatattttaaaagtccaagttattgtgtagttggaggcagatgcccaggctgtaatttccgttatataattgtattcttacttggtagttcatttgtactttcccaagtctcaaactgttaaagcattctcacttggtgtntgatgtggcaaaatagggaatcaagataagcgggcactgaatatat

SEQ ID NO: 208370 - DNA, 418 bp, Glycine max
ctagttcaagatcgcgagcggccgcccttttttttttttttttcccgctcaggatcagtgtcagttatgcagtttttaaccttaaaagccttcttatgccttgagtcaacaagggcaatcagcatccgttgagaatttgatgacaaggatcatggcataaacctcattttccttaataaccttccttgtgattggaggattccctttccatgtctaaggaaaagatgtgcttgatcatgctgtgcatttcgtactgatatgtcaagaacttcattcccaattaatagctgctagctgtcttcataccatttcacatagctatctttgcttttacaattatttttgccatcatgatttataattacttctcaaattttacataatacactatcattatttaaacttttcatttttatta

SEQ ID NO: 208371 - DNA, 583 bp, Glycine max
gtgaagatgtagagaataatgaagcagacaggtttgattggatttgtatgggtcatgaccccccgttgatggaatccaatcaaacctgtctgtgaagatgtagagaataatgaagcagacaccttaaaatcaagtccaaacccagatgaagttgctacatctattagtgttaatgaaacctcttctgtaaagttttctgccaagtccagtttgaagacatcctcaaggcatgatcttgctatggttttcacctgcaaggtctgtgaaacgagatccattaagacggcttgtcgcgaatcgtatgagaaaggtgtagtggtggcaagatgtggggggtgtaataaccttcacctgattgcagatcaccttgggtggtttggtgaaccaggaagcgttgaggacttcctggctgctcgtggagaagaagtgaaaagaggttcagttgacacactgaatcttacattggaagatttagctggaaggaaaccttgaaagatagaatttgaccaagtgtatgttctgcatagggtgtcactgaaaagttggaagtgcaagggaggtaacaataggtggttttggaaac

SEQ ID NO: 208372 - DNA, 553 bp, Glycine max
  unsure (1)..(553): unsure at all n locations
cataaattcctttcttggctaaattttgcacatgaaggtgtatcatggtctaaaaacattcctttggcaggcaccaaaaataattgataaagcaaacagtacattgaatatgttgctttttaatattactagcataattatagacagaagagccgagtttacaaaaccaactattgttacctcccttgcacttccaaactctcagtgacaccctattgcagaacatacacttggtcaaattctatctttcaaggtttccttccagctaaatcttccaatgtaagattcagtgtgtcaactgaacctcttttcacttcttctccacgagcagccaggaagtcctcaacgcttcctggttcaccaaaccacccaaggtgatctgcaatcaggtgaaggttattacaccccccacatcttgccaccactacacctttctcatacgattcgcgacaagccgtcttaatggatctcgtttcacagaccttgcangtgaaaaccatagcangatcatgcctttgagatgtcntcaaactggacttggcagaaaacttta

SEQ ID NO: 208373 - DNA, 577 bp, Glycine max
gcaagccacaaaaaggtcaagggttgctttgctgcaaggctagacaaccttgatgacgatctcatggaggatgatgtcatcacacatgaagagtttttccctacaaaatcaaactccaccctccaatttgaccatggaagctccaatccctcattggcctcttcctccaagagaaaatccaaagtgcatgaatgctccatttgccataggagcttctcttcgggacaagcattggggggacacaaaaggtgccattggatcacttcaaatgctcctgacacctccacattaacaagatttcaacaattccaagagcacttggatcaaatacccaaatttgatacctcttccgagcctcttgatctcaaattagaccttaaccttcctgcaccctctaatgaccttgcaagaaggaatgtgaacacagaattttacttgcagccttgggttgcatcaaaagatgctaaagatgataacaataatagccattgtcaaagtctccataaccctaatacaatgttgatgttgacaatgatgaggacaaaaacaacaacaacaacaactcaatgcataacat

SEQ ID NO: 208374 - DNA, 448 bp, Glycine max
  unsure (1)..(448): unsure at all n locations
ctccacactactacatcactttactttactctaatcactactaactcttctctatcttccatctatcgccaacattccctccgtcttctcattatttactcattctatatccgttatctatccatatatttaatagatatgcggctctatcttnanntnncncnnantcnnnaannntnnnccnnccacaccataccttctatttccagttgacctatgatgtcagcctggtcttcgctcaatctgggagaaatattatgaagaggcacatgctgtaatatttgttgttgatgcttcttgtccgtcacgctttgaagatgcgaagtcagcactggaaaaggtgcttcggcatgaggatctacaaggagcccctcttttgatattagcttacaagcaggatattcctgaaccagtatcacctgataaccttgctcaatatttggattta

SEQ ID NO: 208375 - DNA, 478 bp, Glycine max
  unsure (1)..(478): unsure at all n locations
ctcgagccgaatcggctcgagctcagaattctctaaaagagatctttttctgctctttgaagaaagaagggtctttgcttgattttggagatgtctctgctctcagatctcatcaaccttaacctctccgataccaccgagaaggtgatcgcagagtacatatggatcggtggatcaggaatggacctgaggagcaaagcaaggactctcccaggaccagttagcgacccttcagagcttcccaagtggaactatgatggttccagcacaggtcaagctcctggtgaagacagtgaagtgattttatacccacaagccattttcagggatccattcagaaggggtaacaatatcttggttatctgtgatgcctacactcctgctggagaacctattcccactaacaagaggcacgctgctgccaaggttntcagccatcctgatgttgntgctgaagtgccatggtacggtattgaac

SEQ ID NO: 208376 - DNA, 435 bp, Glycine max
gataatccagctaactcatactcaaaatgaaccagtcaaaaacttatcaatggatatgaaaagaactggaccatttaaaaaaaaaaaaaaaaaacccaactttcctcactttttgcaaataaatgatcactccaacaagagaataccatgaaaaggataacaaaagctaaaatgaaagggttacaatctgcaatgcattgcttccagacaaatcatgatgatagtagtctttcgcttaaataaccctatttttaaaacagttttaaaagcactttttgggcacaattgatggaccaaactcggcatattctgcctttgcaatccacatttgctggaaggggctaaaagatgccaagattgaaccaccgatccaaacactggattttctttccggtggggctacaaccttgatcttcatgctgctgggtgccaatg

SEQ ID NO: 208377 - DNA, 516 bp, Glycine max
caaaaagaaagaatcccaggcgaggagaaagatggaggggaaggagcaggatgtgtcgttgggagcgaacaagttccccgagagacagccgattgggacggcggcgcagagccaagacgacggcaaggactaccaggagccggcgccggcgccgctggttgacccgacggagtttacgtcatggtcgttttacagagcagggatagcagagtttgtggccacttttctgtttctctacatcaccgtcttaaccgttatgggagtcgccggggctaagtctaagtgtagtaccgttgggattcaaggaatcgcttgggccttcggtggcatgatcttcgccctcgtttactgcaccgctggcatctcagggggacacataaacccggcggtgacatttgggctgtttttggcgaggaagttgtcgttgcccagggcgattttctacatcgtgatgcaatgcttgggtgctatttgtggcgctggcgttgtgaagggtttcgaggggaaaacaaaata

SEQ ID NO: 208378 - DNA, 549 bp, Glycine max
  unsure (1)..(549): unsure at all n locations
caagtaccatttttctcaaccttatcacccttttgcataaaagggccaccccttcttcttcttcccttctcaacttgtactacaatttctggattgaattatcttcaaaatgagagaaatccttcatgttcaagctggtcaatgtggaaaccaaattggaggcaagttttgggaggtgatgtgtgatgaacatgggattgatgccactggaaattacgtaggtaactttcatcttcaacttgagagggttaacgtgtactacaatgaagcaagtgggggacggtatgttcctcgagctgtgcttatggaccttgaaccagggaccatggatagcttgcgttctggtccttttggaaaaatattcagacccgataacttcgtgttcggccaaaatggagctggtaacaactgggctaaagggcattacactgagggagctgagcttattgattcagttcttgatgttgttcgaaaagaagctgagaattgtgactgcttgcaggggttccaaatntgtcactcacttggaagtggaactggggtctggat

SEQ ID NO: 208379 - DNA, 526 bp, Glycine max
gtccattctccaaaacaaaatgaagagcctcctcttctctctcttcctcttcctctggttagcctcctccgccgtcgccaccgtccccgcccacaacatcacccgcatgctggccgcacaccccggcttctccaccttcaaccactacctctccgtcacccacctggccgaagagatcaaccgccgccagaccatcaccgtcctggccctcgacaatgccgccatgtcctccctcctcgacaagcacctctccctccccaccatcaaaaacgtcctctccctccacatcctcgtcgactacttcggcgccaaaaagctccaccagatcaacaacagcaccaccctcgtctcctccatgttccaggccaccggctccgcctccggcaccgccggctacgtcaacatcaccaacctcaaggccggcaaggtcggcttcgccgccgaagacaacgacggctccctccactccttctacgtcaaatccgtcaaggaaatgccctactacatctccgtcctccaaatcagc

SEQ ID NO: 208380 - DNA, 585 bp, Glycine max
ctctcactttcatttctacatccctggctctgttccgtcgatgacgatggcgtttagggtgcgaaaccctgacctccgctttctcattcttctctctctcttgtccatcacttccgccaaggtcttcttcgaggagcgtttcgatgacggatggggaaatcgttgggttaaatcagattggaaaaaagatgagaacctggctggggagtggaaccacacctctggccaatggaatggagacgctaacgacaaaggtattcaaaccagtgaggattacagattctacgctatttcagctcagtaccctgaattcagcaacaaggataagacactagtcttccaattttctgtcaagcatgaacagaagcttgactgcggtggtggctacatgaagttgctcagtggtgatgttgatcagaagaaatttggtggggatactccttacagtattatgtttggcccagatatctgtggttacagtacatagaaagtacacgctattcttacctacaatgacacataccacttgataaagaaagatgttccttgtgagactgaccaacttactcatgtttacacatttat

SEQ ID NO: 208381 - DNA, 540 bp, Glycine max
acgccccgctcgagctgtcctgattaattccactggcccggctcgacgagctcactgcggccgcccttttttttttttttttttttttttttttttttttttttttttttttttttttttttttgttttttttttttttttttttttttttttttaacaaacaaacatttttcttaaaaaaaatggccaaaaattagaatttcggggagcgccataaggggaaaccccattggccgaaccctaaaagggccccccccagggggacatttttgcccgggctaaaccgggaaaaagccaaagggggccccagccaaagcccccgcttttaccaaccggttcccccgggcgggttatctgggggaaacaaaaaacccccccccgggaaaaaaacctcccggaaaaaaacccccgggcaccctttaaccggttgggaaaccccccaagggccaacagggccccccccttcccggggggctcccccaacttccggctttgagacaaccacgggggccttgccgggtttaaaaggaatttcccctt

SEQ ID NO: 208382 - DNA, 556 bp, Glycine max
agccgttactggagtaaaaaatcagggttcgtgcggatcgtgttggtcctttagcgccgttggagcgttggaaggtgctcattttctttctacaggtgagctcgtgagccttagcgagcaacaacttgtggattgcgatcatgagtgtgatccggaagagcgtggagcatgtgactcgggttgtaacggtgggttgatgaccactgcatttgagtacacactccaggctggtggactaatgcgagaaaaggattatccttacactggaagagaccgtggtccctgcaaatttgacaagagcaaagttgctgcttccgtagctaacttcagtgtggtttcccttgatgaagaacaaattgcagcaaatttggtccagaatggtcctcttgcagttggtatcaatgcagtttttatgcagacatatattggtggcgtctcatgcccatatatctgcggcaagcatttggatcacggggttcttttggtggggtatggttctggtgcttatgctccaattcgttttaaggaaaagccttactggatcataaggaatcat

SEQ ID NO: 208383 - DNA, 458 bp, Glycine max
gcaataactataacagtgggtaatgatttgtggctagactagctagcatagagaattacagaataaaagcataaacatgtgcttagcagtttcctccttcataacattacatcgtgcaaattatttacatacatactatactggtgcccctaccacgtttaggcatccatccttatatttaattgttagaaacatgtatagcagcgacagttgagaccatcgagtccaccccacatacattgcgacctctgcagatcttgtaatatccctcttctccccagctctccccccatgaattctttatgatccagtaaggcttttccttaaaacgaattggagcataagcaccagaaccataccccaccaaaagaaccccgtgatccaaatgcttgccgcagatatatgggcatgagacgccaccaatatatgtctgcataaaaactgcattgataccaact

SEQ ID NO: 208384 - DNA, 497 bp, Glycine max
  unsure (1)..(497): unsure at all n locations
ctgaagcgtttgatgtaggagcaatcctctccattgccaggaggcaattatctagtgaattggaggctactcgaattgaagctttgcactggatatccacccttttaaacaattatcgtactgaggttttgcaatttctgaatgacatatttgacactctgctcaaggcactttcagatccatctgatgaggttgttcttgtagttcttgatgttcatgcatgcattgcaaaagactctcagcactttcggcaacttgttgtcttcctggtgcacaatttccgggtagacaattcccttttggagaagcgtggtcctttgataattcgtcgactttgtgtgcttttgaatgctgagagagtctaccgtgaactttctacaatattggaaggggaatcggacttggattttgcatcaataatggttcaggctttgaatttgatcttacttacantcgtggaactatctgagattcgagatcttttgaagcaatcactg

SEQ ID NO: 208385 - DNA, 339 bp, Glycine max
aaagtaaatatatatagtatatattgaaagttaaaattacaatttacttattaaattacataattattggaaaacttagcagtaaaaggaaattaaacacttgaaatcatcaacaacaaagcttactacacttatgctttgttgcagggtggcaaaggagaaccacagagacaatcattatcaacaaaagcacttgccggaaacttattcttgggaagctgaccaccatgatggacatagctaacattcaacttctcaagcccaacaacactgtttggaaccttcccaaacacccaattacgaagacaattccaaaaacttaaacctttcccaaaactt

SEQ ID NO: 208386 - DNA, 434 bp, Glycine max
tttttttttttttttttttttttttttttttttttttttttttttttttttttttttttttttttttttttatatttttattttttttttttttttattaaaatgtaaataaattttaaaaaaaaacaaaggaaataaaaagaaactaaaataaaaccaaagaaaacaaaaaaaaaggaaaaaaaaagaagggaaaaaaaaaaaaaaaaaaaaaaaaaaagaaaaaaaaaaaacaaaaaggaacaaaaaaaaaaaaaaaaaggagggaaaaaaaaaaaaaaggggagaaggaaaaaaaggactacaaataaggggggaaaaagaaaaaaaaaaggagccaaagggaggaagaaaaaaaaaaacaaacggggagacacaaagaaaaaaaaggggaggcccatatgttaaaaaaaaaaaagcacccaagaggaggc

SEQ ID NO: 208387 - DNA, 349 bp, Glycine max
gcacgcatacaaagtgatttattaaaatccattcgatgttcaaatggtaatagtagaacaataaaaggtccaaacgccctaacaatggtctaacataaaagggaaaaaacaccaaagaaaaacaatcactgtctggaaaaccggacttattttcgcaaggacataataaagacacttaagaaaactactcttcttcatcttcctctttccagcacttcagagttgatctaggtgaaccacagtcacaagtcttggcaaatttttggtagacaagagaaccacccattccaagcccttcgtggctcctctcttcgcgacagtatcccttaacatccagaacactctagcc

SEQ ID NO: 208388 - DNA, 548 bp, Glycine max
  unsure (1)..(548): unsure at all n locations
atttgacaggttcatcatcataaccttcaatgaaaagaaatggctgaggcaagcattggcagcaaaagcagcagatggtctttacagggaatgacagctctcgtcaccggtggatccaaaggaatcggatatgctatcgtggaggagttggcacagcttggagccactgtgcacacttgcgctcggaacgaagctgaactcaatgaatccttaaatgaatggaacacaaaaggatacagagtaactggttccgtctgtgacgtggcgtctcgtgcagaaagacaagacctcatagctagagtctccaatgagtttaatggcaaactcaatatccttgtaaacaacgtgggaacaaacgtaccgaaacatacccttgatgttacggaagaagacttctcatttctgataaatacaaatcttgaatctgcttaccacctaagccagcttgcacatnctctcctgaaagcttcagaggctgcanacatcattnntatatcctncattgctggtgtgctatcaataggtataggatcccactatggtgcaac

SEQ ID NO: 208389 - DNA, 407 bp, Glycine max
aaaagtttctttatttcaagtgaagttagttagttatatttatatacacaatcgtgtcaatgagatcaattggtacaagccttagccttatggtatggcttgtaattgcaacatcagcattagcaaaatctgataaccccccagtcctagacacacatggcaaccctattgagcctggcaaagattactacatcaaacctgccataaccgacgttggaggccgcgtcactttgtttagcagaaacaatccatgccctctatatgtaggtcaagagaattctgatgcagcagagggcttaccccttttcttcaccccttttgcataacaagatgattttgtgaacgtgaatggggacttcaaggtgacattctcagctgcctcaatatgtgtgcagggcacaaattgg

SEQ ID NO: 208390 - DNA, 523 bp, Glycine max
cttcttctcttaaaagagcctttgctttttctttaggcctttccgaattaagtacttgtttcattttctctcgaagcaagaaaaatgttcatcgagagtttcaaggttgagagtcctaacgtgaagtacacagagactgagattcagtccgtgtacaactatgaaaccactgaacttgttcacgagaacaagaatggcacttatcagtgggttgtcaagcccaaaactgtcaaatatgaatttaaaaccaacacccatgtccctaaactaggggtaatgcttgtggggtggggtggaaacaatggctcaaccctcaccggtggtgttattgctaaccgagagggtatttcatgggcaacaaaggacaagattcaacaagccaattactttgggtcgctgacccaggcatcagctattagagttgggtctttccaaggggaggaaatatatgccccattcaagagcctgcttccaatggtaaaccctgatgatgttgtgtttgggggatgggattcagtaactg

SEQ ID NO: 208391 - DNA, 301 bp, Glycine max
aagtcaacaaaagaacccataaaagcaagaaaacaagttgatgactggtactgatacaaaacgcacaatgataaaatgcgagacaacttattcatacaaaagcagcaggactacttatttcatataaagcttgctcttcacttcagttcttccaagaaatcaacgttgtcaaccaagacagttttccatccatctggatctaaaaacgaagtggtttttgtattaaggccaggaattggccctggttgccgagtaatcttccctccaacctcttttatgacttggttaactacctcagcac

SEQ ID NO: 208392 - DNA, 565 bp, Glycine max
ccaattcattcattgcttaaaagtagccgagagagagaagcgaattataaaaaacaataatcaaccaaacctagggcgcaatttatcaaagtagtgattaacacatttgcaagccacgaagcaacatactcaactttcaaaaatctgacaataatgcagtcaactaaaattctgttctaacacctcaagaaatgcaagagttctgatattaacttgaagagcatcaaaaggccaccattctctttggcatcgaaagtgaaatatagcaactccagtcgtataccatacgaagtttaaagtcttctaccccttctaccactctttctacgtgtactatccgaaggaatgggagtaacatcctctatacgaccaattttcattcctgaacgtgcaagggctcgaagagctgattgagcaccaggaccaggtgttttggtcttgcttccaccagtggcacggagcctgatatgaaaagcagttatgcccagttccttacatctggcagcaacatactgtgctgcaagcatagcagcatatggagatgattcatctctgtcagctttaa

SEQ ID NO: 208393 - DNA, 532 bp, Glycine max
atatagaagacccatttattatccactaaacaaaaagttatcaagagaggaattgtgctacattgatttcaattccttgagataaaaaaatgtagctaactctaaagttaagtaatgaaataaaaataattaaagaataaagaagcacaatcattactttttaattaatttatattgcttgctttcgcaactcattacttttattgccaattaagtattgtctttttgtgcctatggtgtttcggcacgccaggaaagtaaggaattccagtaacctcaatccaatcagttccatgaaaaaacttagatggtgagaaccaacgtgctgcttttgaattgaggttccaaatcccagcccatttcacacgcttggatttgtctgaaccagggccaatgttgtggtactcggcatagaagcaagtatccataccagaaggaccctctagtccttgccatggcaaatacccaatcgcgtcaatcaaatcatcaatgtatgtgtccatgataatggtcctagagtaattcttccatg

SEQ ID NO: 208394 - DNA, 462 bp, Glycine max
atcggggatctgcagtactggatggacgagaactatctctatacctgctttgctcacaccggcgaggttacatcggttaaagtaattcgaaacaagcaaactagtcaatctgaaggttatgggtttattgagtttaatagtcgtgctggagctgagagaattcttcaaacatataatggggcaataatgccaaatggggggcagagtttcaggttgaattgggcaacttttagtgctggtgagaggtcgcgccacgacgattctccagattacaccatatttgttggtgacttggctgcagatgttactgattatcttcttcaggagacatttagggctcgttataactcggtgaagggtgcaaaagttgtcattgataggctaactggcccgaccaagggatatggctttgtaagggtttcagatgagagtgagcaagtgagggctatgactgagatgcag

SEQ ID NO: 208395 - DNA, 412 bp, Glycine max
aatagtcaaataatattagttcccaaaataattaaggaaaattcaacatttacatcgcatactccattgaaatcacctctatgtaagtaattatgaactatgaacatcttgtttattgaacaagggtgaagtccaatcatgcccaatttaggaggcaacaagtacaacttatttttctttcagggagttctcaatatctatcacaaaccggtacttgacgtccctattgatgagcctctcaagagcttcattggcatactcgattggaattacctctatatttgggtgaatctcgtttgcagcacagaagtcaatcatctcctgtatatcttttgtaccacctgtaacacttccggctacagtctttgatcctatattaaggcttgcagggctgaatttgacttgacttggg

SEQ ID NO: 208396 - DNA, 562 bp, Glycine max
aatgaaattaaaatacaagaaattgaattgcctcatgcaaacaaaatatttacaaaatgaaaagaatttaaatcaagacaatcaaaatgctgtcaatttgaatttcctaaaaatctttaaattcctcatccaaacacatagttaaacattttccatgctccagatatacggttttgtgaaacatgaccttcaaccatagttgttattgccataatatctggcttaattccttttcccagcatctcatcatacaacatgcaagtttcttcatacctattcaacctgaagagatgttgtatcaagtctgtatatgtggaaatagtaggcacacaaccagattctttcatgcattgaaacacctcaagcgctctgtcagcatcatttcttcccaaatacccatttatgacaatcccatgaacccttccatcatccatatcccttctcttcataatatcaacaatctctaaagcatatgtaatcctgcctgccttacacagccttttaccaagttcttataattttcaggtccagatctaaatctttatttttgaggtcacgaatc

SEQ ID NO: 208397 - DNA, 417 bp, Glycine max
agacggagtaaaacacctattattatataatttttgggacaaacattattagtagcaccagcctctagcaagctagggcgttattacatttttcttttgtcacatttaactacgatgtttggaggtaaaagggccttattgagcacaaagcttggaagatccaaagcatcattgctgctaccatctgacaacttggaagcaaaagaccaagaaatcacatcatgggtttcaacggagccttcatgcaacccggtggtggcagagaacccaacgctcacccattcgggaagattactcttcaagttcactgtgtcagagaggatgtaacttgttttctttgaagggtggatcagagaagcaaccaagaggctcgtggcggcattataggtaacgagaatctccgccacttgtccattg

SEQ ID NO: 208398 - DNA, 526 bp, Glycine max
catccaaagaattactatgtcaatccatttatacaaggtaaaatttggctgctggctggccaatgatgaaaatttgtctatccatattttacagggtcatttcattgtacatgagaatttaattaagttcgcagaaggggttaagtacaggtagcatatattagagtactttagagaaatctggtgggcatgtactcatttatccggagaggaagacggtaaaactcatcatttctaacatctcccttcctattctggaaaggaccccaccatggaagtcctctgtccacagctgtttgtttgccttcaagtgtgttgtcaacaagagtcccaacaattatagccacagttggggcagaagagaatatggtgttcaaaatgtcattaaaccatccaccacctgttctaactggaccatgaccatccggtgcagtgttcatgacaaaatattgtggtattgatatcgcaaggaacaaggttaggcccagaacatagatatttcttatggaattggtatttgcaaact

SEQ ID NO: 208399 - DNA, 409 bp, Glycine max
gacaataactatcttcttacaaattttaaaaaaaaaaagaaaaaggaaggagggaggaaagggggaattgaatccaaaaaaaaaagaagagaaaaacaaaatgggcagggtttggacttcgaagatagcattggtgctttgcctgatgaaattatcggttcggggcgaggacccttacatttactacacatggaacgtgacctacggcaccattgccccattgggtgtcccccaacagggtatccttatcaatggtcagtttcccggccccgaaatcaacttcaccagaaacaacaacgtggtcaataatgtcttcaaaaacctagatgagcctctcttggttacatggcatggtgtccaacagaggaagaactcttggcaagatggcacattgggtgcccagtgacct

SEQ ID NO: 208400 - DNA, 407 bp, Glycine max
accatattattattttacaggggtttgtgatttttagaaacaaggaataccattttttatctaaatggggcaccaacaaaaagaccctacacttcagaggaacatggttcagaagtgcaaaagttgcatccaaacaaccatgaaggaaaataatgaagctattcccagattccgacctccatgaagccatttttagtggcacagcccctaaacatgccattgcaattgaaaccataatccactttccaaacgttggacacagaaatgagaccacccttcccttaatagagacggggcttgtttacaaaatccacggcttctttaaacttcaagcctttgggtttcattatcgctgttacaaaaagaacaaatgtgttaaatatgattttctgaccttcacccgtgca

SEQ ID NO: 208401 - DNA, 408 bp, Glycine max
ccgttgcttacttcctcctccaccgttggcgcgacaagatccgcagccacacccctctccacgtggtcactctctccgagatcgccgccattttctccctcatcgcctccttcatctacctactcggcttcttcggcatcgacttcgtccagtcctatatctcacgcgccttcaacgacgcctgggacctcgacgacgccgttacagattctgcctgttcctctccctgtccctctcgctcgaccgcaatcaccaagaatgccgctcacgggatgcctcgaacactccattcctctaggacgaccaggggagcgcctgcacacacggagtttgtgaagagccctgctacgcgctcgagtcccgcctgggcgactgtcgccgtgccgcggtgattcgacgcgcggcgct

SEQ ID NO: 208402 - DNA, 373 bp, Glycine max
aaaagaaaagggattatttcctatttattttctcaagccaaatgcatttatacatcgttagattatttaatacatgcatacgaaacacgcacattggcttctacacatttttgtaataattttgagatccgaattctcacgtcaaattaaatttctctttttgctatctgtacctttaaaccatccttcataagaagaacaattgaagggcttggggtagcaacatgatccaccactcgaacacgatacttgtgcaaaatagcagctgccaccatcttcatttgaatgaaggatatttctttccctaagcaagtcctaggtcctgcattaaaagcaatgaatttgtaagatggtacataaacaatacctcctt

SEQ ID NO: 208403 - DNA, 446 bp, Glycine max
aatggtgtgctgacacataattagaaacttagatagtattaagaattttacactgataatatattgaatttgtactctccctcccccttattacattgaatatatggcaatctttttcagccaacaagtgaagcataaatctggtagagctttgtctctataattaaaagactgaaagaaatgcttgctgtccagctacatctgaagatctgcaggcatgtatcatagtgcatatatctgtcgtctctaggattttctctgcatggtcaaaaatcaagtgtccatactcgaaaaccattctcttgcacttatttgcatacttctccactgaattgcacacctttagtaacgtctcaattatctctagcttagtatcactctccttcaacttttccaatagagttgaaacagtatcttggcaaaactcacagctatcatcttgaact

SEQ ID NO: 208404 - DNA, 548 bp, Glycine max
gaacattcaattgcaagcttgcttgcacaaagcgccagttagttcaaaggaacgaggctcaaaattgcctgagctgtggccagccagactgatcaaagtgccttattggttgtcgagttcccaagttggagtttatggaaagccagcccctcaagatttcactgctgattatgaacactggaaacgtgtagtatccaagtcttatctagacgggatgggaattaaatggtcaaatgtacgcaatgtcatggatatgagatctatctatggaggatttgctgcagctttgagagatttgaatgtttgggtcatgaatgtggttacaatagactccccagatactcttcctattatttatgaacgaggtctttttggtatatatcatgattggtgtgaatcatttagcacctatcctaggacctatgatctcctccatgctgatcatttgttttcaaagcttaagaaaaggtgcaatttggctgctgtagtggctgaagctgatcggattcttaggcctgaaggaaaactattgttcgcgatactgtgag

SEQ ID NO: 208405 - DNA, 538 bp, Glycine max
gcaagaatgtgatcaaatttccttcacgctatggcaccatgttacaacagaggtcaccaatttaataaatataaataaaggatatcaaaattaatacccaacaggaaaaaagaatacatagatattcctaactaacatgatacatatgactcagtggaagtacagttaaacaggaatttcgagtagccaaaaaaccaagaattttggcatctcatctccatgcttaagcaatagcatactcgagcttttcctgctccttaggtcgccacttggacttttccacacataacaaaccctccttatccttggagtaagtcatgcgaacctttcactgcatagacctagccatgctctcaagctcttcaatgatctcaacagtatcgcgaacaataagttttccttcaggcctaagaatccgatcagcctcagccactacagcagccaaattgcaccttttcttaagctttgaaaacaaatgatcagcatggaggagatcataggtcctaggatggtgctaaatgattcacaccaatcatga

SEQ ID NO: 208406 - DNA, 380 bp, Glycine max
ttttttttttttttttttttttttttttttttttttttttttttttttttttttttttttttttttttttatttttgggtaaaaattattaacctttttctaaagttgaaggtatatttggctaattaaaatattgttggctggagcaaagaaaggcaaaaaaagagccggggaaaaaaaaaaggaaaaaccaaacacggggggggggggagttacagaaaaaaaaaaaaaacccaaggcgaacgaacagggggaaaaaaaaaaaaaaacggggcgggggcaaaaaaaaaaaacacaattttaaaaggggaggcgagacagaaaaaaaagatcctccccaccgcggcgggggaaggaaaaccaaaggggggggcgggggg

SEQ ID NO: 208407 - DNA, 523 bp, Glycine max
agtatataattatgtatagcatagataataagattcatacaccccacagaaaaaaaaggtatattttaggtgccacccaggcctatactgctagcgtggccaaacttccgatcagaattaggaatgatcttgttccatctgatttagatggaacccaccttggttattcttgtgtacctctaccttgaacttctcttccttctgtcccctcttgactttgagaagcagattaaacttggcaaagtcatcaatgacctcagcctttgcatcagcaacctcatgaagctcatagggtactagtgaattagacctttgctggatagtcttgatcgcatgatttgctgcatcctgaacttgagggtcatgtgttggcacagattgccatccaggttggtgaccatcctttttgacaccaagatcagcagaggtaaatgatggtacatcaccagcaggctcgaactcttggagttctttgaaattcaaccatggcttcacccacaccttggcttcatagagcttcttc

SEQ ID NO: 208408 - DNA, 397 bp, Glycine max
acccgacaaaactcgtaatataaacctcatagccattatctgggggattttattttagggtttatttaattggacaattttatattttatttcattcggggcatattaatcctaaagccgctggtgattgtgtaattgcacccaccatatccagtgctacgcagggctggtcagtaggtacaaaatgacccgctccaaggatccaatagaattgggggtttttgtatgacttaaaaaaccctttgggcgttttgtcacttccacagtagaggggggttttgtttttttccaagaaattttgaagccctgtccactcgagttttttaagccaagcttcagtccccttggttgcacaaatgagatccacttgcccactgtacacagtcacgttgacccc

SEQ ID NO: 208409 - DNA, 394 bp, Glycine max
ggctatatcggccctactcggagccaattccgatctcatttcctttggcttcaggattggcctaataagaaaacaaataattccaattcatatatgaacatttttgcctccttatttcttgaaaatgtggaattggaattccccgaggaattccgatctcatttcctttggcttcaggataggcctaataagaaaacaaataattccaattcatatatgaacatttttgcctccttatttctcgaaaatgtggaatcggaattccccgaggaattccgatctcatttcctttggcttcaggataggcctaataagaaaacaaataattccaattcatatatgaacatttttgcctccttatttcttgaaaatgtggaatcggaattccccgagg

SEQ ID NO: 208410 - DNA, 498 bp, Glycine max
  unsure (1)..(498): unsure at all n locations
aaaaagagaaaaggagaagtgaatttttgggaggcagaatgtgtcaagattgattattcgaacaaaaaggttttctgtcggtccaatattgacaacttggtgggaagtaacgaattttccttggactatgacttcttggttgtagcagtaggagcacaagttaacacttttaacacccctggtgtcaaggagaactgtcattttctgaaggatgttgaggatgctcagaagattagactgtctgtgattgattgctttgagaaggctgttcttcctagtctatctgatgatgagcgaaggtcaaatcttcattttgtagttgttggaggaggtccaactggtgtggaatttgcagccgagctgcatgattatgtccaagaagatctaatcaaactatatccaactgttaaagataaagtgaaaataacattgattcaatctggagatcatatctngaacatgtttgatgaaagaataagttcatttgcggagcaaaag

SEQ ID NO: 208411 - DNA, 425 bp, Glycine max
gggttttagcgcagcttcttctatatttaaggaagatgggtaaggaaaagggtgacatcagtgttgtgggtattggccatgttgactctgggaagcccactaccactggccacctgatctacaagcttggaggcattgacaagcgtgttattgacagatttgagaacgaagctgctgagatgaacaagaggtatctcaagtatgcctgggggcttgataagctcacagctgagcgtgcaagaggaatcacaattgatattgccttgtggaagtttgaaaccaccaagtactattgcacagtcattgatgcccctggacacagggatttgatcaagaacatgatcactgggacatcccaagctgactgagctgttcttatcatagattacactactggtggccttgaagctggaattcaaaggatg

SEQ ID NO: 208412 - DNA, 411 bp, Glycine max
aaaaaaatatatttaatgacagattaacatatgttatttggtagagtacaattggccatcaagtcacatggttgaaagaatagccaaactttcctcctttattacaccttatttttctcaatcaaacaaatgattttaataaatccacatttatgaaaggatgtttgtgtataaacattaaccaatctattaatgtttttagtcatgaacgcatggcgtgcgcttagcacctaggaagatcagctggaggcggaggcactgataaagaaggagtgggcccattctcaaccttgaaagccatggctagcccccacggcaaatgagttttctaaatggcaatgcacaagccaaacacctggattatttgcttggaatttaacaacggaccatcctccgacggggacagaaatt

SEQ ID NO: 208413 - DNA, 537 bp, Glycine max
ttcttttttttttttatatgactctggtgttatttttgactgtgcctaacaatttacacgatgcacttgatcatcctgcatggcgacaggccatgatcgatgaaatgcagaggataacattggcccatgacgcgacacatgcaccacctaataatcataattttacatctttacatacaaaatacaaagactttaaattttaaaaagaagaaaagagataaacagatcatcttaatgaaatgaaaccaaaacccacaaacattggcttgatttttgttgttgttgttgttcccaacttgattaagcatgaaccgtttgattgaatcacttggacttgaagggaatggccctgattacgacctggtggtagagtgctgcaagagctgcaccgatgaatggtcccacccagaagatccagtgttcatcccaaccaaggtccttgttgaagatgatagcagcaccaagactacgagcagggttgataccagttccggtgatggggatggtttgcaagtgaaccaagaacacagcgaaccc

SEQ ID NO: 208414 - DNA, 378 bp, Glycine max
tgcaaaaagaaagaatcttaggcgagtttaaagattgacggcaaggaccctgttgggtccctgggggcgaacattttccccgatagacattcgattgcgactgcggctcatagccatgacgaccttaaggactaccacgagccggagcctgtgccgtttggcggcaccgactgtgttcaagttatggttgttttcagagcaaggatagcatagatttgcggccaattttttgtttgtctacttcaccgttttaaccgataagggagtcgccggcgctaagtcctatctgaatacccgttgggactcaatgaattcgattggaccttcggcggcatgatcttccacctctctttctgcaccgctggcatctcattgggg

SEQ ID NO: 208415 - DNA, 578 bp, Glycine max
  unsure (1)..(578): unsure at all n locations
cttctctctttcaccaatcaacacaaactaagttcttccttctgttgaaagcgatagcaatggccacgaatccaatcgaagcggggaacggcgacgctgctcccaaccctaacgcgactaccaaatcctccgtgtacctgcaagactcggaggagctgaagcgagtcttcagccgcttcgacgccaacggcgacggcaagatctccgtctcggagttggacaacgtcctccgctccctcggatccggcgtcccgccggaggagctccagcgtgtcatggaagaccttgacaccgatcacgacggcttcattaacctctcggagttcgccgccttctgccgctccgacaccgcggacggcggcgacaccgagctccacgatgccttcaacctgtacgatcaggacaagaacggcctcatatccgccacggagctctgccaggtgctgaaccgcctcggaatgaagtgctccgtggaggaatgccacaacatgatcaaatccgtggattccgacggcgacggcaacgtcaacttncccgagttcaagcggatgatgagnncacatcgcgaaaatgctagc

SEQ ID NO: 208416 - DNA, 541 bp, Glycine max
cataggaatagttttcattcgatttctaaatatatataaatatatatatataaaaagaggaaacgagaagaaaagaaatagcggatcataacagacctagatttattagtcaagagattgtgcagcgaaagtgcctagcctatctataaaattcaaatccaaagggcctaatctgttttttcttcagcattgctagcattttcgcgattgttgctcatcatccgcttgaactcggggaagttgacgttgccgtcgccgtcggaatccacggatttgatcatgttgtggcattcctccacggagcacttcattccgaggcggttcagcacctggcagagctccgtggcggatatgaggccgttcttgtcctgatcgtacaggttgaaggcatcgtggagctcggtgtcgccgccgtccgcggtgtcggagcggcagaaggcggcgaactccgagaggttaatgaagccgtcgtgatcggtgtcaaggtcttccatgacacgctggagctcctccggcgggacgccggatccgagggagcgga

SEQ ID NO: 208417 - DNA, 409 bp, Glycine max
atccgcaaaaccaatcacattttaaaaggtaagagtattatttccatgataatctgatttaaaagtactccgcaatataaacagagtataccaaaaaacactcgatctacagctagtaactaaatcctccattttatgatacggataaacagccgaaagaaagaaataaagggcaaaacataaccctgcattaattggcggcacgttgagttgagcatgcattatttgactatgcagatctttatgacagaggcagctccaatacgatgcagggcaacaactgcatcaccaggcttacaaagggccctttctgttgcggacttaagagcagcttcgagaatgacctctgtggattctgcatcggtagcctttgcagatccctcgcccagtataggaatcaagcccctgt

SEQ ID NO: 208418 - DNA, 634 bp, Glycine max
gagcccggccggaattaccgtgccaccagctactactcggaggtcgcctcttgctttattttttcctcactttctcgcttcccaaacgcccctctctcttcttcaatggtccgaccagctcaccgacgaccagatcgccgagttcaaggaggccttcagcctttttgacaaggacggcgatggttgcattactaccaaggaacttgggactgttatgaggtcacttggtcaaaacccaactgaggcagaactgcaggatatgataaacgaggttgatgctgatggcaacggaaccatcgatttcccagagttcctcaacctgatggctcgcaagatgaaagacaccgactcagaggaggagcttaaggaggctttccgtgtgtttgacaaggatcagaatggtttcatctctgcagctgagctccgccatgtcatgacaaatcttggggagaagctgacggacgaggaggtggatgagatgatccgtgaggccgatgttgacggtgatggacagatcaactatgacgagtttgtaaagtcatgatggccaagtgaggaccattccaaccataacctaaatttgacagcatataaagagaagagggacagggcagataagttttgatgagaattc

SEQ ID NO: 208419 - DNA, 382 bp, Glycine max
ccaaactgttatcaaaagaagattttccgacatgcataaacgcagttgatagtttcatatttatagatttctataaatatcatatggtgatgaaggcggttaggccagtcaattgaccgtccacaggacctttaagcatggcccctatagtttccaatgcgaaatgggggccacatttttaacttagggaacccataggaggcccttgataagggatgatgttcatacggaaaaagaggatccacggccaaactgagggccccaaagctcaaaagatcccttaacaaagtgatagtatcctccttttagcgacaatgtattgtcaaccaagccttttttaacaaatggatatgttaaaaggttcccaagggaaacattcaca

SEQ ID NO: 208420 - DNA, 420 bp, Glycine max
gaaacataattgacatcaacacgaataaaaccgcacaaccattgaatagtgggaaagtaacaaaacgctttacttgaagcggacaatttcccatttatattgtatcactatcgtctaaataaatgactccataaagcacatttacagcagcacaaaatgcacagccactgccttttattaatccataaatcacttcatacatagcactgcattactaactatgacgttcacacttcaatggctgaccaacttaagagagtttgccttctcttgcagagaatccaggaggctgtcaaagctcttcttaaacgagtccactccttcaagttcaagctgggaaccaacaaagctccagtcaatacccaatttctggagagcattgtatattccttcagcttcagatgcatttgagtctattgt

SEQ ID NO: 208421 - DNA, 425 bp, Glycine max
cacgatacaatttaagcttatttttctaacctcaaactttaatgcatcatttttctaaattttgttacctaattaactacttaagtatcaagtacgattacacttttctaccattttgttccatctttgcccattgaagcatacaagttgcaaccgaatttgatcattactatgttttcacggtatagatagctctatttctcatttaccgtcacactctaataatcagggatggcagaaaagcggtatcctttagcacccctccatgcataatatgcaattcgagtctcataaaaacctgggagaaagctaaggaaccctagggctaaaaggccatatgcttgagacttttctccccccatatgaccagtgaagataaagtatgaaaggaacaaaagtcctgtaccaaggaataacaggaacag

SEQ ID NO: 208422 - DNA, 430 bp, Glycine max
  unsure (1)..(430): unsure at all n locations
acttagataagtccggtagaatagataatatgacgtgaaaaaaaaaatcaaaataaatgacgtatccatatataactactcagcgtatatacagtcaccaaaaggaaacaattgaacggagacaaacaccatcacatacagaaaataaattatctcccaaatcaggtctcaggcactgggtttacttccactcttatacatgttgtcaatggcattctgatagtatttaagcaactgtggcctcttcttcttgtatgttggagtgataaggtcacgttccatgtcaaatggaattgagtcaaggtgaactgcttttataaactcaaaacctttcaacttcttttccttcgcaatctttgagagctcttcaattatgtaactttntgctcgagcatcttcacagagagaattgaagtccatggatatacca

SEQ ID NO: 208423 - DNA, 566 bp, Glycine max
  unsure (1)..(566): unsure at all n locations
agtcaaggccactagtgttgtggctcaatggtggtccaggatgttcctctattgcttatggtgcatctgaggaaattggtccttttcacattaggcctgatggcaagtcactttacttgaacccttatgcttggaacaatttggcaaatgtactgttccttgattctcctgctggtgttggtttttcatattccaataagtcaacagatctgtatacatttggtgaccagaaaacagctgaagatgcatatacttttcttgttaattggtttgaaagatttcctcaatataagcatagagaattctacattgctggagaaagttatgcaggtcactatgttccccagttgggtcaaattgtttacgagaaaaataagggaatcaagaatccagttataaattttaagggatttatggttggtaatgctgttactgatgattatcatgattatattggcacatttgaatattggtggacccatggtttggtttcagattccacgtataggatgctaagaatngcctgcaattntggttcctctcagcatccatcagtgcaatgcatg

SEQ ID NO: 208424 - DNA, 547 bp, Glycine max
tagcaagatcgcccctataccagtgatcaaggaaatatttcgaactgatggcgagggggacctcaggggtccaccacctaaagtgatgcaggtggataagtctgcatggatgactgatgaagaatttgctagagaaacgattgctggtgtaaacccaacgtaattaaagatttttgaggagttcccaccacgtagcaagctagatacacaagcctacggtgatcatacctgtataataacaaaacaacattttggaacctaacttgggtgggctcactgtagagcaggctatccagagcaagaagctgctcatcttagatcaccatgactatctcattccatatttgaggaaaataaatgcaactaccacaaagacttatgctaccagaaccatatttttcttgaaaagtgaaggaactttgacgccattggccattgagttaagtaagccggatcctcaaggtgaaagaaatgggtcctgttagcgaaggctacgtgcctttgagcggaagagtgaagctaatatttggtattggaaaagcctatg

SEQ ID NO: 208425 - DNA, 427 bp, Glycine max
aagataaagacttcaaagttaccatattattatttcacatggttttgtaattcttagaaacaaggttaccattttttatctaaattgggcaccagcagaaagaccctacactacagtggaacatggtacagaaatccaaaagttgcatcgaaacaaccatgaaggaaaataatgaagctattcccagattccgacctccatgaagccattttcagtggcacagcccctaaacatgccattgcaattgaaaccataagccacttccccagcgttggacacagcaatgagaccagccatcccttcatcgagacggtgcttgatcacaaaatccacggcttcttgaagcttcaagcctttgtattccaacaccggtggcacctcacgcgccagcgtgccacgtatgatggcctcgcctttacccgtgcac

SEQ ID NO: 208426 - DNA, 480 bp, Glycine max
  unsure (1)..(480): unsure at all n locations
cccacaaccgaggtaaataagatcaatgataaagacgatagacacacatcagaacacagagaacgataagacgtgatagacaaacaatctaagaataagatatatataaaaaactctaaaaagaaagcgctcgagaactaccgggaaaaacccnnaaacggacccaaacaataaaaaacaatattacacactcattttcaaagattatggaacaagataggatacagaaggatgggcggaaacttggggggtgcacaaagtaaaatgaagcaagaggataagtaaggaaggaggacggatgaagaaaaggagaaaaaaattggtggtgaaaaatccaaacgataaataaaaattcgtagaggaagttcccaccacgtagcaagctagatacacaagcctacggggaacatacctggataataacaaaacaaacatttggaacctaacttgggtgggcttactgatgagcaggctatccag

SEQ ID NO: 208427 - DNA, 499 bp, Glycine max
agttattccgatattcggacgcatcaacttgttatgaaatcacattgatagcctctactcgtgtcctagctcgtctaagagctagatttgcctcaattgtttgtctcttgccttccgccttattcaaattagcttctgctatttcaagagtttgctgtgcttcttgtggatcaatgtcactacccttttccgcatcatttactaaaacagtgatctcattattgtttattctagcaaaaccgcccatcagagccatcgttaaccattggtctttaagaagacgtattctcaaaatacctatatctacggctgtggcaataggcgcatgatttggtaatactccaatttgtccgctattagtagataaaatgatttccttcacttccgaatcccaaacaattcgattgggggtcagtacacaaagatttaaagtcatttcttcaaattgctctccatttctaagttcgtagctttcgcagtagcttcatcgatattacct

SEQ ID NO: 208428 - DNA, 468 bp, Glycine max
ccagacaaggaaagattttgatatcgggggcacgcaacccctttttccaaaatcagattcagccgggtgctagtccaataaaaacaactaatagaaaagagatctataaatattaaaaatctacattgttattctagaatatacaatgcatcttcacagaatatttgcaagggctagatcacttcaaaggagacctcgacaattctaagatgcttcttcaataagaccttgaaaaaattaacttcattcgatgagaagaggtagagcaaaatggattggagatggatttagatttccagattcattttggagccaatcttgggtgcatataaaagcctctcgcgtgtccgggtttagtgaactacgagaagaatctagcactctgcccccagtgctaaatgccaattctggcgccagagttgacattggagtcccaagaacatcacgtgccatcatagacaaaattgg

SEQ ID NO: 208429 - DNA, 538 bp, Glycine max
gaaatcataaaattctatataataaagacaacatatataactttatcctataaattacacacaacaatttcgagctttattctataaattaagaaaaagaaaatagacatgctatctttctttggtcctaccaagtagctccaatcatttcacaactgttacaatattacaagaacagaaatttcaaacacaaaattgaagctacacatattagtatgctttctcaaacacaactgggagcacattaccatccaaggccaacaaaatcttcccattctcacgcaaaccaccaacaatgccacagtcaaacctacaaaaggggcatacatctgtaggacaccaacctatataatatgaacctttgattggtgtctcagtaattctaaagtaatcatccctgcctgatgcagcaatgagcctccttccactctcactatccttctcagccaaattccaatttgtgccctgcacacatattgaggcagctgagaatgtcaccttgaagtccctattcaccttcacaacatcatcttcttct

SEQ ID NO: 208430 - DNA, 485 bp, Glycine max
aatcataaataatagtattattaatccctttcaaataaaaaacattagaatacattaaattagctggagcattcaactcaactggtatacatatttattaaacatgatgatgttaattagagccttttaactgtacaggcctagttgagctggtacacctgtgccattgatccatgtcccttgcaagaaagcctcaaccgtgtacctggtagcctcatccctattgatgactttgcggccaggccaattaaccctagcagtggtgctagaaccagccccattgttgttgtactcaccatagtaaagtgtgcttagggcaaagttcccttcccaaggaagaaacccatcagggtgaattaggtcatcaatctgagtctccatgatgatggttcttgaatactccttccacggccttccgaggtagctcttgattgtgtctttgaggggtaccaagtcggtgtcggccttgatcacgcatttctgga

SEQ ID NO: 208431 - DNA, 450 bp, Glycine max
ctcttcttcgtctcaaacctcttcgttccttctattcattccatttcttccaaaatggccggggacccagatcgcgttctcgtcactggagccgcagggcaaattggatatgctcttgtccctatgattgctaggggagtgatgctgggtcctgaccagcccgtgatcctccacatgcttgacattcctccagcagcagagtcgttgaatggggttaaaatggaattggtggatgctgcattccctcttcttaaaggtgttgttgctacaaccgatgtggttgaggcatgcactggggtcaatattgcagtgatggttggtggattccctagaaaagaacgtatggagaggaaggatgtgatgactaagaacgtcttcatttacaagtcccaggcttctgcccttgaaaagcatgctgctgccaactgcaaggttcttgttgttgctaac

SEQ ID NO: 208432 - DNA, 418 bp, Glycine max
atcatccatgcaaaaactgtgattacttcctgaatttacattaaatgcatctaaaccttaaataggtatttgtacattgaatcttcaatctatgcatgacaatagaagtagccattttacaagctttcaccaacataaacactcccacctaaaaccatttaagcgttacaacttagttaaaaaggtttgccaatgtttctccaaggcttgcaatcatagagttgttccaacacttctcacttgggagtgaaagcagcaaaaatagtagcatggccaggatctgcaaggtgagcaaagaggttgtcaataggaccagtgccagtgtaaatgtgctggaaccatgcccccatcacagccaacatggccaacctcccattcttgatctcctttgttctcaactccttgatcttctcaggag

SEQ ID NO: 208433 - DNA, 515 bp, Glycine max
agtatataattatgtatagcatagataataagattcatacaccccacagaaaaaaaaggtatattttaggtgccacccaggcctatactgctagcgtggccaaacttccgatcagaattaggaatgatcttgttccatctgatttagatggaacccaccttggttattcttgtgtacctctaccttgaacttctcttccttctgtcccctcttgactttgagaagcagattaaacttggcaaagtcatcaatgacctcagcctttgcatcagcaacctcatgaagctcatagggtactagtgaattagacctttgctggatagtcttgatcgcatgatttgctgcatcctgaacttgagggtcatgtgttggcacagattgccatccaggttggtgaccatcctttttgacaccaagatcagcagaggtaaatgatggtacatcaccagcaggctcgaactctaggagttctttgaattcaaccatggcttcacccacaccttggcttcatagag

SEQ ID NO: 208434 - DNA, 490 bp, Glycine max
gaggaaatgctcagtaatagcataaattgggtacagcttgccatattcatagtatataagttgcacagtcgtgcacagttcaaccgcgggaaagtcctggggatcaatatcaaacacaattgaagtgcattgaccaaccagatcatggaacaaattgctgcaacttatagaaagactaaccaggaaattacgaactctctaacagatgtttgtaaatctaagagaccatggcattggtttcatcttcatcagcttctcctgtttcattgaacatgtactgactttggtactccattaggtactgtgttgatcttttgacatccaaaaacagattgtaaacccgatttatatcatccaactccactgtcttcccctttcgcttttggcatgccaatgcagctgctgtgattagatgaatagcatatctcaaagatgtttctacacctattttggttaacaaacactttgcaccttcactcatgtctacgtc

SEQ ID NO: 208435 - DNA, 414 bp, Glycine max
aatagtcaaataatattagttcccataataattaaggaaaattcaacatttacatcgcatactccattgaaatcacctctatgtaagtaattatgaactatgaacatcttggtaattcgaaccagggtgaactccaatcatccccaatttaggaggcaacaagtacaacttatttttctttcagggagttctcaatatctatcacaaaccggtacttgacgtccctattgatgagcctctcaagagcttcattggcatactcgattggaattacctctatatttgggtgaatctcgtttgcagcacagaagtcaatcatctcctgaatatcttttgtaccacctgtaacacttccggctacagtctttgatcctatattaaggcttgcagggctgaatttgacttgacttggga

SEQ ID NO: 208436 - DNA, 498 bp, Glycine max
gacaataactatcttcttccaaatataaaaaaaaaaaagaaaaaggaaggagataggaaagggttaattgaatccaaaaaaaaaagaagagaaaaacaaaatgggcagggtttggacttcgatgatagcattgttgctttgcctgatgacatcatcggttcggggcgaggacccttacatttactacacatggaacgtgacctacggcaccattgccccattgggtgtcccccaacagggtatcctcatcaatggtcagtttcccggccccgaaatcaactccaccagcaacaacaacgtggtcatcaatgtcttcaacaacctcgatgagcctctcttgttcacatggcatggtgtccaacagaggaagaactcttggcaagatggcacattgggtgcccagtgccctatcgccccaggcaccaactacacctaccgctttaggttaaggatcaaattggaacttacttctactacccgaccaccggcttgcaacgc

SEQ ID NO: 208437 - DNA, 555 bp, Glycine max
  unsure (1)..(555): unsure at all n locations
gggttttagcgcagcttcttctagatttaaggaagatgggtaaggaaaaggttcacatcagtattgtggttattggccatgttgactctgggaagtccactaccactggccacctgatctacaagcttggaggcattgacaagcgtgttattgagagatttgagaaggaagctgctgagatgaacaagaggtctttcaagtatgcctgggtgcttgataagcttaaggctgagcgtgaaagaggaatcacaattgatattgccttgtggaagtttgaaaccaccaagtactattgcacagtcattgatgcccctggacacagggatttcatcaagaacatgatcactgggacatcccaagctgactgtgctgttcttatcattgattccactactggtggttttgaagctggaatttcaaaggatggacagactcgtgaacatgctctgctttcattcacccttggtgtgaaacagatgatttgttgctgtaacaagatggatgctactacaccanagtactccaagggccagtatgatgaaatngtgaaggaag

SEQ ID NO: 208438 - DNA, 458 bp, Glycine max
ccgttgcttacttcctcctccaccgctggcgcgacaagatccgcagccacacccctctccacgtcgtcactctctccgagatcgccgccattttctccctcatcgcctccttcatctacctcctcggcttcttcggcatcgacttcgtccagtccttcatctcacgcgcctccaacgacgcctgggacctcgacgacgccgttacagattctccctcttcctctccctctccctctccctcgcccgcaattaccaaaatgccctcacgggatgcctcgattatattatcctccgaggatgacgaggagattgtaaactccgtcgtggaaggcgtcacgccctcctacgcgctcgagtcccgcctgggcgactgtcgccgcgccgcggggattcgacgcgcggcgctgcagcgcctgacggggcagtcgcttgagggcctgccgctgaggggttcgact

SEQ ID NO: 208439 - DNA, 394 bp, Glycine max
ggcgccaaactattatctcaaaatgatatcatttagttgcaaagttttattaaacaataagagtttattttgggacatatttgctactgggaagattttgataatttggtacaagcaaagggcgaaggtttcaaatcattaacctgggcaaaatctgtcatttcaaaagcttatttttcaagaaatatagctcacttcaacccaaagagatattttgccaaagagattgctgattccctttccaggatcactttgttttacaatagactctccaaccaatatagctttaacaccagcttcctgaacataggcaatatcgtccggggtaaagagaccagattccccaaccataattatgcctctctcggggattattttgcctcgctctccttca

SEQ ID NO: 208440 - DNA, 452 bp, Glycine max
ctttatctgaatgggatcaaataggcaccataactcacgttcccacaatctacttctaccgtcccacctcacaagacaaagacaacgttaacaccgttgcttccaccttgaaagacgcattaagcagagccctagtgccgttttatccactagctggtcgtttacattggataaacaagggtcgtttagagcttgattgcaacgccatgggggttcatttcattgaagctgaatcctcactaaccctagaaaatctcggtgacttttcaccctcttcagaatacaacaaccttgtccccaacgtagactacaccctcccaattcacgagctacccgtggttctcattcaactaactaacttcaagtgtggtggttttagcattagcttaaatacttcacatgctgttgcggatggaccaagtgcattgcacttcttgtgtgagtgggcaagg

SEQ ID NO: 208441 - DNA, 429 bp, Glycine max
acccataaaaagggggcactaacacataaaattataggactgatccaaaattcaatatgcggcccatggtctaattccatgactaaaactgtaaagctcaaatatactatcctcctaaaaggattagatgttgaaatccaagttattccaatgaaagacaaactttttcgagtgatagtcccttggtatcttaaaaggagcattattcaaaattgaagctacacttctgcgggcaaaccatgggaacctactaacaaggacagtatccaagaaggagcaatggattctaatttaggcatgagtaagccaatgccttgtactgaaaaagcttttctgcggtcaagtccaacttattccttgagaactcatcaatgggaagtccttgaactattgtgcattccccattggcacaagtgacatggaatgaat

SEQ ID NO: 208442 - DNA, 465 bp, Glycine max
aaaataatagcagtttcatattgtcttccctacaaacaacaggttacataaaaacggaaacaaacagaaccagttttatagaacagtaatggaaactagatctagccggaacagaaccatcccctcaaaagagacaatcaaccggcaacaggaagttgcggcatgttatacatcttcaagccaccgcaatacattaccaagttcaaaatcacatatcatgttggccatactcctcctcctactcttcctcctcatactcatcctcatcagcagtggcatcctggtactgttgatactctgacacaagatcgttcatgttgctctcagcctcagtgaactccatctcgtccatgccttccccggtataccaatgcaagaaggccttcctcctgaacatagcagtgaattgctcactcactctacggaacatctcctgaatggaagtagagttgccaatgaatgttg

SEQ ID NO: 208443 - DNA, 476 bp, Glycine max
gaacattcaattgcatgcttgcttgtacaaagcgccagttagttcaaaggagggaggcttagaattgcctgagctgtggtcagccagactgatcaaagtgccttattggttgtcgagttcccaagttggagtttatggaaagccagccccttaagattttactgctgattatgaacactggaaacgtgtagtatccaagtcttatctagacgggatgggaattaaatggtcaaatggacgcaatgtcatggatatgagatctatctatggaggatttgctgcagctttgagagatttgaatgtttgggtcatgaatgtggttacaatagaatccccaaatactcttcctattatttatgaacgaggtctctttggaatatatcatgattggtgtgaataattaaagacctattctaggacctatgatctactcatggtgaacatttgttttaaaagttaagaaaaggtgcaatttt

SEQ ID NO: 208444 - DNA, 405 bp, Glycine max
atccgcaaaaccaatcacattttaaaaggtaagagtattatttccatgataatctgatttaaaagtactccgcaatataaacagagtttaccaaaaaacactcgatctacagctagtaactaaatccttcattttatgatacggataaaccgcagaaagaaagaaataaaggggaaaacataaccctgcattagttggcggcacgttgagttgagcatgcattatttgactatgcagatctttttgacagaggcagctccaatacgatgcagggcaacaactgcattaccaggctttcaaagggccctttctgttgcggacttaagagcagcttcgagaatgacctctgtggatttttgatcgggagcctttgcagatccctcgcccagtataggaataaagccc

SEQ ID NO: 208445 - DNA, 394 bp, Glycine max
acccgacaaaactggtaatataaaccttatagccattatttgggggattttattttagggtttatttaattggacaattttatattttatttcattcggggcatataatccctaaacccgttggggattgggtaattgcacccaccatatccagtgctacgcagggctggtcagtaggtacaaaatgacccgctccaaggatccaataaaattgggggtttttgtatgacttaaaaaaccctttggtcgttttggcacttccacaggagaggggggttctgtttttctccaagaaattttgaagccctgtccactcgagttttttaagccaagctttagtccccttggttgcacaaatgagatccacttgcccactgtacacaggcacgttgac

SEQ ID NO: 208446 - DNA, 510 bp, Glycine max
aaaaagagaaaaggagaagtgaatttttgggaggcagaatgtgtcaagattgattattcgaacaaaaaggttttctgtcggtccaatattgacaacttggtgggaagtaacgaattttccttggactatgacttcttggttgtagcagtaggagcacaagtaaacacttttaacacccctggtgtcaaggagaactgtcattttctgaaggatgttgaggatgctcagaagattagactgtctgtgattgattgctttgagaaggctgttcttcctagtctatctgatgatgagcgaaggtcaaatcttcattttgtagttgttggaggaggtccaactggtgtggaatttgcagccgagctgcatgattatgtccaagaagatctaatcaaactatatccaactgttaaagataaagtgaaaataacattgattcaatctggagatcatatcttgaacatgtttgatgaaagaataagttcatttgcggagcaaaagtttacaagagat

SEQ ID NO: 208447 - DNA, 426 bp, Glycine max
aaccaaaccaggtgttcctttataaattaaattcatctgtacacgggcatagaaaaaaatacataaaaattatttgttcagaacttggagagtagaccaaattgagtttcgggatatacacgagacgagattatattataacaattcttctcaccttagcagtcgatgtcgtgcacacttgttttccaaagacctccaagaaagacaaatttctttggctagagatcagacttgaacaaatgttcgtgttcttcttttagctctctctccaatcgtgtatttccatagcgagatttctggtctatccaaccaataatatcggagaatacaatctgcaaattttgtggtggctctccatacaatagaccgtgccacatttctggatacgactttagtgtcttatctgagcttgccgcctcatcatat

SEQ ID NO: 208448 - DNA, 496 bp, Glycine max
ttggtttttttattttattgttctttttttattttttttttttgacacgataagccagcttcaactagattagagggcaacagaaagttggccaatacaattcccaaaggggctgcacagccagaattagaccgagaaattcagggtccaaaaaaatcaaatccatgccaaacttgtaacaacccgacctttacagggtcttaggcagtttttgccaaggacaattaatgtgactaccaggtaaacacctattattgcctaataacctataggcttcaacaaatagaaaacttagtgacaaaacaccattcgcagccaccaacaatgcatgttctcaatcacagaacgcgccaagtgatgaccgctcaccacgaatcctttttgccagctgaatatccttgggcataatagtcacacgcttggcgtgaaaggcacacaagttaatggcctcaaagagcccaacaaggtttgcctaatgagactgttgcaatgcaag

SEQ ID NO: 208449 - DNA, 464 bp, Glycine max
aagcttaaaatgaaagggcttaacattaatacttctcacattacataaacctgtttcaaatacagtcacaataaaacaaggactttcaccctaatactaagctgaaggaatcgattgcaaaataataacccttagaaaacactacggctttgtaaatcataaaccctaagctctctcgcccctaatcctacgagctagctgaatgtccttgggcataatggtaaccctcttagcatgaatagcgcagaggttggtatcctcaaagagcccaacgaggtaggcctcagcggcttcctgaagagcggagacagcgctgctctggaagcgtaaatcggtcttgaagtcttgagcgatttcccttacgagcctctggaaaggaagcttccttatgagaagctccgtgctcttctggtacttccgaatctccctcagagccactgtccccggcctgaaacggtggggct

SEQ ID NO: 208450 - DNA, 522 bp, Glycine max
gtaaaaagcaagtaacattaagttggattcggatacacaagataattcacattatctgaagtacttcaccaaacacaaatctaaaaactctcaaaagtcatttcgttctttgacgctcactttccggggacgaagttggtggcataggcccaggcgttgttgttgacagggtcagcaaggtgatcggcgaggttctccaatggaccctttccggtgacaatggcctgaacaaagaagccaaacatagagaacatggccaatcgtccgttcttgagttccttcaccttaagctcagcaaaagcctctgggtcatcagcaaggcccaatgggtcgaagctgccacctgggtagattgggtcagtgacctcaccgagggggccaccagcaatacggtaaccttcaacggcacccattaggataacttgtgtggcccagatggcgaggatgctctgggcgtggatcaggcttgggttgcccaagtagtcgagcccaccctcgctgaagatctgggacccggccttg

SEQ ID NO: 208451 - DNA, 421 bp, Glycine max
cttctctctttcaccaatcaacacatactaagttcttccttctgttgaaagcgatagcaatggccacgaatccaatcgaagcggggaacggcgacgctgctcccaaccctaacgcgactaccaaatcctccgtgtacctgcaagactcggaggagctgaagcgagtcttcagccgcttcgacgccaacggcgacggcaagatctccgtctcggagttggacaacgtcctccgctccctcggatccggcgtcccgccggaggagctccagcgtgtcatggaagaccttgacaccgatcacgacggcttcattaacctctcggagtttcgccgcttttgccctccgacaccgcggacggcggcgacaccgagcttcacgatgccttcaacctggacgatcaagacaagaacgggcttatattc

SEQ ID NO: 208452 - DNA, 452 bp, Glycine max
ctcttcttcgtctcaaacctcttcgttccttcgattcattccatttcttccaaaatggccaaagacccagttcgcgttctcgtcactggagccgcagggcaaattggatatgctcttgtccctatgattgctaggggagtgatgctgggtcctgaccagcccgtgatcctccacatgcttgacattcctccagcagcagagtcgttgaatggggttaaaatggaattggtggatgctgcattccctcttcttaaaggtgttgttgctacaaccgatgtggttgaggcatgcactggggtcaatattgcagtgatggttggtggattccctagaaaagaaggtatggagaggaaggatgtgatgactaagaacgtctccatttacaagtcccaggcttctgcccttgaaaagcatgctgctgccaactgcaaggttcttgttgttgctaaccc

SEQ ID NO: 208453 - DNA, 438 bp, Glycine max
ctcgagccgaatcggctcgagcgcactcgttctcgtcgtggaataacgacatgaagtcaagcaatgtggtgatgtcgccgacaagtaaggtgaagcaggctctagggctgaagatgttgaagaggtcaccatcaaggagaatggtgtcgggtggcagcggtggaccgtcgtcgccggtcggcggaagtagtccttttcatcagtccgggtcaccgttgaggccacgacggccgatgacttctgcagagatcatgagacagcagatgagagtgactgagcacagcgataaccttctgaggaaaaccatcatgaggaccctcgttggccaagcaggaagaagagcagaaactatcattctccccttagaacttctaaggcatgtaaaaccttcagaattcagcgattccaatgagtaccacatgtggcaaaagaggcagc

SEQ ID NO: 208454 - DNA, 466 bp, Glycine max
caggttgaacaaagtagttagccttcatagctagattgcaatcaaatgtttacactaacaaggaaatgtaagagcacaaagaatctggctccagaaaattgtggtcacctaggatagtagtctctatgacttcgaaattctaactaacaactaccctctacacaaacttccatcatcatcatcatctaaatcaccattggatttgacaaagtgaggactaatgtagctgttcactttcccagcttagcttagagacaactctttcatgttgtgggaaatattcctccatctctttgacaagctcttttggtgttggggcagatacaattatatggcgagcagtggggctgatgaagccttcctccaccgctttgtcaataaaagacaaaaaggtattgtagtatccatcaacattcagcaatcccaccggtttatcatggatgccaagttgagcccatgttatcac

SEQ ID NO: 208455 - DNA, 573 bp, Glycine max
atataacagctgtctggtctctgcattacatcaacgataatggcttacacgttccaaatcacaactcagatctctatacagcagctttcaaccctaaaccgcattatctatttaattatctataaggtccaaacaagaaatatgaacatggaaggttttatggaaaaagcactgttatgagtcttcaaaatgatgatccgtctcatcaaagatctcctcctgcaaaagctcttcaatgacatcttccatggtaataattccaacagcttcttcttcttcagggagctttggaagtggacttccatctatctctaaaatatccgagtacatattttttgaccattttctgctccgagaacccctatttgatgactcgtttgtatttggaaagcttttccacttgtggagtggcatcttgggtttcaaagctttctctttgggaggcttttcaccatcaatatccaccttaacatctctcaccgagtcatttgcattattttgggcagactgctgctagtcttgtcacaccgtctgacaacaacagccatgtgactatggcccttctgaaactca

SEQ ID NO: 208456 - DNA, 523 bp, Glycine max
caagatcgcccctataccagtgatcaaggaaatttttcgaactgatggcgaacagttcctcaagtatccaccacctaaagtgatgcaggtggataagtctgcatggatgactgatgaagaatttgctagagaaacgattgctggtgtaaatccaaacgtcattaagattcttgaggagttcccaccacgtagcaagctagatacacaagcctacggtgatcatacctgtataataacaaaacaacatttggaacctaacttgggtgggctcactgttgagcaggctatccagagcaagaagctgttcatcttagatcaccatgactatctcattccatatttgaggaaaataaatgcaactaccacaaagacttatgctaccagaaccatatttttcttgaaaagtgatggaactttgacgccattggccattgagttaagtaagccgcatcctcaaggtgaagaatatggtcctgttagcgaagtctacgtgccttcgagcgaaggagttgaagcttatatt

SEQ ID NO: 208457 - DNA, 570 bp, Glycine max
ttgatttttttttttgatgaaacatgcgtgatagccttaattgcttactcttcgatctgttataaaaacagaatacagtaaacacgagaacattcaaccaccccaaatgtaacttgaccatacgtaggtagacgaaggaatcatatgcctcctatttcacagtattgaaaaacaggcagagtagtacagcaacctcaatgagagagcccttagatagagatactgctgggaattcctctgaaagtcaatcggttctcactagaaggatagagcacagtgtaaggcattgtagctggcccagtgcggtttctgaacggctcatccttgttcttctgtataagcttatgttcaatctcttgaagcttctttgcaaacctgttgaaggcctctagtggaccagcatcagaagtgcagaagtcaccaccatgtctctcgccaaggtagaactcatcagatgcgtgccttgacaggatttctataattgtaaggtcaatgagggtctccttcttgccagtaataggtttcaaaaactgcttctcagggttctttagccaagcagcatactcagca

SEQ ID NO: 208458 - DNA, 414 bp, Glycine max
actaatacaaatacaaatacaacatattcctttgaactcatcatacatgatgtgcagaggacacaagttctagcaaaacaggtaaaacctgattccctcacttatagttacattagcagatgcattaaagtcataaggacaagcaaatcccaaatattagtattattcttgggtgaaccattcaccccaccctctccttttttcccaacaaaaaattaaacggaggttgggtgaaatttccttgcaaaaacatactagaaataactttatacatggcctcagtgaggtgaacaccatcccaattgatgtactgagaagggcttgagcacacagtggcattaggtgtgccacatgtggcaaacacagtgaagttgtaaggtggttctcccgatccacagcaaacgttgaaggtct

SEQ ID NO: 208459 - DNA, 485 bp, Glycine max
aagtaaaagcatggatttatatatatttttttccacgttgagtacaagagattaaattacctaaaagaaaatatcacacactgaaagaaaggaaagtgcttgaaaatactaaagggtatttaccaatggctcttgtcttgaaaagaacctttaatctacataataggatcaaagaacaggttgcaataaaagcacaagcaattgccattattgacaatatttttattattcttataatttgctcttcattttgaactcatcatgaagaagaaattaaattgactcaaatagcggggttgctcctgaatgatccaagagccttagcagcacctgctctcaagatgaattggtggtagaaggctgcaatggctgctccaataaatggtccaacccaaaagatccaatggtcatcccaggccttctgctggttgtacatgacagcagctcctagactcctagcagggttaatgccagtgcctgttact

SEQ ID NO: 208460 - DNA, 426 bp, Glycine max
aaaaaaatataattaatgacagattaacatatgttatttgatagagtacaattggccatcaagtcacatggttgaaagaatagccaaactttcctcctttattacaccttatttttctcaatcaaaccaaatgatttagaaaatccacattatgaaagtatgtatgtgtataaacattaaccaatctataaatgtttttagtcatgaacgcatggcgtgcgcttagcacctaggaagatcagctggaggcggaggcactgataaagaaggagtgggcccattctcaacctcgaaagccatggctagcccccacggcaaatgagtttccaaatggcaatgcacaagccaaacacctggattatttgcttggaatctaacaacggaccatcctccgacggggacagaaattgtgttacgtatctgagg

SEQ ID NO: 208461 - DNA, 427 bp, Glycine max
gatgataataagcaaacatttctctattattataaaatggtttacaaacgagtttatctgaaatttctcaagatctaaaatacatagagcacagttttttttttccaaactaaagaaaaacagcaaacttttgaaatcactttcacgatgtgtagttgtacttgtacacaataataatttctaacaacataaataatgacgagtctttatgtgacaagagatatgccttgtagaattaatgcatcagctagaacttggttagcagcttgtgaaggatggacactgtcccaaaacacatactgtgtggcattagaacaagttcctggtgattttggattacacaacaaggatgttgtctctacagtcccggtaccacagcatcctctgtttgcctccacaaaaccagattttgaaggggattgaacaa

SEQ ID NO: 208462 - DNA, 455 bp, Glycine max
aaaatatgaatacacgggcaatgaaattttaaggacaacccttgctgtaatggaaatcgtttacataagatgatgatttattctagtttgcactttgccatgccagctatcattgttgaaacatgcgcgagaacacttaacagcaatttatacaaacagaatttcttcattaacacttaacagcaaacacgagaacattcaatcaccccaaatacataacttaaccatacataggtagatgaaggaatcatattccttctattcacttttattgaaaaccagggaaagtactgcaacaaccatagagcccctagatggagatactgctgggaattcctctgaaagtcaatccctcctcactagaaggatagagcaaagtgtaaggcattttagccggcccactgcggtttctcaacgtctcgtccttggtcttctgcataagcttttgctcaatc

SEQ ID NO: 208463 - DNA, 451 bp, Glycine max
ctttatctgaatgggatcaaataggcaccataactcacgttcccacaatctacttctaccgtcccacctcacaagacaaagacaacgttaacaccgttgcttccaccttgaaagacgcattaagcagagccctagtgccgttttatccactagctggtcgtttacattggataaacaagggtcgtttagagcttgattgcaacgccatgggggttcatttcattgaagctgaatcctcactaaccctagaaaatctcggtgacttttcaccctcttcagaatacaacaaccttgtccccaacgtagactacaccctcccaattcacgagctacccgtggttctcattcaactaactaacttcaagtgtggtggttttagcattagcttaaatacttcacatgctgttgcggatggaccaagtgcattgcacttcttgtgtgagtgggcaag

SEQ ID NO: 208464 - DNA, 412 bp, Glycine max
ccctcctcctttctcttttggcggggaccgtgtttttcaaaaggatctcatttatttgccaagcattattaaacaataagagttttttttggcccctatttgcccctggtaagaaatttaaaaattggcaccccccaaggttcaaggttataaaccattatcctcgccaaaattctccatctcaaaagctatttttctctcaaatattctttactttaacccaaatagaaattttgccaaaaagattgctggctccctttccaggatcactttgttttacaatagaccttccaacccctatagctttaaccccaccttcctgaacataggcaatatcccccgggggaaaaaaaccaaattcccccaccataattatgcctctctcggggattattttgccctcgctcttcct

SEQ ID NO: 208465 - DNA, 446 bp, Glycine max
attttcctcccttgacaacatggtggtgcaagtgcaacacaatctcctcttagtcataactttcttgatgttgttgtggtcatggtggagccttttgggtgcactaggagaccctcaaacccatttaatcaacaaggggtgtagccaatacaacgcaaccgacttgtccaacttcaaccaaaacctaaacgcaactttggatgaccttagagcacaggttagcaaccaaagcaagcactttgccacggctcaagaagctagaggagcagaccctgtctatgccatgtttcagtgtaggaactacctctccaccgccgactgcgccgcctgcttcgtggttgccaccgcccaaatccgcaattgctcagccggagccaacggtgcccgggtcatctatgatggctgcttccttaggtatgagagcaatggcttctttgaccagacca

SEQ ID NO: 208466 - DNA, 522 bp, Glycine max
agactaatacaaaatattggacccatacaatcacaaaatacgatgaaaaagcttgttatgattcctagttattacaacaagatggcaaccatcaatcttaatcgagcttcaattttgcaaaaaggttaaattattgaaattatatcaccaataaaagaaatagctcagaaacatacaccaacaaattgtctagttttaaataatcaaaggtgcaatccatctaactcaggagaaactgactgaagggggttaaaaagaaatgataaaaatctgaagaatattattttccttttctgccattgtatcaacacaagcttttgttcccatttacatgtcttgtgtatcttgattatcatcaccccctctgttggatcctccttgatcagttccaaacgtcctcttgctcatgttagttcgctgcactaatcgaaccagcgcttgaaccacttctgacataggtggtcggaattccggctccggctgaacgcatagagcaataacatccgcaaatcgagaaaggga

SEQ ID NO: 208467 - DNA, 419 bp, Glycine max
ggggatcaaaaccccatattttggggcaaaaaggaaaccggaaacaacaaaagcccccaagggaaaactaaaatcaggtttaaaactgggcccacaggaaaaaggggccaaaagggggcccaacaacctatttccctaacattaggggcaaaaattaaccagagaaaaaccagggggcaaaataaaccctacctgaaaccccgccaaaaaagaaacctttgggccaaataaacctggccaaaaccccggggggccaagtaaattggctggttggaaaaaccgaaaccccaagcccttggggggtgggacccctgggaaccccatctccaggaaattttggaagtgcctggtccccaccccggggggcaaattgccccaaagggccaaaccgggaggggggaaacccttgacggccaaaa

SEQ ID NO: 208468 - DNA, 527 bp, Glycine max
  unsure (1)..(527): unsure at all n locations
aaaagcatttcacaaagagaagacacagtggatcgtggtttcacttcatttcagaccaaacatggtgcagtggcataggcacgtttttccctttcttcgccacattcacaagcgagtattggaaccccaggccactcattcagcttcaagccttgtaatttctcgcttagcctcttctctttcacaaggtcagttggggaggagaacatggacaacaacaactttgccctgtttttcaagacccgtttttctcactttccaacatcagggaatatcaagttctgctcagttgctggcaaattcatcagaggaaacacctgttntgtcacctttagccccagtttcattattgagtagttcaaaaggtgaagaccagaagcagaaagttgttactaagccagaaaaagttcaagcgatattaaaggcaataaaacagagtccaaagaaggtcaacttggttgctgctctggttcgtggtatgcttggtaaagatgcattgatgcaggtggaattgacaataaaacgag

SEQ ID NO: 208469 - DNA, 429 bp, Glycine max
ttgactttttttatttttttttttttttgttttctttttttttttgtttttttttttttttttttttttttttttttaccgggcacatagctcccaccctttgaacccacagcgactttatcaagtcctactgcagcaccagccagtacccagccctctgcatacagtccctctacgtctacgggtgcaccatgcagcaagacccccacgagctcgttcagacaggcctctaactctccctcaaccacaccgaggggaccaaaacactcgtcgcaaaatgcctcacatacagaggcctcataccgagagaatacgctgccttgaacgactgggctgaagaaatcagtgacagcgtcgaccggataaccggtcgctgaggaactcaacccgggaaagcgcagggtgaggacttcacgtggcacatcagca

SEQ ID NO: 208470 - DNA, 420 bp, Glycine max
tttttttttttttttttttttttttttgggttttttttttttttttttttttttttttttttttttttttttttttttttttttttttttttttttttttttttttttttaaaaacccggaaaagggggggggggaaaaaaaaagggttaaaaaaggggaagggggttccggggggtacaaaaggggggggggcgaaaaaacaaggggggggacccccctttgggggcaaaaaggggcaaaaaaaaaaaaaaagggggccccggcccctaaaaaagggggggaaaaatcccaaaaaaagggcccccccaaaagatttttgggggggaaaaagggccccaaaaaagggggccccttttttttttaaaaaaaagggaaaggggggaaaaaattcttttttaaaaaaaaaaaaatgcccccgg

SEQ ID NO: 208471 - DNA, 430 bp, Glycine max
aagagaaagacaacaaagttaccatattattatttcacatttttttctaattcttagaaacaaggttaccattttttatctaaatcgggcaccagcagaaagaccctacactacagtggaacatggtacagaaatccaaaagttgcatcgaaacaaccatgaaggaaaataatgaagctattcccagattccgacctccatgaagccattttcagtggcacagcccctaaacatgccattgcaattgaaaccataagccacttccccagcgttggacacagcaatgagaccagccatcccttcatcgagacggtgcttgatcacaaaatccacggcttcttgaagcttcaagcctttgtattccatcaccgctgccacctcacgcgccagcgtgccacgtatgatggcctcgccttcacccgtgcacgat

SEQ ID NO: 208472 - DNA, 530 bp, Glycine max
gtaaaaagcaagtaacattaagttggattcggatacacaagataattcacattatctgaagtacttcaccaaacacaaatctaaaaactctcaaaagtcatttcgttctttgacgctcactttccggggacgaagttggtggcataggcccaggcgttgttgttgacagggtcagcaaggtgatcggcgaggttctccaatggaccctttccggtgacaatggcctgaacaaagaagccaaacatagagaacatggccaatcgtccgttcttgagttccttcaccttaagctcagcaaaagcctctgggtcatcagcaaggcccaatgggtcgaagctgccacctgggtagattgggtcagtgacctcaccgagggggccaccagcaatacggtaaccttcaacggcacccattaggataacttgtgtggcccagatggcgaggatgctctgggcgtggatcaggcttgggttgcccaagtagtcgagcccaccctcgctgaagatctgggacccggccttgaccacacg

SEQ ID NO: 208473 - DNA, 397 bp, Glycine max
gattcagcaagtgcgttttggaagcattagaccgaaatacttcgagatggcccgtacaaagcaaactgttcgtaagtcaactggaggaaaagctcccaagaagcatcttgcaaccaaggctgcacgtcagactgtaccaacaactggtggtgtgaagaagcctaattcctatcgccctggaactgttgctcttcgtgagattaggaaataccagaagagcactgcgcttctttttaagaagcttactttccatgaggttggaaacgtgaaattgcccaggattaaaggactgaactgcgtcaacagagccatgctgtgcttgcattgcaagaggctgttgaggcttacctcgtcgggctttttgaggacactaacttgggtgccattaacgacaagc

SEQ ID NO: 208474 - DNA, 436 bp, Glycine max
aaaactcaaaaacaaatgtaacggtaataatgaaaaatacaaataatttattcagctgttccttcatgattcacccatacatgaacgatgattactttgtttagctggcatagacttgcatgtaattactaattacacctcatcaattaattctgagaagcaataatggtgctatacattacattacaggacacatgtataatggacagaagcgtggaagacaagccccacacacgaaccatcatgtctcagcttcacgacaacgacactttcctcagctcactctccttcacaaacagcccatggaacccgtacggcacccgccgcggaagcctcaccgtcgtcacaacatctagctccggcgacttcgcgtccatcaccaaaaacctcgactcccccttcctctcatcgtgcacgtaactcaccaagtacccat

SEQ ID NO: 208475 - DNA, 496 bp, Glycine max
gaaatgaggatggttttttcatataaaaagcacacaacacttgcaagtgggatacttctacgtcttaaatggataaatacattcgtggtttcaaaaagtaaccagagctacaattataacagcttatttacaacacgcttaacaaatttacaaagaaaatcctccagaaagcgtaattagactgcttcggcaaagccaacttggagatttccatagtcaaagacggtgtgatatgccctcatgaaaacatcgccaagaatccacaatggaccctttggaggaggaacatcaaaagcaataaacccactaaggcagacttctgtaatgccttctccaggtcttagaatatactgctctggtgtgaggacaaaagggttatttccaattgtgaacgtaatgtttggcatcttggaaagactattacagcttatcactgactctccagatggacttggcagggtctcacacaggtgattcacatagttgaatactctgt

SEQ ID NO: 208476 - DNA, 483 bp, Glycine max
gcagctgaatatttgagcgaactcactttaaacagtggcaaagagtttagggccaaggtcgaggagagagatacatctggagggaaagcgaaagggcagggtactgggacagtgcttgcggtaactctagtagctgtggattcggagatcagtgttaatgctgccatgctacaggaaggacttgctaggctagaaaaaaggaataggtgggacggaaaagaaagacaacaggcccttgacaatttggttccgttccagggcgaagctcgaaccagtaggcgtggaatgtggcagtatggagatatccagtctgatgacgaggacactgctcctcctgctagaaaggctggtggtagaaaatgagtgtattttaagaggggagataagttataaaatagacattttcaaagaaaatgagcaagttataggcatgaacattttaattcaaggtagaggaaaaaaatgccatatgtaatccttagt

SEQ ID NO: 208477 - DNA, 579 bp, Glycine max
  unsure (1)..(579): unsure at all n locations
atacactcggcacctctatcaaagccgctgatgtttatcttgcatcggcattagtgaagcttatttgtctagctacttttctcaaggtatcagagagcgatagctttgatccgtatcaggagtttttgaaggcgttaataggttttatagatgttgctgggctttattttgccttgacccagttgactcacaggaacatctctcagaatcataaatttcaagcagttggacttggctgggcatttgctgactctgtgctgcatcggttggctccactttgggttggtgccagaggattagaatttacttgggattacattcttcagggccttgaggctaatgcaaatttggtgttgagcatatcccttgctgcacttggatctttgatgtggcttcgaaaaaataaacccaagaccctcatccctattatatatttgagtgcacggattgtagcaaccatgccatctatcacaagctatctgaggcgtggattgaggtggcactttcccaaagtggtctggtctgagctcttcacatccctggtgatggctnttattagctggcaactgttttctgatg

SEQ ID NO: 208478 - DNA, 282 bp, Glycine max
gaatgaacacatacgagttcacaaaaaaaagggggaaatttataaaaaaatacagaaaaaataaaacagaattgagtaagagggaaggaaacatagagaaaattttagcaatcagataataagaagccagtagtagtgcaaaagtcccttgccaagagtgttggaaccccttttagttaagcaggtaccttctcccccttgagtggcttcaccacttcccatgtgaagtcagggtcatctctgccaaagtgtccatatgcagcagtcttcaagaacctgcca

SEQ ID NO: 208479 - DNA, 506 bp, Glycine max
agttcaaaaacaattgctctattatttaacctagaattaacaaacgtacagcttccacattattactagtaaacataattaagatgatcgaaatacaaagtgacagtgaaaacactcttattacttgcaaaccgatcgagagcatccaaatacagacatacagccaataataaccatagacaagtattggctattttattcaaaagcacaatagataagcaaaccacacacacattttagatggagatactgttgggaattcctttgaaactcatcccttcctcacttgaacgatggagcaatgtgtatggaagctgaactggcccatgtcggcttttcagacttggatcattgttcctctgtgtgatttttccctcaatttctgccagtttgtttccaaactttttgaaagcttccaatgcctttgaatccgtagtccaatttggattatccctttggccaggtagacctcatcagaagcatgccttgacaatatctctatcact

SEQ ID NO: 208480 - DNA, 541 bp, Glycine max
ttttggccattcatgaatgaagctatagacttcaatattaacgttatcaaacacgatataccctacattagaactgttctaatgtcaaactaccattgaaaatgctgtccaaagtagccccttgagaaaaggtgcgaaggccagaaaacttgacataaaatctcagggatcaggtggaaatgaaaatggtgaatcacttatattaacaggactagtgtgggttatctatatcacactttcaacggttgcatattcagattgtaaactatgcttatgtccgcctccttactcgcctgccattcggattaactgattcagcagctgccccatctgctaaatcttgaccatatatgctactgccacttctctttctgcttaatgtctggcctgagttatcatccactgatgcaaatgtctccagcaattccaacagcattgaggggcagctctctttcaaatgcacaaaagcttccgactgcattacagctcccaagtttgcaggatttgcaataaattttaaacagattgccttaagctgtgg

SEQ ID NO: 208481 - DNA, 539 bp, Glycine max
agtaaaatagacgatgtaaatgaacatgtttaaaaattaatgtcagatgtagcttttacaacatcaagactcaagtaaaccaaaaacataacaaatttgaatactatgacacattacccagttgattatgttctaagatacgcaaccaatacaatagccacgataaggtgtaaaaattgcacgggaagacctcacaccattcaactcttgaaagaaattcaatcatcgacactcatgaggaaaatgattgtagcgctctatcaaaactttcttcagctgatgatacccgtttgaccaatacatgctctgggtgagaaagtttcagctggctgaatgatttgttagatggtttgccgagatgaagacagcatacaactagattggctagagtttctggatccctggcatccttgttaagagcttcaaccaaaagggtctcagcttcgtcgaagttgcccatgtgcatgcagcaaacagccttgccattcaagagcaagctggtggactgatacctctgcgacaaatcctggaagatcaga

SEQ ID NO: 208482 - DNA, 390 bp, Glycine max
gacgttcttgagtgtccaataatcattggagtttggaatggatgatcaagaatggctacatttaagttttaaaaaaattcctcttgccgtgtgcaccctctattcctatcatattatgcccttttaatatttctcaatatcaattatgatattgatatcataattaatgtctacgtatagatctttaacgttcttcacttccggaaaggcagaaatatcaaagttgtagaccctttcattagtgaaaacggttcaaaataatgaaagtctcttctctgtttttaacataaaaaaaaaaaaaaaaaaaaaaaaaaaaaaaaaaaaaaaaaaaaaaaaaaaaaaaaaaaaaaaaaaaaaaaaaaaaaaaaaaaaaaaaaaaggggcggcccc

SEQ ID NO: 208483 - DNA, 469 bp, Glycine max
tgacgggcaatttgccgctctacatcgtgtagcagtaccgccttgcttggggggggggggggggggggggggggggggggggggggggggggggggggggggggggggggggggggggggggggggggggggggggggggacccgaaaaattcacaaaaaattgggggggggggaaatttcgggattagagcaaaccccttttaattgggagggggttttttggttccaacccaaaaattggaaaaagtggggttcccattgggaggggccggttaaaggttgaaagccggggccaaaaagggaaaacccctaaagggcagaccaaaaaccccccttttttccaaaaccaagggggggaaaattgaaaacccttttgggggccatagtttggttaaatttttaccggggggccttttttaaaaaacccttggactttaaggttccctgggttggttttccttggccaaa

SEQ ID NO: 208484 - DNA, 625 bp, Glycine max
  unsure (1)..(625): unsure at all n locations
gggcattgctgagcttgtgaaccacccagagatccagcaaaagttaagggatgagattgacagagttcttggagcagggcaccaagtgactgagccagacatccaaaagctcccatacctccaagcagtggtcaaggaaactcttcgtcttagaatggcaatccctctccttgtaccacacatgaacctccacgacgcaaagcttgggggctatgatatcccagctgagagcaagatcttggtgaatgcatggtggctggccaacaaccctgcacactggaagaagccagaggagttccggcctgagaggttcttcgaggaggagtcgcttgttgaagccaatggcaatgactttaggtaccttccctttggtgttggcagaagaagctgccctggaatcattcttgcattgccaattcttggcatcactttgggacgtttggtccaaaactttgagctcttgccttcccctggccagtcacagattgacactagtgagaaaggaggggcaattagcttgcacatactcaagcattccaccattgtgggcaaagccaggtcattttagacttcaccacatgatcatgatcatatgatcaatccccctaatnnnttctttttcttt

SEQ ID NO: 208485 - DNA, 568 bp, Glycine max
  unsure (1)..(568): unsure at all n locations
acagtttccatctctctcacaaaatgacaacaatatcaaattgctcccttctcttcctcttcctcttcctctccaccctccacatagcttccaccctctcaacccccaccaacttcatcaagtcctcctgcagcaccacccagtacccagccctctgcatccagtccctctccgtctacgcctccaccatccagcaagacccccacgagctcgtccagacagccctctccctctccctcaaccacaccgaggccaccaaaaccttcgtcgcaaaatgcaacaaattcagaggcctcaaaccgagagaatacgctgccttgaaggactgcgctgaagaaatcagtgacagcgtcgaccggctcagccggtcgctgaaggaactcaaattgtgtaaggcgaagggtgaggacttcacgtggcacatcagcaacgttgagacgtgggtgagttcggctctgaccgatgagagcacttgcggcgatgggttcgccggaaggcgctgaatgggaagataaggaggcgattagggctagaatggcaatgtngctccgttactagcaatgctctc

SEQ ID NO: 208486 - DNA, 507 bp, Glycine max
catacaaaaacagaactcatatttcacatttgatcagaagcaacacaagatccatatctctataaaaactcacaattacatacaccacacaaaacacaaaattaaccattaaccaaccacatagaactgtttgttctttttttttttcccctcaaaggaaaaaacgaaaacaaaaaacaaaaactttcttcccaactccccctagtgttgtgcagcatactgattaataagcgagagagcattgctagtaacctgagcaacattgaccattctagccctaatcgcctccttaatcttcccattcagcgccttcccggcgaacccatcgccgcaagtgctctcatcggtcaaagccgaactcacccacgtctcaacgttgctgatgtgccacgtgaagtcctcacccttcaccttacacaatttgagttccttcagcgaccggctgagccggtcgacgctgtcactgatttcttcagcgcagtccttcaaggcagcgtattctctcgg

SEQ ID NO: 208487 - DNA, 586 bp, Glycine max
  unsure (1)..(586): unsure at all n locations
gattgaaaaactgccaatggcatttcccattgcaaatatacgactgtacaacatatgaacatgatattaacttgaaaacttcgaccccctgtaccactcaattctattttaaaataggtcctaacctaaaaatgtaatacattgtattttgtcccctccccactgaagcttctcaaccaaatccaaaaccctcacttgcttcgtgaattgccagcagtaacctctcttctaaatggtgtttagatggatactccggcaaatctaattgattgaagcaagtatgagcagaaggcaagtgatcaggacttccatatgctttgtgtatctgaaacttctgggagcctgaaattccttgaagagcgctaaagccttccaaaggcaccttggatgtgcctgtcacaaattgcaacagtcgagctttgacttctttgctcaaaccttgaacaacctnccaaaaccattggataactggcgatgcagcactatatccagaatattccggatttgctctcaagtcatccaagtcaatatcaggaagtccactgatcaacattccagctctttgcattgatatcgatatcactcc

SEQ ID NO: 208488 - DNA, 528 bp, Glycine max
ccaaagcgaaaccctaaccctaacggagagatggcggagcacttggcatcgatattcgggacggagaaggacagggtgaactgtccgttctacttcaagatcggcgcgtgcaggcacggcgaccggtgctcccggcttcacacgaagcccacaattagcccaacgttggttctgtcgaacatgtaccagaggcccgacatgaacatgaacatcatcaccaaccccgatcagccccagccccaatctctcgaccccgataaggtccaggatcacttcgacgacttctacgaagatctctttgaggagcttagcaagtacggccccattcagagcttgaatatttgcgacaacctcgccgatcatatggttggaaatgtgtacgttcagtttagggaggaagaccatgcagccaacgccctcatgaatctgactgggaagttttattcaggtcgacccatcattggtgatttctctcctgttacggattttcgagaagctacttgtaggcagtatgagggaaatgtatgc

SEQ ID NO: 208489 - DNA, 535 bp, Glycine max
  unsure (1)..(535): unsure at all n locations
gagttctggaccaacagcaatgacgaatgtggagctcgttgcgacgaacagatgaattttgtgaagaattttaagggtcatgctcagattcttgagaggggtggttacaccttgttcactccacactacataacatggttttgtccaccacccttcattcttagcagtcagtgcaagtctcaatgtataaaccgtgggagatattgtgctccggatccggagaaggattttggagaaggatatgaagggaaggatgtggtgtatgaaaatttgaggcagttgtgtgttcatagagttgccaatgagagcaaccgttcatgggtctggtgggattatgtgacagatttccatgtcagatgttctatgaaggagaaaagatacagcaaggattgtgctgaggaagtcatgaaatcattagatctgcctatggataaaattaagaaatgcatgggtgatcctgaagcagatgtggagaatgaaagtgctaagaatgagcaacangtccagatcggtagaggatctcgccgtgatgtca

SEQ ID NO: 208490 - DNA, 481 bp, Glycine max
  unsure (1)..(481): unsure at all n locations
cacaaattccctttaataataagtaagaattattacaaaagaaaaagaatattacaccgtcaatcaacaatcatcataatttttttttttatttcatcaagagtagttgttgttgtccaaagtggcaatcaacggttgtttgtggccgtcggatccttcatcaagggccgtaagtaactgggcccgacaggcctggtactcccaatcggtggtcccaatcatatacaacatgaggcccgcacaacaaacctgggccgacaataggcccagccagagcccacagaacccaacctcgagccagaacgcaagcccaactgccacgggcatccccaccagataaaacgctcccaggttcacattcgccgncacgttcggcctcgccgtccccctcaccaccccgcaccccaccgtctgcgggcagtttcccagctcgcacagccccagaatcggtaagcgccgccccgtcagccgcagaatcccc

SEQ ID NO: 208491 - DNA, 551 bp, Glycine max
gaaccactaaattatagctaattagctaattatccattaaacactgtcagagcaatccgaatggaaaaaaagagaaaaaacatagccaactccgttccgcatgatataaaagcttaatcaacctcctccattttgctgccctcagcatcagcttcagcctcctcctccagtgggggcatatcagcatcagcttcagctgcatcctcgtcgatgctcagtccaagcttcaacattctgaggatcctgtttccaaaagtgttgggttcctcaaggctgacaccagaagtgagaacagcagtctcgaacagcaactgaacaaggtccttcacggatttgtcgctcttgtcagcatccgcacgctttctgagctcctccataattgggctctcagggttgacctccattgtcttcttgcttgacatgtatcctgccatgctgttgacccttagggcttgagctttcatgatcctttccatgtttgcagtccaaccgtattctccagtcaccagacagcttggtgaatcaacaacacggtcccagactacaacctt

SEQ ID NO: 208492 - DNA, 532 bp, Glycine max
ttgctgagcttgtgaaccacccagagatccagcaaatgttaagggatgagattgacagaggtctgggtgacagtgaccaatgggttcaacatcctactacgaaagacaaagttaacatacaaataaatcgagagcccgtcatatattatagtatgaagaataaaataactgcatctaacgcacatacaacaacaacacagtttcagactctttgtaaatcagctgaaagggcgtcccggatctcagcctaagggctaaacgaatggcaatcgagctgaagctttctgtgtaagctctccagtaccaagctcaaccacaagccataactgcatgaatgcaacggtattgacttttggatccatatcttcggtgctgccggaaaatgcctacctggtatcatactgggcatgtccctgccaggctagattttgcgaaccaaagtggcattagatttgcttgtgtcaatccatcgcgtgatcactcaagcctttatgaagaatcatcttccattgtccacacaaaaccaggcatg

SEQ ID NO: 208493 - DNA, 431 bp, Glycine max
accaagcaatttcgaataaatgttcacaacttcacataaagctccaaaagtaccggaacaaggcaagttccacgaaaagaactaccatacacagagcacgaggaaaaaaaaaacaacacagacaaagtaacataacagtgcaaacttctaatcaataatcttctccttcatcaccatcttcttcagttgcctctgcaccgacttcctcataatctttctccagggcagcaagatcttcacgagcctcagagaactctccctcttccataccctcaccaacataccaatgaacaaaagccctcttggcatacatgaggtcaaatctgtggtctatgcgagagaagacctcaacaacactggtgggatcggagatcatgcacacaggcctctgaacccttgcatgatcaccgccaggaacaacaagttgaggc

SEQ ID NO: 208494 - DNA, 543 bp, Glycine max
gcagcaaaattcttattattttcaatacttaactgatggcaaattggcaatgcttttgattttgcaaatactagcaaccatctaagccggacatttttaactgctcagcccacagtaagaaaattctgtatgatggataagataagccaacggctacaccatgacaaacattactactgtcaaactaaataaacgacactaaccgaaatcaaatatcattctcaataatcaataatgtgtgagatcaaatcaaatggcttcacttatcgaggaggggaagggggaggcggtggcaggtttgattttgcaaatcccacccatgcaacaatgccgactgccagaattatccatccaaatatgtcatacttcagatcactgctcttctttttcttctgagtctgaaaaataatcaaacaaaataggtaatgaatgagcacacaagtacgaagatcagagtctatctatctccaatgtgatttttgtagcacaaggagtgcttacccaaaatgcagatatcataaataactagcagtccaagagcca

SEQ ID NO: 208495 - DNA, 503 bp, Glycine max
aaacaagataaaaaaatcatgttagatatgacttctagatagttattatatattctaattagtaatttgtgattggatcacgacataaaaattctttaactgtcaatgcaaacattatttactctttttgtaattagaatagaaaactttcaaatgaacccctgaacaaagggatgtaacatcctgaaattaattgaatgtgaaaagttggagatgagcttattatcgtttaagtggcttatatgctgctgctagtatggtgacggactaagcacaatcatgtaactagttactaactattggacccatctaactaacccaatatgtggtagtaataatgaggctatgaatttgaaattgttattgaattgattgtatatggtgtggacttgcaagttgcatcacaaccaaggagcttggaactgttatgcgttcattggggcaaaacccaactgaggcagagcttccagacatgatccatgaagtggatgctgatgggaatg

SEQ ID NO: 208496 - DNA, 587 bp, Glycine max
  unsure (1)..(587): unsure at all n locations
ttagaattttgtattttttttataatttatttaattattttctccctacaaaatcttgatctctctgctgttgtggagtggtgttgtgttaatctcattcacacattcacagttatactctctctctctttgtcgcttggatcactgatctcatctcaattttcagatatgtcgacatctgataagccagaagtggtggaaaggggtagcaaggatgaaaaacacaaggaagatgatcaagaggaggggaagggtggattcattgagaaggtgaaggatttcattcatgacattggtgagaagattgaggaagctattgggtttgggaagccaactgctgacgttactgcgattcacattccatcgattaatcttcacaaggcagatcttgttgttgatgtgctcatcaagaacccgaatccggtgccaatccctctgattgacatagattacttggttgacagtgatgaaaggaagctagtttctggattgataccagatgcgggtaccatcngtgcacatggagagcagactgtcaaaattcctgtcactttgatntatgatgaccatcaagcaacatatgctga

SEQ ID NO: 208497 - DNA, 420 bp, Glycine max
aactggagaaaattggtaaatagaattttcttttctaatactactatcatgaaacaatttcattgtattaataatgacatatatcataattattttagtttcgttcaatatcaccgaagcctaggacaaatatgcggattcctttggcatttaggttacaaagcgagtatcccttgattagttcaattcttggtttggatcagtccacttcgttaaatgcaattttgctctttcagcctctttgtcccagtcgcatcgaattgtaatgaggctcaatattaatgtctgagttgctgtgccaccaaaaatcatccctgcccagattcccataactccttgattgaagacccaacccatcaaaattccaagaggcaccccaataatatagtagcaacccaaatttatgtatgcaacatatga

SEQ ID NO: 208498 - DNA, 477 bp, Glycine max
agggtacatagaaagcaccatattttattagaataatggccatgtacatgtacatgtacctgtttaaaaataattatgattacataaaaatcagtattatatatatcaaaacatttttcagggattaaatgatggggttgaatcagtttcaggaggataaaatatctgatacattttcctatcgatgaagttcctgtatggatcctcctccctcttcttgatcaagtaatttaaattgtgttcaacttctgacttaatctgcaggtacatttggttggcactttctctgtcttttagcatcttatccatgccttttgttcttatgggcttcccaaatagaaagtaaaagcgacctggtatctttggtagaagcaccggaaaagagagattttggcttgccaccttgccacttggttcatctctaaacttaactgagtcacggttcatatttcctatttgatcgttgactatggggat

SEQ ID NO: 208499 - DNA, 530 bp, Glycine max
ataattaccaacacatgtcatccctcatatttcttatataagcaacacacgttaacatcactgttttgttgtgagcaaggtttcagctcccaacaaaaaaacacaaggactaatccgtgaaaataagatctatttaggggcttcactgagtttttgcatgattcctattcacagttttgcacacactttctttggtacacaaaccatcttaaaggccttcaacttctctacttccaatccaaccttcaagctgtagcagaccacccttgcattgatcaccatttcaccatgatttggcaacagcaccaactgacacttgttcaccacttcctctggcaaagaccctgatccacaacgggtaaagaagcaccccacagaagggtgctccaaaatgaactcctgattaggaacacatccaccacacacaacccctcttccttcaactctctccttaaaccctagtggaaaagctgattccacacactcaaaatccttagggggtttaagtgcttgccaaaatggcatacctg

SEQ ID NO: 208500 - DNA, 513 bp, Glycine max
ctttcattttccctcactttctcgctccccaaacgcccctctctctcctccaatggccgaccagctcaccgacgaccagatcgccgagttcaaggaggccttcagcctcttcgacaaggacggcgatggttgcattactaccaaggaacttgggactgttatgaggtcacttggtcaaaacccaactgaggcagaactgcaggatatgataaacgaggttgatgctgatggcaacggaaccatcgatttcccagagttcctcaacctgatggctcgcaagatgaaagacaccgactcagaggaggagcttaaggaggctttccgtgtgtttgacaaggatcagaatggtttcatctctgcagctgagctccgccatgtcatgacaaatcttggggagaagctgacggacgaggaggtggatgagatgatccgtgaggccgatgttgacggtgatggacagatcaactatgaggagtttgtcaaagtcatgatggccaagtgaggaccattcca

SEQ ID NO: 208501 - DNA, 463 bp, Glycine max
agggtcataataataataataataaccaaaagaagatgaaaacggagagtaacaaagcatggggagacacagctaccgaagcttctaaaaacaagggacagagccaacaagttggataactagggagcagagaagtagtagcaattaaagcaaacaagaaaaatagacactcaactaacaaaacctaataaccccaaatcaagatggacctaatgggaatagaattctcatcaaaacttatctgccctgtccctcttctctttatatgcttttcaaatttaggttatggttggaatgggcctcacttggccatcatgactttgacaaactcctcataggtgatctgtccatcaccgtgaacattgggctcacggatcattttatccaccttcttgtccgtgagcttcttcccaagatttgtcatgacatggcggagctcagctgcagagatgaaaccattctg

SEQ ID NO: 208502 - DNA, 512 bp, Glycine max
aggactaatccaaaattcaatatgcggcccatgggctcaaatatcctcctcctaaaaggattagatgttgaaatacaagtaattccaatgaaaaacagactcttctccagtgatagttcctttgtatcttagaaggagcattattcaaaattgaagctacacttctataggcaaaacatgggaacctactaacaaggacagtagacaaaaagcaatggtgtctaatttaggcatgagtaagccaatgccttctcctcagaaagctcttctgcagtcaagtccaacttcttccttgagaactcatcaatggaaagtccttgaactattgcccattccccattggcacaagtgacggggaatgaatatataagtccagctggaacattgtaggaaccatcagaatatactcccattgatacccaagtgccctgaggagttccaagaacccagtctctaatatggtcacaagcagcactagcagctgatagtgcacttgaaagctttctagcttt

SEQ ID NO: 208503 - DNA, 458 bp, Glycine max
ttatattttgagcgaactcactttaaacagtggcaaagagtttagggccacgaggaaaggtctcgttgtgaaaatcttttcatgatatcctaaatgttgacattttgagagcttcgttagattacacactaagtgataacgtacaaggtttgattattgcgaagtgcatctcagaaattttaccactaaatgcatatgatcagattcgaacttctatgccttacttgaacaaatgctcttttaccgattgaataggcacctttttactgtgaaaaatgccatcagcaagtgctgctgatgcatttgttttgtcgaacacctcagagaagcgttcaggaacaccagcaccgatacatgcgagtacagggatacttacagcatctgatatcaacttaattaaatctacatcgaatcctttcccttgaccgtcgcaatcaatgcaattaagtggtatttca

SEQ ID NO: 208504 - DNA, 262 bp, Glycine max
ttttattttataatttttttttttatttattattcttgtgatgagttattggttttggtttgttttgtgtttttgtttatttttttgataatttgaaggaaagcacaacacaagaaaacagaaaaacgaagacagaaaaaagggagaaaaacaggggaaggcacagagaggacgcaccgaaaagacagaacaaagcacggggacagaaaaagggggagaaaaaagacaaaggagggaaaaggccacaaaagggacaaaggga

SEQ ID NO: 208505 - DNA, 499 bp, Glycine max
aatttattttctttctgcttctcatggatctctcctcactctcttcataccgcactgtcggagtaacaccttctgatcctcgaaaatcacttcctcaatggggtcttcatttcctctcctacactcacaggctcaaccagattaagaaaaggtcaagtggggtatatgcatcactatccgagagagagagaggagagtattattcccagagaccgccaactccgctactagacaccgtcaactatcctattcatatgaaaaatctctctaccaatgagctgaaacaactcgcagatgaactgcgttctgatgttattttcagtgtttctagaactgggggccatttgggctcaagtcttggtgtggtggaactcaccgttgcactccactatgtctttaatgcccctcaggacaagatactctgggacgttggtcaccagtcttacccgcataagatactcaccggtaggagggacaagatgcataccatgaggcagac

SEQ ID NO: 208506 - DNA, 465 bp, Glycine max
tgaccagccaactttgcgctatagcacgtgtagcactaccacctgcttgggggggggggggggggggggggggggggggggggggggggggggggggggggggggccggggggggggggggggggggggggggggggggggggggggggggtttaaaaaaccctaaaaggggtttttggaaaaaacccccccaattttagcccaatttccccagaggttttaaaaaagcgcttacccgcattacactgggaaaaagggagatttttccccccaaaaagccgtgcttgcccttaatccccaaccccaaaaagcctttttttaagggggggaaaaaatccctttggccccttttggggccgccttttaaggcccccaattttcccccccctaggcccaaacccccaaatttccctaaaaaaaagcccctattaccccaatttccccccaagaaattttttcccaaaa

SEQ ID NO: 208507 - DNA, 549 bp, Glycine max
gcaccctttggccattcatgatcgtacctatagcttccaatattctgattatcgagaggaagatcaggatggctggtgtttcttccatgcttcttttctttctatttgtaatattaatatctcaagtcagtgcccagttaagcgtaacctgtgattacagcaaggtcggaaattacacagcaaatagcacctataacaccaatctgaacacccttttatccactctctcttccaacacagaaattaattatggtttctacaacttctcacatggtcaaagcccagatagagtcaacgccattgggctctgcaggggagatgtggagccagataagtgccgcagttgcctcaactatgccagaagcaatctcacacaagattgtccaaatcagaaagaggcaattatacattttgacaattgcatgttgcgctactccaaccgcacaatatttggccaagtggaaaattttcctggtctctatatgtggaacttaaagaatgcaacggacgtggatgagttcaatcaagtgctcgcaaacttaatgagga

SEQ ID NO: 208508 - DNA, 504 bp, Glycine max
aacaatccatgatattattaaatgagagacaattattcatagtttcgacataatttatcaggcaaacctgattcaactaaaagaagattacataatttaacaatggactttccacaaaccgctaagacatgaatcacatgctttcatagataacaattagaagataatcgtggcttaattaaaatctcaagtggagtagctttagtcttgcctaatccaacggtttcagtcatatcaataggttcatttgatggatttaagaatgaaaaagaatgaaaaagactggcaagaatcaaatgaaccatttgaaggctaaaggatattccaggacacactcttctaccaccaccaaatggtaatagctcaaaatgatgtcccctaacatcaatgtctttatgggtggttagaaacctttctggtttgaactctaatggatttgaccaaacactaagatctgtgtggatcttccaaatatttggaattagacgagttccttttttgaca

SEQ ID NO: 208509 - DNA, 496 bp, Glycine max
gttaaaaagttcaaacctgcatgattgcatttattattttggtttccattacacaaacatggtttattaatgacaaatacaagtacattcagccactccaaatacataacttaaacatacacaactgatgaaggaatcagattccttctatttcacatttatttaaagccagggacagtacttcagcaaccatagagcccttagatagagatactgttgggaattcctctgaaagtcaatccctcctcactagaaggatagagcaaagtgtaaggcattttagccggcccatagcggtttctcaatgtctcattattggtcttctctataagcttcttttcaatctcttcaagattctttccaaacctcttaaaggcctctaatggcccggcatcagaagtccagtagtcaccggcatctctctgcccaaggtagaactcatcagatgcgtgccttgataaaatttctataattgtaaggtcaatgagggtctctt

SEQ ID NO: 208510 - DNA, 433 bp, Glycine max
catcatataaaatatatatgttctgaaagaacacatacaagtacacaaaaaaaagggggaaattcataaaaaaatacagaaaaaaaaaaacagaattgagtaagagggaaggaaacatagagaaaattttagcaatcagataataagaagccagtagtagtgcaaaagtcccttgccaagagtgttggaaccccttttagttaagcaggtaccttctcccccttgagtggcttcaccacttcccatgtgaagtcagggtcatctctgccaaagtgtccatatgcagcagtcttcaagaacctgccatttccacccctcttgagatcaaggttgatggagatcatgccaggcctgaagtcaaaactctccttcacaatgctgaggatttccttgtcagggatcttcccagtgccataagtgtcaacaaacacac

SEQ ID NO: 208511 - DNA, 536 bp, Glycine max
gtttagtgacatttgcagtagtagccagcaggacgaggaaaatgggtagtgtggccccaaggttccgcttcctcctggccactcccttccctcttctccgccgccggcaccaccaccaccaccgcaacctcttcctcctctccacccattccctccccttatcttccttctctttctctctcaaactcaaagcctcccaatcccaagcttccgcccctaacacctctccctgccctgagtggtcctcattcctctcccacatctcctccgccggctacctcccctccctccccgaccaagccttcaccgccgccgccgaacgtctctcctactccttcctccgcgacgccaccgcctgcctcgccttcgcacgtgaccgtcctaaccttctcaggttgctttctacgagagacattgcggcgctggttgagcacggctccccctttctcttccgcgacgccgacgactccgtcaggaagatgaagacctttctctccaacggtgacaccaatgtgttggacactgatagagcaaat

SEQ ID NO: 208512 - DNA, 481 bp, Glycine max
cgcaagcaaaaagaaagaatcccaggcgaggagaaagatggaggggaaggagcaggatgtgtcgttgggagcgaacaagttccccgagagacagccgattgggacggcggcgcagagccaagacgacggcaaggactaccaggagccggcgccggcgccgctggttgacccgacggagtttacgtcatggtcgttttacagagcagggatagcagagtttgtggccacttttctgtttctctacatcaccgtcttaaccgttatgggagtcgccggggctaagtctaagtgtagtaccgttgggattcaaggaatcgcttgggccttcggtggcatgatcttcgccctcgtttactgcaccgctggcatctcagggggacacataaacccggcggtgacatttgggctgtttttggcgaggaagttgtcgttgcccagggcgattttctacatcgtgatgcaatgcttgggtgctatttgt

SEQ ID NO: 208513 - DNA, 541 bp, Glycine max
tctgtctctgtgtttgcggctgaggattccgaacgagcgaccttcttcgtttctcgcaaagtttaagtcatcatgggtaaggaaaagactcacatcaacattgtcgtcattggacatgtcgactctgggaagtcaactaccactggtcatttgatctacaagcttggaggtattgacaagcgtgtgattgagaggttcgagaaggaggctgctgagatgaacaagaggtcattcaagtatgcctgggtgcttgacaagctcaaggctgagcgcgaaagaggaattaccattgatattgctttgtggaagtttgaaaccaccaagtactactgcacagtcatcgatgcccccggacatcgtgactttatcaagaacatgattactggtacctcccaggctgattgtgctgtccttatcattgactccaccactggtggttttgaagctggtatttctaaggatggacagactcgtgagcatgctcttcttgctttcacccctggtgtgaagcagatgatctgctgctgtaacaagatggatg

SEQ ID NO: 208514 - DNA, 558 bp, Glycine max
  unsure (1)..(558): unsure at all n locations
aagatgataacccatgatttccttagaacatgcataatattttacgcaaagtttcttggataaggactagttttgaagtaacattgtgatgtgcatatcaagctcctgtcttcttttttctgccttttgtgttccatattcnttttcattgaaactattacaaggtcaaattattgcaaccaaaataatttcgatcgggtcatcaagtggagaaaaaaaaaaattactcccatggcacatcaccgacaagcatccagtcgccatccctgtcttcataggtcgggacatagtcggagctgttcagaagatccatcaacttgctctcattcatgaaatccttgaagccttgggattcacaatttccaatggtgaaggagctaaacattttgcccaaggcatcagagagctcagggtaactcttgtacatcttcaagtcaactttgcggaggtaaggtgctccatccatgctaactttgacaaagcttgcattagggctgttcttctcgctttctttccgtcgctgctcttttgggctgcaaacatgttctttcggaaaga

SEQ ID NO: 208515 - DNA, 547 bp, Glycine max
  unsure (1)..(547): unsure at all n locations
gttgatgatgtcattgagcattactcaaaaatcaaagaaaatccagagttccattctcttcccagcttcctatttggacagtccatgggtggagctgttgcattaaagatacacctgaaacagcctaaggcatgggatggtgccattcttgttgcgcctatgtgtaaaattgcagatgacatggttccaccaaaattcctcactcatatcctgattggtttagccaatgttttaccgaagcataagttagttccaaacaaggatttagcagaagcagcattcagagatttgaagaagagggaacagactgcttacaatgttgttgcttacaaggataaaccacgtttgaagagtgctgtagaaatgcttaaaactaccgaagaaatagaacagcgattgaaagaagtttctctaccaatattcatccttcacggngaagctgacactgtgactgatccatcagtgagcaaagccttgtatgagaatgcaagctgttcagacaagatgcttcagctttacaaggatgcctatcatgcacttcttgagg

SEQ ID NO: 208516 - DNA, 545 bp, Glycine max
  unsure (1)..(545): unsure at all n locations
cagcactgacttctgctctccttttgccattttcgttcaggcgcagggatgtataataaacctaatccttgcttttgggtgggcttgtgctgcatttgtcaggaaccgagaaataaatagaataaagaagagtatgcggaatggcaataactttgcattcctttgtcatgatattagtgaacttgagcactccaatcaggctgatcttccaagtgtaacagtaattatgcccctaaaaggatttggagaacacaatctccataactggaagactcagttaacatcgctttatggtggccctcaagaatatcttttagtagttgaaagtacagaggatcctgcataccatgctgtagcaaaactaataacagaattagaggattctgttaaagctaggattataatagctggtttatcaacaacttgtagtcaaaaaattcacaatcaattggttggagtggaggcaatgcataaagatagcaagtatgtattatttttagatgatgatgttaggctacatcctggatcaatnggagcactcgttc

SEQ ID NO: 208517 - DNA, 504 bp, Glycine max
  unsure (1)..(504): unsure at all n locations
atttttcacttttgggtgagcagaatcgttatgcttctggaacagatatagtgaggtttccaaggggtggctatgtacatagctttcctttcttagatagttcagaaagtggagccacacagaatgtgctgcaagcttctggctcaaccaaggcagattctccaattcttggtctcacagtgatgggtgaaggtcgcatagctgtgtatggggactccaattgtttggacagcagtcatatggttacgaattgttttgcccttctgaggaaattgctagattttactaatgaagacgttagagatccagaacttttctctgactcaaataaacaagattctcctttgtatgaacctgacaatcagttgccatcccgcagaactgatgtaaatttctctgcattttcagctattgtggggaaggaattgatctgcaggactgacancaggtttgaaatctggggaactaagggctacaatttgcaagtcacgggaagaaaccaga

SEQ ID NO: 208518 - DNA, 483 bp, Glycine max
  unsure (1)..(483): unsure at all n locations
gtcacgggggagatctgattcgggagggtggttgaggggctgtctggtggttttcgcagtggtctcagcgttgggcgtgtgtggccctgctctttactggcgattcaagaacgccatcactctccgcaacaacaacaacaaactctcttgcccttcctgcctctgtgactgccctccccctctctcgctcttccaacttgctcctgggctggcgaatctctctgtctcagattgtggaagtaatgacccggatctaaaggaggagatggagaagcagtttgtggaccttctcagcgaggagttgaagttgcaagagtctgttactgaagcaaacactcggcacatgaacataactntggctgaagcaaaagagtggcgtctcagtaccagagagaggcagattaatgcataactgcaactganacatgcgagcaggcaaaagaacgtgctcaggccatactcacaagggagaaaagatgactc

SEQ ID NO: 208519 - DNA, 581 bp, Glycine max
ctcgagccgattcggctcgagcttatgtttatgacatgagaaacaagcttaatgacaaataccaagagtttgtcactgcttcagagagagatgattttactgctaaacttcaggaagtggaagattggctttatggtgagggtggagatgaaactaaaggtgtatatactgccaagcttgaggaactcaaaaagcatggtgatccaattgatgagcgttacaaagaattcatggagaggggtactataatcgaacagtttgtctattgtataaatagttacagacaagttgcaatgtcgaatgatcccagatttgagcacattgacattaacgagaaacagaaggtcataaatgaatgtgttgaagctgaaaagtggtttaatgagaagcagcagcagcagaactcacttccaaaatatgccaaccctgtactcttgtcagctgaaataagaaagaaagctgaagctgtcgataggttctgcaagccgattatggcaacaccaaggccaaccaaggcgactacttcaccaggaccagcaacacatccatcttctcagagtgatgaacagcagcagcagcag

SEQ ID NO: 208520 - DNA, 587 bp, Glycine max
  unsure (1)..(587): unsure at all n locations
cattcccaaagaagaacgtggcctctctgctaaaccccttatcgtctccaaaaatggcttcttctatcataggcgtttcctccatttaccaaacaccccctctcgaactataccagaggccaagcactgcttccacttcctccgttaggttgcaatctttagactccaagtctcacttcaacaacctcctccgagcccaccgccactccactggcccgggcctcaagcctacaccatctttcgtcccctccgccgtcgccacccccaactcctccctcctcagcgaagaagccttcaaaggacttgcccgcgaattcgaccaaaacgacgaccaattcacccgcgcctcctccgccgccgaatccgttaaccccgacgaactcgacatttccaagctcgacttgccctcgcgtctcgttgagtctctccggagccgtgggattactcaacttttccccattcagagagcggtgttagtacctgcactagaaggtagagatatcattgcgcgagcgaagaccggtnaccggaagacgttagcgttcggaatccaattataaaggcctcactgaagtgagcacgcacct

SEQ ID NO: 208521 - DNA, 367 bp, Glycine max
agaccttgccggcagatttgccgtgctacacgtgtgcagtgccgcctgcttgggggggggggggggggggggggggggggggggggggggggggggggggggggggggggggggggggggggggggggggggggggttttttaaaaagaccggcttgggttttgttcccaaaaatgggggggggttaaggtttggggttaaaaaaaaagttgaaaggtgggcccattttcccaaaaaaaaacccccttttggcccaagttttttaattttcgcccacctaaggaaaggaaaagccccaatttggggccaaaatttggggaaaagggcccccattttgggcccttaaaaaaccccctctgaaaaagtg

SEQ ID NO: 208522 - DNA, 580 bp, Glycine max
gggaagacatgggaaaagcttgggtaggcctggtggtattgctgtgtttgattgtcacggccatcgccgaacaatgcggtcgtcaagctggcgggcagacatgtcccaacaacctatgctgcagccagtacggttggtgtggaaacaccgaagaatactgttccccttctaagaactgccagagcaactgctggggaggcggcggcggtggcggtggcggcggcggcggtgaaagtgcttctaatgtccgcgccacatatcattactatgagccagagcaacacgggtgggacttgaacgccgtgagtgcttattgctcaacttgggacgctagcaaaccttactcatggcgcagtaaatatggctggaccgctttctgtggtcccgttggtcctcgtggccgtgattcttgtggaaagtgcttgcgggtgacaaatacaggaacaggagcaaacacaattgtgagaatcgtagatcagtgcagcaacggaaggttggatttggacgtgggagtgttcaatcggatagacacagatggaagaggatatcaacaggggcatctcatggtaactatcagttt

SEQ ID NO: 208523 - DNA, 495 bp, Glycine max
cttatctaactattgtacctttgcaaaataacattctttagttatttcgaattcgtgtagcacagagagaagagaagagaacttgtattttctgccagtttcccagtatggtggccacaagcacaaatcaatccgagttagaaacaagtaagaaggattccacttatgacagaatagctgaagtcaaagcctttgatgaaacaaaacttggtgtgaaaggcctcttcgattctgggatcacaaagataccacgcatgttccatcatgccaaggtggaggaccacactgaaaccatgccaaatgactcaaacttcagtgtccccatcatagatctccaagatatagacacaaactcatcccttcgtgtgaaagcacttgacaagattcgaagtgcatgcaaggagtgggggtttttccaggtggtgaatcatggtattgctgttgatcttttggatgagatgatatgtggaatccgtaggtttcatgaacaagatg

SEQ ID NO: 208524 - DNA, 401 bp, Glycine max
tgatttaccatttaccacaccaaaaccaatcggatcgtttcctctgcggagtcagaaatccatggatccctacaagaatcggccatcaagcgccttcaattctcccttctggactactaattccggtgctcccatctggaacaacaactcatcgctgactgttggatctagaggtccaattctgctggaagattaccatctggtggagaagcttgcaaactttgacagggaacggatccccgaacgtgttgtccatgctcgtggagctagcgcaaagggtttttttgaagtcacgcatgacatttctcacctcacatgtgccgatttcctccgagcccctggagtacagacccctctcatcgtccgtttgtccactgttatccacgaacgtggcagccctg

SEQ ID NO: 208525 - DNA, 383 bp, Glycine max
gattacgaaaatgtggaagagaacgggttttgaagaagaagcagttcaattgatcaactcagatttcagggacctaagtctagctgctaatagactcgcccatcatgccatcaaacttggtggcattggctttggagcctctttgttcggattgtttgctgccattgctgctatttatctgttgattttggatcgtacaaactggaaaacaaatattctcacagcactactcattccatacattttcttcagcttgccttcattaattttcgacgtattcaggggagagcttggaaaatggattgctgcagttgctggtgtattacgccttttccttccaagacacttacctgattggctggaatagcctggagctctgattc

SEQ ID NO: 208526 - DNA, 440 bp, Glycine max
  unsure (1)..(440): unsure at all n locations
gtcttcataaacgcctttcttctccgtttccgtttcctcgttcgaattcgctttttgatctgcgaaaatgagagagtgcatctcgatccacattggtcaggctggtatccaggtcggaaatgcttgctgggagctctactgcctcgagcacggcatcgggcccgatgggcaaatgccaagtgacaagacagttggcggtggtgatgatgctttcaatactttcttcagcgagactggtgctggaaagcacgtgccacgtgcagtgtttgtagatcttgagcccactgttattgatgaggtgagaaccggaacttaccgccagcttttccacccagagcagctcatcagcggcaaagaagatgccgccaacaactntgcccgtggccattataccattgggaaagagattgttgatctgtgcttggaccgcatcagaaagc

SEQ ID NO: 208527 - DNA, 516 bp, Glycine max
cttgtgcactcagttactctctctctctctggagcgtcgtcgtttcgttagggcacaaaaccccttttcggatcggtggagcaaggcctcgccggcgagattcccgaggctgttcaatcagcgatcgagcaccggcgaaaagcggcgaagatgaaggttttcgtgaagactctcaagggcacgcacttcgaaattgaagtgaacccttcggacacgctttctgaagtgaagaaaaatatagaaactgttcagggtgcagatgtctatcctgctgcacagcaaatgcttattcatcaaggaaaagttctaaaggatggtactactttggaggaaaataaagtagctgaaaatagttttattgtaattatgttatcaaagactaagagttcatctggtgaaagatctactacttcaactgctccttcagttaaggcaagtgcaactcctacttcaacctctgtgtctgctgcgcctcaagctcctgcttcaactggagcaacgcctacacctgttact

SEQ ID NO: 208528 - DNA, 532 bp, Glycine max
caaaaacataaaaattgacacattgtcatctggaaggcaacctaatctgctcagctctccttcatctgtgcaactctctccaagccaagaacatcaactatcattggtacctgcatcagtggaaagagatttggagccattggagaatgaggttcagcctggtgaagattgtacccagtcattggtattggttcagatggctggtgaagatttccagcagaatagtccgaaaaagaaaaggcgcaagttggaaccagctggggaaggggagtcttgcaagcgttgtaattgtaagaaatcaaaatgtttgaagctttattgtgagtgctttgctgctggagtctactgcatagaaccttgtgcatgccgcgattgcttcaataaacctattcatgttgagactgttcttcaaactcgccagcagattgagtctcgtaatccacttgcatttgctcctaaagtcatacgaagttctgattctgtatctgaaattggggatgaccttaacaaaactccagcctcagcacgacac

SEQ ID NO: 208529 - DNA, 473 bp, Glycine max
  unsure (1)..(473): unsure at all n locations
caaaaagaaagaatcccaggcgaggagaaagatggaggggaaggagcaggatgtgtcgttgggagcgaacaagttccccgagagacagccgattgggacggcggcgcagagccaagacgacggcaaggactaccaggagccggcgccggcgccgctggttgacccgacggagtttacgtcatggtcgttttacagagcagggatagcagagtttgtggccacttttctgtttctctacatcaccgtcttaaccgttatgggagtcgccggggctaagtctaagtgtagtaccgttgggattcaaggaatcgcttgggccttcggtggcatgatcttcgccctcgtttactgcaccgctggcatctcagggggacacataaacccggcggtgacatttgngctgtttttggcaggaagttgtcgttgcccagggcgattttctcatcgtgatgcaatgcttgggtgctatttgt

SEQ ID NO: 208530 - DNA, 595 bp, Glycine max
gtgggtttagatactggtgtcccctggattatgtgcaagcaacaagatactccggatcctcttattgacacctgcaatggatactactgcgaaaactttactcccaacaagaaatacaaacccaaaatgtggacagagaactggactggctggtacactgagtttggaggcgcggtccctcgtagacctgcagaagacatggcattctcagttgcaagattcgtacagaatggtggttcatttgttaattactatatgtaccatggaggaactaactttgatcggacatccagtggcctcttcattgccaccagctatgactatgacggtcctattgatgaatacggacttctaaatgaaccaaaatgggggcatcttagagatttgcataaagcaataaagctatgtgagccagctttagtgtctgtagatccaacagtgacatggccaggaaataaccttgaggtacatgtgttcaagacttctggtgcttgtgctgcattccttgcaaactatgacaccaaatcttccgcatcagttaaattggaaatggacaatatgacctaccaccatggtctatcagcatccttcctga

SEQ ID NO: 208531 - DNA, 457 bp, Glycine max
gtggtactacatcctggcgccccctggattatgtgcaaacaacaacatactccgtattctgttattgacacctgctctggatactactgcgaaaactatactcacaacatgaaatacaaatcaaaaatgtggacatacaactggactggctggtacacttaaccaggaggcgcggaccatcgtagaccagcacatgacatgacattttcagatgaaagattcgtacataatggaggcccatctgctaattactatatgtaccatgtaggaactagcttagaccggacttccagaggactcatcattgtctcagctatgactatgactgacctatagacgaatactgacgtttaaatgaaccacaatgggggcatcatagagattcgcatactgaaattaagttctgtgagccagctttagtgtctgtagattcaacagtgacatggtccgataataa

SEQ ID NO: 208532 - DNA, 509 bp, Glycine max
gcaaattgggtcatgaaccaagtgcttgttaaatcatgttatggatttgcaagaaaacttaaaagccatgggtttcattggggtgatctttcatccaaaccattgcatcaaccttcccctttccctaatattgacaagtgtgatttggagtgtagagggtcacaaaccctagcttgtgactttcacaaagtcctcttaaggactcattccttctttccctatttcatgcttgttgcctttgaaggtggaagcatttttagggcattcttcttgctttgttcatgccctatgctgtggatcttaaactatgaaatgaagcttagggtcatgatcttcatctccttttgtggcctcagaatgaaggacatggaaaacacttcaagggcagttttgccgaagttctacttggagaacctcaaccttgaggcctatgaggtagtggcttcagtagggtccagagttttcttcaccactatgcctaaagtgatggttgaaggggttctcaagga

SEQ ID NO: 208533 - DNA, 523 bp, Glycine max
  unsure (1)..(523): unsure at all n locations
gttgaaaacacaaaagaaaaaaaatgggttcttctctgtggacctgtctgattttgttatcacttgcttctgcttccttcgccgccaacccaagagcaccaattgatgtgccatttggcagaaactatgtgcctacctgggcctttgatcacatcaaatacctcaatggtggttctgagattcagcttcatcttgataaatacacaggtactggcttccaatcaaaagggtcctacttgtttggtcacttcagcatgtacataaaattggttgctggtgattcagctggcacagtcactgctttctatttatcatccacaaactcagaacatgatgaaatagactntgagttcttgggaaacagaaccgggcaaccttatattttgcaaacaaatgtgttcaccggtggcaagggtgacagagaacaaagaatctacctctggttngaccctacaagagaatatcacagatactcagtgctatggaacatgtaccagattgttttctatgtggatgactaccc

SEQ ID NO: 208534 - DNA, 597 bp, Glycine max
ctttctttctctctcttttttttttttgccctatctcatagggtttccaccctctctctcatgcatttttgctctcacgagttcttctttgccgttgccctcttattctttgctgtatttggagccttcttttgtgtggaacagagcagatttcacctccctgggttttttgaaccgtgcccatgtctaaagttttcagctttaccggaaatgatgatttctaccatgggggccctatttatcctaacccgaaggaaccatgtctcttcttgtctcttggccgtcaagttgatgtttaccttcctcttcagaagaggtctcgcttcagtgttccatttgatatcagcggagaatggtttgagcagaagcagaagccaaagacatctattgaatctttgccagatgaatgcctctttgagatccttagaaggctgcctgcaggccaagataggagtgtctgtgcttctgtatccaagcgctggcttatgcttctgagcagtatttgcaagactgaaatccacagctaccgaagtactggaaatgaaaaccaggaaattagtgacgaaggatacctatcccgaagcttggaaggaaaga

SEQ ID NO: 208535 - DNA, 552 bp, Glycine max
ctctagattagtactcacaccttataaaagagaaagaaaaagaaaaagagagtgatgaaagcggagatgaaggatggagctcctcaagttgtgatgaatcataatggtaaccacggcaaattctcacacctacttgcttcccaagatcgtgactatcttctctctccaactggggctcaggtgaaagtttctgatcttgaagggaaagtagtgggtctattattcgctgcgaattggtacccaccttgccgtggattcacccaagtcctagctggaatctacgaggagctaaaaagcagagtccctcaatttgagattgtgtatgtgtcctcagatgaggacttgaatgcctttaatagcttctatggaagcatgccctggattgcaattccgttctctgatttggaaacaaagaagtctttgaccagaaagtttgacgtggaagccgttccatgcttaattttgttgcaacctgacgatcgtaaagagcacgcaacagttcgtgatggggttgaacttatttaccgctatggaatccaagcttatccattc

SEQ ID NO: 208536 - DNA, 578 bp, Glycine max
  unsure (1)..(578): unsure at all n locations
atcaaaaaccctaaccaagaaagttttcaccgcatctccacctattctcaatctccacaaatcgaagaaaagagaatgagtagacgctcgagcagaactgtctacgttgggaatctacctggtgatatccgtgaaagagaagttgaagatttgtttctgaagtatggacacataacacacattgacctaaaggttcccccaagaccacctggttatgcatttgtagagtttgaagatgctcaagatgctgaggatgcaattcgtggtcgtgatggctatgattttgatgggcaccggttacgggtggagcctgcccatggtggacgtggtcattcatcctcaagagatcgatacaatagtcacagcaatggccgaggtggaccgtgggtgtctaggcgctctgatatcgtgttctaatctctggattgccctcttcggcatcctggcaggatcctaaggatcacatgcgntaggcaggggatgtttgtttttctcaagttttcatgatggaggggtactaccggtattggggatacacaaatatgatgatatgaaaatgctatcaagagcttgatgac

SEQ ID NO: 208537 - DNA, 547 bp, Glycine max
  unsure (1)..(547): unsure at all n locations
gagaggaagagggagtgagagagagtgttcttcgtttgctaccttctcccagaaatggttacgttcaggtttcaccagtaccaggtggtcgggagggctctcccaacggaagcagatcagcatccgaagatctaccgaatgaagctctgggccaccaacgaggttcgcgccaagtctaagttctggtattttttgaggaagctgaagaaggtgaagaagagcaatggtcaagttcttgctatcaacgagatttttgagaagaacccaaccaagattaagaactacgggatatggttgcggtatcagagtaggactggttaccacaacatgtacaaggagtaccgcgataccactctaaacggttcagttgaggcaatgtacaatgagatggcttctcgccacagggtcaggagcccatgcatccaaattatcaagactgcaaccatcccagctaagctttgcaagagggagagcaccaagcaattccacaactccaaaatcaagttcccattggtcttccagaaagttagaccacctaccangaagc

SEQ ID NO: 208538 - DNA, 297 bp, Glycine max
gtttactgacacttgcagagagtgtttttcttactaggttacagcggcgtgggccaagagggtgaccatggccatggtcaccaacctgctctagtctacggggttcgcggcatcatcacgacctagacatgttgaatactcttgaacgaaaaccgcccacgcacgccaccctatgcatgacgaggaactgaagtccatgtacgagcagaggctagtaaagcacggcagggcgtgcaccgcgctgcgagagaacgagaacaggatccattacttcagggacaacctgcgattcatcga

SEQ ID NO: 208539 - DNA, 566 bp, Glycine max
agccattgaagggtggaaagcctcgtgttgctgattttgttcatggtaaagatggactagggaacacattcctacccccacctaaaggtgagaaaattgagaaaagtgctagtgagtttttggtagagaaagtctctgaatatcctggtgaagtatctgtgctagcacttggaccactaacaaatttggctttggcaatcaaaagggattcttcctttgcaagcaaagtgaagagaatagttatacttggtggtgcattctttgccttggggaatgtgaatcctgctgcagaagccaatatccatggagacccggaagccgcagatattgtgtttacctctggggcagatattgttgttattggaataaacattacaacccaagtccaattcacagatgctgatctcctcgaactgaaggaatctaaaggaaagtatgctcccttcttgagtgacatatgcaaattctatagggactttcatgtaaaatctgatggtgtccacggaattttccttcacgatcctgtaagttttgtggcagttgtgcgtacagatcttttcacatac

SEQ ID NO: 208540 - DNA, 395 bp, Glycine max
gataaagcacagaacagttgaagtgaatggcataaaaatgcatgttgcagagaaaggagagggtccagtggtgttgttcctccacggcttccctgagctctggtactcatggcgccatcagattctctctctcagctccctcggctaccgcgccgtcgctcccgatctccgtggctacggtgacaccgaagcaccaccttcaatcagcagctacaactgcttccacatagtgggtgatcttcgtgcgttaatggactctttgggtgtccaccaggtgttccttgtgcttaatgactggggagccatcataggttggtatctatgcatgtttcgccctgacaaagttaaggcctatgtctgcctcagtgtccctctcctccgcagagacccaaaca

SEQ ID NO: 208541 - DNA, 432 bp, Glycine max
  unsure (1)..(432): unsure at all n locations
accaactcggttcttttttttctttcaccttcacctatggccatggcttctttgattcagtgttctgcaacttccctctccgctgtccccatcactacccgtttcaccaggacccacaagtctcgccttcgctgctccttagatgctaatgtttccgacatgagcgttaacgcgccaaaagggttgtttcctccggaacctgaacattatcgaggaccaaaactgaaagtggcaattattggagctggacttgcaggcatgtcaactgcagtggaactcttggatcaaggccatgaggtggatatctatgagtcaagaccttttattggtggcaaagttggctcttttgctgacanaggtgggaatcacattgaaatgggattgcatgttttctttggttgctacaacaatctttttcgattgttgaagaag

SEQ ID NO: 208542 - DNA, 518 bp, Glycine max
  unsure (1)..(518): unsure at all n locations
gctgaaccctcacctcaatcttgcgtgctagctagctttattccaattcctacagaaccaaattattctgctagctagctagtacgtcaaataaaataaaataatcaaatatggcattcagcgggacccaacagaaatgcaaggcttgcgacaaaactgttcactttgtcgaaggtttatctgccgatggagctgcttatcacaagaactgcttcagatgcagccattgcaatggccttcttgcgataagcaattactcatccaccgaaggagttttgtactgcaaggtgcactttgagcagcttttcaaggaaactggaacctaccccaagaaatcccagtcgtctggaaagcctccactcgagctgaatagagcaccaagcaagctttctgccttcttctctgggactcaagagaaatgttcaaaatgcaagaaaaccgtatatccattggagaagttgaccgtggaaggcgagttntaccacatatcatgctntangtgtgcacatggagggatg

SEQ ID NO: 208543 - DNA, 496 bp, Glycine max
  unsure (1)..(496): unsure at all n locations
aatttgcattgatatgtaaatatgcaatggactagcaacattactaaatacattcgtgtacgatatccatatgttaaagccgtaacctatggactatcacacaacagttctgctactgattacctttgtgagtgcaaccattattctcatattcattcggagattattcaaccaaacctcagaatcagaatatgcaaagcttccaccagggcctcgtccatttcctatcataggaaacatcttggaacttggcacaaatccacacatagcactcaccaaattctcaaagatttatggacctcttatgacttttaaacttggcagaataaccaccatagttatctcctctcctcaagtagccaaagaagtactacttgaaaatggtcaagtcctttctagcagaacaattccacattcagtccatgcacttgaccatcacatatactctactgtgtggctgccaccatcagctcatggaggaaccttangcgagttt

SEQ ID NO: 208544 - DNA, 566 bp, Glycine max
  unsure (1)..(566): unsure at all n locations
cactttcttgttttctctctcaccctcatatccatcatcttccacacccatggagcgttctctgagcaatcaataatcaagttacccacagaccaaccaagggtagagaaactgacccacttgcattttttctaccacgacatcttagagggcaagaacatcacggtggtgaaaatcatcgagccatcagcgagcgaggttcgtgaagcaactgggtttggaaccactttcatgatggacaatgttttgaccgagggtccagagctgagctcgaagcacgttgggagggctcaggggctgtttggcttggcctctttggaggaccgtggaatggtgatgctcattaacttggctttcagtgagggtgagtatgctggcagcactctcagcatgcttgggaggaaccctgttcaggacactgttagggaaatgcccattgttggaggcacggncgtgttcaggtttgccaagggctatgccattgccaagagtctttgggaaatttctgacaatgagcattttgtggtggagtatcatgtcactggttctcatccttagatctatat

SEQ ID NO: 208545 - DNA, 591 bp, Glycine max
  unsure (1)..(591): unsure at all n locations
gaaaaaccatggcaataacactcaacaatggcttcaagatgcctatcattggattgggcgtgtggcgcatggaaggaaacgaaatcagggacctaattctcaattccatcaaaattggttatcgccattttgattgtgctgctgactacaaaaacgaagcagaagttggagatgcgcttaaggaggcttttgatagtggccttgtgaagagagaggatctcttcattaccaccaagctttggaattctgatcaaggccacgttcttgaggcgtgtaaagacagtctcaagaagcttcagttaacgtatctagatttatatcttgttcactttcctgttgccgtaaggcatactggggttggtaatacttctagtcctttgggtgatgatggggtcctggacatagataccaccatatccctggaaacgacctgncatgcaatggaagatcttgtttcatcgggcttggttcgcagcatagggatcagcaactatgatatctttctgaccagagattggttagcatattccaagataagcctgctgtaaatcagattgaactcatcatacttcagcgtgattcttagtcaat

SEQ ID NO: 208546 - DNA, 487 bp, Glycine max
cttttcttctatttttatttctatccaatcatccatggccgaggaaccccaaaaaccagcctccgctgaagaagtggtcgctgttcctgcggagaacccaccatctgaagccgaagctgaaaacatcgaagcagagaaggcccagagtggtgtagaagacaagatttcccagtcggtttcgttcaaggaggagaccaacgtggttggcgacctccccgaggcgcagaagaaagcccttgatgagctcaagaagcttgttcaagaagcgctcaacaaccatgagctaactgctcccaagccagaaccggagaagaagaaaccagcagcagagaagaatgaggaagttgaagtgacagaagggaagaatgaagctgaagtcatagaagagaagaatgaagtggaagtgacggaagagaagaaggaaatagaagttacagaagagaagaaggaagctgcagtcatagaagagaagaggaaagtggagtga

SEQ ID NO: 208547 - DNA, 416 bp, Glycine max
cgactgtgccaggtaagttttcctcctacatgtgagtagtacctcctgcttggggggggggggggggggggggggggggggggggggggggggggggggggggggtgggggggggggggggtgggacgggggaaagttcccaaaaaccaattttgcattcagggaaaataaatgggttccctagaaaacgggggtttttggtaaatacatgggaaggccggttgcgtaaaagtaattttcatttaaaaagcatttttgaggggttaacctaaactataaacccggggatttaaggtttaaatttattggccaaaaaatccaaggaattcctattggtaaccccaggctttcaattttaactgcgcaataaaggccctacttcagggcaaaaaaaagcattttctcgggaaaagagg

SEQ ID NO: 208548 - DNA, 581 bp, Glycine max
ctcctactggaagaattcacaaaggagtatgttcaacctggatgaagaatgccattcccttagagaaaagccgtgactgtagttgggctcctatttttatcagaacatcaaacttcaagttaccagctgatcattccattcctattattatggttggtcctggtacaggcctggcacctttcaggggatttttacaggaaagattggccctcaaagaggatgccgttcaacttggtcctgcattactcttctttggatgtaggaatcgacaaatggattttatttatgaggatgagctaaagaattttatggaacaaggtgctctgtcagagttgatagtcacattctcgagagagggacctgaaaaggagtatgttcaacacaagatgatggataaagctgcaaatctgtggaatttgatttctcagggaggttatctttatgtttgtggtgatgctaagggcatggcccgagatgttcatcggactcttcataccattgtccagcagcaggaaaatgtggactcttcaaggcagaggctatagtttaaaaactccagatggatgacgtattctagagat

SEQ ID NO: 208549 - DNA, 498 bp, Glycine max
cacttcacctcaatgccagaaaacatctttacaagggctctcacttcatgaagccaaaaggggtgtttcagaatccttcctagttgagaacaacaatggttcctccattgctggaaggagacttgagatcacagcacgaactgctggggcttcaaagacaattgaggtggaggttgacaagccacttggcctcaccttaggccaaaagtctggtggtggtgttgtcatcactgctgttgatggtggtgggaatgcagcaagagcagggttaaaggcaggggaccaagtcctttacactagcagtttctttggggatgaattgtggcctgcggataagcttggatttactaaaaccgccatccaagcaaagccggactctgtctactttgttgtcagcaggggtgctgaagtagacgttaaaaagctcacaaagcgacctgctcctgctcgatttggaagaaaactgaccgagactcaaaaagcgagagctactcacat

SEQ ID NO: 208550 - DNA, 528 bp, Glycine max
gcattttgcttgttatttcacgcgttctctctccaatttggacctccctttccttcgttcctcactcactgcaacggcgccggagatccgtcgctctcctcctccaccaccaccgcgatgggcgccaattccatgctcgccgagttctctcacgatctcgacgaccagatctcccagctcatgcagtgcaagccactctccgagcaacaggtccgaggtttatgtgagaaggctaaggagattttaacggatgaaagtaatgttcagcctgttaaaagccctgtgacaatttgtggcgatattcatgggcagtttcatgatcttgctgaactgtttcgaattggagggaagtgtccagatactaactaacttgttatgggtgattatgtggaccggtgttattattcagttgagactgtgtcactcctcgtggcactgaaagttcggtatcctcagcgaattactattcttagaggaaaccatgaaagccgtcagattacttaaagtttatggatttatgatgaatgc

SEQ ID NO: 208551 - DNA, 535 bp, Glycine max
  unsure (1)..(535): unsure at all n locations
cgtgagccttagcgagcaacagcttgtggattgcgatcacgtgtgtgatccagaagaatatggagcgtgtgactcaggctgtaatggtgggttgatgaacaacgcatttgagtacatacttcagtctgggggagtacagaaagaaaaggactatccatacaccgggagagatggcacctgcaaatttgacaaaaccaaagttgcggctactgtatctaattacagtgtggtttcccttgatgaagaacaaattgctgcaaacctagtaaagaatggccctcttccagttgctatcaatgcagtttttatgcagacatatgttggtggcgtctcatgcccatacatctgtgggaagcatttggatcatggggttcttctagttggttatggtgaaggtgcatatgctcccattcgttttaagaacaaaccttactggatcattaagaattcatggngcgagagctggggagagaatggatattacaagatctgcagaggtcgaaatgtgtgtggagtagattccatggtctcaact

SEQ ID NO: 208552 - DNA, 341 bp, Glycine max
caccgacaaaaaatggaactttcactatttgaattcattttccgttccccactccccgatattgccatccccacacacctcccattgtactcttactgattccaaaagttgtcacagttacatgaccgttcatgcctcatctacggcgacgccagcgaaacccttacctacgccgacgttgatctctccgctcgccgcatatccggcggcctgcacaaaatcggcatctgccagggtgacgtcatcatgctcgtccctcgcaactgcccgcagttcgcactcgccttgctgggcgccactcaccgtggcgccgtagtcaccacccgccaccccttttacac

SEQ ID NO: 208553 - DNA, 410 bp, Glycine max
gcaaaaagaaagaatcccaggcgaggagaaagatggaggggaaggagcaggatgtgttgttgggagcgaacaagttccccgagagacagccgattgggacggcggcgcagagccaagacgacggcaaggactaccaggagccggcgccggcgccgctggttgacccgacggagtttacgtcatggtcgttttacagagcagggatagcagagtttgtggccacttttctgtttctctacatcaccgtcttaaccgttatgggagtcgccggggctaagtctaagtgtagtaccgttgggattcaaggaatcgcttgggccttcggtggcatgatcttcgccctcgtttactgcaccgctggcatctcagggggacacataaacccggcggtgacatttgggctgtttttg

SEQ ID NO: 208554 - DNA, 523 bp, Glycine max
attcaccatttttctcttttccgttctgttctgttctgctttgcccctcttttctcccaatgactactcaccattctctctctttccaactcctctgagcctcgctcgttaggatctctgtctcttctcggagacccacaaaacaatgtcttatttatttccttctcaaacaaagaacctctatttccccttggctgctcagatctagtattcctcaagtcacaacctttttttgttccgttagcggtgtgagacatgagtaaagaagaattcttgaagatacagaaatgtgttcttaaagtgaacatacactgtgacgggtgcaagcacaaagtgaagaaaatcttgcagaaaattgatggggtgtttaccacagagatagatgctgaacaagggaaggtgacggcttcagggaatgtggatcccaacgttctgatcaagaagcttgcaaaatctgggaaacatgcagaactctggcgttgcacctaacccaacaacaacaacagtgatcataatcattata

SEQ ID NO: 208555 - DNA, 602 bp, Glycine max
  unsure (1)..(602): unsure at all n locations
cacgaacaagggtgtgttctgagtcagcttcggcaacggttcctagcggcagcaccaaacaagtcgagtcgacgcaagctgcattgctttctcaatataaataagtttaattcgagacgtcatcttactctcacctgaaaaccattcattcattgatcaaactcccaaaacaatggcttctttcaatctctcttattcttcctcaccagccctctcatgtcctcgggcgagcaaacaattcaaattattcaatgatgtgccttttgtccgaatgaattctaaatttccctcaagtgacaatgctattgggagaattaaagctaagttgatctctgngagggggtgatctactttcctatccaaatggcaatggcattgtgataggtaaaaatctggttggtgatgaatctgttcgaattgaggtacagccgaatagaacactggcagcagacacagggctaacaagcaatgttttctctattgacaacgatgaatttgatttggacagccccacagcaggttttgcttccatttctgaggcaattgaagacattcgccagggaaagatggtagtggttgtggaccgataagatcgagaaaat

SEQ ID NO: 208556 - DNA, 592 bp, Glycine max
tttagatttcgtgaagcccaccattctaaactcaaaacccagcaacaaagacgagactttgaccctctccaccacctcctcctcctccttcacgtcctccgtcaccaacgacgccagcgtctccgacggcaagatcggcccttttctccctccctccgccgccaagccacctctctcctccgcccaccggaaaaagtgccgcgacgctgccgccgcactctccaccaaaccctcctgccactgctccaagaaaaggaaatcacgcgtgaaacgaacgattcgtgtgccggcggtaagctccaagatcgccgatatcccatcggacgagtactcgtggagaaaatacggtcaaaaaccgatcaagggttcaccttaccctcgagggtactacaagtgcagcaccgtgagagggtgtccggcgaggaagcacgtggagcgagcgcaagataaccccaagatgctaatagtgacttacgagggtgagcaccgtcacgttcttccgttaactgccgctgccggcgttagtttcggccattaatagagttgagtaatcgacgtcgtcgtttcggaaacctgacggggggacgtagat

SEQ ID NO: 208557 - DNA, 547 bp, Glycine max
  unsure (1)..(547): unsure at all n locations
ctctgcgactcatgcaaatcagccactgctaccttgtactgccgccccgacgcggccttcctctgcggcgcctgtgactctaaggttcatgccgccaacaagctcgcatcgcgccacccgcgcgtcgtgctctgcgaggtgtgcgagcaggcgcccgcgcatgtgacctgtaaagccgacgccgccgcgctctgccttgcctgcgatcgcgatatccactccgccaaccccctcgccagccgccacgagcgcatccccgtcacgccgttcttcgagtccgtacattcagtcaaggcctcctcgccgatcaacttccaccaccgcttcttctccgacgccgacgctgatgctgacgtcagcaccgaggaggccgaggccgcgtcatggctgctacctaatccaaagacagatctaaattcgtctcagtacttgttctccgaaaccgaaccggttccttacatagatctggattacgcggccatggatccgaagacggagcagaaaagttccgncaccgncgacggcgtcgttccggtgcagagcaact

SEQ ID NO: 208558 - DNA, 433 bp, Glycine max
tcctgctgatatggccaagaagaaaacaagtgtaatttcaaataactggtttcctgtttgggatgaagagtttgatttccctttgactgttccagaactggctttgctccgcatagaagttcgagagaatgataagagtcagaaggatgactttggtggacagacatgtttgcctgtctcagagctaaaatctggattccgatcagtccctctccatgatgaaaagggtgacaaattaaaatctgtgaagcttctgatgtggtttcagtttagatgaattataggatcagccatataataatcttagataatggatatgaggtcattgtaatgataattatatttatctttagctgcttgcaatggtatttctggctttactatgttatattttctgcaccatcaacatcaatataaaacagtattaagaact

SEQ ID NO: 208559 - DNA, 446 bp, Glycine max
  unsure (1)..(446): unsure at all n locations
cgaaattggagcagaggagtggcggaggacgaagtcgacggcgacaatggttaacgaaacggtgcggtggtgtgctttgttgtagtcgtctccgatcatcatcgagaatgcgcaatctggctgcacctcattccttgggggttttcatctttcgccccaataagcctccttttctcactctcccctcactctctcgaagatctctcccttccatccagtgcggtgcagttcaattccgcccctgcatcgatatccacaaagggaaagtgaagcaaattgtagggtccacccttcaagacttgaaaggctccgatcccgtcaccaattttgagtctgataagtcagctgctgaatacgccacgctntacaagcaagatggactcactggtggtcacgtcatcatgcttggtgcggatcctttgagcaaagctgctgcccttcaagca

SEQ ID NO: 208560 - DNA, 453 bp, Glycine max
ctgcaatcataatgttccagagagaatttgccatgagactggttgctcagcctggtgataaactatattgtcgtctcacagtcaacactcaactacatgctcgagtcttccacctcctcaaagttggaagaaacaacttcaggccccctcccaaggtggattcctctgtggtgcgaattgagcccaggaaaccccgtattgaagttaagcaaaaggagtgggatgggtttttgcggatttgttttaacaggaagaacaaaacacttggttcgatatttaggcagaagagcgtgatctccttgcttgaaaaaaactacaggactgtgcgggcactggaactcgggcaagaagattcactgaaggaagtggatgctaaaatggacttctctagttttggtgatgatcaaagtatggagatggatgatgatggagcagatgatgatgaaatggaag

SEQ ID NO: 208561 - DNA, 483 bp, Glycine max
aaaaaattcaagatccaaatgttcttcttaaacttttaatttttatttaatcggcaaataatatatatatatatatatatatatatatatatatatatatattatagaaggagtaccagaattatttgaaggaaaagtttaaagctcaaataaaaagttactgaattcttaaacatatagttagagattctttgttgttattgaataatagttagttagaggtttaatcttcatgattgtatgtatgaaaaaagatatgtagtgagactttcggttctatgaataaatttttatactttgaaggattagtcttttagtcttactcaaaagatatcttaaattgaaaaaaaaagtgattatttatcatgcacacactataattacattaaataaaatattattcaattcttggacaagatagttcttatttgacttgttctgattaattggattggcttgatccacatttgaagttttggatca

SEQ ID NO: 208562 - DNA, 522 bp, Glycine max
  unsure (1)..(522): unsure at all n locations
gtttctgtctctgtgtttgcggctgaggattccgaacgagcgaccttcttcgtttctcgcaaagtttaagtcatcatgggtaaggaaaagactcacatcaacattgtcgtcattggacatgtcgactctgggaagtcaactaccactggtcatttgatctacaagcttggaggtattgacaagcgtgtgattgagaggttcgagaaggaggctgctgagatgaacaagaggtcattcaagtatgcctgggtgcttgacaagctcaaggctgagcgcgaaagaggaattaccattgatattgctttgtggaagtttgaaaccaccaagtactactgcacagtcatcgatgcccccggacatcgtgactttatcaagaacatgattactggtacctnccaggctgattgtgctgtccttatcattgactccaccactggtggttntgaagctggtatttctaaggatggacagactcgtgagcatgctcttcttgctttcacccttggtgtgaagcagatgatc

SEQ ID NO: 208563 - DNA, 586 bp, Glycine max
agctgacggtgctgatcgccggagacctcacccatcattcccaagaacttgacaacttcctggcacaatatttgatagttttgtgtacatttaaagaacagcttcagcaacatgtcagagtccacgccgtcgaggctgtcatggcctgccgtgatatcgaaaataccttacaagctctcactggagtgagtttgggagaaggaactggtgcaacaatgtcagatgacgaagatgatttacagatggatttttctttagatcaatctagcgctgaagggcatgacatgatgggatttggtcttcctacagaatctgaaaggtcattgatggaaagagttcgccaggaactaaagattgagctgaaacagggtttcaagtcaagaattgaagatgtcagggaagaaatattaaggaaacgtagagctgggaaattgccaggtgacacaacttctgtgttgaagaactggtggcagcaacatgcaaagtggccttacccaactgaagatgacaaggcaaaacttgtggaggagacagggttgcagcttgagcaaattaatattggttcatcaaccaaaggaaacgtaac

SEQ ID NO: 208564 - DNA, 450 bp, Glycine max
atactgttccagccatacagtcgagtggcatcaagattatagaggagtaccaactaagtcgcaagctagatactcaagcctattgtgatcatacctgtgtaatagcaaaagaacatttggagcctaacttatgtgggctcactgttgagaatgctttccaaaactatgacgttgttcactttatatcaccatgactatctcattccttattatgaggaatattaatgcatataccacaaagacttatgctacatgaaccatattcatcttgaaagatgatggaactttgacaccattggccatatgagctaatgaatgccacatactcagggtgaagaatatggacctgttagcgaatcctacgtgccagccagcgaaagagtggaatgcttatataaggttactggaaaggctgatgttgatggaatgatgcatgctaccatcaaataa

SEQ ID NO: 208565 - DNA, 605 bp, Glycine max
  unsure (1)..(605): unsure at all n locations
cccaaatgcaaacataattcatttacatctttctttcttctttctgcaaatacttccatttcctgatttcctcaaaacaacaacacgtttaattttcatctccttccttttctatcctattcctctccctattattattattggtacatcntttttcttcttcctctgatacaaagacaccatgagaggacaggaagatcagcaatctagggttttctgtgagctctcggctctggtcttcaaccttctccggtcaccgtcgatcgtgccggagcctccggcgaggcgttcgccggcgggggcgcagattactccggcggggttcgcgtcgctactgctagggatttcggtggcgctgatgctgtgtggatcggtgactttcttcatcgggttcatgctgatgccgtgggttctcggattggttatggtgttttacgtcgctggcgtcgtttcctctctctccgttctcgggcgttctattctctgttacgctacgccacgtaaggatctccctgagtggaaacttatataaaaagaataataatcgaattgaccagtactatactggtntgtgcctgcctgctcatgctgccattagacaatga

SEQ ID NO: 208566 - DNA, 590 bp, Glycine max
  unsure (1)..(590): unsure at all n locations
ctctttcttcccaccttcctctccttctttctttctgcttaaggtctacacaagttctctgcttcttctccccctattgacctttggtcatcacaagcgaaaacccacttctggatcttctggtgtaaaggccattagaagctttagaaattntctaattgagttggtgtatagtgttgaagggggtgaaatctggagcccagtttgttagttgttactcacttcatctgtaagctcataggttgaaccctctttttttggagacttacctgggaaaagatgatgatgtttgaagatatggggttttgtggcgatttggatatgttatgtgtttctcttggagagggggatattgctgtgagacaaactgaaccggatcctgtagttgaggatgactacagtgatgaagaaattgatgtggatgaacttgagaagaggatgtggagggacaaaatgcgtcacaagcgattgaaagaacaaaccaagtccaaggaagggactgatgcaacatagcanaggcaatcccaagagcaggcatggaggaaaaagatgtcaagagctcaagatggaatactgagtacatgctgaaa

SEQ ID NO: 208567 - DNA, 574 bp, Glycine max
  unsure (1)..(574): unsure at all n locations
aaaatattattaagatgatcaacattattggagcacttgttctactctttgcatttctcttcctcagttgtgtgtatgcacaagacacaacaacccttgtgcctgcaatcataacttttggtgattctgctgtggatgtagggaacaatgactatcttcccacccttttcaaggctgattaccctccttatgggagggactttgttaaccaccaacctactgggaggttttgcaatggcaaattagctactgatttcactgctgacacattgggtttcaagacctatgctccagcatatcttagcccacatgcatcagggaaaaacctccttattggagcaaactttgcttcagctgcatctggttatgatgaaaatgctgctactttgaatcacgcgattccgttgtcccaacagttgagttatttcaaggaataccaaggcaagctggccaaggtagctggcagtaaaaaagcagccttaatcatcaaggatgcgttgtatgtgctcagtgctggaagcagtgactnttgtgcaaattataatgtcaatccttggatcaacanagtctacac

SEQ ID NO: 208568 - DNA, 539 bp, Glycine max
gaagtaatggcgaacatagacatcgaagggatcttgaagcagcagcagccttatgatgggcgcgttccgaagacgaagatagtgtgtactttgggccctgcttctcgatccgtagaaatgaccgaaaagcttctgagggcagggatgaacgttgctcgtttcaatttctctcatggcacccacgactatcaccaggaaaccctcaacaatctcaagactgccatgcacaacactggcatactctgtgccgacatgcttgacactaagggacctgagattcggactggttttctgaaagatggaaaacctattcaacttaaagaagggcaagaagtcaccataactactgattatgacattaagggggatccggagatgatatccatgagttacaagaagctgtctgtacacttgaagcctggaaataccatactgtgctctgacgggacgattactctcactgtcttgtcttgtgaccctgatgctggtactgttagatgtccgtgtgaaaacactgcaacgtgggtgagagaaaaatg

SEQ ID NO: 208569 - DNA, 519 bp, Glycine max
ctgtttctcaatcgttagatctcatcttatactcaccggcgagtccatctcgcgccagcgtcgacgccgctccggcaaccgctccggccaccgcctttggttccctcactttctcgtccttcttcttctcagaaatatgccttctcagaaagttgaaacgggtcatcaagacacggtccatgatgttgcaatggattactatggtaagaggctggccacggcttcatcagatcacacaattaagataattggggtgagtaatacggcctctcagcatctcgcaacattgactggtcaccaaggacctgtttggcaagtggcgtgggctcaccctaagtttggttctctacttgcatcgtgttcctatgatggtcgtgtcattgtttggaaggagggcaaccaaaatgaatggactcagctcatgtgtttgatgaccacaagtcatctgtgaattcggttgcttgggcgcctcacgagttgggtctttgcttggcttgtggctcgtctgatgggaatata

SEQ ID NO: 208570 - DNA, 504 bp, Glycine max
  unsure (1)..(504): unsure at all n locations
aaaaagctcttttccttctaaatttgattccttagttcagcattctattattatatatggcttcttcaccttcctcagaaaacaaaaacctagagggagtagctggtggtgccggagagaaacccattccacttggtgagaacgttctgcagaagcatgctgcattctttgacttgaataaagatggtgtcatctacccatgggagacttttaaagggttgcgtgaaatcgggactggggttttgctgtccgttggaggtgctattttcatcaatgtgtttctcagtcagagtactcgtcccggaaagtttccatctatactttttccaattgaaattaaaaatatccaacgcggcaaacacggcagtgacactggagtctacgatactgaaggaaggtttgtaccttcaaaatttgaagaaatttttaacaagcatgcacatacacatccaaatgctttgacatatgatgagttaacggagatgataaggcnaatagagagcc

SEQ ID NO: 208571 - DNA, 467 bp, Glycine max
  unsure (1)..(467): unsure at all n locations
cacacacgcacagatctgatctatctgaagctgaaaacgccgacgcccgacggtgatgatgaagatggggtcctcaccttcacgttgctccttcttcctattcctcctcctcctagtggcgctcttcccctcgtcgctctccgagatccggttctccgagatccgaaacgacgatcgctccatcgttcccttcgatcagtttggattcacccacaagggtcgccttgagctcagcgtttccaaaatatcactctccaattccaatttggacctctccaaggtgggattcttcctctgcaccctggattcctggcttcatgtcttccagcaactggaggatggcgagattcggtgcgcccttcaatccgatctggtcaagtccgtctacaccttcaattctctcaacggcaaggactctttcagcacgctctancaagaagaaaccgacgccgatcagtacaacctcg

SEQ ID NO: 208572 - DNA, 521 bp, Glycine max
  unsure (1)..(521): unsure at all n locations
gatgcaggaagcgacgaaggtgataataatcggtgccggaacttctggtatcgccaccgccggttgcttaacgaagcaatcaataccttacataatgctcgagagagaagactgtttcgcttcgctgtggcagaaatacacctacgatcgtctccaccttcatttgaggaagcaagtttgcgagttaccgcacttaccgtttcccaagtcttaccctcactacgtgcctcggaagcagttcatagactacttgggaaactacgttaaccactttgagatcaagcctctgtaccagcgtgcagtggagttggtggagtatgatggatggaaagggatttggagagtgaaggctcagaatagaagatctggtgagcttgaagaatacgctggaaagtacctggtcgtggccagtggcgaaaccgccgagcctcgtctgcctcaaattcaggctttgagagtttcaatggaaagtgattcactcaactggctacaaaacggaacgagtntaagaataacatgtc

SEQ ID NO: 208573 - DNA, 442 bp, Glycine max
aggaaagaaaactctcaaaaaactattatagcaatggcagaacaaaaccaaaaccaaacaactgaagctggaaggcaccaagaggttggtcacaagagccttctccagagtgatgctctttaccagtatattctggagacaagtgtctacccaagagaacctgaatccatgaaagaactgagagagttgacagcaaaacacccatggaacatcatgacaacctctgcagacgaagggcagttcttgaacatgctccttaagctcatcaatgccaagaacaccatggaaattggtgtctacactgggtattcacttcttgccaccgctctcgctcttcctgaagatggaaagatcttggccatggacattaacagggagaattatgaattgggtttgcctgtaattaaaaaagcttggtgttgaccacaaaattgaattcaga

SEQ ID NO: 208574 - DNA, 493 bp, Glycine max
caccgacaaaaaatggaactttcaccacaagaattcattttccgttccccactccccgatattcccatccccacacacctcccattgtactcttactgcttccaaaagttgtcacagttccatgaccgtccatgcctcatcgacggcgacaccagcgaaaccctcacctacgccgacgtcgatctctccgctcgccgcatctccgccggcctccacaaaatcggcatctgccagggtgacgtcatcatgctcgtcctccgcaactgcccgcagttcgcactcgccttcctgggcgccactcaccgcggcgccgtcgtcaccaccgccaaccccttctacactccggcggagctcgcgaagcaagcgatggccacgaaaaccaggctggtcataacgcaatccgcgtaccttgagaaaatcaagagtttcgcggacgacagcgatgtcatggtgatgtgcattgatgacgattattctttctgaaacgatggcg

SEQ ID NO: 208575 - DNA, 607 bp, Glycine max
  unsure (1)..(607): unsure at all n locations
gaagcagacagatcagaggttgagggtgcaagcacaccatcagaagctgcaaagaaggtgaaaattgggatatattttgcaacctggtgggctttgaatgtggtgttcaatatttataacaagaaggttttgaatgcttacccttacccttgggcttacttcaactctctcacttgcatgtgggtctcttatgatgttgatctcttgggccactgggattgctgaagccccaaagactgatcctgagttttggaagtctttgttccctgttgctgttgcacatacaattggacatgtagcggcaacagttagcatgtcaaaagttgcggtatcattcacacacattatcaagagtggtgaacctgcttttagtgttctggtttcaagatttcttttgggtgagagctttcctgtgccagtctatctgtctttaattccaatcattggtggatgtgcacttgctgctgtgactgagctcaatttcaatatgatcggntttatggnggccatgatatcgaatttggcatttgtattccgtaatatcttnttcgaaaaaggcatgaatggaaagtctgttaatggatgattactaccatgttatctattt

SEQ ID NO: 208576 - DNA, 551 bp, Glycine max
ataagatcactatcaccaatgacaagggtagattgtcaaaggacactggcattcctcctgcacccaggggtgttcctcagattacagtgtgctttgacattgatgccaatggtatcttgaatgtctctgccgaagataaaaccactgcccagaaaaataagatcactatcaccaatgacaagggtagattgtcaaaggaagatattgagaagatggttcaagaggctgagaagtacaagtctgaggatgaagagcacaagaagaaggttgaggccaaaaacgctttggaaaactatgcatacaacatgaggaacaccgtgaaggatgacaagattggtgagaaacttgacccggctgacaagaagaagattgaggatgcaattgagcaagcaatccagtggttagacagcaaccagcttgcagaagcagatgagtttgaggacaaaatgaaggaattggaaagcatctgcaatccaatcattgccaagatgtaccaaggtggtgctgggtcaaaacgtggtggtgctggtgcagcaaaggatgagtatgct

SEQ ID NO: 208577 - DNA, 619 bp, Glycine max
  unsure (1)..(619): unsure at all n locations
gtatcacgggaacgttgtctcctgagaaagttgctgggaagattgttttgtgtgaccgtgggttaactgctagggttcagaaaggctccgtggtgaaatccgccggagcgttgggcatggtgctcagcaacaccgctgccaacggcgaggagctggtggcggatgctcatttgttacctgccaccgcggttgggcagaaagccggtgacgctattaagaagtatttgttttctgatgcgaaaccgacggtgaagattttgtttgaaggcacaaagttggggattcagccatctcctgtggtggcagcgtttagctctagaggacccaactcgatcaccccgcagatccttaagccagatcttatcgcgccaggtgtcaacatcctagccgngtggtccaaggcggtgggacccaccgggttacccgttgataacaggcgcgtggatttcaacatcatttctggcacgtccatgtcgtgccctcacgtgagcggcttagccgcgctgatcaagtcggctcaccctgattggagcccagccgcggtccgatcggctcttatgacaacggcttacacagtttacaaaaccggtgagaagctgcangacagcgcaacgggaaa

SEQ ID NO: 208578 - DNA, 494 bp, Glycine max
agactttgccaaccaatttgccctgctacatgtgtgcactacctccttcttggggggggggggggggggggggggggggggggggggggggggggggggggggggggggggggggggggggggggggggggggggggggggggggggcccccttaatttggaaaaaaaaacccaacccgaaaccaatttttggaaaccccccccattaaaattgggaccccaaaaccccctttaaaaaaagggttttaaaccgggaaaattccgtttttccccaaaaaaaaaatttatccctttaaaaggggggtttttggccaaaaaggggttttccccaaaaaaaccctttttttttagagaattttccccctttttggggaaaaaaccctatttcccgaaaatttaatgggcgcccccctaaaaaacccgaaaggaagaaagccctttttgggaaatttgggggtttcatttaaggacctttttttttgggggcccccccc

SEQ ID NO: 208579 - DNA, 548 bp, Glycine max
tgcacttgaagggaagtatctggtacaagatagttgttatgatttgattgacagtgctgatgcagtcaatggacatcaagagcttcagcatctcagtttctcttgtcatgtaccgaatgtgactggaagagggtttattgaggtggaagacaatggtcttagcagctgttcctttccattcatagtggcagagcaagaaatttgtttagagatctgtacgctagacaatgtcattgaggcagcagagatggctgatgacaaccagataaaaactaacctaatggaagaaaagactcaagcattgtatttcatacaagaaatgggttggctccttcatagaagtcgtgtgaaagttaggctaggtcccatggcacctgtccaagatcgcttccattttaatcggttcatatggcttgttggcttctctatggaccatgactggtgtgctgtgatgaaaaagctcttgaacattatctttgagggcactgttgatactgagatcatgcctctgtgaagtagctttgttagagatggtcttctacacaagc

SEQ ID NO: 208580 - DNA, 506 bp, Glycine max
  unsure (1)..(506): unsure at all n locations
ctcacacatgaggggtagccggttgcgagcttcatctgctggtgatgaggaggtggatctacttctacctggtacagcaagactccaaatacagcttggtgtgaacatgccatcaagggcagaacagatttcaggaaaacaaaaacaagaaaagcaaatgtttcatgaagtgtacgatgtggtgctgtaccttggtatcattgacatattgcaggactacaacatgactaagaggattgaacatgcttataaatctcttcagtttgattcattgtctatctcagctgtggaccctacgttctattcgcatcgcttcctggaatttattcagaaggtgtttccaccaaatgcaacgacaggttaatcaagataattatggggttatatttaaccagtaagtntatttagaaagtgtgaatattgcacttttcatgctttgctcagaatttttatgtaggtggccacgtggcaccttgtgatggtggtataggaatcaagtgaatatg

SEQ ID NO: 208581 - DNA, 442 bp, Glycine max
gttctagatcgcgagcggcccccttttttttttttttttattaaaaaaagtacaacaacggattacacctccaaacttggtcacttaaacaaaaatctaaaaatgaaaaagaaagaaaaaatacaaaatatttgtgtttttgttgtcttttatactagtcgtggcaacctacaggggtgccacccacttacgtcacgagtcacgagccgcatcgatcaaaacgacatgatcgattcgaggctctctataacggttctatttgagtcaccacaatggggctccgaaccacgtgcttcccatccgtccacgtcagcgacccgaacaccgccccggacggacccatcttcagattacgggtgtaccccgccaccgtcaccacatagcttcgcttgttcaccggctgcgagaacacgagcctcgacggctttaccgtcacgctgac

SEQ ID NO: 208582 - DNA, 488 bp, Glycine max
cctttctcctaaaacatctccagtgggttcttcttcttctattacaacaacgtcgtccaagaccatgaccatggccatggccacgatcctgctcctgttcacggtcttcgcggtttcatcggccctagacatgtcgataatctcgtacgacaacgcccacgccgccacgtcgcgcagcgacgaggagctgatgtccatgtacgagcagtggctagtaaagcacggcaaggtgtacaacgcgctcggagagaaggagaagaggttccagatcttcaaggacaacctgcgattcatcgacgaccacaactcccaagaggaccgaacctacaagctcggactgaaccggttcgcggatctcaccaacgaggagtacagggccaagtacttgggaaccaagatcgatcccaaccggaggctcggcaagaccccgagcaaccgatacgcgccacgtgtcggcgacaaactacctgaatcggttgattggagga

SEQ ID NO: 208583 - DNA, 498 bp, Glycine max
  unsure (1)..(498): unsure at all n locations
cggctcgagtgagaaaacagaagaaaacaaaatggaagacacagtttctgcgttgaggtctttgatggtttctcactctccgccgctggatgccttagtggtgccctctgaagattatcacctgagcgaatatgtgtctgcacgagacaagcgccgcgaattcgtttccggcttcactggaagtgccggcttggcacttataacaaagaaagaagcactgctgtggacggatggacggtattttttgcaggctgagaaagaacttagtgctgggtggaagctaatgcgaattggtgaagatcctgctgtagatatctggatggccgataatttgccaaaagaagcatccgttgggngttgatccctggtgcatttcaattgatactgctcaaagatgggagcgtgcttttgccgaaaaacagcagaagctggttccaacctcaaaaaatttggtggatgaaagttggataaatcgcccaccggcagagataaatgctg

SEQ ID NO: 208584 - DNA, 489 bp, Glycine max
  unsure (1)..(489): unsure at all n locations
agggagggaaactggagagcgacatggaattcgacgagcaagaggagcatgaggaggaggaggaaatggggatgccggagccggcggtggcggtggcggcgccgcagacttttgactcgcggtcgaaaatcggcggcggcgaggcgcggaagagcgcgttcggcgtggcggcggtgcggtaccgagaatgccagaagaaccacgccgtcagcttcggcggccacgccgttgacggctgctgcgagttcatggccgccggagacgacggcatgctggaaggcgtcatctgcgccgcatgcaactgccaccggaatttccaccgcaaggagatcgacggcgagatgtcctccttccaccaccgcgcgcaacctccaccgncgccgttgcaccaccaccaccaattctccccgtactaccaccaccgcgtcccgcagcaccccaccggcgncggctacatccaccaccacctcacaccttcgatgtcgcagc

SEQ ID NO: 208585 - DNA, 640 bp, Glycine max
  unsure (1)..(640): unsure at all n locations
taggaatacagaatttttttcaaacacaaatgcctactcactcttttagtcttaggactagtaattataaaatgaaaaacaaaatcattaaaggtactattacttggaaagcattattactttattgataaaaataagtcaaacaactcttcagggacttctgctctgactcgacttatttattaaaaatattaatttgttttttttaattaatcaaattgatcagatttaattttgtaaaaagactattaaatttgataagttggtatttttatataattatacatacaatatttatatttaatatacatttactaatattaacattaataatatgtttgatagacctgtttgtttatttaagttggatggcttacttaggcatacagatttattcacttgtctatgagtcttttataaaagaaatcatataaatatgctttaagttagattaaaattttaaataaatcatgctaaaacttaaaaaacaatttgtaataaataaataagtcaggttgagataatataggatagacttatgcccactaaagtttggtgaatgcatncttaaagtacattntaagtaaataaatatatgtactaantatataaaatatctttgtgcacatatacattaaat

SEQ ID NO: 208586 - DNA, 445 bp, Glycine max
gtttattagtattattatcactagctacctgctatcaaagcatcacaaatggcttctacagacaagcctggcggcgaccctgaatacagaacatcttcaactccagctcctgctggtgttgattactttaaatttgatgtcatcctaaggtttctattgtttgcagcatcactggtagctgttgtggtgatcgtcactgctaatcaaacagaggttattcgtgttccacagcctgtgccatggccagccaagttcagatactcaccagcctttgtttattttgtagctgcattgtccgttactggcctctacagtatcattacaacacttgcatcactctttgccagtaacaagccagccctcaaaaccaagttgctcctctactttatcttatgggatgcgctgatattggggataatagccttagcaacaggcacagctgggg

SEQ ID NO: 208587 - DNA, 527 bp, Glycine max
  unsure (1)..(527): unsure at all n locations
ggaggaggcaaatgtcaagcctccaaccccattgacgcttgctggagatgcaataaagactgggccaatgaccggttcaggctagccaagtgcggcaaagggttcggaagacgggccaccggcgggctcggtggtcccatctatgtcgtcaccgataattccgatgacgacatggtgaaccctaagccgggaactatccgtcacgctgtcacccaaaaaggccccttgtggatcatcttcggacacagcatgatcatcagtttgaggcaagagctgatgatttcctccgacaagaccatcgatggtcgtggcgcaaacgtgcaatttaggggcggtgctggcctcaccattcagttcgtgaacaacgttattatccacggagttcgcatcaaggacatcgtacctaaggatggtggcatgattagggactccgccgaccattatggattgagaaacaagagtgatggtgatgccatctncattnttggatccaccaacatttggatcgatcatgtttccctctctac

SEQ ID NO: 208588 - DNA, 553 bp, Glycine max
  unsure (1)..(553): unsure at all n locations
cggctcgagctcgtaaaccctaaaccccgttttcagtgacatcgagatcgatcgaacatggatgaggagtacgatgtgatcgtgttgggcacgggtctcaaggagtgcattctcagcggtcttctctccgtcgatggcctcaaggttctgcacatggacaggaatgactattacggaggagaatccacttcgctcaatcttattcagctttggaagagattcaggggagatgacaagcctcctccacatttgggagctagcagggactataacatcgatatgaaccctaagtttattatggctaatggcaatttggtgcgggttctcatacatactgatgttactaagtatctctctttcaagctgtggatgggagctttgtgtttaataaaggaaaggttcataaggtgcccgcaaatgacatggaggccttgaagtctccacttatggngctatttgaaaaacgccgagcacgcaagtttttcatttatgtgcaaaattacaatgagagtgatcccaagacccatgaagggatggacttgacaagagtgac

SEQ ID NO: 208589 - DNA, 485 bp, Glycine max
gaccattctctcagcctagctaataagatttgtgagagaaagggagaaagggtgtgagaatggagagcaaagaggaagatgtaagggttggagcaactaagttctcagaaaggcaaccaattggtacagcagctcagggtgacaaggactacaaagaaccacccccagcacctttgtttgagcctggtgagctaaagtcatggtccttctacagagctggaattgctgagtttgtggccactttcttgttcctctacattaccatcttaactgtcatgggtgtcaacaggtcaccctccaagtgtgcctctgttggcattcaaggcattgcttgggcctttggtggcatgatctttgcccttgtctactgcactgctggaatttcagggggacacatcaacccagctgtgacctttggtctctttttggaagggagctgtccttcacaagggcgctgttctacattatcatgcagtgtcttggag

SEQ ID NO: 208590 - DNA, 477 bp, Glycine max
  unsure (1)..(477): unsure at all n locations
taaggttactgtcatacatgccgtggcaattccagtacaaccagctccggtggaaagtgcggagtatagaaaacagctagctgaagactacggtttcaggcaagttggagagccgcttccagatgatgttactttaaaggatgtcatcaattcccttcctaaggaggtctttgagattgatgatgtgaaagcatggaaatctgttctgatatctgtcacttcttatgcactgggtctcttcatgatttccaaagccccctggtatcttcttcctctggcttgggtatggacagggactgcaataactgggttctttgttataggacatgattgtgctcacagatcattttcgtctaacaaattggtagaagacattgttggaactctggcctttatgcctctgatttatccatatgangcctggcgatttaagcatgacaggcatcatgcaaaacaaacatgttacgtgaagatact

SEQ ID NO: 208591 - DNA, 438 bp, Glycine max
  unsure (1)..(438): unsure at all n locations
actacttgaacatcaagagccttttggaccttacttgccagacagtagcagacatgatcaagggaaagactcctgaggaaattcgcaagacattcaacatcaagaatgacttcacccctgaggaagaggaggaagttcgtagggaaaaccaatgggcgtttgaataagttttatgattctgctgcttttgaaatttcaatgaaaagatatgccctatagtttctagtttatgtttctgactattttgtttgttttatttatgtttcgcgtatcaaacttgtcttcttttttgaacttgggcaatcttgaaattgtaagtaatagttgaatatggtgggaggaatgcttttgaatctggtatctcagctttattgttnacaaaagcaaccctatgcacacacaagctgggaacagtgatgatggaaagtaccctttaag

SEQ ID NO: 208592 - DNA, 529 bp, Glycine max
ttctggtttaacgggaggaggaaccagaagcaacattctccaaaaccaacttccaagatgtatggcagcccgatgtatgatgacagagaggtaaacctaggtgctcatgaggaccgccgcgtgctgtcatttgatgctgcggtcctgatgtcacaggaactagaccgggtcaaagaggtacctgaagaagagcatgtcgaggaagttgatcattattcaagaaatggtaatgggtcagatcatctgcatgtcgatgagatcgtggaagaacctggaaccagtgaagctgtcaataatggatcttggctcaattcaacttctcttgcccggcatcaaagcttggagaatggctctacctctgaaatatgtcctgatgtcaaagagagtgccataagaagggaaactgaaggtgaattcaggttgttgggtaggagagaaggtaatcgttacggtggtgataggttttttggtttggaagaaaatgaagccactagcaggggaagaagagtgtcatttaacatgggagata

SEQ ID NO: 208593 - DNA, 314 bp, Glycine max
tgttgatcgagataactagaaacagtgtgatgaaaatgaaggtccttgttttcttcggggctacaattttggtagcatggcaatgccatgcgtacgatatgttccctctccgaatgaacactggctatggtgcccgtactccggaggtgaaatgcgcaagttggaggcttgctgtggaagcacacaacatctttggctttgagaccattcctgaagagtgcgttgaagcaacataggaatacatccatggcgaacaatatagatcagacttcaaaacacgtaacctacatgctctacttttatgccagagacct

SEQ ID NO: 208594 - DNA, 545 bp, Glycine max
  unsure (1)..(545): unsure at all n locations
tgcatctctctgtgttcaatcttcaaagacttgaattcttcttacttaggttctgaatggctggaatttgctgtggtgttgtcggagaaggtgacactccggctccactcgagccaactactcgcccctccaggcgccggagtttggacatcttacccttaaaatacatcgctgacatggcggtgccgccgtcggatggttcacggaaacgtcccaagctggatctcagggaccgcgataacgtagttcaaaattgcgacgaatccactggacacaaggtggtgaaaaaagaagccaaagtggaaatccacgacaatatttccgaaacgaaaaacgtaactgttgcggatgcttcggaagttgaagattctcctaagttcggcgtgacgtcagtttgcggcaggagaagagacatggaagattccgtttcggtgcggccttgcttcacccaaggcttccactacnttggcgttntcgacggtcacggttgctctcatgtcgcgactatgtgcacggagcggntacacgagatcgtgaatgaagag

SEQ ID NO: 208595 - DNA, 504 bp, Glycine max
ctcattgctgttcaccattttcaattcattcctgtgttagattccaagtggtttggtttggtttgacataaataaacctttcaagatctcagaggggcagaagatcaaagccaagacaacacactctcatatataaaagagtgtctctgataatttgatctttgtttcttctctttctctcctttgagatttttcagcaccccaccaaggttttgtccgaaaagcttgaatttttcgcctaccctttacaatgatctcttcattgagacaacctgttgtagggatcagtggttctgatcttcttttgaggcaaagacatgcaaccctaattaaggcaaggtcctttttaccctctttgtcaagagaaaagggtcaaagatctcttgtttcagttcaaaagccacttcacattgctgcttctcttggtgttggaaattttgtgtcagtgaagagtgatgatgacaaaaggggtgatttggtgaagtgtgaggcctatgaagcaga

SEQ ID NO: 208596 - DNA, 543 bp, Glycine max
  unsure (1)..(543): unsure at all n locations
gttgttcaaactcttagaaatgttgctcgtgatggaaggactgtcatctcttccattcatcaaccaagcagtgaagtctttgcactctttgatgacctcttcttactatctgggggcgaaacagttattttggagaagcaaaatcggcaattgagttttttgctgaagctggtttcccttgtccacgtaaaagaaatccttctgatcacttcctacgatgtatcaattctgatttcgacattgtaacagctacactgaagggatctcaaagaattcatgatgttccaaattcagcagatcctttcatgaatttggctacagcagagattaaggcaacactagttgagaaatataggcgttcaacatatgccagaagggcaaaaaacagaattcaagaactgtctaccgatgaagggcttcaacctncaacacaacatggaagtcaagctagttggtggaagcaactataacgttgacatagagatcatttgtgaacatgtgtagagatgtggttactacttggttgggatcatatttacatca

SEQ ID NO: 208597 - DNA, 419 bp, Glycine max
gaacccatgttcccgtgatgtcaccacttacaaatgggttcgcggtgttcatggggcacgggtccaccatccctatcaccggcactggcatcaacccagctagaagccttgggcctgctgtcatattcaacaacgagaaggctcgggatgaccagtggatcttctgggttggacccttcatcggtgctgctcttgctgcattctaccaccagtccgtgttgagggcccaagcagcaaaggctctagggtctttcaggagctcctcaaacctgtaattctggccaagctatttgagctactagagacatgcttcatttaattggtgttcttaattaatttgcttatacatggtggataggaataatctgcatattctcgtcactatgttgatctaactaatgtttactatatttgtggtg

SEQ ID NO: 208598 - DNA, 452 bp, Glycine max
ggcgagcagaccggggacgtccctccccacccgaaccttttctttcaccatcacaaccaccacattcacccacgggggggggcactcacatctactctgcgaccgatatagctccccttctcataatttataataataatttactacacccctcttaatctacagaccttgtttattatacccatttatatcctgccttattatcatatggacatgctttcggctctccatgcagctgttaattttgtgcaatacccttatggaggttatatcgtgaaccgtccaactctagccagaaggtttatcccagaagaaggaaccaaagaatatgatgagatggtgaaggatcctcaaaaggcatatctgagaacaatcacacccaaattcgagacccttattgacatttcagtgatagagatattgtcaaggcatgcttctgatgaggtctacct

SEQ ID NO: 208599 - DNA, 436 bp, Glycine max
gtaacagtcaaatcgggacattctagtttttctcagtcactctctctctctctggaacgtcggggcccacttaaggcacaaaaccccactttagatccgtagagcaaggcctcgccgacgagattcccgaggctgtgcaatcagcaatctagcaccagcaaaaatccgctcagatataggttcttctgaaacaacctacaggaacctcacttcacaatcgaagagaaccctacggacacgctctctgaagtgaacaaaaatatagaaactgctcatggtgcatatgtctatcctgctgcacagcaaatgctatattcatcaaggaaaagttctaaaggatggtactactttggaggaaaataaagtcactgaaaatagctcgattgcaattatgtgatcaaagactaagagttcatctggcgaaggatctactact

SEQ ID NO: 208600 - DNA, 503 bp, Glycine max
  unsure (1)..(503): unsure at all n locations
gaacacatttgcactcacacatagaagcagagagaggccattggttggtttcagagatgggaagcatgcacatagaaaccccagaaacttttgctgatggtagcaaaaacttcgatgatgatggacgagctaaaagaactgggacttggattactgcaagtgctcatatcataacggctgtgattggttctggagtgctatctcttgcatgggcaattgcacagatgggttgggtagctggtcctgcagtgctctttgtcttctctttgataacatacttcacctccactcttctcgctgactgttaccgttcacctgaccctgtacatggcaagcgaaactacacatattctgaggttgtcaaagccaacctaggaggaagaaaatttcagctgtgtggattggctcagtatataaatcttgatggtgtaacaatcggctacactataactgcatcacttagtatggnggcggtgaagaagtcgaactgttacacaaacatg

SEQ ID NO: 208601 - DNA, 315 bp, Glycine max
  unsure (1)..(315): unsure at all n locations
caaagcacaagaagccagagagcgaatgggttcagcaatgaatacatagtgataacaatcttggctgctgccgaaggagaccataaacttccaagcatcaatggaagtggagacttgaagcaagctttacagaaacttggttccattccgtcaagcagattattggcagttgaggtgttatggacaccacagaatgagaacgatactctctcagaacgggagttacttgaagattacccgcttttacggcctttgaagtgggggatgccatgcttgcntactgctactagcctcttatatagctatgaactgaga

SEQ ID NO: 208602 - DNA, 409 bp, Glycine max
gccatttgtatacagtgtaatgactttgtcagcagcaacatttgcattttggtattttgtaggatcacacatatttcctgatgttttgctcaacgatattgctggcccagaaggagatcctttgttgttgagtttaaaactatccgtagatgttttggttgtttcttgtccatgtgcactgggtcttgctacgcccacagcaatcttggttggcacctcacttggggcaagaaaaggacttcttattaggggaagggatgtgctggaacgcttggctggaataaattatattgctctagacaagacaggaacccttaccaaaggaaaaccagttgtgtcggccataagctctatcctttatggagaatctgaaattcttcggcttgctgctgcagtggagaaaacagca

SEQ ID NO: 208603 - DNA, 523 bp, Glycine max
cttctcccgatggaactttcctcaaagaaagagttactatctcgaatagtatcaacactaacgcccaccatcacactcatcttcttcttccttgtgctttctccgagcctgtgcacatcactcggaagcaccaacacagttggatcggagttgctgaaggttgctccttctgaatttgaggggacagtgagaaccgtcgttgatgtgttgcaagaagtcacctctattctctccgagttcggttctggcttcggcgattcacgtctttctaacgccgtttctgactgtcttgatttgcttgacatgtcctctgatgaactcgattggtctgtctccgccacacagagtcccaaagggaagcacaacagcacagggaacacaagttcggatttgagaacatggctgagcgcagcacttgcaaatcaagatacatgcattgacggattcgacggcacgaacggcatggtgaagggtctagtatccactggtataggccaagtgatgtccttactccaacaacttc

SEQ ID NO: 208604 - DNA, 500 bp, Glycine max
  unsure (1)..(500): unsure at all n locations
acaagcccaacaaacttggttttaattggtataggcgtgccaaggtcttgttaattttgagcgttaagtgctgcaactaatcagatcccaagaccttggcctaccttgccatacagaaaaaaaaaaagcagaaaaaaagccaaggtttggagccaacaaaaataaacacaaagcacaagtcatggaaagaataatggctggaagtgcaacaaaggttgctttcaccctcttggccactttcgccattgtcattccatgccttgaggctggcattgctgagttcgacgattatctcaaagcccaagctgatgaagcccataaaattgctcttgattcctatgtcccagagccccacgatgtcgcccatgaactcaatttccatgttcatatggcactggaaaactccacaaggagggaactaaggcagaggaaacttagaggaggaggcaaatgtcaagcctncaaccccattgacgcttgctggagatgcaataaagact

SEQ ID NO: 208605 - DNA, 539 bp, Glycine max
ggcattagatcagcttaagggaatgccttctcgcggtgatgttgagcctggggagattccttctttaatggacctaggccttaatccatctgcaacaatgtcacagaatggaaagtgcgttgctaatgcttctatggtaggaggggagactgaggcactgcagaagcttaaaaaatttgcagctgagtgtgcagctcagccacacaaggggtttaaggatggaacacagagtatatatggtgccaacttctcctgcaagatttctccgtggttggcaatgggatgcctttcccctcgcacaatgtatgaagaactgaagaagactgccggcagagtcatttctgcttcgtccaaccggaatgatggtggtaatggctcgtccagaactggaacaaattggttgatgtttgagttgctatggagggacttctttaggtaactattttttgtgcacatcttttggctttgcttgaaacttcagtgtacatttttctttgcatgagatatatggaaatggcaatggtgcaccactttgggga

SEQ ID NO: 208606 - DNA, 502 bp, Glycine max
  unsure (1)..(502): unsure at all n locations
ctctgtgtattacccaacaaatgcagcaattcaacaagacactgaacttcaagcatggtggaaggaagttgtggagaagggtcatggtgacttaaaagataagccttggtggcctaaactgcagactgtggaggatctcattcaatcctgctctattatcatatggacagcttcggctctccatgcagctgttaattttgggcaatacccttatggaggttatatcgtgaaccgtccaactctagccagaaggtttatcccagaagaaggaaccaaagaatatgatgagatggtgaaggatcctcaaaaggcatatctgagaacaatcacacccaagttcgagacccttattgacatttcagtgatagagatattgtcaaggcatgcttctgatgaggtctaccttggccaaagggataatccaaattggactacggattcaaaggcattggaagctntcanaaagtttggaaacaaactggcagaaattgagggaaaaatc

SEQ ID NO: 208607 - DNA, 479 bp, Glycine max
acgggcacatatgcctgaagcttgaactttcatgacatgagtggacattactcagggggggaagggctggaaatagctgaggagttgtcagagaaggtgacactacggatccactcgagccaactactcgccccttcaggcgccggagattggacatcttacccttaaaatacatcgctgacatggcggtgccgccgtcagatggttcacggaaacgtaccaagctggatctcagggaccgcgataacgtaggtcaaaattgcgacgaatccactggacacaaggtggtgaaaaaagaagccacagtggaaatccacgacaatatttccgaaacgaaaaacgtaactgttgccgatgcttttgaagttgaagattctcctaagttcggcgtgacgttagtttgcggccggagaaaagacatggaagatttcggttcgagcgggcttgctttaaccaaaggtttcactactttggcgttt

SEQ ID NO: 208608 - DNA, 547 bp, Glycine max
  unsure (1)..(547): unsure at all n locations
ctgttgcaaaatccgttcccctatctttctgcgtttcgagttgttgctaaagagtgatggactcaccgcccagtaatcaccacgccgtcgacggagacgccaacgacctcgttagacccttttcccaccgcgacgacgacggcaaaccccaacccctcaccggcgacggcgccagtcccggaaagatattcatagggggtttagcgagagaaacgacgattgcgcaattcatcaagcactttggtaaatacggtgagataacggattccgttatcatgaaggaccggaagaccgggcagcctcgcggtttcggcttcataacttacgccgatccctctgtggttgatacagtgattgaggacactcacattatcaatggcaagcaggtggagattaagcggacgataccaaggcgggctgttggctcgaactcaaaggacttccgaacgaagaagatttttgtgggtggaattccttctactgtgaccgaagatgaatttagggacttctntacacgctatggagaagtcaaagatcaccatataat

SEQ ID NO: 208609 - DNA, 550 bp, Glycine max
  unsure (1)..(550): unsure at all n locations
gaactccatagccttcaaatccttcgtcggcctccgccagtcctcgccggaggccccgcatttcgccgcccagccaagacccgccactccccaccgcaaattccgcgtcttggctggaaaattcagccccaagctcaatggccggaacctccgcgtggcggtggtgggaggcggtccggctggcggggccgccgcggagacgctggcgaagggcggcgtggagacgttcctgatcgagcgaaagatggacaactgcaagccgtgcggtggcgccatcccgctgtgcatggtgggggagttcgacctgccgctggacatcatcgaccggcgcgtgacgaagatgaagatgatatcgccgtcgaacgtggcggtggacatcgggaggacgctgaagccgcacgagtacatcggcatggtgcggcgcgaggtgctggacgcttacctcagggaccgcgccaaggagtaccgtgcgaacgtcatcaatggctttgtcttgaaaatggatattcctanaggatagaactccccctacgttcttgcatactctagc

SEQ ID NO: 208610 - DNA, 569 bp, Glycine max
caatcatgtgtgaaattatgaaacatcatccatcatgtccatggtgataaattggtgatagcagcttttccaaagggtttctacaaacccaacatgacaggctgttgcttccctgtgaccttccatcggtccggtagtcgcagggtcagcttcaggcttgttagaagttcctcttccggttcatctaaacatcggggaagagagagtcataaagggcctctggttgtttgctttggggagatgatgatcaatttggtccctacagtagcaagagtgtcccttgcagatgcaactgcctataagaaattcccttctggagccactgccaatgttgctgttggaatttgtagactaggaggctcagcagctctcattggcaaggtgggaaatgatgaatttggacatctgttatctgatattctgaaacaaaatggtgttgacaattctggcctgctctttgatgatcatgccaggacagcgttgggaatttatgctcttaagagtaatggagaacctgaattcatgttttaccgaaatccaagttctgatgtgctccttcgtcctgatga

SEQ ID NO: 208611 - DNA, 303 bp, Glycine max
tttctcttcaaattcaaaactctatctatcatgctacgaactacatacaattctcaaatcaaaattcaaacatataatagtagtatcaggcattagcacacttcaactcacaaaccttacgcacattttttgaaacagaaaatgaagctctccgcgttgcagcagacttatctcacgcgccgggcgaacagcttcagaggatcggcgcagttggattcgtccggcgacggctctgtgaagtcgccggcggcgattttctggttggtaatccacggcgtctgctgcctcatcagcttggttctc

SEQ ID NO: 208612 - DNA, 505 bp, Glycine max
  unsure (1)..(505): unsure at all n locations
caagagattaacaaggttgttaaccgatatattgatgaaggtgtagcagagcttgttcctggagttctattcattgatgaggttcatatgctagatatggagtgtttttcgtatttgaatcgtgctttagagagctccctatctccaatagtaatctttgctactaatagaggaatatgcaatgtaagaggaactgatatgacaagtcctcatggcatacctgttgacctgttggatcggttggtgatcattcgaacgcaaacatatggtcctgctgaaatgatacaggtagtatggccttcatctttctttcaaatagatttcaaaatgttaagcattatgtgtttggatatacaaacatacatgcttcttaattgtgggacagattctagctatccgtgctcaagtagaggaactggttgtggatgaagaaagtttagctttccttggggagattgggacacanacatctntaaggcatgcagntcaaactgtatcacctgcc

SEQ ID NO: 208613 - DNA, 526 bp, Glycine max
gcaatactgcaatagagaaagaggcagatagaaaaaagagctgagttttgagttcaaaagatgactaacttcccagtgatcaacttggagaagctcaatggtgaggagagaaacgacaccatggagaaaataaaggatgcttgtgaaaactggggattctttgagctggtgaatcatggcataccccatgacttattggacactgtggagaggttgaccaaagagcactacaggaaatgcatggaagagaggttcaaggaatttatggcaagcaaaggtctagatgctgtccaaactgaggtcaaggacatggattgggagagcaccttccacttgcgtcacctccctgaatcaaacatctcagagatccctgatctcattgatgagtacaggaaggtgatgaaggattttgctttgaggttagagaaactagcagagcagctgttggacttgttgtgtgagaatctcggcctagagaaagggtacctcaagaaggctttctatggatcaagaggaccaacttttg

SEQ ID NO: 208614 - DNA, 287 bp, Glycine max
gtcggagttaggccatggaagtaatgttcgaggaattgaaacagtcactacttatgattcaaacaccggggaatttgtcatcaatactccatgtgaatcgggtcagaagtattggattggtggtgcagcaaatcatgcaacgcacactatagtcttttcacagctctatataaatggaagcaatcaaggggtgcatgcatttattgcccaaatcagggattcagatggaaacatatgtccaaacatccgaatagctgattgtggtcacaaaaattgtttaaatggag

SEQ ID NO: 208615 - DNA, 505 bp, Glycine max
cacatattcaatggcttcctctcttctctctccatcattcacttccttcccccgcataaagaaggatgtctctctctctgctttcacttctcagcgatgcttcaaagcgcttccaaggagaataatccgttgtgctgtggcggcgcctcagcgccaaccttccaccactggatcagtgaggactgcaatgaccatgactgagaagatactggccagagcttctgagaaggtacagctgacccctggcgataatgtttgggtcaatgttgatattttgatgacacatgatgtgtgtggccctggttctattgggattttcaagagggagtttggtgacgatgccaaggtttgggaccgtgaaaagcttgtaataatacccgaccattatatattcacaagtgatgaacgtgccaatcgcaatgtagacatattaagagatttctgccatgagcagaatatcaagtacttttatgatattaaggatctcagtaattttaaggaaatc

SEQ ID NO: 208616 - DNA, 420 bp, Glycine max
gagcccatgttcccgtgttggcaccacttccaattgggtttgcggtgttcatggttcacttggccaccatccctatcaccggcactggcatcaacccagctagaagccttgggcctgctgtcatattcaacaacgagaaggcttgggatgaccagtggatcttctgggttggacccttcatcggtgctgctcttgctgcattctaccaccagtccgtgttgagggcccaagcagcaaaggctctagggtctttcaggagctcctcaaacctgtaattctggccaagctatttgagctacgagagacatgcttcatttaattgtgttcttaattaatttgcttatacatggtggattggaataatctggatatcctcgtcactatgtttatttaatttatgtttactatatttgtggtgaa

SEQ ID NO: 208617 - DNA, 415 bp, Glycine max
gtgagggttgcccctagaccctccgttttggaaaatatgagcttggaggaaatgaaacaagtatttaatgaactacccgaggctctaagcttgcttgctctagcaaggactgctgatggcactcgggcacgatattctagatctatacaggaccttggctactaaggctccatcgcttaaggattcggtcggtgagctcgaaaaagtgggtgcactcaaagatgtgagaacatgacctttgaagggttatatggttcttaacttatatgcgcacgtgcctgcgctaaattgctaatgctcttggggagtacggttaagtggtattacattactgtatggctagcattattcttggggaagcagattccctcgtatgtatgtaccaagtatctatcactctgcttgcacgttatgc

SEQ ID NO: 208618 - DNA, 579 bp, Glycine max
gaactccatagccttcaaatccttcgtcggcctccgccagtcctcgccggaggccgggcatgtcgccgcccagccaagacccgccactccccaccgcaaattccgcgtcttggctggaaaattcagccccaagctcaatggccggaacctccgcgtggcggtggtgggaggcggtccggctggcggggccgccgcggagacgctggcgaagggcggcgtggagacgttcctgatcgagcgaaagatggacaactgcaagccgtgcggtggcgccatcccgctgtgcatggcgggggagttcgacctgccgctggacatcatcgaccggcgcgtgacgaagatgaagatgatatcgccgtcgaacgtggcggtggacatcgggaggacgctgaagccgcacgagtacatcggcatggtgcggcgccaggtgctggacgcttacctcagggaccgcgccaaggagtacggtgcgaacgtcatcaatggcttggtcttgaaaatggatattcctatagataagaactccccctacgttctgcattactctagctacgatggcaaaaccaatggggcttgtga

SEQ ID NO: 208619 - DNA, 616 bp, Glycine max
gacagatcggagcagaccctgtctggagtggcaagtggctctgacttcacaagaaagtggggtggaaactcagacatatgctcgatacaaatacccaaccatgagcaaaactcaaggcaattttagacttcgtgtagctgaaggagaatttactgattctcagattattgtgatgctgggtgagaatgggacaggaaagacgacatttattcgaatgctggctggtttattgaaacctgacaccatagaaggtggatctgaggtggagatgcctgaatttaatgtttcatacaagcctcagaagattagcccgaagttccaatcaactgttaggcacttgctacatcaaaaaatacgtgatgcatatactcatccccagtttgtgtcagatgtgatgaagccacttcttattgaacagttaatggaccaagaagttgtgaatctttctggtggagagttgcagagagttgctctgtgtctctgtcttggaaagcctgcagacatctatctgatagatgagccaagtgcgtatctagattctgaacagcgaattattgctggcaaagtctataaaagtttattcttattcaagaaaacggctttggcgtgacatgat

SEQ ID NO: 208620 - DNA, 534 bp, Glycine max
gctatttcttacctcttggcatggccattcaaatgtcttcttttgtctttgtttctcttacaattttattttgcttctcttccttggagaagagttttgcctttcaaacaacaaaggaggacacagaaagcaacaatcttcatcaatatactcatcttgttcacctcagctcactccttccttcatcttcctgcagctcttctgccaaaggtcccaaaagaaaagcatcattagaagtggtacacaaacatgggccatgctcccaactgaataatcatgatggcaaagcaaagtctacaacaccacacagtgagattctgaaccaagacaaagaaagggttaagtacattaactcaaggatctcaaagaacttgggccaagatagtagtgtgagtgaattggactcagttacactaccagccaagtctggtagccttattgggtctgggaattactttgtggctgttggtcttggaacacccaagagggacttgtcactcatctttgacacttgcagtgatctcacttggactc

SEQ ID NO: 208621 - DNA, 517 bp, Glycine max
  unsure (1)..(517): unsure at all n locations
atcttgaccaagattgacaggcgatctggtaaggagcttgagaaggagcccaaatttttgaagaatggtgatgctggtatggttaagatggttccaaccaagcccatggtggttgaaactttctctgagtatcctccccttggtcgttttgctgtgagggacatgcgtcagaccgtagctgttggagtcatcaagagtgttgagaagaaagaccccaccggagccaaggtcacaaaggctgccgccaagaagaagtgattgcattttggcaattttgctagcacatgtgatcatcaacgtggtttcaaaaaaacttgttcctttacagtagtttatctttgcagagtcttaggtgtttgttttaccagttatattttgaagtgtccgccgatttcatgtagccgtagccttcaaaactgggttcttgatcggcggtaacattttcgttgctgnttgtttttgatgagtactgatttttggtttgatggtaaaagtctgagattttcaaattcacaag

SEQ ID NO: 208622 - DNA, 604 bp, Glycine max
  unsure (1)..(604): unsure at all n locations
cagattagtaccacaaaaatggagaaatagaataactgaatatcgtatagctcaaaataaagatttaaccaaatgcaattcatatgaaaaaagccaattaattctttacaaagaacaacaagtaaacgcattaaaaaaaaaaattagaaaacaatatagatacgatcttttatcctataattttatcaattatgcagataagaaagactcatatatttatggatatagatccctatttcaagtaaaaaaaaaccaagtgatttcttctaattacaacacgtataaaaaagaattattggatatcatagataatctctntatcaagaattatatatcggaagatgcgattctagatatggaaaacaatatgtatagaaagtattttgattggatgggaatcaatagagaaatactaaatcgttccatatcgaatccagaaatttggttcttttcaaaatttgtgatattttatgacgcatataggggtaactcgcaggttataccaatcaaattactttntttttcttctaatgtaaatcaaaatgtagtgaaaataaaagaacatactagacngaaaanaatgatctcttgaatgagtagagac

SEQ ID NO: 208623 - DNA, 541 bp, Glycine max
ggttccgtgatgactcactcaccttcaaggttgctgagacttcacaggaaactgctgaggaagctcagacatatgctcgatacaaatacccaaccatgagcaaaactcaaggcaattttagacttcgtgtagctgaaggagaatttactgattctcagattattgtgatgctgggtgagaatgggacaggaaagacgacatttattcgaatgctggctggtttattgaaacctgacaccatagaaggtggatctgaggtggagatgcctgaatttaatgtttcatacaagcctcagaagattagcccgaagttccaatcaactgttaggcacttgctacatcaaaaaatacgtgatgcatatactcatccccagtttgtgtcagatgtgatgaagccacttcttattgaacagttaatggaccaagaagttgtgaatctttctggtggagagttgcagagagttgctctgtgtctctgtctcggaaagcctgcagacatctatctgatagatgagccaagtgcgtatctagattctgaaca

SEQ ID NO: 208624 - DNA, 583 bp, Glycine max
  unsure (1)..(583): unsure at all n locations
gtgaaatcgggactggggttttgctgtccgttggaggtgctattttcatcaatgtgtttctcagtcagagtactcgtcccggaaagtttccatctatactttttccaattgaaattaaaaatatccaacgcggcaaacacggcagtgacactggagtctacgatactgaaggaaggtttgtaccttcaaaatttgaagaaatttttaacaagcatgcacatacacatccaaatgctttgacatatgatgagttaacggagatgataaaggcaaatagagagcctaaagatttctcaggaaggattggtagtgtggttgaatggaaaattctttacaaacttgctaaagataagagtggattactgcagaaagaaacaatccgaggtgtttacgatggaagtttatttgaacaactgaaaaaacaacactcttcaggcaaagagaagtagtaatatttttcagacacgtatgtgaaaagaagaagttacttgtcgatctcagcanaattggttattnctatgaatttatatgctagtcagttagtcacaatatttcacagtgtcctgtctatttttatgttcat

SEQ ID NO: 208625 - DNA, 551 bp, Glycine max
tgaatgatttggatagtagcaatttttgtagtttctcttacttacctgtgtctatggagaagaagcacgaaaaagggaaagagattaccacctggtccaaaagggttgccaattttgggaaaccttcacaagttggggtcaaatcctcatcgtgatctgcatgaactagcccagaaatatggacctgtcatgtacttgcgcttaggatttgtgccagccataattgtttcttcaccccaagcagctgaactgttcctcaagacccatgatcttgtctttgctggtagaccacctcatgaagctgcaaagtatatggcttgggagcagaagaacttggcttttggtgaatatggttcttactggcgcaacgtgcgcaagatgtgcacattggagttgctaagccaaaccaaaattaactccttcagacccatgagggaagaggaacttgacctattgatcaagaatctaagaggggcatccaatgatggagctgttgctgatctcagtgccaaggtttgcacactcagtgcagacatgtcttgtagaatgat

SEQ ID NO: 208626 - DNA, 509 bp, Glycine max
  unsure (1)..(509): unsure at all n locations
gtttttgacgagagtgatgggtcaagacaatgctgaagcagccaacaatgtgagcaagtggacagggacagtttacctcttctctcttcttggagccttccttagtgactcttactggggaaggtacatgacctgtgccatcttccaggtcatatttgttattggtttggtttcattatcattgtcatctcacatatccctattgaagccgagtggttgtggcgataaagaattacaatgtggatcacactcatcatcccaaacggctttgttctatctttccatatacctagtagctttgggaaatggaggataccaacctaacatagccacatttggtagtgatcaatttgatgaaggggaccctaaggaacgactttcgaaagtagcattttttagctacttttatttggctttgaatcttggctcactcttctcaaacaccatattggattattttgaggataagggacaatggactntgggattctgggcatcagctggttctg

SEQ ID NO: 208627 - DNA, 406 bp, Glycine max
aattcggctcgagtttctcttcaaattcaaaactctgtctaagtcccaatccttcttggtttacgcccaaaaggcttcttatgatattttgtctcattaacatgctaaactatgtggatcgaggagctatagccagtaacggtgtcaatggaagtcttgcaacttgcactgactctggaatttgtacaggtggcagtggaattcagggggattttaacttgaacaattttcaagatggagttctgtcatctgcatttatggttggacttctaattgcttccccaatatttgcttctctggccaaaagtcacaatccattccggcttattggtgttggattgtctggttggactttagcgatagctggatgtggtagtttcgttcgatttttggtctattgcaatat

SEQ ID NO: 208628 - DNA, 518 bp, Glycine max
  unsure (1)..(518): unsure at all n locations
cacaacacaacaccttttccttttcccttccgttggtgccattcgtgcagcaccggatcctctcatttctccggcgataactctcccttttccggcgaattcaccgcttcctcgatatgaatcccgagtatgactatctgttcaagctccttctgattggagactctggtgttggtaaatcatgccttcttctaagatttgctgatgattcatacattgagagctacataagcaccatcggagttgattttaaaattcgcactgttgagcaggatgggaagacaattaaactacagatttgggatactgctggacaagaacgatttaggacaataactagtagctactatcgtggagcacatggaatcattattgtttatgacgtgacagatgaagatagcttcaataatgtgaagcaatggctcagtgaaattgaccgctatgccagtgataatgttaacaaacttttggttgcaaacaagagtgatctgacagcanatagagttgtctcatatgac

SEQ ID NO: 208629 - DNA, 491 bp, Glycine max
cccgaatccaagtgaaacgaaaaacactcatcatcatggattcagttgcattaaatggcaaaagcaatgataagcctcttcacgttgccatgctcccatggctggccatgggtcacatatacccttacttcgaagtcgccaagattcttgctcaaaagggtcactttgttaccttcataaacagccccaaaaacattgaccgcatgcccaaaaccccgaaacacttagaaccattcatcaaactcgtgaagctacccttgccaaaaatagagcatctaccagaaggcgcagagagcacaatggacattccgtccaaaaaaaactgattcctcaagaaagcttacgagggcctacaatacgccagttccaagttgctgaaaacgtcaaaccctgactgggtttctgatgacttcgcagctgcttgggtcataccaatagccaagagctacaacattccttgtgctcactacaacattaccccagctttcaac

SEQ ID NO: 208630 - DNA, 252 bp, Glycine max
tgcatgacttgcacagtggcctttcttgaagttgctcagacatacctgcctccatggggcagggacccgtattcggtaccgagattacactcgtcgatacatagccattggttgtgtggaaaaggttccatgtatgcttgctatgccgggtggaagactccaacagcgatgcctttaagaagcctcttgccagggaccccacttacctatgggtccttgaaaatggaatgaccatgcaaagttttggtagtc

SEQ ID NO: 208631 - DNA, 505 bp, Glycine max
gttctagatcgcgagcggccgcccttttttttttttttttacacacatttataatttcatcaaattttcataaaaagtaaaattgttcttcaatattaagtctcctaagtcctaattaataataacattatagtaataagtaatgtctaacaactaacattaacacctaccacaaccaacgacggttaaaattaaaaggaaaaaaaatgtacacactaactacgggccccactgaaacaggtccatttggtccaacctcttctctaactatgactcttttttttttctaacctgaaaaaaaaattcaaaaaccgggaagcgacggtggcgaagcggtgtcgggctcaggcacgtcctgcttcttccgccgcatctcgaggacctttcggtggtggttggagtgcaactcgctggagaaagtacggctacaggcgggtctatattccggtaataaccgacccgacttgtagcggaccccacacgcgttgcacagagtcttagcccc

SEQ ID NO: 208632 - DNA, 363 bp, Glycine max
catacttgcaccccgatcacttataactaatcccaacatatgataggtgtagagggggtatttcaatctattatccatattgtgatgaagaaggaacatgaagagggtctcaagattgacgttgctacactcacagttacagtagttgttgtgatgctgccattgctatgcacatgtggggcaagcaacctcgaccctttgattctaataccaggtaacggagggaaccaactagaagcaaggttgaccaatcagtacaagccctctactttcatctgcgaatcatggtaccctctcatcaagaaaaagaatggatggttcagactttggtttgattccagtgtcatacttgctccttcactc

SEQ ID NO: 208633 - DNA, 535 bp, Glycine max
gccattgcttactcgttggcctttcaacaagttgattagagaaaaagcccttcaagtaacaatgaagcatattcattacgaagatgagactagtcgatacataaccattggttgtgtggaaaaggttttatgtatgcttgcttgttgggtggaagatccaaacggagatgctttcaagaagcatcttgcaaggatcccagattacttatgggtttctgaagatggaatgaccatgcaaagttttggtagtcaagaatgggatgctggctttgctgttcaagcttttcttgccactaacctaattgaagaaattggtcctacacttgcaaaaggacatgacttcatcaagaagtctcaggtaaaagataatcctcttggagattttaaaagtatgtatcgtcatatttctaaaggatcttggacattctctgatcaagatcatggatggcaagtttctgattgcactgcagaaagtttaaagtgttgtctacttctatcaatgttgccaccagagattgtgggagaaaagatggaa

SEQ ID NO: 208634 - DNA, 507 bp, Glycine max
gttgttcaaactcttagaaatgttgctcgtgatggaaggactgtcatctgggccattcatcaaccaagcagtgaagtctttgcactctttgatgacctcttcttactatctgggggcgaaacagttattttggagaagcaaaatcggcaattgagttttttgctgaagctggtttcccttgtccacgttaaagaaattcttctgatcacttcctacgatgtatcaattctgatttcgacattgtaacagctacactgaaaggatctcaaagaattcatgatgttccaaattcagcagatcctttcatgaatttggctaccgcagagatttaagcaacactatttgagaaatataagcgttcaacatatgcccgaagggcaaaaaacagaattcaagaactgtgtaccgatgaaggggcttaacactcaacacaacatggaagtcaagctcgttggttggagcaactattaaccgtgacaaagagatcatttgtgaacatgtgtagag

SEQ ID NO: 208635 - DNA, 347 bp, Glycine max
tgaagtagtcgctatgattgagtatgcactcgctccctaacctcggcatggaattcgggatgtgattgagatcaaactcttttaaatgtagctcgtgacggaaggactgtcatctgggccattcataaaccaagcagtgaagtctttgcactctttgatgacctcttcttactatctgggggcgaaacagttattttggagaagcaaaatcggcaattgagttttttgctgaagctggtttcccttgtccacgtaaaagaaatccttctgatcacttcctacgatgtatcaattctgatttcgacattgcaacagctacactgaatggatctcaaagaaatcatgat

SEQ ID NO: 208636 - DNA, 423 bp, Glycine max
gttagaattcttggttttatcttctcagtcagcagcaacatttgcattttggtattgggtaggatcacacatatttcctgatgttttgctcaacgatattgctggcccagaaggagatcctttgctgttgagtttaaaactatccgtagatgttttggctgtttcttgtccatgtgcactgggtcttgctacgcccacagcaatcttggttggcacctcacttggggcaagaaaaggacttcttattaggggaggggatgtgctggaacgcttggctggaataaattatattgctctagacaagacaggaacccttaccaaaggaaaaccagttgtgtcggccataagctctatcctttatggagaatctgaaattcttcggcttgctgctgcaatggagaaaacagcatctcacccaatagc

SEQ ID NO: 208637 - DNA, 488 bp, Glycine max
aatgcatccatccagagcactaaaaacaaatcccaacatctgaaaggggtagagtaggtatttcaatctattatccatattgtgatgaagaaggaacaagaagagggtctcaagattgaggttgctacactcacagttacagtagttgttgtgatgctgtcattgctatgcacatgtggggcaagcaacctcgaccctttgattctaataccaggtaacggagggaaccaactagaagcaaggttgaccaatcagtacaagccctctactttcatctgcgaatcatggtaccctctcatcaagaaaaagaatggatggttcagactttggtttgattccagtgtcatacttgctcctttcactcaatgctttgccgaacgcatgacccttcattaccaccaagaactcgatgattacttcaacactcctggggttgagacccgggtccctcactttggttccaccaactctcttctctatctcaatcc

SEQ ID NO: 208638 - DNA, 417 bp, Glycine max
ttgcgtggctacatgttgcagtactacctgcttgggtgggtggggggggggggggggggggggggggggggggggggggggggggggggggggggggggggggggggggggggtaaaaaagcttgggaaataccttttaggggggggaaaaaaaaataaacccccttaaacgttttaataatggaattttttttaaaaaaaaacgtttaaattagcgccaatgggggtgatgaggagggcattttagttataaaagctcagtgggaaggaattgggaaaaccctaataataaagggcaggtcaataaaatttaaatggaggggagtataatccccgtgggaaaggggggcgtttaccccctgggggggggggggtttaaatagatagcggaagagtaaattctattaatattgggga

SEQ ID NO: 208639 - DNA, 286 bp, Glycine max
agtaatcggatcaacaatatgggtgaagaaggtgctgctttgttcacgattgtttatacccacacaacacaaagagatattcaacgccagggagaattgtcaatgggagctacaacagatttaactcggagatacttgtgtcgggcttccattccaaaatctcttccaaatgcattctttttgttccctccataaggcatgttatttccaaaggcaacgatacagttgatccaaacaatgaccgcacgaatggaccttggcacactgttggctgtgaccaaactct

SEQ ID NO: 208640 - DNA, 270 bp, Glycine max
cctcggggaattccaattccacattttcaagaaataaggaggcaaaaatgttcatatatgaattggaattatttgttttcttattaggcctatcctgaagccaaaggaaatgagatcggaattcctcggggaattccaattccacattttcaagaaataaggaggcaaaaatgttcatatatgaattggaattatttgttttcttattaggcctatcctgaagccaaaggaaatgagatcggaattcctcgggggtaccgagctcgaatt

SEQ ID NO: 208641 - DNA, 516 bp, Glycine max
  unsure (1)..(516): unsure at all n locations
attagaggggttttctctttgagagaatcgtatcttacaacttttcgtgaccacttttagtgagggaagagaagctaagagagagactccaattagattcaagagagatggccatcagccatgaaacttgggctttcattttcggtcttctaggcaacgtgatctcctttatggtgttccttgctccattaccaactttttaccaaatctacaagaaaaaatcatccgaagggtttcaatcactaccttatgttgttgcactgttcagttcaatgctctggatctattacgcacttgtgaaaaaggatgctagcctccttctaattactattaactcctttgggtgtgtgatagagacaatttaccttgcaatcttccttgtttacgccccaagcaaaaccaggctttggaccatcaagcttcttctcatgttgaatgtttttgggtttggagggatgcttctttcaacactataccttacgacgggttccaaacgtctntctgtgataggatgga

SEQ ID NO: 208642 - DNA, 541 bp, Glycine max
  unsure (1)..(541): unsure at all n locations
ttcgtttcttcccaacagaagaagagcttgttggcttctacctacacaacaagctagaaggccaaagaaatgccatagccatagccatagacagagttatcccagttattgacatcaatggagttgagccttggaaccttccaacacttgctggggagctttgtcgtggggacacggagcaatggtttttcttttcgcccggtcaagagagggaaaccaggggaggcagacccagcagaaccacagcttgtgggtattggaaggctacaggttctccttgctatgtttactcttctcacaacaaagtcattggggtgaagaaatccatggtcttctacaaaggaaaagcacctatgggaacaaaaaccaaatggaagatgaatgaatacagagccatccatgtcccttcccaatccacccctgccacccttcatttgacatgtgaattcagcttgtgtcgggtatatgtcatatcggngagctttcgagcatttgatcgacgaccattagagaaagaaggagcagagtcgcgggttcatag

SEQ ID NO: 208643 - DNA, 233 bp, Glycine max
cgaaagtgttgctcaggataggcctaataagaaaacaaataattccaattcatatatgaacatttttgcctccttatttcttgaaaatgtggaattggaattccccgaggaattccgatctcatttcctttggcttcaggataggcctaataagaaaacaaataattccaattcatatatgaacatttttgcctccttatttcttgaaaatgtggaattggaattccccgagg

SEQ ID NO: 208644 - DNA, 504 bp, Glycine max
  unsure (1)..(504): unsure at all n locations
gcaacatcacaggggaaccttactcggtccaaaccaacgtgtatgtgaacggtgtgggcaacagggagcaaaggctcaacctttggttcgaccccaccaaggattttcactcatactctatcttctggaatcaacgtcaagttgtatttttggtggatgagacaccaataagggtgcacacaaacatggagcacaagggaattccatttcctaaggaccaacccatgggtgtgtatagctcaatttggaatgctgatgattgggccacgcagggtggtcgcgtaaaaacagattggagccacgcaccattcattgccacatacaagaactttgagatcaatgcttgtgagtgtcccgtgtcagtggctgcaatggataatgctaagaagtgcactatcagggagggcaagaagtattggtgggatgagcctaatttggctgaactcaacctgcaccagagccaccagcttatgtgggttagggcaagacacattntctatgact

SEQ ID NO: 208645 - DNA, 484 bp, Glycine max
cacgttacaagtttttcacaagtactactaatccaactaagtgaaaatgttctaattacaaccaaaagccgaagaagaaaagacttttacaatatgctagtaatagtgacgaggcacaagaaagactcttcttcttaagaggaggatgagaaggtgtcaatgatggttgtgtggagtgggtcactcaagtgggtggcccagttgttgagcgggcccttgccggtggcggcggcttggactgcaaagcccaagaagcccaccatggcaagacgggcgtgcttgatctccgccaattgaagggtggctttcttctctgggtctgaggccaggcccaatgggtcgaagtaactgccacctgggtacaacctcttctctgggtcgagctctgcattcctctggaactctatgtagccaattacgagtacctcgatccaaatcagtgtggtgattgagaatggaagtggttgcccaaggtatgatgacc

SEQ ID NO: 208646 - DNA, 448 bp, Glycine max
tgactggctactcgttgtagtaccgcctgcttggggggggggggggggggggggggggggggggggggggggggggggggggggggggggggggggggggggggggggggggggggggggggaaaaaaaacccccgaaaaaggggttagtttcccggaaaggggccccccttaaaaggggggaaaaagggagaaggggggacagtttttgggaaatttatggttttgggccgaaattttggaaggtggccccaaatttgttggaaaacctcccccgaaatggcaccccccttaaaaaaaccccgggggccaaatttaaggggggcaaaaatcttttaggggccgaaaaacccccgggggcaaaaccgccccgggtaaggtaaaaggccccttcttggagggccccccggggaggtgccccttaggctttatgggggccccccgggggt

SEQ ID NO: 208647 - DNA, 561 bp, Glycine max
tacctatactcgttagcactaccacctacttgggggggggggggggggggggggggggggggggggggggggggggggggggggggggggggggccgggggccggggggggggggggggggggggggggggggccccaaattttttttcaaaaagcccggttgggaaaaaaaaaaccaaccctttttaaaatttttttgggtaatccctttaccgtgccctgttaaaaattttttttgccccccaatatggcctttcacccccaaaaggacaaaaaaaaatttttcccccaaaccccccccttccccgaaaaaattaaagatttaacccccatatccccaaaattaaaatttttaaaaacagcccccctttttggcatattccccaatttctgcccccttttttttttaaaaaacccccctcaaaagggctaaatttttatttccccccccaaatttttttttttgaaaaactttcccctaaatccaaaaatgtctgaattgcgttcccccaaaaaaccttcccctttttttggggcccccccctattgtaaaaatttttt

SEQ ID NO: 208648 - DNA, 571 bp, Glycine max
cgcctttcttctccgtttccgtttcctcgttcgaattcgctttttgatctgcgaaaatgagagagtgcatctcgatccacattggtcaggctggtatccaggtcggaaatgcttgctgggagctctactgcctcgagcacggcatcgggcccgatgggcaaatgccaggtgacaagacagttggcggtggtgatgatgctttcaatactttcttcagcgagactggtgctggaaagcacgtgccacgtgcagtgtttgtagatcttgagcccactgttattgatgaggtgagaaccggaacttaccgccagcttttccacccagagcagctcatcagcggcaaagaagatgccgccaacaactttgcccgtggccattataccattgggaaagagattgttgatctgtgcttggaccgcatcagaaagcttgctgacaattgcactggactccaagggttcttggtcttcaatgccgttggtggaggaactggttctggacttggttcccttctcttggagcgtctcttcgttgattatggcaagaaatcaaagcttggtttcacagtcta

SEQ ID NO: 208649 - DNA, 560 bp, Glycine max
gagagaaggaaagggaaaatgggtaaggatctgagcgaggaacaagtgtcttccatgaaggaagccttctctctattcgacactgacggagacggtcggatcgctccgtcggagctggggatcctgatgaggtctctgggaggtaacccgacgcaggcccaactcaaagccatcgtggctgaagagaacctcacggcccccttcgacttcccccgattcctcgatctaatggccaaacacattaaacccgaacccttcgatcgccaactccgcgacgccttcaaggtcctcgacaaggactccaccggcttcgtcgccgtctccgagctccgccacatcctcaccaacatcggcgagaagctcgagccctccgagttcgacgagtggatccgtgaagtcgacgtcggatccgacggcaagatccgctacgaggatttcatcgccagaatggtcgccaagtaacgccgattccattctctctttccagtgttattttctctctttctttcgctttggggtgttggcttttcagtggacccaataatagattaatcaattgg

SEQ ID NO: 208650 - DNA, 528 bp, Glycine max
gcacacacaaaaaaaacatcttattttatagaaaggaataacttaaaagtacaattttttatttgccgaataacttaataccatccagaaaatctagttcaaagaagttacataaggacatctttcagctacagaaacagattacatcaaataagtttgtctaaactacctcactctctttgaatttcatcacattactcgtccttttactgcttggacgtaatatctttaagcttttccttcaaatcacccgtctgatgcatattaagaacaatatctgatccaccgataaactctcccttaatgaaaacttgtggaaatgttggccagttactgcagagaaagaacacacgagagaacagtgggacatcacaaaaagtatatttgacttttctgtcaataattaaacttggcagcacctgcacttctagtactaccatgtttgagaactaattaatatgatcccatataccgctttaaagtgcaggacagggtttggctgactaaattccagaggatttaacatga

SEQ ID NO: 208651 - DNA, 466 bp, Glycine max
caaaaaaagaaagtaaaaaagaaaaccctagaggagaagaagccaaaaaaaagaagccaaaaaaaaggctccaaagatgggtttcaaaagctcttctcttctatgcctagctcttttgcttgcatgctcttcggctattcatgcctttgacatcacacaactgctaggccaatatccagagttttccacattcaacaaatacctaacggaaaccaagctcgcagacgaaatcaacagccgcaacaccatcactgtcctcgccgttgaagactcagccatgaattccattgctgccaagtccccagaagccattaaggccatcattagcacccatgtcatccttgacttctttgatgagaagaagctcatggaagctcaagctaatagccaacagttgacaaccctattccaggcctcaggcattgcagtgaaccaacaaggcttcctcaaggttgcactcgtcggc

SEQ ID NO: 208652 - DNA, 427 bp, Glycine max
attagaggggttttctctttgagagaatcgtatcttacaactttccgcgaccactgggagtgagggggaaccatctaagagagagactccaattagatccaagagagatggccatcagccatgaaacttgggctttcattttcggccttctaggcaccgtgacctcctttatggggttgcttgctacattaccaactttttaccacatctacaagaaaatatcatacgaaggggtgccatctcttccttatgctgtcgccctgttcaggtcaatgcttcggatctattacgcacttcgtgaaaaaagattgccagcctccttctaaaaactattaacttctttgggcgggggatagagacaatttaccttgcgactttctctgtttccccccccagccaatcccgggttttgaccatctagcctctt

SEQ ID NO: 208653 - DNA, 594 bp, Glycine max
ttgcgtggtacgtgtgtggagtgccgcctgcttgggggggggggggggccgggggggggggggggggagatttggatgaggtggggtatgcgtgcagttgatagaagtcggggtaagagtgggggtggccgggcacagacagcaggtaacagggtcggcagtacccgaggtgctggggctttcagggtcacgtgtgaatgttaaggtaacacaggtaggggggggtgggtgacgaagcggtgggggaggggtatgaataggggcagggataggacaacaaaaaaaaacgaagggcaggccgagaattgctcacggattttgagagctcgtagaaaagagtataaaggggcaaaacaattaaaaggtgccaggtcagagccaatcagggacgagggtgtgaggcaggtttagttaagtaaaagatgggtgagatagagggggggttagagtgacaagtctagtggttcagagagaaggtggcagaaacacaggagtgagcagagttaagaaggtggggggagatcgcggccaaggacaacaaagtatggccgggggggggatggcaaagaaccagtgagagttagaaagagagca

SEQ ID NO: 208654 - DNA, 603 bp, Glycine max
  unsure (1)..(603): unsure at all n locations
cccattccctcctacttcactcattaacactctttacattccatatgttttcataaaactttatatcattatattcactccattcaacctaccnanaccanacggaggtgcgtcagtccggagtacaccccgggacgacgagcatactactcgagagtcaacccaacaggctagcttttagggagctgcttgtcactgctcccggagtccgggaatatctcacatggtgccatcctctttgaggaaaccctctaccagagcacaaatgcaggcacgccctttgcgaatgtcacgaaggacgctgtggtgcttacctgtcatcgaggctgacacggacacagactatctacctgcaactaacgtagaaacaacgattcagggtctacatggccctggtaagcgttgggcctagtactactaagctggtgcacgttctgccaaatggggagcagtgctgaagattggtgccaacaagccatcggagctgtctatccatgagaacgcctatggcttggctagatacgctggcatatgccaggagaatggcctggttcccattgtcgagcctgagacacttgtcgatggacctcatgacattacaag

SEQ ID NO: 208655 - DNA, 497 bp, Glycine max
cttcacccctactcgcgagcttttatggatttgcttttcactgctcctggtgcctggggatatcgtgactggtgacatcctttctgaggaaaccctctaccagagcacatctgctggcaagccctctgcgaatgtcttgaaggaagctggtgtgcttcctggactcaaggttgacacgggcacagtcgagcttgctggaactaatggagaaaccaccactcagggcctagatggccttggtcagcgttgtgccaagtactactaagctggtgcacgttttgccaaatggcgtgcagtgctgaagattggtcccaacgagccatctgagctgtctatccatgagaacgcctatggcttggctagatacgctgtcatatgccatgagaatggcctggttcccattgttgagcctgagatccttgttgatggacctcacgacattcacaagtgttgccgacgtcaccgagccgtgttctttgcacatgctacaaggcttt

SEQ ID NO: 208656 - DNA, 501 bp, Glycine max
ctgtctataaaacttttagttacataacataacataacataacaggtagcttcattgacttgtctcttttttttaatgttttgagttctttttctctcatggatttgattattgatactaatttgcgttatgtataggttcttacaaatgggaaatacaggagtgtggagcatagagctgtggctcatgaggagaaagctagactctcaattgtgacattttttgctcctagctatgaagtggagcttggtccaatgcctgagtttgtggatgaaaaccacccatgcaagtataaaatatacaatcatggagagtacagtaaacactatgtaacaaacaagttacaaggtaaaaagaccctggaatttgccaagatccaaaccaagaacacaaactaggaagttccctaactagttaggagaactataattagactgactaatgactgtgtgtgtagaattaattatctaccacataaaagcatcatggtcaaatctctcg

SEQ ID NO: 208657 - DNA, 501 bp, Glycine max
cagcagcagatccggcgggacaaggtaaggttcgaggcggcgccattggtagggatagaggaggaggaaccagtgtacgagaccgccggaatgttgtcggagatgttcaattttccgcccgcgacggaattgctggagcagcagcacgccacggcgacgttccgggcggcgaggcaagccggagagtggtacggaaacagacagcagcaacagcaacagatttcaggcattaatgctgactcagcagcagccatgcaactttttctgatgaaccctcaaacgaggtcgccttctcctcctcaaagccacactattccttcttcaactcttcacatgttgcttccaaatccttcttccaattccctccaaggatttactggttcggccgcgggagggtcttttggtcaattcacatgggttcctgagggtgctcaccaacaaggaggcgtggtggaagggcaaggtctttcgttatcgctgtcttcttcgttggaggcagcg

SEQ ID NO: 208658 - DNA, 501 bp, Glycine max
aagcagaaaacattgcacctcatcacttattctaccaacatggtgttaaataatggcgatccggtggttggagtattcaaaatcattcaccaatgtatgttccttcttagtgggttcggatgctctatctataggaggaacatacgttcatgaaatgaaagaaacactatcccctacagtaaaaacgatccccctaattcaaaattcccaatgtcgacatagtgaaattaaataatcattatatgatcgcgtaacgaaagctctattttgcttggtttgtttgattcctccttcttcaaagtgtcacgctagggaacttgcaggatccataacttggatcctttgcggtttgagttgcaagcccattgaagtaacaagttccgccaaccttcctaaactgcgcccaataagcactaaacgcatagctcgcgtgccagaaaaccgaatcgggtttaaaacacttccccttcgattggatcgggtcgcacgtgccattcccct

SEQ ID NO: 208659 - DNA, 527 bp, Glycine max
gcgaaacccaaccgctgaccgtcgctccggcaatgtggccggaactccaataatctccgtcgtcccacttctacccccgacaatgcctcacgccaaaacctcccaatcgcagcagaacataaagcagagggtactcacgtgcctaacgaagctctcagaccgcgacacacaagccgcgggagccaccgagctcgagtccatcgcgcgtaccatagacccacactcggttccagtgttcctctcttgcatccactccaccgactcctccgacaaaacccccgtccgcaagcaatgcgtgcacctcgtcgccaccctctcccacgcgcacggcgacgcgctctcgccgtttctgtccaaaatcatcgcctgcctcgtccgccgcctccgcgacccggactcctcggtccgggccgcgtgcgccgactccgtcggcgcactctcggcgtgcgtcacgaggcagcctttcgccgccgcgttcctcaagccgctcgcggaggcgcttttcacggagcaggacccgagctcgc

SEQ ID NO: 208660 - DNA, 554 bp, Glycine max
tctccatacaataatccgagtgacactcctcactttgtggccatggcttcactgaggtgcctccactcaacccaccctcatcttcatcgcggttcagcgcttctcgccatttcgaaccgctgcttcaaccattcctccttgctgaaccggactctctccgtaaaccctcctcgaaccgctcctccacgcgccatggccaagcccagtttctcaactgcccaagacctagtggcttctcctggcgattttgaatttgcgcagcctctgaaaattgtggagtatcccgacccgagattgagggccaggaataagcgcatagttgccttcgatgatagtctgaagaagcttgtccacgaaatgtttgatgtaatgtacaaaactgatggtattggtctctcagcaccccaattaggaattaatgttcaacttatggtgttcaatccagtaggtgagcgtggtgaaggagaggaaattgttcttgtaaacccaagagttagccaatactcaaagaaactgacactatttaatgaagggtgcctatctttccaggcatc

SEQ ID NO: 208661 - DNA, 508 bp, Glycine max
aactaattaaatgactttattgaaattggattccccaagtataattttcattatctcttcctccacttattgggaggttgaaagttttaccagttactatagaacaaaattaatctctctgatgcaaatatctaagatacataaataacatttcattaatttccattatgtccaaagaggctcccaagcagtaccaaaactgttgtcctctatgaagcagctcatatcaacgtgaggttgaggctgaagcacgtgctgctcctgtgactgactcatttccatgcaaattagggccactaaattggcttgttggcactgcatgttcactacctcagcttgtgctttggccagctgtgcttgtagctcactaacttgcttttgaagttggcatattgcacctgcacacccataaactgggtctctgatcctagcatttgcctcataaaccatgctgctcacagcatctgctctctgggattctggcagttcctgcaagaacttgatgatg

SEQ ID NO: 208662 - DNA, 355 bp, Glycine max
aggacgcccttttttttttttttttttttttttttttttttttttttttttgggctggaaggggagcatattacatatatgttatctcaacaaacaagaaaatcaatacaaacttgattaagataccatatatataggactggatataaatacacatatttcccagaagatcgacaacctaataatagatacatcatacatgcatcaaactagtggaagaagcaggggcttcaatttcatacttaattcccacccaaattaaagcacttaatcttccatgagtgccaaattaattaaggagcccatggtggccttcaaaaaccttggcaaaagaatttttcttttcttatttttg

SEQ ID NO: 208663 - DNA, 375 bp, Glycine max
gggagaactcaaattaatttcattcagggtacttgcaatgactataacagtgggtaatgatttgtggctagactagctagcatagagaattacagaataaaagcataaacatgtgcttagcagttacctccttcataacattacattgtgcaaattatttacatacatactatactggtgcccctaccacgtttaggcatccatccttatatttaattgttagaaacatgtatagcagtgacagttgagaccatctagtccaccccacatacattgcgacctctgcagatcttgtaatatcccttttctccccagctctccccccatgaattttttatgatccaggtagggctttccttaaaacgaattggagca

SEQ ID NO: 208664 - DNA, 621 bp, Glycine max
  unsure (1)..(621): unsure at all n locations
cttttccctcgttgaaatgaaaatgggttcttctttgtggactttgtgtctaattttggcttcactagcctcttctgcattctgtgcctttccacggaggccagtggatgttccattcggcagaaactacgttcccacttgggcttttgatcacatcaaatacttcaatggaggttctgagattcaacttcatcttgacaagtacactggtactggcttccagtccaaagggtcatacttgtttggtcacttcagcatgaacataaagatggttcctggcgattcagctggcacagtcactgctttttatttatcttctcaaaatgcggagcacgatgagatagattttgagttcttggggaacagaacaggacaaccttacattttgcaaacaaatgtgttcaccggaggcaagggtgacagagagcaaagaatctttctctggtttgatccaacanaagcataccacagatactctgtgctgtggaacatgtatcaaattgtgttcctagtggataacatcnccaatagggtgttcaaaaacctaaagggctngngagtgaagttccnctttgaccaacccatgaagtgtacaacagcttgtggaatgctgatgactgg

SEQ ID NO: 208665 - DNA, 554 bp, Glycine max
  unsure (1)..(554): unsure at all n locations
ctagaatgcggattgcaataggatccgctaaagggcttgcttatcttcatgaggactgtcatcctcgtatcatccatcgcgatatcaaagctgccaatgtccttattgatgatagcttcgaagcaaaggttgctgattttggattggctaagttgactactgataataatactcatgtatcgactcgtgtcatgggaactttcgggtacctagcccctgaatatgcatcaagtggaaaattgacagagaagtctgacgttttctcatttggggtcatgctattggaactcataactgggaagcgacctgttgatcacacaaatgccatggacgacagcttagtagactgggctcgaccacttctgactcgtggactagaggaggatggcaactttggagagttggttgatgcatttttggagggaaactacgatgctcaagaactgtcaaggatggcagcttgtgctgctggtagcattcgtcattctgccaagaaacgtccaaaaatgagccaaattggtagaatatnggaaggagatgtctcactggatgac

SEQ ID NO: 208666 - DNA, 521 bp, Glycine max
ggggcttcagctgttctgctgatgaaaagaagtgttgcattgcaaaaggggctacccattcttggtgtattcaggacttttgcagcagttggtgttgatcctgccatcatgggtgttggccctgctgctgcaattcctgttgctgttaaggctgcaggtctagagcttgatgatattgatctttttgaaataaatgaggcatttgcctcccagttcgtgtattgccgtaacaagctagggcttgatccagaaaagatcaatgttaatggaggtgcaatggcaattgggcatcctctgggttcaacaggtgctcgatgtgttgcaactctgttgcatgaaatgaagaaacgtggcagggactgtcgatttggagttatatctatgtgcataggtactggaatgggggcagctgctgtttttgagagtggtgattgtgctgatgagctatgcaatgcccggaaagtggatgaccttcttttatccaaggatgctcgcttgaaatagttacttcatactcacta

SEQ ID NO: 208667 - DNA, 425 bp, Glycine max
tgcccgttgtgggcccaccggaacaattcctgccgcatccgtctgctcggcattcggctcccgcggctcgaggcactttttctgccattgaagaagaacccgtttaaccgtcggggcaagtggaacacacccaactcttaattgatggaacatttgtccatgctgtttctggaactggtgcggatcttgttgcgcgcaacggatctgcttgagaagcatggtgatcagcttgctcacttgagacttgggataatggagagccttatgaacaagctgctaagattgaagttgcaatgcttgttcgactgattcgatactatgctggatgggcagataagatccatgggctaacagttccagctgatggaccatatcatgtgcaaacattacatgagccacttggtgatgccggtcagatcattcct

SEQ ID NO: 208668 - DNA, 422 bp, Glycine max
agtaaaatgcacgagaaaatttattagaaaatcacgatggctagctaagtttcaaagccaagtacattctgttgtaatgtcaaatggaaattaaaaagacacggaaggaggagctgattcgatgtcatgagctattgaaccctaagaattgatccacaggcttagccacacagttggcaagtgtatcacctgcttccggtgtagatgcctcagaatacacaccaacatcatcttcagtgccagatggtcgcacaaagcaccgaccttgggggtacttaacagattcttcatttatggcttcttttagacccggggggctcacaaccacagctattgcatttgttgtaacaataaccgctctgtcagcaactttgaccttgagctgcttgctgggtaaatcatgataaagctcattccattta

SEQ ID NO: 208669 - DNA, 577 bp, Glycine max
  unsure (1)..(577): unsure at all n locations
gaaagagagagagagagagaaagagaagtgtgtagttggtgaagtttttgagaagaatatggaacgaagtggcggaatggtaacggggtcgcatgaaaggaacgaacttgttagagttagacacggttctgacagtgggtctaaacccttgaagaatttaaatggtcagatttgtcaaatatgtggtgacaccattggattaacggctactggtgacctctttgttgcttgtcatgagtgtggcttcccactttgtcattcttgttacgagtatgagctgaaaaatgtgagccaatcttgtccccagtgcaagactacattcacaagtcgccaagagggtgctgaagtggagggagatgatgatgacgaagacgatgctgatgatctagataatgggatcaactatggccaaggaaacaattccaagtcggggatgctgtgggaagaagatgctgacctctcttcatcttctggacatgattctcatataccaaacccncatctagtanacgggcaaccgatgtctggtgagtttccatgtgctacttctgatgctcaatctatgcaaactacatca

SEQ ID NO: 208670 - DNA, 508 bp, Glycine max
attgaatccaacaggcgagctcttagggagctgcttttcactgctcctggtgttcttcaatatctcagtggtgtcatcctctttgaggaaaccctctaccagagcacagctgcaggcaagccctttgtgaatgtcttgaaggaagctggtgtgcttcctggcatcaaggttgacaagggcacagtcgagcttgctggaactaatggagaaaccaccactcagggtctagatggccttggtcagcgttgtgccaagtactacgaagctggtgcacgttttgccaaatggcgtgcagtgctgaagattggtcccaacgagccatctgagctgtctatccatgagaacgcctatggcttggctagatacgctgtcatatgccaggagaatggcctggttcccattgttgagcctgagatccttgttgatggacctcatgacattcacaagtgtgccgccgtcaccgagcgtgtccttgcagcatgctacaaggctttgaatgatcaccatg

SEQ ID NO: 208671 - DNA, 569 bp, Glycine max
  unsure (1)..(569): unsure at all n locations
gaagaagtatcactcatataatactctgtatcatttcatttcgataatcatccatagctactgaagaaaatggcaaccatctctgctgctatcacaaccccatcgatctcccgcgcaactcttgtgcaaaagcgggtctcatctcccgttcttggtttgccagcaatgggtaaggtgggaagagtgagttgctccatggaggaaaaaccttattctgtgaaggaaagcagctctagcatgttggggatgggggcatctctgatggcagctgccagcgctgcagccatgtcaggcccagccatggccttggtagatgagagactgagcactgaaggaaccggacttccctttggcctcagcaacaatcttcttggttggatccttttcggcgtctttggtcttatctggactctctattttgtctacacttccactcttgaagaggatgaagagtcaggactgtccctttaaatatcctgagttgtaaggtgggtgatgatgaatgatggattgtataaatngcaatgagtccccctcatcttctgtgtagttaaacaaattctgtgctt

SEQ ID NO: 208672 - DNA, 516 bp, Glycine max
  unsure (1)..(516): unsure at all n locations
cttattgctcccagcaaccactctccccaagaagacgctgaggctctcagaaaggcttttgaaggatgggggactgatgagaaaactgtcatagtaatattgggtcatagaactgtttatcagaggcagcaaatcagaagagtctatgaggaaattttccaggaggatcttgtgaaacgcctagagtctgagatcaaaggagactttgagaaagccgtgtaccgatggatactagaacctgcagatcgtgatgctgttttggccaatgttgccatcaagaatggcaaaaactacaatgtcattgtggaaatcgccactatcctctccccggaagagcttttggccgtgagacgtgcttatctcaaccgctacaagcactccttggaagaagatgttgcagctcatacctctggccatctacgccagctnttagtggggttggtgacctcatataggtatgttggtgatgagatncaatccaaattgcacaaactgaggctgaaatcttcatgatgc

SEQ ID NO: 208673 - DNA, 501 bp, Glycine max
ttactatactgttagtataccgcctgcttgggggggggggggggggggggggggggggggggggggggggggggggggggggggggggggggggggggggggggggggggggggggggggccaaaaaaaaaacccctttgtttattggggggaggggccccccaaaaggaggggtttttttcccaaggaaacaaagcccccgcaaaatttcctaaacgggggtttacttataacccccccctggtttacgtttccccaaaagggggggaaggggaagaagtttccccccatttggggcccgaaaattttcccctgttaaggttaccccggggattttttggcctcataggattttgggggacttttaagttttgggggggaaatagggctttgggggcctaaaatagggggcccgtaaaaatggttttttgggggaggagggcccttccaaaaaatggggggggggttaattcccaggttttttttcccaaccgggggcca

SEQ ID NO: 208674 - DNA, 394 bp, Glycine max
aaaccgggaacggacaattttttaatggaacaagagctcattattcatgaaagcctccaaaggggaaaacaacattgtttaaggcccctccatgactaaagaataattctcaggatttttttttataaaaattaaggggcaacttaaaggcttgttttgagagcttaatcattgtccaagggattaggccccttaaaagtcctttcccctttgttgcttcccaggggggcactcctttggtttccaacgtttccaaagattttggatcccttcttttccaactttttttttttaggtgatttgttttcaaaagattacttaccaaagtcctcaaatgggtccctgagaattaacttttcccatgggttgaaaccaaccctctttaaattcttgg

SEQ ID NO: 208675 - DNA, 450 bp, Glycine max
caaaagataagaaaagcttatacttcagtctgcaatgaaactgcaagtattcggcaaagatctggaactctatttaacatactagtagcaacaaccttaacaagatcattacctgcaatgaaactacaaagtattcctgcaaagaaattaaacacaagctttcacataaagaaactaacgaatacaatccaagagtagaaactcagggccttgcccaacaaaatagactcatacttcagtctaagcaccactatagattaacaaaatctcactattctcttaacaatcacagataccaagtctcaaaatcaacttctgcttttgcgtcgttccctaaggccatttccattagcatatgggacctcctcacgcccacgataaggaggtgacctggtgtagctacgtccacgaggtgacaaactacggcgcctatgggaccgcccacgagga

SEQ ID NO: 208676 - DNA, 586 bp, Glycine max
  unsure (1)..(586): unsure at all n locations
aatccatccattattctctgtgtgtctttctctacttctttccctttccccaacccctcatacgttactctttaaatacgcaccacatcttcacgtgcctctcggttcttcagtccaaacaatggccatggttgagctctggtggattacgtgctttctctaactactgttttccacacttaacgaaccagaacacagtgagaaagacataatggcggtggagtacacatgctgctcaacggccttcttcgttcacatactggtcatcgtgctgctcgtgcttttcgcgggcctcatgtcgggcctcaccttgggcctcatgtcgctcagcctcgttgatcttgaagttcttgctaagtctggtactcctcaggatcgtaaacacgctgagaagatattaccagttgtcaaaaaccaacatttattgctatgtactctgctaatttgcaatgctgcagccatggagacacttcctatttttcttgatggcctngttactgcatggngcgctatcctaatttctgtgacattaattcttttggttggtgagattataccccaatcagtttggtctcggtatggtttg

SEQ ID NO: 208677 - DNA, 562 bp, Glycine max
aaagaatccaaatggaccaccaaatccaaatcggaatggtccccccaatatggatagttatactgacaatcacctgcgcaaaattggatcaaatgttaattcctatatcggtatggtttgcgatacacttaagaatactataccaaaggccgtggttcattgtcaagttagagaggctaagagatcattgctaaaccacttttatgttcatgttgggaggaaggagaaggagaaattgggtgctatgttagacgaagacccagcccttatggataggagaaatcaaatagctaaaaggcttgaattatacaagcaagctagggatgatattgactccgtggcttggaaataatgaaatcccagagtttgcaacagatgtttcgaggaagatttgttatagatttgatcattcttactatttttttttaatcaaacacgaacagaaaaatctacggttatggcaagaagttgaattcgcacttgcgaatgattcttttggtccacagaccacagtgtacaaaagcattggagttctatgttgtgaatttatgtaacttacgag

SEQ ID NO: 208678 - DNA, 481 bp, Glycine max
  unsure (1)..(481): unsure at all n locations
atgatgctaagatgagtgaattgctttccactgatgggcaagaattcttcacctcttatgatgaagtgtatgacagctttgatgcaatgggattgcaagagaatcttctgcgaggcatatatgcttatggttttgagaggccttctgctatacagcaaaggggaattgttcctttctgcaaaggactggatgtgattcaacaggctcagtctggaacaggaaagacagcaacattttgttctggaattttgcagcagcttgattatggattggttcagtgccaggctttggttttggcaccaacaagggagctagcacagcagatcgagaaagttatgcgagctcttggtgattacttgggagttaaggtccatgcttgtgttggtgggacaagtgttcgtgaggatcagcgcattctccaggctggtgtccatactngtgttggcactcctgggcgagtgtttgacatgctgcggaggca

SEQ ID NO: 208679 - DNA, 466 bp, Glycine max
ctaatccctcactcttgttcttcagtctcctcctattatccgccaccgtagccgccgccgaacggatcgacgatgaagacgaccttctgatccgtcaagtggtgccggatgcggaggaccaccacctgctcaacgcggagcaccacttctccgccttcaagacaaagttcggcaagacctacgccacgcaggaggagcacgaccaccgcttccgtatcttcaagaacaacttgctccgcgccaagtcacaccagaaattggatccctccgccgtccacggcgtcaccaggttctccgatctcactccggcggagtttcgccgccagttcctcggcctgaagccgctccgccttccctctgacgctcagaaggctccgatcctaccgaccaacgacctccctaccgatttcgattggcgcgaacatggagccgttactggagtaaaaaatcagggttcgtgcggatc

SEQ ID NO: 208680 - DNA, 529 bp, Glycine max
caaggatgcagctggagttgcaggaaatgtgtttgcttttgggttgttgtgtctcccatacccacatttaggaggattatcagaaatgggtcaacagagatgttctcagggttgccatatatttattcccttctgaactgcttgatctgcatgtggtatggcacacctctgatatctgctgataatttgttggttacaactgttaattcaattggagcagtctttcagtttgtgtacacaatcatcttcctgatgtatgctgagaaagcaaagaaggtgagaatggttggattattgctggcagttcttggcatgtttgcaatcgtattggttgggagcttgcagatagatgacgttataatgcgtcggttctttgtggggttcttgagctgcgcgtctctcatttcaatgtttgcctctccattgcttataattaaattggtcattcagacaaagagtgttgaattcatgccgttttatctctcactttccacctttctaatgagcacctctttcttactttatggat

SEQ ID NO: 208681 - DNA, 397 bp, Glycine max
aagcacctttcttcccaacagaagaagagctattttggcttctacctacacaacaagctgggaggccggggaaatgccatagccatagccatagacagagttataccagttattgacatcaatggagttgagccttggaaccttccaacacttgctggagagctatgccgtggggacacggagcattggatcctctttccgcccggacaagacagggaaaccaggggaggcagacccagcagaaccacaggtcgtgggtatcggaaggctacaggaactccctgctatgtttactcttctcacaacaaagtcattggggtgaagaaacccatggtctcctacaaaggaaatgcacctatgggaacaaaaacccaatggaagaagaatgaatacagag

SEQ ID NO: 208682 - DNA, 355 bp, Glycine max
catattccttcttcgtgaattggggattacttttttaccaaaaaaaaagcacccttttttttttttttacaaaagggttcacccaattattaatcttaaattcccgaggaccttaaataatatacgtaccgactggattttcacaaaattaagacctcacctatgctgaggttagccctctaggaagagattcattgcctggatcaggtgaaacaaacctttgaccagcttttaaaacagctgaatggaaggctgttgggttgtcaacgaacgcaaagtgcccaccctgaggaatcctgatgatgtcccatggaaccttcatatgcttgcgagctttttggacaccttgataatt

SEQ ID NO: 208683 - DNA, 376 bp, Glycine max
aatcgcaaaaataaacacaaagcctcattcacagcacggtggtgtctttcaagaaaacaaagttacattcccttccctgttgcacaggtttgaccaaatacactgaattactaaaattgacataaaaggaacactaggaaaacaaaaagcaaaattccaaacgattattctgggaagagtcaaaccacaataatacttatcaacaagaaattcggttgttgtacccataataccgattcctactcgcactagtctcttcaaacaacaccaacttcgattgatcagtagctgtagttcgaaacatggaggctctctgaggcaccatcagcaagctgtgagttacccttgtaggttcccagagttgcctctgagttag

SEQ ID NO: 208684 - DNA, 517 bp, Glycine max
gttccttttggtttgcagaaaggaacatggaagctgtgtgtgctttttctgttggcacacttcacatcccaacagcacatgaaacatcaaactcctttaggaaatccatattcttgagcaaccaagtggcttcaccagtttcattggtttttctcaggggcagttcaaaatccaagcttttaactgccttgtcaccccctccattgacagaatccagtaaccaacctgaggctgagccagaatttgaaagtcatgcagagaaatttgactggtactctcagtggtaccctttgatgccaatttgtgaccttgacaagaggaagccacatgggaagagggtgttgggaattgatgtggttgtgtggtgggataggaatgaggggtgcttggcaggttcatgatgatgcttgtcctcatagattaccacccttgtctgatggaaggattgatcaatggggcatgttgcagtgtgtgtaccatggttggtgttcaatggcaaaggagaatgccagctcat

SEQ ID NO: 208685 - DNA, 503 bp, Glycine max
ccagggaagaaatttctcctacaaatcgatttttgttgaagttgctattacaaatattttcagtaaattccactttactgaaacaatatacatatgatttcattcaattatgaaatttaattagtaaaaaaaaatattaaaatacatatagacaggaatagcacaaaattaagacctaacctatgcagaggttagccctttaggaagagattcattgtctggatcaggtgtaagaaaccttcgacaagcataaaaaacagctgaatggaaggcagttgggttgtcaatgaacgcaaagtgcccaccctgaggaatcctgatgatttcgcatggaaccttcatatgcttgcgagcttcttgggcaccttgataattcatccagtcttggaaaccatacatgaaagtggtgggcaccttccactctgaggcactgagaagaaggggcatcctagcaaatgcttcaaatgaaaaaatatattttaagcacagctcttcactagctt

SEQ ID NO: 208686 - DNA, 499 bp, Glycine max
caaaagagaagaaaagcatatacttcagtctgcaatgaaactacaagtattctgcaaagatctggaactctatttaacatactagtagcaacaaccttaacaagatcattacctgcaatgaaactacaagtattctgcaaataaattaaacacaagctttgacataaagaaactaacgaatacaatccaagagtagaaactcagggccttgcccaacaaaatagactcatacttcagtctaagcaccactatagattaacaaaatctcactattctcttaacaatcacagataccaagtctcaaaatcaacttctgcttctgcgtcgttccctaaggccatttccattagcatatgggacctcctcacgcccacgataaggaggtgacctgctgtagctacgtccacgaggtgacaaactacggcgcctaggggaccgcccacgaggactgtaactccttcgcccataacttgggctcctacggaatctgggtggacta

SEQ ID NO: 208687 - DNA, 575 bp, Glycine max
taagtattgcagaagcaaaaaatggagccattattttcttcagcagcagcaatatgtgtggtgactgtgttggtagctgtgattcccatatgggcactgaagatgctgaactcgctgtggcttaggccaaagaggtttgaaaggcttcttagagcgcaaggttttcatggtgacccatactcactttctcatcacaactccaaccaaacccttttgcaacaacaccagctcaattcccaaccttttcctctatccgatgatgttgctcctcgtgtatcctccttgttacatcacactatcgacaaatatggcaagaaatccttcttttgggaaggtagaacaccaaaggtgatcattacggacccaaatcaactcaaagaagtcttcaacaacattcatgacttccagaagccaaagtttagtgacaatgtcaagttcttgttcgctggcctgttaaattatgagggtgacaagtgggctaaacatcgaagaattatgaacccagcatttcactcagaaaaattgaaaaatatgctaccagcattttctcaaagctgccatgatatgattagcat

SEQ ID NO: 208688 - DNA, 481 bp, Glycine max
ccctaatccctatttttcttcctcagtagtgtcatttacgcttctcttctctgcagcaactatgcctaaccctaaggtcttcttcgacatgaccatcggcggtcaatctgctggccgcatcgtgatggagctctacgccgacgtcactccccgcaccgccgagaacttccgcgcgctttgcaccggcgagaagggcgtagggcggagcggcaagcccctccactacaagggctcgtccttccaccgcgtgatcccgagtttcatgtgtcagggtggcgacttcaccgccggaaacggaaccggcggcgagtcgatttatggcgccaagttcgccgacgagaacttcgtgaagaagcacaccggtcccggcatcctctccatggcgaacgccggtcccggaaccaacggatctcagttcttcatttgcacggagaagacagagtggctcgacggaaagcatgtcgtgttcggacaggtcatc

SEQ ID NO: 208689 - DNA, 545 bp, Glycine max
  unsure (1)..(545): unsure at all n locations
cgccagtgctggacgagctcactacagctcactcgnccttnntttttttttttttttttttttttttttttttttttttgcacgcatacaaagggatttattaaaatccattcgatgttcaaatggtaatagtagaacaataaaaggtccaaacgccctaacaatggtctaacattaaagggaaaaaacaccaaagaaaaacaatcactgtttggaaaaccggacttattttcgcaaggacataataaagacacttaagaaaactactcttcttcatcttcctctttccagcacttcaaagttgatctaggtgaaccacagtcacaagtcttggcaaatttttggtagacaagagaaccacccattccaagcccttcgtggctcctcttttcgcgacagtatcccttaacatccagaaaacacgtttgatcaaacaacttgcttgcaccatccacatgaactgcaacagagaactcagttgggagaaaacatgccaatacccttctaaccattttgttcagattcaccacttttgagtcataccc

SEQ ID NO: 208690 - DNA, 545 bp, Glycine max
  unsure (1)..(545): unsure at all n locations
gacagcgtcctcctcatacaaccccttaacctgcgacgcacaacagtgtcaggacctcgaaatgtccgcttgcagaaacggtaaatgcctctaccaagtctcatatggtgatggctcattcactgtaggagaatacgtcaccgaaactgtgtcgttcggagccgggtcggttaatagggtcgcaatcggttgcgggcatgataatgagggtttattcgttgggtccgctgggcttcttgggcttggtggtgggcctttgtcattaacttcacaaatcaaagcgacgtcgttttcgtactgtttagtggatcgcgactcgggaaaatcgtccacgctcgagttcaactcacctcgacccggtgactcggtcgttgcaccgttgttgaagaatcagaaggtgaacactttctactacgtggagctcaccggagttagcgtcggcggngaaatcgtgaccgttccgccggagacntttgccgttgatcaatccggcgccggaggtgtgattgtggattctggaaccgcgataactcggttgcggactc

SEQ ID NO: 208691 - DNA, 406 bp, Glycine max
ccccgaaaaaaacccaccctttttttttttttaaaaaaggggttccaaaagggtttatttgaaatttctcaagacctaaaaaaaatagggccccgttttttttttcaacctaaaaaaaaacccccaacttttgaatccctttcccgagggggggggggcccaaaaaaattttacccccaaaataacccccagtttttttgggacaaaaaaaatcccctggaaaaaaaaggcctcacctaaaacttggttagccccccgggaaggggggaccctggcccaaaacacatactgggggggattaaaacaagttcctggggattttgaattacccaccaggggtggtggttttacagtcccgggaccccaacaacctttggttgcctccaaaaaaccaaattttgaaggg

SEQ ID NO: 208692 - DNA, 583 bp, Glycine max
  unsure (1)..(583): unsure at all n locations
gtttcttcttctgttgcgttgtgtgtgagtgtgggcacggtaagatgcagaccattgctaggcgcttagggcagcaatcgctgaggccatcgacgtcgctcaagtccatctatccaatttccgatcaccattatggaatggatcacgagcgttacgtttctaccctcgccaccaagggagttggtcacctcgttcgtaagggcactggtggacgatcctccgtcagtggcattattgctacagtatttggggcaactggattcttaggtcgttatgttgtccaacaacttgctaaaatgggatctcaagtcctagttcctttccgaggctctgaagataatccccgtcatctcaaattgatgggggatttgggacagattgtacccatgaaatacaatccaagggatgaaagttcagtaaaagctgtgatggctaaggccaatgttgttatcaaccttattggaagggattatgagacaagaaactacagctntgaagaagtgcactatcacatggctgagcaactagcanagatttccacagagcatggtggtatcctgagatttattcaaagttcttggtt

SEQ ID NO: 208693 - DNA, 572 bp, Glycine max
  unsure (1)..(572): unsure at all n locations
gcctcagtaatctgagagagaaacaaaaacaatgaaggtttccattgccaagttccactcccttcccctatgttttttccttctcttggccttcaacacaaaacccctcctagcagcagaaccagagccagtggttgataagcaagggaaccctttggagccaggagtagggtactacgtgtggccactttgggctgatgaaggaggcctcacactaggccaaacaaggaacaagacatgccctctttatgttatccgtgacccttcattcattggcaccccagtttcattcttagcaccaggccttgaccatgttccaacactcactgatctaaccattgatttccctgtggtgacagtgtgtaaccagccaacagtgtggaggctcaacaaggtagggtcagggttctggtttgtgagcaccagtggtgaccctaatgatatcactagcaagttcaagattgagaggcttgaaggggatcatgcttatgagatctacagcttcaagttctgccccagtgtgcctggtgcgctgtgtgctcctgtggngactnttgaagatgctgatggaa

SEQ ID NO: 208694 - DNA, 560 bp, Glycine max
ctgtttgtttctgatctatggcttccaaggagttctctggtctttgttccttggtttggtcactctccgagagcattttgtgcactactgggttgaaaatgtatttggtggagagcaaaggaggtgccataacatgcatgttcttggctcttttcttcttggggacatggcctgctcttttgactatgttagaaaggcgtggtcgtcttcctcagcatacctaccttgattactcaatcaccaatttcttgtctgctttactcattgcttttacacttggtgggataggcaagggcactcatgatcagccaaatttcttagttcaacttgctcaggataattggccctccgttctttttgcaatggggggtggtctgttccttagccttgggaatctgtcaagccaatatgcatttgcttttgttgggctatctgttactgaagtgatcacggcaagcataactgttgttataggcacaaccttgaattactttttggatgacaaaatcaacaaaactgagatccttttccaggagttggttgccttttgattgagtttt

SEQ ID NO: 208695 - DNA, 578 bp, Glycine max
  unsure (1)..(578): unsure at all n locations
aatttatacaggaatcacattagctgagtatttcagagatatgggttataatgtcagtgtgatggcagattctacatctagatgggcagaagcattgcgtgaaatctctggacgactggcagaaatgcctgcagatagtggatatcctgcataccttgctgcacgtttagcctcgttctatgaacgtgctgggaaggtaaaatgtcttggaggccctgaacgtacaggtagcgtaactattgttggtgctgtttcgccacctggaggagatttctcagatcctgtgacatctgcaaccctgagcatagttcaggttttctggggtttggacaaaaagcttgctcagaggaagcactttccttctgtaaactggcttatttcttattcaaaatactcaacggcacttgaaaccttntatgagcaatttgatccagattttatcaacattaggacaaaggctcgtgaagttctgcaaagggaagatgacctgaaatgaaatgttcagcttgtgggcaaggatgctttagcttgaagagataagatcacctttagaacttgcaagcttttgagagaggata

SEQ ID NO: 208696 - DNA, 506 bp, Glycine max
cgttttcgttagaaaaaaaaaaaggatgtttatacatctgaatatcaatcttgcatgggggcatggcctcaaaaacatccaccaacagcacccattattctctacccgagatcatatcaaaccgaaatcctgacacaaaataggtgcggatactgaacacgacactaagcgatggcgaacaagcccctggaactggcatgacgaccgatcagaaaatacaaattgctctacagctcacaagagatcggtgcggaagttatataagggggctcaactttagggacacaggaagacttcaacgctgtcaagatgataacgcaagaagtgggcaacaactgtgacgctgatagggatagttcctgaaattgcggccctatgtaggggcaatgacagggacataacgagagcctgggaggctctaaagtatgccaagagggcagagcttatgcctttcatagcagtgagtgcgattctcaaggaatataagctcaatagaacaaagaaga

SEQ ID NO: 208697 - DNA, 546 bp, Glycine max
attcggtgatcactgatcagtggtttggtgttgttgatagagaaaatgcattccagccctttgcttcttgaggaacccattaggatggcatccatccttgagccatccaagcctactttttttccggctatgacgaaaattgttggcacacttggtccaaagtcacgatcagttgatataatttcccattgccttgatgcaggaatgtctgtggcaaggtttgacttttcatggggtgatccagaataccatcaagagacattggaaaatttgagagttgctatcaaaagtaccaagaaactctgtgcggttatgctagatactgtgggtccagaattacagattgagaataagactgatcacccaatcacccttgaagcagacacattagttgtcttaactccagatcaaaataaagaagctagttcaaatctcttaccattaaattttaccgggctatcaaaggctgtgaagaagggtgatactatttttattggaaaatactcgtttactggaagtgaaacagcttctgtatggctggaggtc

SEQ ID NO: 208698 - DNA, 365 bp, Glycine max
cgatattgctgtaactaaccctattcatcaactgagtcagagaatgaatctgtggacggacgagaactcgttggttattgatgtgtctgtgccctcctgcgacctatacttcatctggcccaatgacgctgctccgaaggcgcagaagaacttgatcagctatggtggcgccgttggttatcgcctgattgccaacattgaggccgccttatagacctgcacctaccccatattgtggcagttctgttacaactattgcagctccactctccttgggtggggcgaccgttactacaaaggcgacgacgacaaagccaaggcagaggccaaggccgaattcacctacgccgtcgaacaggaccacc

SEQ ID NO: 208699 - DNA, 565 bp, Glycine max
ctcgagccgaatcggctcgagatcaattaccatacaatccttgcagaatgagattgctgctctccagaaaaaagggtcactggatgctgaggagcaggttggaaaggctcatgcacgtgctggtgaactacagaagcaggtggacaagcttaaaagggaactagaaacacaaaacaaggagaaagtgaactgggaaactcgagtacctgagttagagaaaaagattcatgacttgaactcaaaattagaagatcttcaaaagataaatgaggaacagaagaaaaaaattcaaaaaactgaacgtgctcttaaagttgctgaggaagaaatggtgaatgcaaagtttgaggctactgccatagaaaaagagctgagggagactcatggtgcttggcttgccccttggcttgctgttcactatattcatagtaagtcttttgttgatagtcattggaacaaacatgggaaacctgctttggaaatggttactcaaaaggccctagagaaaaaggcacaagctggaaagagggctgaacctcatgtgggaaccattaaaactaaatgg

SEQ ID NO: 208700 - DNA, 533 bp, Glycine max
ctacaattagaaaccctaagaggcatggggtgtggcagctccaagctggaggatctacgggcagtggccctttgcagggagcggtgtggtttccttgacgaagcaattcaccagcgctacgcactggccgcagatgacatggcctacatcaactccctcaaggcacttggtcactccttacaccttttcattcagcaagacatggatgctcctacctctccctctccctccccctccccttctccccctcacaaacccttcaaacacgcctcttcttttgactccgactgcgacggctctcaccttcacttacactccgactccgacttcgaccacgtacactgcctccaccattcccctgatccatgctctcctctggctcaccatcttcatatgaattacatgaagaataaagccgctccttcaattgtctacgagcagaggcctctgagtccccaaaccatgtacttgggagaggcctactcttgctcctccttttgcccttaccagtatcccccttacccctaccccta

SEQ ID NO: 208701 - DNA, 556 bp, Glycine max
gttccctacctctcctttcaagatgcagatcttcgtcaagaccctcaccggaaagaccatcacccttgaggtggaaagctctgacaccatcgacaacgtcaaggccaagatccaggacaaggaaggaattcccccggatcagcaacgtctcatcttcgccggaaagcagctcgaggacggccgtaccctcgccgactacaacatccagaaggagtcaacccttcaccttgtccttcgtctccgtggtggcatgcagatcttcgtcaagactctcactggcaaaaccataaccctagaggtcgaaagctctgacaccattgacaacgtcaaggccaagatccaggacaaggagggaatccccccagaccagcaacgtctcatcttcgccggaaagcaacttgaggacgggcgcaccctcgccgactacaacatccagaaggaatcaacccttcacctcgtcctccgtctccgtggtggcatgcagatcttcgttaagaccctcaccggcaagactataaccctagaagtcgagagctccgacaccatcgacaacgtc

SEQ ID NO: 208702 - DNA, 446 bp, Glycine max
cggctcgaggcacttcttctgccattgaagaagaacccgttaaaccatcagtgcaagtggaacacacccaactcttaattgatggaaaatttgtagatgctgcttctggaacggcaaaggatcttgttgcgcgcagctgatctgcttgagaagcataatgatgagcttgcagcacttgagacttgggataatggaaagccttatgaacaagctgctaagattgaagttccaatgcttgttcgcctgattcgatactatgctggttgggcagataagatccatggtctaacagttccagctgatggaccatatcatgtgcaaacattacatgaaccaattggtgttgccggtcagatcattccttggaacttcccttttctcatgtttgcctggaaagttggaccggcattggcctgtggcaacaccattgttctaaaacagctgag

SEQ ID NO: 208703 - DNA, 526 bp, Glycine max
aaaaaccttcccttctcttctcacccccacactcccatctcacacacccctcgcatccaacaatgtctctcaccattccctccaacctctccaagcccgccgccctccgccccaaactaagcccaaagctaaggtccgccgccacaaccaccatcgtctgcagcaccaccaacaacaacaacaacaacaacgtgtcctccgacctgaaggcgttctccgccgcgctggccctctcctccatcctcctctccgcccctctccccgccggcgccgacatctcggggctcaccccatgcaaggagtcgaagcagttcgcgaagcgtgagaagcagtcgataaagaagctggagtcgtcgctgaagctctacgaggcgggcagcgcccccgcactggccattaaggcgagcgtggagaagacgaagaggaggttcgacaactacgcgaacaggggttgctgtgcggcggcgatgggttgccgcacctgatcgtgagccgagaccagaggcactggggtgagttcatcaca

SEQ ID NO: 208704 - DNA, 311 bp, Glycine max
agcaagaactcttcttacattaattgaattggaagatgaggttgattgtggttcacatgcattagattacatcatatcatgtaccatttataaaaaaagtaattacaaaaagagcgcgtaaagatcccatccacatacaaattctccaggctttcctccaatgtagccatccaccctctcttatctagacatccttggcaatgaggtcgccgttgatgagttctctgtaggcagcaacgggccagctgaaacccctgaagagcaagcgagaagccagaagaacatcgatgatgatctccttgcatgggggg

SEQ ID NO: 208705 - DNA, 560 bp, Glycine max
ctcgagccgcaataattcagaaatgttactgcaaacattagctatccctacaatactcgttgtgatattcatatgggtggtacaaccaaagcaacgtcatgggaagattgcaccaggtcccaaggcgttgccaattattggtaacctccacatgctagggaaactcccgcaccgcacccttcaaacctttgcaagaaaatatggacccataatgtccttgaagctagggcaagtccaagccatagtggtttcctcccctgaaaccgctgaactattcctcaagacccatgacactgtttttgcaagcaggccaaagattcaagcctctgaatatctctctcatggcaccaagggcttggtgttttccgagtatagcgcctactggcgcaaagtgaggagagtgtgcacccttcaacttctcagtgcttcaaaagttgacatgtttgctcctttgaggagacaagaattgggagtgttagtgaagtcactgagaaattcagcggcatcacgtgaagttgtggacctcagtgaggtgttgggggagcttatggagaacatag

SEQ ID NO: 208706 - DNA, 435 bp, Glycine max
ggaatgtcatatttcttgtgtttttgtagctagttcttttcttgttaatacaatattttgctaataaaagattaaaatatattttggattcctaaaattatgataagtgatgtgaccaaaaaatatgataactggaaaaaattaggcaaagcaatatgataaataaaataaaataaaaataataaattaaaattttgaatgtaaattgatgtgtgtgtaggtgaaaagtatgctattgtacaagtcaactcatgaattgtactcaccaaaaaatctcaacgtgaattctggaccatacaaagtatatcctatggtatcagttttcttttcttttattttaaatcttaattagtacatcaatattaatgtaaggcgtgtgtgtgtgttgaagtacgttgttggaaaagtatgctattgtacaagtcatctcatgaa

SEQ ID NO: 208707 - DNA, 552 bp, Glycine max
ctctgtttctgtctctgtgtttgcggctgaggattccgaacgagcgaccttcttcgtttgtcgcaaagtttaagtcatcatgggtaaggaaaagactcacatcaacattgtcgtcattggacatgtcgactctgggaagtcaactaccactggtcatttgatctacaagctcggaggtattgacaagcgtgtgattgagaggttcgagaaggaggctgctgagatgaacaagaggtcattcaagtatgcctgggtgcttgacaagctcaaggctgagcgcgaaagaggaattaccattgatattgctttgtggaagtttgaaaccaccaagtactactgcacagtcatcgatgcccccggacatcgtgactttatcaagaacatgattactggtacctcccaggctgattgcgctgtccttatcattgactccaccactggtggctctgaagctggtatttctaaggatggacagactcgtgagcatgctcttcttgctttcacccttggtgtgaagcagacgatctgctgcttgaacaagatggatgccac

SEQ ID NO: 208708 - DNA, 309 bp, Glycine max
ctgttttccgctgcttgtttgtgcctgcgtagttacaaagtaaaaagagggaggactaggacaaaagttgttggcagtcatcatgtcgagcgcttcgttgaaggagatgaggaacggtggtgaggattatagcaatggtcatggtggtggtggtgtgagggacttgtatggagaggattgtgccactgaggaccagcttatcactccatggactttctctgtggccagtggatgcagtttactgagagatccacgctacaacaaagggctggcctttaccgagggagagagagatgctcattacttgcg

SEQ ID NO: 208709 - DNA, 501 bp, Glycine max
aaggcatttgaggactgtgggttttcttcacagattatgaatgctattaaaaaacaaggatatgagaagccgacaactatacaatgtcaggctttgccagttgtgctttctggcagggatatcattggtatagcaaaaactggttctggtaaaactgcttcttttgtacttcctatgatcgtgcatatcatggatcagcctgagcttcagaaggaggaggggcccataggggtgatatgtgcacctacccgagaattggcacatcagatttttctggaggccaagaaatttgcaaaagcgtatggggtacgtgtctctgctgtctatggtggaatgtcaaaacttgaacagttcaaagagcttaaggcgggatgtgagatagttgttgctacccctggcagattgatagacatgctgaagatgaaagcattgacgatgatgagagcaacttacctggtgcttgatgaggctgatcggatgtttgatcttgggtttgagccg

SEQ ID NO: 208710 - DNA, 483 bp, Glycine max
gagttagggctttacagtgtttctcttccttcttcttcttcttcttcttcttcttcggggaatcgcgattgttctgtgcgagagaaagaagagagagatcgaaaatggcgttggctttcgacgagttcggaaggccgttcataatcctgaaggagcaggagcagaagagcagactccgaggattggacgctcagaaagccaacatctccgccggcaaagccgtggctcgcatgctccgaacctacctcggccccaaaggcatggacaagatgctgcagagccccgacggtgacgtcaccatcacgaacgatggagccaccatccttgaccagatggacgtggacaaccaaatcgcgaagctgatggcggagctctcgcggagccaggactacgaaatcggcgacggaaccaccggcgtcgtcgtcatggccggcgcgcttctcgagaaggccgagcgccttctcgagcggcgaattcacccca

SEQ ID NO: 208711 - DNA, 462 bp, Glycine max
gttaagactacgaactaagacaaattttcattccgcctacaaacaaagattaaaacatctacaaaaacaactaatccataatgatcaatatcaaaagcatagcaattgcaacaaaacaaaaacacccaattccgatacaaaccgggccaaaatcttacatttcaagtgagcgtacggactgactacaaacaaaccaattgaaacaaaatactatcaccaattcagcatcttgacgtataacatgactgagtttaaaaatatcagtactcatatggggaaatgacatcatcgattttcagtatcatcttgacaacttgagtagcaagtaagagctgttgctgctttccgatcaaagtttcgaagacattttgctcacgcatgtcattagtgccaacatcattacaatcaatgccaaagtgagggttattatcctttatttgctgagacttaacagcagataat

SEQ ID NO: 208712 - DNA, 247 bp, Glycine max
cgccaacataccgggggtaattgtatatcaactccacacattggtaacaaacgagaagaacattaatgggacaatagagtttaacacaaaccaaacttattcgcaccggaactaccccacccatgagccataacatttcttcttaaaacgcttgggaaaatccgacatagactatcacacccaaatgccgctccagcttaaaacccctcacgaagacgctccaccacgtgccgagttgactcctttc

SEQ ID NO: 208713 - DNA, 397 bp, Glycine max
ttgagatgctatgagaatccaactgctgtatagtacaaacacccttgagggaaagaagggggtgacttgccacaagaacctttaagcaaatctgcagcagttggaggattgagatgctatgagaatccaaagaataagattactgcaatacctgctgaggaagaggaaatctggggtgcattcttcaaggcggaagggtcagcagtccttgcaggcacagagtaaaagattcattttcaaatgaagtaccttttgacggggggaggcgggaatgtgcttatgtgcttgagacggcataggcttgcatgcgggggccagtaaaaaacctctcatgataactatgagaagaatgtgactggtagtaaagtctatcatgggggtcattagctaggatttc

SEQ ID NO: 208714 - DNA, 400 bp, Glycine max
ctgctgcaataaaggatcgctcaattgattttggcgacttgtctaagggcccactgtgagggaagtctatcaagcttttagggtttgttgccttgtaaaggctcggagagtacatacacctaggtggatttgatagcggggctttcgatggaaaacatgatcataacagctctattaagcactttgcactcgatgactggaggtggtattgcctgactaggagtgtgctacattggtattgcactgttcataactgcacagattgctttccagctacttgcacagcgtatataccatattgagagagcttcaaaaggagagaagggaagctgcaagaatgaacgttctgcccgacactccatatgctgtattcggattagtcattgcgcaggcaattggt

SEQ ID NO: 208715 - DNA, 469 bp, Glycine max
agggtttgggtttttcactttcagcctctccattccttcaaccttcttcttctctttgatctctgatggagacgttccgtgtttagtagcaagggttagttgaggccttgtgtttggaaacgtacggtgtcgttttggagttgggaaaacaaataattctgagagatggcaaccacgaacccttttgatttgttgggtgacgacgctgaggacccttctcagctcatcgccgccgagcaactcaaggcggcggctgctgctgcggctgccaccgccgctcccaagaaggcgccggctcagcagatcaagccggctcagctccctagcaagcctcttcctccggctcaggctgtgagggatgccagaaatgagtctgttcgtggaggccgtggaggtggacgaggtgtgggacgtggatttggacgtggtcgtgggtttagtcgtgactctttcaatgacgagaactcat

SEQ ID NO: 208716 - DNA, 435 bp, Glycine max
cttgtgccgtgtcccctttaagccaattgcaatcaaacaaagtttcggttattggtgttcatttttcttcctccatctttctctaaaacattaattgaactctccattccttaaattttaccaacgagctagttccgacacagacaaagcaatggcaaagactgagttagaggtgactgttgagagcaagaacaaagaactaaagcacctgggatttgtgaggattgctgctattcaaacttttgtgattgtgtcaaatctgtatgagtacgcaaagcagaattctgggcctttgagatccgctgttggaacggttgagaacactgtaaccaccgttcttggtcctgtctgcaacaaattcaaggacttccctgatgatgtcctggtttatgttgacaaaaaggtggatgaaagcttccacaagttcgatgagca

SEQ ID NO: 208717 - DNA, 288 bp, Glycine max
ccgaaaaaaaaataaaaaccccttgggcccaaaaagcccttttttaaaaaccgggtttcaaaaaacccccctccccccaaaaatcccccctttttgaacccaaaacccgttgggggggggcccttctggcccaaaaaaaatttttttccccaaaacccattttgaaagaccagggctcgtttttttttctcaaaaaacaaccgggggggggcggaacccccggtttttggcccccctgggaactggatcaaaggcccccccccgcccaaaaagggaaaaaaaggggtt

SEQ ID NO: 208718 - DNA, 544 bp, Glycine max
  unsure (1)..(544): unsure at all n locations
ctcttcccttagtaaaaaaatatccttctttcttcttctgaatatcaatcttgcattaagtccatggcagccaaaacatccaccaacggcacccatcattctctacccgagtacattccaaaccgcattcctgacccacattatgtccgcatcctggacaccacgcttcgcgatggcgagcaagcccctggagctgccatgacgtccgatcagaagctccaaattgctcgccagctcgcaaagcttggtgtggatgtcatcgaagggggcttcccttcagcgtcacaggaagacttcaacgctgtcaagatgatagcgcaagaagttggcaacaactgtgacgctgatggttatgttcctgtcattgcggccctatgtaggtgcaatgagagggacataacgagagcctgggaggctctcaagtatgccaagaggccaaggcttatgcctttcatagcagtgagtccgattcacatggagtataagctcaataagactaaagaagaggtgcttcanatagccactgatatgatcaaaattgcac

SEQ ID NO: 208719 - DNA, 468 bp, Glycine max
caagcaaataataagttcatttctcatatattagtcccatgtggagacttacaaaggtaacattctccaataatatgttccatacttaaaaagataacaaagaaatcacaaatagcaagctgaatttataacttgaagtgtgaattctaacatttaggtgctagaattctttcgacaaatacaaatcattcctttgaatcgagcattttgtttagtgcagtaatataagcctctacacttgaagtaacaatatccactccttctccggtaccactaaatgttggataaataacgtttccattcaaagcaggagtaggtgactgcttattctctctacgaattacaacacgtgtagtagcaattgcatcggtgcctcctgtaactgtacttggtgagtattcaagtacttttacggtttccttcactatgagattaatagccttgtaagctgaatctactggtcctaca

SEQ ID NO: 208720 - DNA, 506 bp, Glycine max
ctcattctctactagaaagcttgaacctttgcggacaagttctgagacccagttgccggagggggcgggtcccactgggaatggaggcggagactgaaaaatcacgctctgatgggaagggttggagtttttgtacaatgccatttatgcgaacaactcacactccttgttcttctactacttgcatgtcttacatgcacaatgatcatccgcgaaatcagaatcactttcaatttgttgatagatccagtcatgattcttcaaccacagtttcatctatggccaagtctctgctccctacgaagaggaggctccatcttgatccttccaacaagctctactttgcatatgaacctggtaagcaagttaagagtgcaatcgcaattaaaaacacttgcaagtctcatgtacctttcaagtatcaaacaactgcacccaagagttgttatatgcgccctccagctggtgttcttgcccctggtgacagtattattgccaccgtattc

SEQ ID NO: 208721 - DNA, 443 bp, Glycine max
gtataaattatagattatgatgtaaaagtacaattaagtacagctgattatagtattaattcactcgcatttaacatcacaaacataattgaaaagaaaaatgaaaggatttcattattgcttcatagcaactttctaggccactcaaccacgtgagacagatcagatcagtgagctaggaattcaatttcagaacatacattgaagaaaattaagggcttgacccaacaaaaaggaagaaagaaatgctttacactgaatcaacaccttggacctgctgttgagccaagtatctttctcttctttctttccattcatctataacaaggccctccccagcaacacaaggacctttctcctccagtggtttctttcgcgcttcaagtgcagcgtcggcctcagccaacattcgttaaagcttatccaggacaggactaggcttt

SEQ ID NO: 208722 - DNA, 559 bp, Glycine max
cgccggcaccgtcttcttcaccggcgtcggaaaatccggcttcgtcgcgcacaagatctcgcagacgctcgtctctctgggcgttcgctccgcgttcctctcgccggtggacgctctccacggcgacattggaatcctcaccaatcgcgatgtgctcatcctcctcagcaagtccggcgccaccgaggagctcctccgccttgtgccgtgtgcgagggccaaaggcgcgctcctcatcgcgctcacctccgttgaaggcaacgcgctcgccgcggcgtgcgacatgtccgtgcatttgccgctccagagagagctctgtccgttcaacctcgcgccggtgacatccaccgctattcaaatggtgttcggcgacaccgtcgccatcgcgctcatggaggcgaggaatctcaccaaggaggagtacgccgcgaaccatcccgccggcaagatcgggaagagcctcatcttcaaggtgaaggatgtgatgaagaaacaggacgagcttccaatttgcagagaatcggatttgattatggatcagctcgtggaactcacaact

SEQ ID NO: 208723 - DNA, 460 bp, Glycine max
aatttttctctcaaccggcccaatttagcataagcccagcatggccaccgcaacagcaggggccacctcgtccttcatggggacgcgcctcctggaggcccactccggggcggggcgggtgcaggcccggttcgggtttggcaagaagaaagccgccgccccgaagaaagtttccagggggtcgggctctagctccgataggcccctgtggtatccgggcgccaaggcgcccgagtacctggatgggagccttgtcggagactacggattcgacccatttgggctagggaagcccgccgagtacctgcagttcgagttggactcgctggaccagaaccttgcgaagaacgtggctggggacatcattgggaccaggaccgagctcgcggacgtgaagtccacgccgttccagccctacagcgaggtgttccggctgcagaggttccgcgagtgcgagctc

SEQ ID NO: 208724 - DNA, 530 bp, Glycine max
gaaactactgtcaggtggccaaatccaatcctgagaagtctatccctttaactgttcttaaaagtgccaagggcttaccaattttaacagatgctaaagctggtgcactggtctcttacaaactgggcactggtttggttgttgctcgaagatcagatggatcatggtctgcaccgtcagcaatattctccctgtgtttaggatggggtgctcaaattggtggtgaacttatggattttatagttgattttcgggatatgaaagctgtgaagacattctgcagtcatatgcattattctcttggtgctggatgtagtgctgcagcagggcctgttgggagagtgcttgaagcagatattcgtgctggtgactgatgctctggcatgtgttacacttacagttgcagtaaacgtgcatttgtgggagtttctttggaaggaaatatagatgcaaccagtatggatgccaatttgcgcttatatggcgatacttacctgaccacatctgatattttactgggaatggtggac

SEQ ID NO: 208725 - DNA, 444 bp, Glycine max
atgggaaagcaacttttggagaggttttcaaggttttctttgccttaacaattacagcagttggtgtttcccagagtagtgccttggctccagatactaacaaggccaaagattctgcagcctcaatatttgaaattcttgacagcaaaccagctattgactccagcagtgatgagggcacaacattagacacagtaaaaggtgaaattgaacttcaacaagtcagcttttgttacccaacaaggcctaatattcaaattttcaaagacatgtgtctaaccatgccaactggaaagaccgttgccttggttggagaaagtggcagtggaaaatcaacagtgatcagcctcttagagagattttacaaccctgactctggacgcatactaattgatggagtggatataaaagaaattcaaactaactggctgaggcagcaaatgg

SEQ ID NO: 208726 - DNA, 422 bp, Glycine max
aaaataatccaattcaaacacgtataattaaaaactcaatttagaccataagagtaacaagtgtgtcactcttctgacttatacaaatgcaaggaatagaaattgacaaaagagataaaaggatgaagaccaggaaaatatcaacaacgtcataactcataactcgtgtaacgccaaaaaaaaaaaaaaagcaggattttatttttatcatcattatcattgaggcactgatagttattgattatccaaagaaggctagtgtttgctcaaagccatgctgggtttttcaggggattaacaacagccttcacttgcaagtagtttttgagactatactctcctttttctctgccttgaccactcatcttgtaccctccaaagggaattgcagcatcaaatgtgtcaaagcagtttatccacac

SEQ ID NO: 208727 - DNA, 532 bp, Glycine max
ggcaagaatatcaaattggtctattgtcttcctcctaatctactacactactccacatagagcccagcctttcaagcccaagcccaagcccaagcccaagcccgttcataaaatactcctgcagcagcacccaggacccagccctctgcgtctaatgcctgtccgtctacgcctacagcatccaacaggaccctgaccaactggctgagacagcactctgcctctctgtgaaccgcacccaagccaccaaaaccttcgtggctaactgcaacaaattcagaggcctgaaacccagagaggacgctgcactcaaggactgcgccgaggaaatcagcgacagcgatgaccggctcagccggacgctgtacgagctcaagctatgtaaggctaatggcgaggacgtcacgtggcacattagcaacgtggagacatgggtcaactctgctttgaccgatgagagcacttgcggcgatggattctacggtgaggcgctgaatgggaagatcaacgactctattatggctacgatgct

SEQ ID NO: 208728 - DNA, 592 bp, Glycine max
tgttcttgcaagagtaacagagaggaggtggacaaacaaagctataatttttagaggggttaccaccctcaccttctgccaaaccaaacccacccttttctctctttaagctactattgtgctgagagctgaagaggagatggggggtggaaatcaagaggcagtgaagcagctgcagaccctgatggaaaatgtggatgatgagcagctgaagaacacattccagattatgcaccagggttatcaaactgaaacgttaatacggtttctcaaagctagggactggaatattgccaaagcccataaaatgttaattgattgtttgaactggagggtggaaaatgagattgacaatgttttaaggaagcctatccccatggatttgtacagagccatacgggattctcaactcataggaatgtctggttactcaaaggagggtctacctgtcattgctgttggtgttggtctcagtacatatgataaagcatctgacaaatactatatacaatcacacatcccactaaatgaatatagggatcaagtgatcttgccaacagctacaaggaacatggacgatacattggcacct

SEQ ID NO: 208729 - DNA, 535 bp, Glycine max
gttgttgctatcaagaaaatgaagaagaaatattactcttgggaggagtgtgtaaacctgagagaagtcaagtcattacgaaaaatgaatcacccaaatattgtgaagctgaaagaagttattcgagaaagtgatatcttgtactttgtttttgagtacatggaatgcaacctataccaactcatgaaagacagggaaaaactattttctgaagctgaagttagaaattggtgttttcaagtttttcaaggtcttgcttacatgcaccagcgtggatacttccatcgtgacctgaagcctgaaaacttgctggttaccaaggatttcatcaaaatcgctgattttggactagcccgagaaatcagttcacaaccaccctacactgagtatgtctccacacgatggtatcgtgctcctgaagtgctgcttcagtcttatatgtatacctctaaagttgatatgtgggcaatgggtgctataatggctgagcttttctctcttcgtcctcttttcccaggtgccagttgagcggatg

SEQ ID NO: 208730 - DNA, 421 bp, Glycine max
ggtatagggttttccccggcgggatacagtcccgtaatcccttcttcatcctgttttgctaaaaaattgagagtccagccgcaacgggccttgagctctgacccctacgttctggaactcgccgaaaccctagaagactccttcccctcctctccctccaccccactccctctccagaacctccgcctctcctcctcccaatccctcctctccactccatggccctcccgccgcgacgagcccttccgcttcaccgacctctccttcatccgccaatcccgcatcctccccgtctcccccaccatctccctcctcactcccacctcccacctccccaacgacgtctacgtcggctccctctcctcctcctccccctctctcctccaacgagtctcccatttcatctgccctttccccatcg

SEQ ID NO: 208731 - DNA, 573 bp, Glycine max
  unsure (1)..(573): unsure at all n locations
gtccattcctagaaaattggtcacacgcacacacaacactttaagaaaatcatatatttgaaagtaatatacagtggatttttgtagtaaggttattttatgttaatgttaggctaacaacatgtgtttgatgggaaattgattagctattgctctgttaggcatctgaagctgtatattttgatttacaaaattttctgttcaacctcagctagctatttggttatgttactcaaaggatttacatattaatcttctgctgacttctgctgagtacaaaattgaaagcaaacaagttttggcttccaaaagtacaagactacgagttgataagaacatattcatctactgccaaaggcctgaagttgaaccatggattgttcagctgcaagaaaaacacaaaaggctgaccgtgaaaagttaaggagggatcgactcaatgaacaattcgtagaactgggtaacattttagaccctgaatggcccaaaaatgacaaagcaaccattataggtgatacaattcaattgctaaaggacctaacttctangttagtaactcaaagatgaatatgc

SEQ ID NO: 208732 - DNA, 451 bp, Glycine max
cactagattcatgctattttctccaccggctctgctcaagcctcaccaagtaccggttaccactccatttcctcttactcaaacccatcacacagtatcaagaaacaagagggtgcacagcaccagcagattcggaaactttcttgactgcaaacccgagaacaaacccggatccttagattttgaccttccatggtgccacccttctgaccgcaatcgttatgatgtgatcatcattggggctggccctgcaggcacaaggctcgccgggcaagtgtccctctatggagttaaagattgttgcgttgatcctgaccctctctctgtgtggcctaacaactatggtgtgtggagagatgagttggacagccttggtcttgaggatcgcttggacaaaacatggcccatggctcgtgttcatgcggatgatggcaagaccaagtgtttggat

SEQ ID NO: 208733 - DNA, 422 bp, Glycine max
cttgaataaaccgaaccgttcttcgattcgggttcaagttcgaagaagaaaagcgatgagttcgggtagtagcagcagccacagcagtgagaaggagaaggagaagcagagagtgagtcgcacgtcgctgatactctggcacgcgcaccaaaacgacgccgcagctgtgcggaagctcctccaggaggatccctcgctcgtcaaggccagagactacgacaaccgcacgccgctccacgtggcgtcgctccacggctggatcgacgtcgccacctgtctcatcgagttcggcgccgacgtcaacgcgcaagatcgctggaaaaacacccctctggcggatgcggagggagctaagaagagtaatgtgatcgagcttttgcaatcgcatggtggcttgtcttttgggcaaaatggaagccatt

SEQ ID NO: 208734 - DNA, 489 bp, Glycine max
atgacgttcttctccttggtgatggcccgtggccggaatttgtaaatagtgtagggtgcatcaagatactttcccctcaggaagtgcagcaaatgggcaacaatggccttgagcttcttaactctgtccccattcagaggctctctaacggcgtctgtgacgactacgcaggccgtgaggacccaagaaatttaagcactgggataacaattgtggggtctttaaactactgaatgatgtgacaatcaatactatgaatctcttctctctcttgtattattactcctacttctccactctttgtcaatggtgggatgtactgcctagttgtagtttataggctacttataagccttttgttttttttgtctgttttcctgttttttgctgcctaggaccattcataagataaacaatgtaaaccatatggcatcttgtcaatgtgctatctacaatatattgattacttaatctgttaggaaaaaaata

SEQ ID NO: 208735 - DNA, 469 bp, Glycine max
cttactggaagccttgttgtgagtaagagaaaaggcttcctgcaccgagcacaccaacttgatacctctgattctttctttgcttagaattccacagaatatggagactgttcttttcaatcactccccacctttggaattcaagggtttgagcaaggaggaggaagactcattgctagggcaagtggaaatatggaggtacatgacatgcttcacggactccgtggccttgaaagctgtcatagagcttcgtatagcggacatactagaccgttatggtaaaccactatccttgtcgcaaattgtggagaacatagaagacgcaccctccccagatgcctctcttctccagagagtcctgagagtgatggtgcgcagaaagatcttcagtgcacaagaatcagagacaggagaaaccctcttcggcttgacacgagcctcgaagtggatccttcgcgacacgaaaatg

SEQ ID NO: 208736 - DNA, 599 bp, Glycine max
ctgtttgtttctgatctatggcttccaaggagttctctggtctttgttccttggtttcttcactctccgagagcattttgtgcactactgggttgaaaatgtatttggtggagagcaaaggaggtgccataacatgcatgttcttggctcttttcttcttggggacatggcctgctcttttgactatgttagaaaggcgtggtcgtcttcctcagcatacctaccttgattactcaatcaccaatttcttgtctgctttactcattgcttttacacttggtgggataggcaagggcactcatgatcagccaaatttcttagttcaacttgctcaggataattggccctccgttctttttgcaatggggggtggtctgttccttagccttgggaatctgtcaagccaatatgcatttgcttttgttgggctatctgttactgaagtgatcacggcaagcataactgttgttataggcacaaccttgaattactttttggatgacaaaatcaacaaagctgagatccttttccaggagttggttgctttttgattgcagtttttaggctctgctgtcatcatcaatgctgtgatataaagc

SEQ ID NO: 208737 - DNA, 670 bp, Glycine max
  unsure (1)..(670): unsure at all n locations
cgaaaatgactcgtgaaagatgaataataacgagagaataatttatatctacaaattctacaaatagtacaaaatgcaaattcaatatgttaactactgaaaanntatataaganagcgggtttcgttgtgcaagacngannaaggaatacgaacgggagcgcggaaaacggaacgagcgacagccgagncgggacggacggaagaggaacccgaacgaaaagccaagcctggaggaaccaagaggggccgaagccgaagcattaccaaaaactaacacaaaacagacaaaggaggagccgaagcctcctacacaagaaactttgccagctcagaaagaatccaaaaacaaggggagggatatgaaatccaacaccgagagagccaggttggatgcagaaatcagatgaatagaatgtactacataccacaaaaggaggcccctgccaaagagagtgaaaacacaccaacaatgttaaatgaggggaaaagagaggaggagaatgcaaaggcaaagcaagccttggaaagaaagaagaaagttagcagcagaaaagctgcagccaaagcagccatcagagcacaaaaggaagctgagaagaagcttaaagaccgtgagaagaaagccaagaagaaatcaggtgctgcagcaggggccaaccctgaggatg

SEQ ID NO: 208738 - DNA, 527 bp, Glycine max
cttcaccacctccttcttcttcccttcccccactcttcaaccccacacaaacctccctgcttccaacgcagtaaaaccttactccgagcctccaccgtcgaatccccaaccccaaaacgccgcggcagaaagaaaaaacccgaaacacaaaccccctcaaacaacacccctcccccccaaaacgcagacaacaaaacagaagaagacgagctccacgactacgacgacggcgtggacttcccctactcggaccctcccttaatatgctgcttcggcttggcgcggaaggagttcgtccctgcggtgcgggtgcaggactacccgatgcacccggacatctactccgagtggaagatgctgcagtggaagccccccgagttcgcacgtgcgccgggcggcccgccgtccaacgtggccgtggcgcacgcgcgcctcggggggcgggcggcgttcctggggaaggtcggggacgacgagtttggagaggagatggtgctgatgatgaacgaggagagggttcagacgag

SEQ ID NO: 208739 - DNA, 589 bp, Glycine max
  unsure (1)..(589): unsure at all n locations
tagcagtgtggtctctctcactccaactccaaccacagagacaacaaatacaacaacgttgtttccatgacaatggaatctgcgcttacagcttctaactggaaccgttctttgattcggattcgccacactaagccacgcttcggtgcaattcgccccacagcaatacggtgctccatcaactcgtatcgcttgtccaacctcactccctctgagcttcagagcctcaagagccgaccccgcatcgatttctcttccattttcggtgttgttaatcctattgtcgatgatgttcacaaaagaggggatgctgcggttaaagaatacacttcaaagtttgataaagttgaattggataagatagttgaggttgtctcggagctccctgaccctgtgcttgaaccgcctattaaggaagcttttgatgtcgcctatgataatatttatgcatttcatgctgctcagaagtcatccgagaaaagtgttgagaacatgaaaggagtccaatgncagagagttgcaagaagtattaactctgtgggtctttatgttccagggggaactgctgtataccttcacagctttgatg

SEQ ID NO: 208740 - DNA, 295 bp, Glycine max
ctgctgcaataaaggatcgctcaattgactttggcgacttgtttaagggcccactgtcagggaagtctatcaagcttttagggtttgttgccttggcaaggctcggacagtacatacccctacgtggatttaatagcgaggctttcgttggaacatatggaccataacagtttattaagcactttgcactcgatgaacggcaggaggtactggctgactaggagtgtgctacattggtattgtactgttcataaatgcacagattgctttccagctacttgcacacgtatatacc

SEQ ID NO: 208741 - DNA, 330 bp, Glycine max
tcagcgggcgccctttcctttttattctaattgccttttttgcttttgtggccggcatacaggggaaaattatttactacatccaccaatagaacacaaacagaactctccataacgggacaattaccatcgagccaaacccgactcatactaaaaggtggttacaaacccattacacgtgacatttgttagtaaaaagatagggaaaaaccaacatgggaacatgagacggaagatgctattcaaacttaaacccctcgcgaaaaccctacaccaaacgcaaagtagaattcttgggcattgagatacgctggagggaccgttcataac

SEQ ID NO: 208742 - DNA, 593 bp, Glycine max
ggagcttacaagagtgacggcaaaggactgagcaactgggataactacactcacggaccaggtagaagtgtaataatggatggaagcaatggggatatcgcgattgatcattatcatcgctacctggaggatatagatttaatggaaactttgggagtaaacagctaccggctatccctgtcatgggcaagaattctaccaaagggtagattcggagagcccaaccatgctggtatcgagttctataacagactaattgatgttctactactcaaagggatccaaccctttgtaactcttagtcactatgacattccccaagagcttgaagacagatacgggagttggctaagtccccagttacaggaagattttgctttttatgcggacctatgttttaaaacctttggtgacagagttaagtactgggtcacattcaatgagccgaatttcctagtgtcacttggttaccgctctggtttatatcctccatgccgttgctctggccaattagcaatggctaaatgcagtgaaggagactcagaaaggagccctttgttgcagctcataatgtatcctgtcacatgcagctg

SEQ ID NO: 208743 - DNA, 500 bp, Glycine max
  unsure (1)..(500): unsure at all n locations
ctttctttctgtaactaaccccaatcatcaactcagtcagcgaatgaatctgtggacggacgagaactcctcggtgatggaggccttcatgccatcctccgatctctcctccatctggccccctcccgctcctccgcagccgcaatccacggcggtcttcaatcaggacaccctccagcaccgcctccaggccttaatcgagggcgcccgagagacctggacctacgccatcttctggcagtcctcttacgactattccggctccactctcctcggttggggcgacggttactacaaaggcgacgacgacaaagccaaggcaaaggccaagtccaaagccacctccgccgccgagcaggaccaccgcaaaaaggttctccgggaacttaactccctcatctncggctcctcctccgcttncgcctncgacgacgtcgacgaggaagtcaccgacaccgagtggttcttcctcgtctccatgacgcagtccttcgtcaacg

SEQ ID NO: 208744 - DNA, 456 bp, Glycine max
  unsure (1)..(456): unsure at all n locations
ggagagtgcaataactcgttgtacattcctagtgtgtgggagagacatggctaagatgtgtgttttggtgttggttcttgctctggctgtggccacaagtgccagaaacgttcccaaccccaaggatgctggtcttaaggaccagaagaacttcatcagctatggtggagttggtggttattccgggattgggaacaatggactgccttttggaggagctggtgccggaataggtggtggttttggcggaggtggtggacttggtggtggcctcggcggtcctaccggtgggatcggagggtttggcggtaccggtagcggtgtcggtggcggtattggtggtggcgttggaactggcgttggtggtggcagcggtgttcttcctttcccttgaatgatgaacatgcatgcatgcatgcatatatgctccgtcacgnttctttggatacactagtc

SEQ ID NO: 208745 - DNA, 524 bp, Glycine max
  unsure (1)..(524): unsure at all n locations
ggagcgtgggcataaagtcgttgacagtcgaaaacaaactctcacttcttccttccttgcttccttctcttctgcgttttcttcttcaacattccaatctaatccaaaacgctgcgttttatttcgtattcaatttaattcaatccctaaattcctcgccggagagagcgaatcttaataaccccaccactttccggcgaaacatggccgtcgccgtcgccggccgccagaagccgagctccgacgcgagcctcttcacgctctgccccttctggagctcgcgcaacgctactcaaaggtccaccaaaacggtgtcgtccgtcgccaggtcgctgctccgtccgcgccggaaactccgcctcgatccttccagttacctctattttccatatgaaccgggaaagcaggtgaggagcgcggttcggttgaaaaacactagcaagtctcacgttgctttcaagttccaaacgacggcgccaaagagttgttacatgcggcctncgngtggtactcttgctccggga

SEQ ID NO: 208746 - DNA, 547 bp, Glycine max
cgcgccacccaccacctctgttcatcacttgagccacctggttaacaccggtgttctcgggagcaaacccactgtgagagttttcaccaaagccaatcccaatttctctctcaccattcgtggcggccaagtcattctcgctccctccgatcccaccaatgagtaccagcattggtataaggatgagaagtacagcactagggtgaaggatgaagaggggtgccctgctttctctttgatcaacaaggccactggtgaagccttgaagcactccatcggtgccactcatcctgttcggctgataccttacaagcccgactatcttgatgagtctattctatggactgaaagccgtgacttaggagatggccacagagctataaggatggtcaacaatgttcatcttaatgtggatgcttttcacggtgacaagaattctggaggtgttcgtgatggcactacaataatcctctgggactggaacaaaggtgataaccagcagtggaagatcttaccttactgatttcaattgacgaaattatcaatg

SEQ ID NO: 208747 - DNA, 553 bp, Glycine max
gtgcactgcaacttagccacttgaacccccttcgtaagcctcttcacatcttcacttggggacttcttcttccgcactaatacgaaaccagagggaattcacaaaagaggttaccatgtcggacgatgagagagaggagaaggagttggatctcacttctccggaagttgtcaccaagtacaagagcgccgcggagattgttaacagggctttgcagttagttatttcagaatgtaaaccgaaggcaaagattgttgacctttgcgagaaaggggattcgtatattagagagcaaactggtagcatgtacaagaatgtgaagaggaagatagagagaggtgttgccttccctacatgtgtgtctgtgaacaacactgtctgtcacttctctcctcttgccagtgatgaaacagtgttggaagatggtgatatagagaaaattgacatggcttgccatatagatgggttcattgctgctgtggcacacactcatgttcttcaggaggggccagttacaggacgggcagccgatgctcttgcagaacaaacaccg

SEQ ID NO: 208748 - DNA, 461 bp, Glycine max
  unsure (1)..(461): unsure at all n locations
ttgagatgctatgagaatccaactgctgtagagtagaaacacccttgagggaaagaagcaagtgacttgccacaagaacctttaagcaaatctgcagcagttggaggattgagatgctatgagaatccaaagaataagattactgcaatacctgctgaggaagaggaaatctggggtgcattcttcaaggtggaagggtcagcagtccttgcaggcacagagtaaaagattcattttcaaataaagtaccgtgtgatgtattaatggagtaatgtgtttatgtgcttgtgacggtaaggcttgcatgcggggccatgtaaatacctttaatgataactatgagaagaatgtgactggtagtagagtttatcatggtgttcattagctaggattttctctgtttctcttgtacagntgcgctttctaatgtaataaaagatatgcttttggtttaaaanaaa

SEQ ID NO: 208749 - DNA, 293 bp, Glycine max
tttttttttttttttttttttttttttttttttttttttttttttttttttttttctttggaattttgttttttttaaaaaaaaaagctaattttcaacagaacaaagaccatgacaatttataaaaacaaacaaaatgttcacatgaagaaccgtaaaggattatgcaagcacacgcctgtgaaatatactgcaaccctacacgaatcccacaccggccaattaggggatactccactgaaaaagaaaaggaatcccccacaatgggaaaaaaaagccttaattcttctaac

SEQ ID NO: 208750 - DNA, 542 bp, Glycine max
  unsure (1)..(542): unsure at all n locations
cagctcatctctctctccctctctctttgttctctctttctctttctccaaaatggctctaaactacccttttttaacctacttcatactactgctagtaaccataacccgtttgatattcactgtgggaaaaactgagcaatggaaagctccgattctaccagagcttgacattgataacatatcccacaaactccatgatgaccctgaaaccattcaaatggcttcaagggactatggccatttaacgcatgaattcccattagctgtgtttcgtccatcttctatagatgacatagtcaccttgataaaatcttcgtacaatagctttgccccttttgacatagctgcgaggggccaaggccactccactcatggacaagccatggctcgtgatgggattgtggtggacatggccagcctaagaaaacaaagaaatggggttgcgattagtgtctctaaggaccctttgatgggtcactatgctgatgttggaggggaacaaactctgatngatgtgctacatgccacacttgaatatg

SEQ ID NO: 208751 - DNA, 576 bp, Glycine max
gacttaacaacagcacaaagcgggttactgtctgttcaagctaccatctctctctctctttcttagtgcctccttgccagaagttaaaatggcccaagaaactttcctattcacatctgaatcagtgaacgaggggcaccctgacaagctctgtgaccagatctccgatgctgtgctcgatgcatgcttggagcaggaccctgacagcaaggttgcctgtgaaacctgcaccaagaccaacatggtgatggttttcggagagatcacaaccaaggccaacgtggactatgagaagattgtgcgtgacacatgcaggaacattggttttgtctctgatgatgttggtcttgatgctgacaactgcaaggtcctcgtcaacattgagcaacagagtcctgatattgctcaaggtgtgcacggccacctcacaaagaggcctgaggagattggtgctggtgaccaaggtcatatgttcggctatgccactgacgagactcccgagctcatgcccttgagccatgtccctgccacgaagctcggtgccaagctcaccgatggttcgaagacgggacatgc

SEQ ID NO: 208752 - DNA, 539 bp, Glycine max
ctaaaactgtgtcctccgccgttcacatcatcgtcgacgttcagttgctcacactctcaacaggtgagaagagagatgagaggaaggagctatagtccatcgcctcctccacgccacagcagaagaggaggaggagggaggagtcccagccccaggggccgctatcctccccgtcccagacaacaagatctccctaccagccttcttgtccgtaaccttcgtcatgactgtaggcctgaggatctacgccgaccttttggtcaatttggtcctctcaaggacatttaccttcctaaggattactacactggagaaccccgtggctttggttttgtccaatatgtggatcctgcggatgctgctgatgctaaatatcatatggatggtcaagttcttcttggtcgggagctcactgttgtctttgctgaggagaatagaaagaagccaactgagatgaggacacgagagagaaggggtcgcttttatgatcgaaggaggtctcctcctcgttactctcggtcaccccgctactctcgatc

SEQ ID NO: 208753 - DNA, 537 bp, Glycine max
  unsure (1)..(537): unsure at all n locations
cacaaatccaatgcaatccttttcccaaaaccccacatcccaaataacatcaaggcctatagcataagtgatggaatcccagagggtcacgtcctaggcaaaaacccaactgaaaaattgaatctttttctccaaactggtcctgagaaccttcacaaaggtatagaattagcggaagcagagacaaagaagagagtcacatgcatcattgcagatgctttagtaacctcttctctcctagtggctcagaccctcaatgttccttggattgcactttggcttcccaattcatgctcactctctctctatttctacactgacttgattcgccagcactgtgcaagccgtgctgggaacaaaaccttggatttcattccagggctgtcgaagttgcgtgttgaagacatgccacaggatctgcttgatgttggagaaaaagaaacagttntttcaagggaactaaattcgctaggtaaggtgctacctcaagctaaggtagtagttatgaatttctttgaggaattggaaccacctttg

SEQ ID NO: 208754 - DNA, 362 bp, Glycine max
gtctctcccatcctttcgcattctcaatacccttttgatttgtgaaaggaaagcaaacatggttgatcaggtccaacaccctacaatcatggacaaggttgctggtcagctccatctccgttctggtctttcatctggtattagaagttatgatggagcctaccgccacccagctatgtaccaaagaccctcttttgggaattactcgaatgctgcattgcagtttcctgtgatgcccacatgcaaagctaccatggatttgtctgctactgcaacatctgcctcacccgtctttgttgctgctccagcagagaaaggccattttcttttagactttctcatgggaaggtgtttcagcagct

SEQ ID NO: 208755 - DNA, 536 bp, Glycine max
cgacagttgagtcgggacggacggatgaggaacccggatgaaaagccaatcctggaagaaccaaaacctgctgaagctgaagcattaccaaaaactttcacaaaacagccaaaggaggagcctaagccttctccacaagaaactttgcctgctcagaaagaatccaaaaacaaggggagggatttgaaatccaaaccggagagtaaggatgtagcagaaactgatgaatatgaatttaaaaatccccaaaaggaggcccctgccaaagagtgtgaaatcgatccagcaaagctgaaagagatgaaaagagaggaggagattgcgaaggcaaagcaggccttggaaagaaagaagaagttagcagagaaagctgcagccaaagcagccatcagagcacataaggaagctgagaagaagcttaaggaccgtgagaagaaagcaaagaagaaatcaggtgctgcagctgtggccaaccctgaggatgaaccaaaagatgaagttgtcgaggctacagagccagaaagggttacgatgat

SEQ ID NO: 208756 - DNA, 418 bp, Glycine max
agagacaaataacaatttgctattacaaaacgaagaaactattattggaattcattcaaattgaagtgcacatgattaataagattcaaccaaactagagaaggccaccacggagcctaaggacaacatagacatagaaattttgttatatcatacacattcaaggaagagaaaatctcaatagcaagattcaactgaaactagaaatcgccaccacggagcctaagaacaaggtgaagcgtggattccttctgaatattgtaatcggcgagagtgcgtccgtcttcgagctgcttcccagcgaagataagacgctgctgatccggtggaatcccttccttatcctgaatcttcgccttcacgttatcgatcgtatcagaactctccacctccagagtaatagttttcccggtgagcg

SEQ ID NO: 208757 - DNA, 446 bp, Glycine max
tttttttttttttttttttttttttttttttttttttttttttttttttttttatttttgtgatttttttatttttattttcctttttatcccttttatttttttaaattttttattttattcacccaatattattcaaaaaaaaaaaaacccccacaaataaaaaaaataaaaaattagaccaacaaactccttaaaaaaaagaaccccaaaaaaaaattaaacccaaaaaaaacttacaaaccacaatatgttgagccgctaaaaaaaacccccccacaccaaaataaaaccaacccccctaaaaaccccccaaaaaaaaaaccctccccccccccaaattttataatccaaaaaaaaaaaaaaagccccattcttttttttccaccccaaaaaaaaatccacccaaggaacaaaaaaaaaaaaacccccaaatatttttccac

SEQ ID NO: 208758 - DNA, 420 bp, Glycine max
aatcaaaatagcatatggagttattatatcaaatacgtgattgttacatgcaacaatcaacttagatacatctagtgatcactcacacccaacaacaaagactatgaagtgtctgaagaaatagaaactaatacaataaaaggctcgcataagtgaagccctacagtcacactcgatttctcttattctgatagtaagtgcttcactgctgcctcagtatcccgctgcagaaatgagcaaatctgtccatggcttgttcagaacctgatgcttgcacagttagtggagcggctgatcttgtaagggacattgaccttgcagaaaccagggagtgcctgagcatactggtcattgatgttgtacctagcagcatccgccttgagacagttgcacacagtttgtttgtcaacggtggtgaca

SEQ ID NO: 208759 - DNA, 223 bp, Glycine max
ggagtcaaaactggtctgagggaaaatgttctattacaaggctaagtgtcccacaaattgaaactttatgcgtgagcataaaataccaaggctaccaaagatgctatcactaaagaaaacaaggaaacctcttgcctagcaccagcattaggtaaccacggataagaatcaggtggtggcattacacagttgtcaccgttgaagtagacccttcgaggaaaag

SEQ ID NO: 208760 - DNA, 512 bp, Glycine max
aaagagaaaaaactaaatttcagatttcatttcattgatacctcaataggtgcaaaccttacattagatgataatcatacacgtgtgtaacatctaatattttagggaatataaaataaaactaaataacataataaaaggataatatcataaatatgcagaacgacacagcaaaaacaaagggtaactaacagcaattccttaatgctaccgagtcatttatgaatgtctgttggatcaatcaaccttgtccacaaaagaaggcagacagaatgcagcagcatggatctctgggttataaaacttagtaggtccctttgccaccccatttttctctggattcaatttatttattggatgtttgaagttcactggtggaccctccgtagagcaaagcatgaatccaatcaccccacttgcatatgtaggaaccgtggtccaagcatagttaacggagcctttgaatatcttcttgcaattggctatggtgtctgcaaccacaaagttcttat

SEQ ID NO: 208761 - DNA, 425 bp, Glycine max
aaaataaaaacataaacaacatactttcgctggaacgagttcaatacatcattttaaaacataataaacagcagcacttaaaccagagatgcaaagcacaagttcaagggagacactgaacaaacagattagacatatgagaacacttcataaaagggattccccttagcaaccaccacgaaggcgaaggacaagatgcaaaggggattccttctgaatattggaatctgccaagggacgaccatcttccaattgcttcccagcaaaaatgagcctctgctgatctggagggataccttccttggcctgaatcttagctttcacattggcaatagtatcagagctttccacctccaagggaatggtcttccctgtcagagtcttcacaaatatctgcatacctccacgaagcctcaacaccaaat

SEQ ID NO: 208762 - DNA, 421 bp, Glycine max
gcacgcaaacaaagtgatttattaatccattcgatgttcaaatggtaatagaaacaataaaggtctaaatgcccaaatggtctctaacagaagctaaaaaagacaacaaagaaaaacaataacgtatctggaaaaccagacttattttcacaaggacagaataataaagacacttaaggaaactactcttcctcatcttcctcattccagcactttagagttgatctaggtgaaccacagtcactagtcttcccgaatttttggtagacaacagaaccacccattccaagcccttcgtggctcctctcttcacgacagtatcccttaacatccagaaagcaggtctgctcaaacgacttgcttgcaccatccacatgaactgcaacagataactcagttgggaggaaacatgccaataccc

SEQ ID NO: 208763 - DNA, 403 bp, Glycine max
ttttttttttttttttttttttttttttttttttttttttttttttttttgggtttttgtttttttttttttttttttttttttttttttttttaaaaattataattaaattttttaaaaaaagaaaaaaaaattgaaaaaggaaaaaaaaaaaaaacgccaaaaaaaaaaaaaaaaaaaaaaccctccccaaaaaaaaaaaaccccaaaaaaaaaaaaaccccaaaaaaggtaaaaaaaagggcacctcctaaaaaaataaataaaggccccaaagaggaaaaaaaaaaacaaaccctccaaaacaaaaaaaagcgccaaaaaaaaaaacccttttttcccccaacaccaaaaaaaaaacacccccaaaaaaaccataattaattttttcacaaccgggggt

SEQ ID NO: 208764 - DNA, 411 bp, Glycine max
aataccaaggaatctctcataatgataaggaaaaagtttaattacaagacaattttaaatgtaaagcatgataatatgtcgctacaactacaacagacaaacacatacgtcttaaaattattactcgtattaagaagcactcacacaaaacaagcaaagatcgatatataagaaagccaagtctaacaacatgattgagagtcattatgttcctgttcatgattagtacttaattagacatgcatctcatggttttggttgatgaaatattataacaaaccataatgacacaaatttactattattcaaccacttagcaatgtccatccgtgtctgctgcagcttaattatccttactttagtaactaagccaactgggcaccgcaattacaaaggatggggcaggtcatg

SEQ ID NO: 208765 - DNA, 495 bp, Glycine max
aagatgcatgaatatccatatattgattccccataatacacttatgaggtcatttttcaaaaaacaatataaaaatttcacatgtattagctgtacagttttctcatgtttaatttgtacaagatatgatatgattccaccctagcttggaagaagaatcacaacaactgtgctgaaaacaaagctaatttatttattctacatagacacattaatttgcacacaaaataacaaaaaaaatcttcccaagattaggctgcagtatgatgccctatttggtgaaaccaatagtataaggaacgccagtagccttcaaccaaccatcagcatctccagcaggtccacctctgaggaattgggcagcagtgaattgtgcagcttcgttcttattaatattgggatggtaacccctccactttacccttccttgaacgttagaaccaggtccaacgttagcatactcagcatagtacaacgtatcaagatcaggttccc

SEQ ID NO: 208766 - DNA, 524 bp, Glycine max
cacaagacttgaataaatttcatttcaattatacgtttccatatatacatcaggcacacaagtaatccattcatatgttaaattgttacacaagcatacaacagtgtcatgatttcctcaggtccacaaatattggaagtttgaatgccaatagcctcgaatatgcaacttgaatcttagcccaaaacttttacttagttattggctttgccatagcttcttgggaaagggataacgtccctaacattgccaaggccagttgcgaagaggaccatcaggtcaaaccttagagtgaacccagagttcttcactgttccgtttcgacgaagatctaggtaccattcatacttctctcgcgggaagcctaactaatcaatcctggagcttatcatgttaagacgttcctcgttttggctaccagatattattgttccaagctttgggacaaccaagtcaaacgcagctacagttccatcatcattctggcgagcataaaatgggctagcttcttttggataattgat

SEQ ID NO: 208767 - DNA, 449 bp, Glycine max
aataaatgttaaattaataaattaagtcttgtaattaaagacagtgggagtacatcttagttctactattttctttgcctcagatccctcaaatcatataatccaagggaaaaggaagaacaaagcgaggaaaaggaattaaaaaaccacggaagcattcacttcgggtttgatatgtacacgacttatttatgttacaaccacaaacgaagctctttatttggttcaacacgacttgtttacttcacattttagaggacctgcaaagcgagtgagactcgatacggctttcccaggctttgctatgatttctgccttgggattttttgctacgtttttcccagactgaacaaagaaggctccattcatcaataaatcaccctctgatctccaattccagttcttccacacactttctggtgcatagtccccttttgcacttctttggc

SEQ ID NO: 208768 - DNA, 369 bp, Glycine max
caaaataaaataattctgggacaacattatgctacgataaatccacaagggaaactagtaataataacaaactttccctggtatttccgagggttccttattgatcactcttaaatcactagtcaccgcatcagcatgatttatccctccaagggaacactgtgaagaacaacggtctcaacggttagacccggcccgaatccgaatagcaccccccactttaacccttctccaggggtactcttcccttcctccttagacttcttcctcatttcatccagaatgaacaaaacacacgcgcttgacatgtttccgtactcactcagcacatgccgggtggactggagtttctccggcttgagccggagc

SEQ ID NO: 208769 - DNA, 501 bp, Glycine max
gagaaacatgagcagagattacaatttaatatataaaatatacgttcgtgttaaccagattataaactggactgaacaagaggggagagagagatcatcataatacatctaaaatatagtggtaattattgcttcatattaatctacacatacatataacatatataaatatatgtaaattgttgttacttttgtatcatcaggcagaaatctaggaattggcagacccacctcccttgattgaaagaggagaaccacagagagaggtgttctcagtgagttttggattaagaaacaccacaatcactgttatgtcatcatggatgtgtctcctcatcccttgctcaatcttttggaggtcagaaagtctcatttcacacttcttagctgcttctctaagtgcagctttcacaagtcttctagcaattccgttaggtggattgttgctgactatgctaacaacctcttggttggaagatgctcccataagccatcagaagc

SEQ ID NO: 208770 - DNA, 398 bp, Glycine max
cataacgagaggacacatatttgcattgtgtgtcttccttgtgccttgtttaacaatttctagggaggaatttgactacaagttcaatgccagaacagaagtgttctgtcttattccctaaggattatgaaagcacacaaagacaaaaaagattaaattaaggtacttaatttcaatctggtgggtacatatataaatacatggagtggtggtagcaactagcaagggcattaagagacttaataggtaaaatttaaagtttcaggggcattttggtcctcctctttttgtcttccagttgttgtagcaagggcaaacttgcttgttgccaaaagttccaggaggcacacacaagcacttggcacagcacttttggcagaagaataggcacggtttct

SEQ ID NO: 208771 - DNA, 354 bp, Glycine max
ggagcacaggtgacattttgttcatgctttcgcatcatgataaaaacatcacaggggatggtgaacatatttatttttatcaaattaagacaccgcccttacctatcccctcattacaaacattatcttcccccccaaaaacttgaagttaaacgcacccccacaaaagttttcatagatgccatccatttcaatatacattatctaaacacaaatcagcccatggcatacttctgggtccagctgcgtgcagtggcctcatacttggcccggccagttttgtacatgtgagcgatttccggaacaagtggatcatcaagatttggatcagccagcaatgagcagatagaaagc

SEQ ID NO: 208772 - DNA, 540 bp, Glycine max
acatcaaaatagtaatcacacttaacatattagcagaactatgaatacattgtttttcattacaaagggcataataatcgatctcgacccaactaagaacaaaaacggcgtataaaaaaagaattacaaaaatagaacagactttgttacataacaccgagaatagttgtcatacctcccagactaaaaacaaaacagaacagactggaaggtatcctcaaatccacatccatgcaattgccaacttcagcttccacagctttgaatagtttacgagatcttccatgttatacctatttgctcaatctcaaatctgaaaactgtctttgtctttgtcccagctgcaattatatcctctcccaaccagaaaaaaccatctcccttttaaaaacaatctaaaataaagcactccaaactgctccatttccttcaccacactttgagtggacatatttaatcttctccactgacttacagattccactgcagctcccatcaaatgatgcaaacacatatgtaccggcctgcgccttcactaca

SEQ ID NO: 208773 - DNA, 414 bp, Glycine max
gggccaaatgggcttggagcctctattcattttttcaaggcatctgggccttccaaatggcagaccaataagttgacatgcttcaaacaaatcaacttaaaggatcggtggaaaaaacactgaacataaccatatctctactttttcctttaaagaccacatacttcctgagaacaccctccctttgaaaaccagccttttccagcaccttttgagaagccacattttccacatcaactaaagcccgaagcctctccaaggggggaaactcgctgaatgcaactttaatcacttggttcacagcatgggttgcaatcccttttccccaatttttggaggcttaagcgtaaccaagttcaacaaatttgtgcctgtttctacgctggcccccacatgagaaaaaatcaatacccc

SEQ ID NO: 208774 - DNA, 512 bp, Glycine max
  unsure (1)..(512): unsure at all n locations
catcaattacaagcccttcagcagcaactcgaggacctgcttccacaggaggcttcttacgagcttcaactgcagcatcagcttcagccaactgtcttttcagtttttccaaaacaggactttgccgagctggatctataaagacaaccctcaatattctttccactgtcactagttccttttgttcatcaaactgcatgacagaaggccaaagaccaaatttaattatttacttttatcattcacgggtaaccttgaaaatattgcctaaagcatgaatagatgaaacaagctattatcaatataacaagctgacgctaccatgaaaatagcctatctacaaatatctgttaataaatcaatcctatccagaagttgaagttcagtttttggcatatgttaatgttgtagggcctatagctaacccaaacaaactagtatcctacatatggagtaatattatagaataccaggagtngaaaaccactagctggctaaatcatctaatcaaa

SEQ ID NO: 208775 - DNA, 195 bp, Glycine max
agacaagaatcacatgctttcatagataacaattagaagatagatcgtggcttaattaaaatctcaagtggagtagctttagtcttgcctaatccaacggtttcagtcatatcaataggttcatttgatggatttaagaatgaaaaagaatgaaaaagactggcaagaatcaaatgaaccatttgaaggctaaag

SEQ ID NO: 208776 - DNA, 257 bp, Glycine max
tttttttttttttttttttttttttttttttttttttttttttttttttttggttttttgtttttttttttttttttttttcctttttttttttttttttttttttttttttttttttccaaggaaaccccaaaaaaaaaatttgcccttttggaaaaattttttaaaaaaacccccccccgggggaaaaaaaaataaaaacccccccccccaagaaaaaaaaaaccccaaaaaaatcccccccccccccccttggg

SEQ ID NO: 208777 - DNA, 548 bp, Glycine max
  unsure (1)..(548): unsure at all n locations
aaaatcaaatagttgagcattgagtacaagattaggatgtatggcagatgaagcttgtcaacaatcgccttcattagcgtaagcacccaccacctgctaatgactgaggtacaatatagacaacagcaaacctaaccatgccgccaaatcatgaaggagaaaaagaaaaagaaagccaacttttcaactgtaatcaagaacgaacgagagtcgggccacagagctatatgaactagcaaccatagacaattagtggtttctacatactacagatactttcgtgcaagggctcggactttagtatcaaaatgtgatgacgtgatccgggagccaggcaagcacaggggattaaggagagtctctatgtaaagctcatgcacctctnggaagaagctcttaataccatcatcattacgggagtcatgtagcaacataagtcgggtatgaccagctgtaacatacactgacacccatgttcattaaacctgtctactgatttcaagtacattgcactagtagtccatgcaaggtcctgaacatatcaagag

SEQ ID NO: 208778 - DNA, 566 bp, Glycine max
caaatagaaaattgccagtgagtctgacaaggaaacagcagcgcagcggagtgagcaatgccggagcttccagaggtagaggcggcgaggagggccgttgagtataactgcgtcggaaagaggataacaaagtgcgttgtcgccgatgattctaaggtgatccatggtgtctctccctccgacttccaagcttccgtcctcggcaagctcatcgtcgctgctcaccgtaagggaaagaacatgtggcttcaacttgattctcctccttttccttccttccaattcggtatggctggtgctatatacattaaaggagctgcagtaacaaactataaaaggtctgctgtaaaagacgaggatgagtggccctcaaaatattcaaaaattttcattgagttagatgatggtttggagttgtctttcactgacaaaaggcgatttgctaaagttcgtctgctcaaagatccgacatcagtgccttccatatccgagcttggtcctgatgcacttttcgaacctatgacacttgagaagtttacggagtctttgcacaagaagaaaactga

SEQ ID NO: 208779 - DNA, 538 bp, Glycine max
  unsure (1)..(538): unsure at all n locations
aacacggatgacaaccattccagaaagcaacaaaaatggaaattacattttttttttcagacacatggggggatgtgtccaacaagagaacaacaaatgcaacaaaaatcaaaaacagagaaaaacaacttgtagctttatttacacacagggagaccaaagaaaaagcggttcagaaaactccaccagccatggaaggaatgtcatcaaagcaccaaaggttcatgaggtttccaccatcctgagttgtgtcaccagatagcaaggattccaatgaagtatcgccccagctcccttcaagataaggcatctgaaagaacttcaactcagattcaatatccacaagctcctcagagagtgtctttgcagaatcatcttcaatagataccacattctgagagttaggctgctgctggttggcattttgcacaaaatgagattcacaatccaaaggagcagaaagcatggatgagatctcaggagcataatcaanatgaatactcccttgatctgaactgaagtaaagggttgcatcatc

SEQ ID NO: 208780 - DNA, 542 bp, Glycine max
  unsure (1)..(542): unsure at all n locations
ggcactgattcttcattgaatcatggaatgacacccaacataggcgactcgggtttcctgcattgtccggaagatgcaggacaaggaaacccactgaacaaaacctttgtgaaggtttataagtcagggtcctttggaaggtcattggatatcaccaaattcagcagctaccatgagctgcgtggtgaactcgctcgaatgtttggccttgaaggcgagttggaggaccctgtgagatcaggctggcagcttgtatttgtagaccgagagaatgatgttcttctccttggtgatggcccctggccggaattcgtaaatagtgtatggtgcataaagatactttctcctaggaagtgcagcaaatgggcaacaatggccttgagctgttgaactcggttccaaatcaaaggctctctaatggcatctgtgatgactatgtgagccgtcaagacccaagaaatttaagcactgggataacaactggggngtctttagactactaatagtctgtacttcttctatcatgtttaatattattaccc

SEQ ID NO: 208781 - DNA, 564 bp, Glycine max
  unsure (1)..(564): unsure at all n locations
cggctcgagtttgaatcaagggtgagggccttccatggcttccgcttgtgcttcctctgcaattacagctgttgccatctctacgccgagttccgggcagaagaatggatcaggaggttgttttcttagtggaaggaaattgagggtgaaaaaggagagagcagcaattggaggacgatcgatgggcactacagtgtgcgcagttgctgagcctgacagacctctatggttcccaggcagcacccctcctccatggcttgatggcactctacctggagacttcggctttgaccctcttggtcttggatctgacccggagagtctgagatggaatgttcaggcagagctagtgcactgcagatgggcaatgttgggtgctgctggcattttcattccagaattcctaacaaagattggtgtcttgaacactccttcatggtactcagctggagagctggaatacttcacggacactactaccctcttcatagttgagctctttntcattggctgggccgagggtagaagatgggctgacataatcaagccaggctgtgtcaacac

SEQ ID NO: 208782 - DNA, 470 bp, Glycine max
  unsure (1)..(470): unsure at all n locations
ggcactgattcttcattgaatcatggaatgacacccaacataggcgactcgggtttgctgcattgtccggaagatgcaggacaaggaaacccactgaacaaaacctttgtgaaggtttataagtcagggtcctttggaaggtcattggatatcaccaaattcagcagctaccatgagctgcgtggtgaactcgctcgaatgtttggccttgaaggcgagttggaggaccctgtgagatcaggctggcagcttgtatttgtagaccgagagaatgatgttcttctccttggtgatggcccctggccggaattcgtaaatagtgtatggtgcataaagatactttctcctcaggaagtgcagcaaatgggcaacaatggccttgagctgttgaactcggttccaaatcaaaggctctctaatggcatctgtgatgactatgtgagccgtcaagaccccnagaaattaagcac

SEQ ID NO: 208783 - DNA, 585 bp, Glycine max
cggctcgagtttgaatcaagggtgagggccttccatggcttccgcttgtgcttcctgtgcaattacagctgttgccatctctacgccgagttccgggcagaagaatggatcaggaggttgttttcttagtggaaggaaattgagggtgaaaaaggagagagcagcaattggaggacgatcgatgggcactacagtgtgcgcagttgctgagcctgacagacctctatggttcccaggcagcacccctcctccatggcttgatggcactctacctggagacttcggctttgaccctcttggtcttggatctgacccggagagtctgagatggaatgttcaggcagagctagtgcactgcagatgggcaatgttgggtgctgctggcattttcattccagaattcctaacaaagattggtgtcttgaacactccttcatggtactcagctggagagctggaatacttcacggacactactaccctcttcattagtgagctctttttcattggctgggccgagggtagaagatgggctgacataatcaagccaggctgtgtcaacactgaccccatcttttccacaac

SEQ ID NO: 208784 - DNA, 545 bp, Glycine max
ccagcaaacatcttatattttttattaaatcgtagtcaattaacaaccaaacataaaccattttttatttttcagatccataagagaaaaaatagatacccaacccaaggagagaatgcaaccttgaaaagcagcaaatggctcgtataacttcatattcaaggctcgaagaccatgctctctgcttctcgcttcacggattcaaagagcacagatgataaataacgctctccaaagcttgggaagaccgcaataatgagttttccagcattttctggcctctttgctatcttaattgcagcagctgcagctgcaccagatgatattcccaccagcaaaccttctttcaaagcaagaagtttagcagttccaatggcttcttcacttgaaatttgaacaacttcatcaagtaaatcgacatccagaacaccagggatgaagccagcaccaattccttggatcttatgagggccaggttttcctccagacagaattggactttctactggttcaatgccatatagcttaatataaggggtctgatc

SEQ ID NO: 208785 - DNA, 529 bp, Glycine max
tttttctttcactatccctttcgaactctctccgattagggcacacgcgatgcctctcttcctctccgacgaggagttcgcgtggtgctccggtgacggctctgccgtggccgcgaaggccgacgccttcatccgcggcctcttcaacgagctcgacaccgtccgctccaaggcccacgccgccgacatcaacgccgagcagaactgccttctcatcgagcagaagtatctctccctcaccgccgagttctccaaactcgagtcgaacatcgccgaacttcaatcctctctcgatcagcgcctccgcgaaatcgacgaggtgcaatcgcagaaccaccgaatcaaattggaagcggttgagaaagatagggagatagagcggttgaggacggaggtggcggagttgcacaagtcgaagaggcagttgcttgagttgaacgagcagaaggatttggagctaagtgagaagaatgcaaccatgaagagttatcttgataagactgttcgtttaagtgaaaatgctgctcat

SEQ ID NO: 208786 - DNA, 546 bp, Glycine max
  unsure (1)..(546): unsure at all n locations
ccagcaaacatcttatattttttattaaatcgtagtcaattaacaaccaaacataaaccattttttatttttcagatccataagagaaaaaatagatacacaacccaaggagagaatgcaacttgaaaagcagcaaatggctcgtataacttcatattcaaggctcgaagaccatgctctctgcttctcgcttcacggattcaaagagcacagatgataaataacgctctccaaagcttgggaagaccgcaataatgagttttccagcattttctggcctctttgctatcttaattgcagcagctgcagctgcaccagatgatattcccaccagcaaaccttctttcaaagcaagaagtttagcagtttcaatggcttcttcacttgaaatttgaacaacttcatcaagtaaatcgacatccagaacaccagggatgaagccagcaccaattccttggatcttatgagggccaggttntcctccagacagtattggactttctactggttcaatgccatatagctntatatcagggttctgatctt

SEQ ID NO: 208787 - DNA, 569 bp, Glycine max
caaatagaaaattgccagtgagtctgacaaggaaacagcagcgcagcggagtgagcaatgccggagcttccagaggtagaggcggcgaggagggccgttgagtataactgcgtcggaaagaggataacaaagtgcgttgtcgccgatgattctaaggtgatccatggtgtctctccctccgacttccaagcttccgtcctcggcaagctcatcgtcgctgctcaccgtaagggaaagaacatgtggcttcaacttgattctcctccttttccttccttccaattcggtatggctggtgctatatacattaaaggagctgcagtaacaaactataaaaggtctgctgtaaaagacgaggatgagtggccctcaaaatattcaaaaattttcattgagttagatgatggtttggagttgtctttcactgacaaaaggcgatttgctaaagttcgtctgctcaaagatccgacatcagtgccttccatatccgagcttggtcctgatgcacttttcgaacctatgacacttgagaagtttacggagtctttgcacaagaagaaaactgaaat

SEQ ID NO: 208788 - DNA, 383 bp, Glycine max
gcgatgagttcgggtagcagccacagcagtgagaaggagaaggagaaacagagggtgagtcgcacgtcgctgatactgtggcacgcgcaccaaaacgacgccggatcggtgcgcaagctcctccaggaggatccctcgctcgtcaaggccagggactacgacaaccgaacgccgctccatgtggcgtccctccacggctggatcgacgtcgccacgtgcctcatcgagttcggcgccgacgtcaacgcgcaagatcgctggaaaaacacccctctggcggatgcggaaggagctaagaagagtaatgtgatcgagctcttgcaatcgcatggaggattgtcttttgggcaaaatggaagccatttcgagccgaagccggtagc

SEQ ID NO: 208789 - DNA, 432 bp, Glycine max
  unsure (1)..(432): unsure at all n locations
caaatagaaaattgccagtgagtctgacaaggaaacagcagcgcagcggagtgagcaatgccggagcttccagaggtagaggcggcgaggagggccgttgagtataactgcgtcggaaagaggataacaaagtgcgttgtcgccgatgattctaaggtgatccatggtgtctctccctccgacttccaagcttccgtcctcggcaagctcatcgtcgctgctcaccgtaagggaaagaacatgtggcttcaacttgattctcctccttttccttccttccaattcggtatggctggtgctatatacattaaaggagctgcagtaacaaactataaaaggtctgctgtaaaagacgaggatgagtggccctcaaaatattcaaaaatntttattgagttagatgatggtttggagttgtctttcactgacaaa

SEQ ID NO: 208790 - DNA, 525 bp, Glycine max
  unsure (1)..(525): unsure at all n locations
gcgatgagttcgggtagcagccacagcagtgagaaggagaaggagaaacagagggtgagtcgcacgtcgctgatactgtggcacgcgcaccaaaacgacgccggatcggtgcgcaagctcctccaggaggatccctcgctcgtcaaggccagggactacgacaaccgaacgccgctccatgtggcgtccctccacggctggatcgacgtcgccacgtgcctcatcgagttcggcgccgacgtcaacgcgcaagatcgctggaaaaacacccctctggcggatgcggaaggagctaagaagagtaatgtgatcgagctcttgcaatcgcatggaggattgtcttttgggcaaaatggaagccatttcgagccgaagccggtagcgccgccgttgccgaacaagtgtgaatggaangannnnanccttccnanctcgacttctccaactcggtgcgaatcggatagggttcttttggtgagattttaaaagcccaatggcgtggaacaccagttgctggtaaacgta

SEQ ID NO: 208791 - DNA, 553 bp, Glycine max
ttcagaacttatctgtggcagtgtctgttctgcagcagtgcaaaaatctcaccacccttgtacttactaagaatttccgtggtgaggtaatttcagaaagtgtgacagtagaatttgagagccttatgattttagcacttgggaattgtggtcttaaaggccatattccttcttggttatccaattgcaggaagttggcagttcttgacttgtcttggaaccatttgaatggtagtgttccttcttggattggtcagatggacagcttgttctatttggatttctcaaataattctctcacaggagaaataccaaaaggtctggcagagttgaagggcctcatgtgcgctaactgtaatagagaaaaccttgctgcttttgcattcattcctctctttgttaagagaaacacaagtgtaagtggactgcaatataaccaggcatcaagtttccctccttcaattctcttgagcaataacatattgagtgggaatatatggccttgaattggtcaattgaaagcactgcatgtcttggatttaagcagaaacaa

SEQ ID NO: 208792 - DNA, 548 bp, Glycine max
tttttctttcactatccctttcgaactctctccgattagggcacacgcgatgcctctcttcctctccgacgaggagttcgcgtggtgctccggtgacggctctgccgtggccgcgaaggccgacgccttcatccgcggcctcttcaacgagctcgacaccgtccgctccaaggcccacgccgccgacatcaacgccgagcagaactgccttctcatcgagcagaagtatctctccctcaccgccgagttctccaaactcgagtcgaacatcgccgaacttcaatcctctctcgatcagcgcctccgcgaaatcgacgaggtgcaatcgcagaaccaccgaatcaaattggaagcggttgagaaagatagggagatagagcggttgaggaccgaggtggcggagttgcacaagtcgaagaggcagttgcttgagttgaacgagcagaaggatttggagctaagtgagaagaatgcaaccatgaagagttatcttgataagatggttcgttaagtgaaaatgctgctcatacagaggcacggctgagtga

SEQ ID NO: 208793 - DNA, 401 bp, Glycine max
  unsure (1)..(401): unsure at all n locations
gctatggcgatttaattattagtattattcttattgttatctccatttgactcactcgctctctcttgtttgtttgcgtagaaaaataaaatcaggtactgcagggttgtgaaagctagatactaattagatcgcttgatcgaagaaagagaaacaaaccatagtactactactaattntgattagggatttgatctaatataatataatttcacgatttaattaaccgcagaagctgcctcggtgtgtgagggacaaaagtgagtgagagagagagagagagatcaggagagattggaaaagatgtcataatcatcgaactcgccgtgcgcggcgtgcaagtttctgaggcgaaagtgcacgcaagagtgcgtgttcgcgccgtacttttcgccggacaa

SEQ ID NO: 208794 - DNA, 518 bp, Glycine max
cacaaagtgctggagcaaacactaacactaacacaacaccaccaacaagaagaagaagaaacattcccagagacccttttgctctgtgaagccaaagttgctatcttttctcaaatggggacccgaatcccttcgcaccagctcagcagcggcctctacgtgtcgggtcgacccgaacaagtaaaagagcgtccgccgacgatgacgtcacgctctgttccgtacaccggcggcgaccccaagaagtccggcgagctcgggaaaatgttggaaatccccggcgtcgagccgaaaccgtcgcgtccgtcgtctgggtcggtgagatccgggccgaactcgggcccggcgggagggaggctgagcgggtcagggcccatgtcgcgaaagtcgtccggttcgggtccgatagcgctgcagcccacgggcctgataacgtcgggcccggtcgggagtcggcggtcgggtcagctggagcagcctgcagcgacggcgggggggaagatggtgtacgggtcggc

SEQ ID NO: 208795 - DNA, 360 bp, Glycine max
tcatcatggccacctctgctattcagcaatcagcattcgcaggtcaaactgctctgaagcagctcaatgagttggtccgcaagaccggtggcgccggcaaaggtcgcaccaacatgcgccgtaccgtcaagagtgctcctcagagcatttggtatggccctgatcgtcccaagtacctgggtccattctcagagcagattccgtcatacctgaccggagaattccccggtgactacggatgggacactgctggactatcagctgacccggaaaccttcgccaggaaccgggagctggaggtgattcacagcagatgggccatgcttggtgcacttggctgcaccttcccagagatccttg

SEQ ID NO: 208796 - DNA, 569 bp, Glycine max
ttcagaacttatctgtggcagtgtctgttctgcagcagtgcaaaaatctcaccacccttgtacttactaagaatttccgtggtgaggtaatttcagaaagtgtgacagtagaatttgagagccttatgattttagcacttgggaattgtggtcttaaaggccatattccttcttggttatccaattgcaggaagttggcagttcttgacttgtcttggaaccatttgaatggtagtgttccttcttggattggtcagatggacagcttgttctatttggatttctcaaataattctctcacaggagaaataccaaaaggtctggcagagttgaagggcctcatgtgcgctaactgtaatagagaaaaccttgctgcttttgcattcattcctctctttgttaagagaaacacaagtgtaagtggactgcaatataaccaggcatcaagtttccctccttcaattctcttgagcaataacatattgagtgggaatatatggcctgaaattggtcaattgaaagcactgcatgtcttggatttaagcagaaacaacatcgctggtaccatt

SEQ ID NO: 208797 - DNA, 415 bp, Glycine max
gctatggcgatttaattattagtattattcttattgttatctccatttgactcactcgctctctcttgtttgtttgcgtagaaaaataaaatcaggtactgcagggttgtgaaagctagatactaattagatcgctgaatcgaagaaagagaaacaaaccatagtactactactaattttgattagggatttgatctaatataatataatttcacgatttaattaaccgcagaagctgcctcggtgtgtgagggacaaaagtgagtgagagagagagagagagaagaggagagattggaaaagatgtcatcatcatcgaactcgccgtgcgcggcgtgcaagtttctgaggcgaaagtgcacgcaggagtgcgtgttcgcgccgtactttccgccggacaaccctcagaggttcg

SEQ ID NO: 208798 - DNA, 605 bp, Glycine max
  unsure (1)..(605): unsure at all n locations
ttcagaacttatctgtggcagtgtctgttctgcagcagtgcaaaaatctcaccacccttgtacttactaagaatttccgtggtgaggtaatttcagaaagtgtgacagtagaatttgagagccttatgattttagcacttgggaattgtggtcttaaaggccatattccttcttggttatccaattgcaggaagttggcagttcttgacttgtcttggaaccatttgaatggtagtgttccttcttggattggtcagatggacagcttgttctatttggatttctcaaataattctctcacaggagaaataccaaaaggtctggcagagttgaagggcctcatgtgcgctaactgtaatagagaaaaccttgctgcttttgcattcattcctctctttgttaagagaaacacaagtgtaagtggactgcaatataaccaggcatcaagtntccctccttcaattctcttgagcaataacatattgagtgggaatatatggcctgaaattggtcaattgaaagcactgcatgtcttggatttaagcagaaacaacatcgcttggtccattcctagcacaatttcagagatggagaactnggaatca

SEQ ID NO: 208799 - DNA, 491 bp, Glycine max
  unsure (1)..(491): unsure at all n locations
tcatcatggccacctctgctattcagcaatcagcattcgcaggtcaaactgctctgaagcagctcaatgagttggtccgcaagaccggtggcgccggcaaaggtcgcaccaacatgcgccgtaccgtcaagagtgctcctcagagcatttggtatggccctgatcgtcccaagtacctgggtccattctcagagcagattccgtcatacctgaccggagaattccccggtgactacggatgggacactgctggactatcagctgacccggaaaccttcgccaggaaccgggagctggaggtgattcacagcagatgggccatgcttggtgcacttggctgcaccttcccagagatccttgagaagaatggtgtgaaattcggcgaggccgtgtggttcaaggctggttcacagatcttctcggagggaggacttgactacttgggcaacccanacctgatccatgctcanagcatccttgccatctgggct

SEQ ID NO: 208800 - DNA, 543 bp, Glycine max
cggctcgagtttgaatcaagggtgagggccttccatggcttccgcttgtgcttcctctgcaattacagctgttgccatctctacgccgagttccgggcagaagaatggatcaggaggttgttttcttagtggaaggaaattgagggtgaaaaaggagagagcagcaattggaggacgatcgatgggcactacagtgtgcgcagttgctgagcctgacagacctctatggttcccaggcagcacccctcctccatggcttgatggcactctacctggagacttcggctttgaccctcttggtcttggatctgacccggagagtctgagatggaatgttcaggcagagctagtgcactgcagatgggcaatgttgggtgctgctggcattttcattccagaattcctaacaaagattggtgtcttgaacactccttcatggtactcagctggagagctggaatacttcacggacactactaccctcttcatagttgagctcttttcattggctgggccagggtagagatgggctgacataatcag

SEQ ID NO: 208801 - DNA, 468 bp, Glycine max
cacaaagtgctggagcaaacactaacactaacacaacaccaccaacaagaagaagaagaaacattcccagagacccttttgctctgtgaagccaaagttgctatcttttctcaaatggggacccgaatcccttcgcaccagctcagcagcggcctctacgtgtcgggtcgacccgaacaagtaaaagagcgtccgccgacgatgacgtcacgctctgttccgtacaccggcggcgaccccaagaagtccggcgagctcgggaaaatggtggaaatccccggcgtcgagccgaaaccgtcgcgtccgtcgtctgggtcggtgagatccgggccgaactcggcgcccgcggagggaagctgagcgggtcaaggcccatgtcgcgaaagtcgtcccgttcgggtccgatagcgctgcagcccacgggcctgataacgtcgggccccgtcgggagtcggcggtcgggtcagc

SEQ ID NO: 208802 - DNA, 535 bp, Glycine max
  unsure (1)..(535): unsure at all n locations
gatgacgcggacgggntcgatctgtggctaggaatgtgccaggtgcctgtcaccaacaaccaaaggcaacgaatagcacacaacaaccaactgcaacgtagacaacacaacaaccaacgccaacgcatccaacacaacaaccaaaggcaacgaatacaacacaacaaccaactacaacgcaaacaacacaacaaccaaccccaacgcatccaacacaacaaccaacggcaacgcatccaacacaacaaccaactccaacgcagacgacaacacaacaaccaacggcaacgcatccaacacaacaaccaacgccaacgcattcaaccaaacaaacaacgccaacgcagtcaacacaacaaccaaatacaacgcatacaacaaaacaaacaacgccaacgacaacgcacccaacacaacaaccaaacgcaacgcaaacaacaacaaaaaccgtcccaccggcggttacagcaacggcacagagccccaaggttttgctgcccccatcacaacactcagcgcaggtgctgaaacgggt

SEQ ID NO: 208803 - DNA, 474 bp, Glycine max
tcatcatggccacctctgctattcagcaatcagcattcgcaggtcaaactgctctggagcagctcaatgagttggtccgcaagaccggtggcgccggcaaaggtcgcaccaacatgcgccgtaccgtcaagagtgctcctcagagcatttggtatggccctgatcgtcccaagtacctgggtccattctcagagcagattccgtcatacctgaccggagaattccccggtgactacggatgggacactgctggactatcagctgacccggaaaccttcgccaggaaccgggagctggaggtgattcacagcagatgggccatgcttggtgcacttggctgcaccttcccagagatccttgagaagaatggtgtgaaattcggcgaggccgtgtggttcaaggctggttcacagatcttctcggagggaggacttgactacttgggcaacccaaacctgatccatgctcaaagca

SEQ ID NO: 208804 - DNA, 519 bp, Glycine max
  unsure (1)..(519): unsure at all n locations
cacaaagtgctggagcaaacactaacactaacacaacaccaccaacaagaagaagaagaaacattcccagagacccttttgctctgtgaagccaaagttgctatcttttctcaaatggggacccgaatcccttcgcaccagctcagcagcggcctctacgtgtcgggtcgacccgaacaagtaaaagagcgtccgccgacgatgacgtcacgctctgttccgtacaccggcggcgaccccaagaagtccggcgagctcgggaaaatgttggaaatccccggcgtcgagccgaaaccgtcgcgtccgtcgtctgggtcggtgagatccgggccgaactcggcnccggcgggagggaggctgagcgggtcaaggcccatgtcgcgaaagtcgtccggttcgggtccgatagcgctgcagcccacgggcctgataacgtcgggcccggtcgggagtcggcggtcgggtcagctggagcagcctgcagcgacggcggnggggaagatggtgtaccggtcggcg

SEQ ID NO: 208805 - DNA, 540 bp, Glycine max
ggcactgattcttcattgaatcatggaatgacacccaacataggcgactcgggtttcctgcattgtccggaagatgcaggacaaggaaacccactgaacaaaacctttgtgaaggtttataagtcagggtcctttggaaggtcattggatatcaccaaattcagcagctaccatgagctgcgtggtgaactcgctcgaatgtttggccttgaaggcgagttggaggaccctgtgagatcaggctggcagcttgtatttgtagaccgagagaatgatgttcttctccttggtgatggcccctggccggaattcgtaaatagtgtatggtgcataaagatactttctcctcaggaagtgcagcaaatgggcaacaatggccttgagctgttgaactcggttccaaatcaaaggctctctaatggcatctgtgatgactatgtgagccgtcaagacccaagaaatttaagcactgggataacaactgtggggtctttagactactaatagagctgacttcttctatcatgtttaatattatta

SEQ ID NO: 208806 - DNA, 576 bp, Glycine max
  unsure (1)..(576): unsure at all n locations
gcgatgagttcgggtagcagccacagcagtgagaaggagaaggagaaacagagggtgagtcgcacgtcgctgatactgtggcacgcgcaccaaaacgacgccggatcggtgcgcaagctcctccaggaggatccctcgctcgtcaaggccagggactacgacaaccgaacgccgctccatgtggcgtccctccacggctggatcgacgtcgccacgtgcctcatcgagttcggcgccgacgtcaacgcgcaagatcgctggaaaaacacccctctggcggatgcggaaggagctaagaagagtaatgtgatcgagctcttgcaatcgcatggaggattgtcttttgggcaaaatggaagccatttcgagccgaagccggtagcgccgccgttgccgaacaagtgtgatggtaggaaactancctaccgagctcgacttcttcaactcggtgcgaatcgaaagggttcttttgcgagatataaaagcccttggcgggaacaccagtgctgtaaacgtatctttcattctttagtaaaattattgtgattaggacttaagcttgaggcaattgttgtg

SEQ ID NO: 208807 - DNA, 560 bp, Glycine max
gaaagagaacaatttgttgtttactaatgagagatgaaggaactaatcatttgtcttgccatcgcaaaagaatagaactcccataattccattagagaagcaattaatatggggttaaatctaaaatccaaacaatggttgccccaaagttaaacaattaaaataaaagttgcaactttagttgccaactattcattcctatagaagttcctagcaggaaatctaatgcagattttttcgggtaacttctatggggacataaggaattgctgtaatttgaatttcaactttctgcttgcagaagaacccgcataaaaaagggcaatacaggcagaacataaacaattcattgtgcgtctgagtctgttggggtagacttttccgttaatgcagaaagctgtgtctcctgctgtttcttcagatacctctgggcagttgcattcactatcttgacaaagaagttcataagcatgagccacacaacagtgttccagactaaagtgaaagaaaaatccccacttttcccctgcttatttggggaaactggatgggaatctttt

SEQ ID NO: 208808 - DNA, 551 bp, Glycine max
cagctctttctgttctctctttcttctccaagcgattcattcaattttcaattcgattcgatcgcattcttcttctacattctcgattccttcctttctcaacaactattatattatgcatcttcgtctccctctctcaccaaccacctagggtttctctccgacgttaggtttttttttttcgtttctcgccgggattttgggggcagacttaatctccggcagctatggcctccaacttgcagatgagccctcaggtggagcagatccacggtgaaattcgcgacaactttcgagccctcgcaaatggctttcagaagctggataagattaaagatgccaatagacaaagtaatcagctggaagaactcacggacaagatgagggagtgcaaaaggttgataaaggagtttgatcgtgagattaaagacgaagagggaagaaatcccccagaagtgaataagcagctcaatgatgaacagcaatcaatgattaaggagcctaactcatatgtggcattgagaaaaacgtacatgaataccattgggaat

SEQ ID NO: 208809 - DNA, 566 bp, Glycine max
  unsure (1)..(566): unsure at all n locations
atatgtaaggatggaggtttatttaagaagatacttaccaagggggagaaatgggagaacccaaaggatcctgatgaagttttagtcaagtatgaagcatgccttgaagatggaactcttgtggcaaaatctgatggagtggagttcacagtcaatgatggttatttttgtcctgctttgtcaaaggctgttaaaaccatgaagaagggagagaaagtgcttctgacagtgaagccacaatatggatttggtgagaagggtaagccagcacatgatgaagaaggtgcagttccaccaaatgcaacattgcagattactcttgagttagtttcttggaagactgtctcagaagtaacggaggacaagaagatcattaagaagatcctcaaggaaggggaaggatatgagcgtccaaatgagggagccattgtgaaatagaaagtaattggtaagctgcaagatggtactttgttttngaaaaagggccatgacgatgaaggagagctgtttgaattcacaactgatgaggagcaagtaattgatgggcttgacagagctgtgttgac

SEQ ID NO: 208810 - DNA, 462 bp, Glycine max
atcactcccccacttgagtaatgagtcaggatccctatccattttttacactgtggcactgtccacccctttttgggttattatttctaatttttataataacttctagccactgccacacagagtgtatttttaaaaaaaaagagcaaaaccgcaatgcatcccacgtcagcatcacgcattagttgaccaacaactgctctccacgtgtgcactgtgtgccacttgacttcccacttgctcctttctcaatccactttgagccgtcaccgtggaccccaccaccttcttccgcctcttcgtcgacgacgcactatccgacgaagaagacgacggctccggcgaatacctctttgccgtgacccgaaccggttcgggctcgcctgaattaatccggagcgggaaattcaacaaagcgcgcgagccgcgcattcggtacgcggctcggtcgtaagccagcgc

SEQ ID NO: 208811 - DNA, 439 bp, Glycine max
caataatacaactaggtggacagcattgattagaagttttaacattagtttttttacatcagaattaacaataaaatgtttttaaattgtcttttgggcaaaacgcagatgttttgaacaacaaaagaagggggattaaagaatgtacaattgaattgtcaaaggcagatgactaagcatcatctgcattacttccaccaacatgtgcttcattgccgacccaataattattattgttattgccatcaggacctgacaccttgtaccgttcaattacagattttccttccttgtacttctggcttttttcatgagcagtctcatatttccaacccacaattgatccacagcccacacagaaaatgtcagccacagtatgcatcccaggggccatctgtctgtcctcattttctccaggtgtaacattcacgaccttact

SEQ ID NO: 208812 - DNA, 559 bp, Glycine max
tttttttttttttttttttttttttttcttttttttttttcattttttttctttggggggtttttttttttttttttcttttcttttttttttttttattttacccaattcttccccccccctttccacacaaataaccaccccaccctccccccccccccaggggggaaaaaaaggggaaaaaaaaaagggggggaaaaaaaatcaaaaaaaggggcccctaaaaaaaaacggggggggggggagggggcccccccataaaaaacccccgggggccccccccggggggaaagggggcaaacaggggggccaaaaaaaacacccgggggggatccccggcccgggggggcccaaaaaaagggggggggggggggccccccagggggccaaaaggggggggggacaaaacggggggcaaaccttttcccccgaggggggggagggccaccaaaaaaaaaaccccccgcctcgggggggcaaaacaaccgcaccaccgggcaccttataaaggaggaccccggggggcccccccaccggtggaaggagcggcccccccccc

SEQ ID NO: 208813 - DNA, 513 bp, Glycine max
gatgataataagcaaacatttctctattattataaaaggggttacaaacgagtttatctgaaatttctcaagatctaaaatacatagagcacagttttttttttccaaactaaagaaaaacagcaaacttttgaatcactttcacgatgtgtagttgtacttgtacacaataataatttctaacaacataaataatgacgagtctttatgtgacaagagatatgccttgtagaattaatgcatcagctagaacttggttagcagcttgtgaaggatggacactgtcccaaaacacatactgtgtggcattagaacaagttcctggtgattttggattacacaacaaggatgttgtctttacagtcccggtaccacagcatcctctgtttgcctccacaaaaccagattttgaaggggattgaacaaggtcatagagaggcttgtaaatgtcgaaaaccgcaatcttaagaccaggaagttgcttttgagactcgttgagctgagttgagcttt

SEQ ID NO: 208814 - DNA, 540 bp, Glycine max
accagatcttcacgcaaacttctgatttgagttttactcctttagatctgcaaatgaatttctgattttcatttaaacgcttggccgaattgtggagctgccaaagcaaaacacttattattatgtgagagcaataatgggctctggaaatatactaccttcttctggcagctctgacatgtctatctccgagctccgcgagaagcaccattgggagctagaaaatctgactctgaccacacaacctctcaaaacgttgaaattcttcacattagctgttattcaatacatcaagaaaacagcaatatatctattggcaaaaggtggatgggttatgcttttcagtgttgcagttgggactcttggcatagtgctgatgacccttggttgcctccatgagaagcatcttgaggagcttcttgaatattttcgctttggactgtggtgggttgcccttggggttgcttcttcaattggtctaggatctggtttgcacacatttgtcctatatttgggtccccacatagcactgtttacaat

SEQ ID NO: 208815 - DNA, 533 bp, Glycine max
cagctctttctgttctctctttcttctccaagcgattcattcaattttcaattgggggcgatcgcattcttcttctacattctcgattccttcctttctcaacaactattatattatgcatcttcgtctccctctctcaccaaccacctagggtttctctccgacgttaggtttttttttttcgtttctcgccgggattttgggggcagacttaatctccggcagctatggcctccaacttgcagatgagccctcaggtggagcagatccacggtgaaattcgcgacaactttcgagccctcgcaaatggctttcagaagctggataagattaaagatgccaatagacatagtaatcagctggaagaactcacggacaagatgagggagtgcaaaaggttgataaaggagtttgatcgtgagattaaagacgaagagggaagaaatcctccgaagtgaataagcagctcactgaagaaaagccatcaatgatcaatgagcttacctcatatgtggcattgagaaaacggacat

SEQ ID NO: 208816 - DNA, 514 bp, Glycine max
caaattaacctgatcaggtgaatacagtaacagatgattcctatcatgttcaaccaaaattccagatggttgttgcacaatttcagcagcagcactagcatcattctttatctcagaatcaacatcaagaggttgctgcttaattttatccagagaattgttatcacccgaatcgtcttctgattttttgtcgttcaaaattgcagacttgtttttatcctctacttgttccactttaacagcttgtccacaattctgtttatcaccttcaacagaggtaccagagtccctcttttgcattgaagatgcaggaagcaaatctgctccctgagtctcattgtcatcaaacatgacatccaatcgggaaaagttttttatcaaggttgatgtcatttcaatctcaagtctcttgtcaattcttttatctgatagtggagataaaaggtctcggtttcgtttctttaatatagatggtgtacctgtgagggtttagccgcacttttttaactcgagc

SEQ ID NO: 208817 - DNA, 451 bp, Glycine max
aactgtaattatttttcagccagtgatcagaggggatttttatcataattctaagtgttttggaaacacattgtgcaccaatacagaataattaaaagggagaacttattttttttccctttttaagccttctccttagatggaactgtcccatctgtgcctgcaagcatggcatattagctcttcctagtcaaatttgtgcactcaaatcccaaagtcccttgaagaaccctttgaatgtagtttgcaactttaattgctgatttccctccactgcatgtgagctccttgggaagctggttcaagaaagtgatctcatatgttggcattggattcatgaacacaaagtacgggtacaacaacttgtgtccgttaacctcggttccgtataacacactttgctttgagttaatagcaactgggacaattctatcaactgtgttcagcaaat

SEQ ID NO: 208818 - DNA, 432 bp, Glycine max
  unsure (1)..(432): unsure at all n locations
gggagaagggaataaagaaaaaataagaagaagaaaaataaattaaataaacagagataagaaataaaataaaaacagatgaaaaaaaaaggtaataataaaataaaaagaaggggatgatcgtgaataagaaaaaaccccaggggggagaagaggaaganaaataaaaaaaaaaaaaattatagaagagagaaaaaagaaaaataaaagggggtgggaaaagaaaaatngagggggagaagaaaaaaaaataaaaaaaaaaaaaaaaaaaaaaagaaaagtataaagaaagaaaagaaaaataaaaaaaagaagaaaaaaggaaaaaaaaaagaatagaaaagtggaaaaaaagaaaaagaaaaaaaaaagagaggaaagaagaaaaaaaaaagaaaaaaatggtaagaaaatgaaaaaaaaaaaaaaaga

SEQ ID NO: 208819 - DNA, 400 bp, Glycine max
gtgggttataaaggaaacattgattagaaaccagtcaaaggggtgcccaccaacaacatcagataactaaaatctgtcactgaaatcttcagaaaaatagcggaaaaaacatctccacaagacatcacagactatattaagattattactaagtagtaatgaaaacacagattatgatgtaagcaataacaagtttgtaacaaagtacaaaatcaaattaagtagtgagaatagggggggaggtagtcatctttgccaccaagaatgccagccttggtgtctggaaagaatttaaatcctggcagctcggcgacatctatctcacttggaaccccaatggggtagcggagattgtgacctggaaggtcatgctcaagtgacttcgtttaattcagatccc

SEQ ID NO: 208820 - DNA, 462 bp, Glycine max
ggaatccaataaatgtttcaatatggaattgccaaactttaaaaagcttacaacatacaaaactgcacattattctcattctcatagtaactaaaaaatgataaggcagaaaagagagatttaaaagaataaggatttctccccctaggcatattaatcccatggactcaatgaacactcctctggggtagttggataacgttcagaatcctggcagtagtcatagatcacaaggttcctctgaacccaagcataatcctttttctgatcatcagagaggggccaagcatcatactgatcccaccaatttttggttgtggttgagacacaagcagggtatgggtcttcccattggcaaccatccacactgaagtccttgtaggatgacacaaatggggctaatttccagtttgtcttcttaagcccacctcttggggcccagtcatctgcattccatatgct

SEQ ID NO: 208821 - DNA, 437 bp, Glycine max
ccccccaaaaaagttcccgggtatttcccaatattttaccccccgggggggaatgttaggaaacccaatttgttgttcccgaagggcccaaaaagaaaatttttggcgctttttcccggcttcccccctaggggggggttaaaaatgatttggggggccccctttgggaatgtcccccttgggggggggggcccttttttccataacttggttaaaaaggggaaaagcaattgccccccttttttgaagggggggggccttcttgtattgtttttggaaaaaaatgggggccccttttgcccctgaaccaaatttttttcctttgtttttcccaaatgggcccgaggggtccggggaatttaagcgggggcccttcttctttgccccgcattgggaaggagatcccccagggggggggacggggtttttttcccctt

SEQ ID NO: 208822 - DNA, 471 bp, Glycine max
atctctgaacaagaagcaaatacattctaaatgggggcatactacatatttcatctcctatcctagtagtgttaaagcttccacgcacatttgttttcccggtataaggagacgccgggtagaaaatgatatgtccatgctactgtaggatttcaagtaatgattctttcaccagtaatccccacaagagcattttccatccttgaaatgatgaaaccttttgttatctctgacaattaattccctccctacaatcctggacatgatcttgatggcattgtgacagtcaccacagactcgaaggttcttgatgattctaagaggtgttcttggtggagtactaataagaccataggcaattgctagacgttcactgtggtagagcaaggcttgctcctttgcttcctgatcaatgtcatgaagaacatatcttgtgtcaggaacataccctgcttctttcatcccactcaa

SEQ ID NO: 208823 - DNA, 429 bp, Glycine max
gcccttataatggttggcgctttagcgcgcgacctatacccggccgtagtggcatgggccaagtcctgtttagtaggagggcgctgtggtttctgcaaaacccatgtctcgagcctcttcggagcggtcgtcgatgcatatctaggtggtatttgcatctattcaaatgagaactttgtaggccgtatagggtaaaggttccatgtaatctgcacttgcacatgggttagttgatcctacgggacggtggaagcctgtctgatatcgctctgtgcgcgtacttctaaagggaatcggtttaatatttctgaaccgggacgtggcggctgacggctgcgattgggagttctgagacgttcgcgggggccccggactgagttatcttttctgtttaacagcctgcccaccctggaaacggttcattcggat

SEQ ID NO: 208824 - DNA, 411 bp, Glycine max
  unsure (1)..(411): unsure at all n locations
ccaagttcactttggtggcagttgaacgagtttgcaaccccacacacaaaaaccaaacccttaaaaatgtcatccccctcgccggtggccacggtggtctccgccgccgcgctgtacgaccgcgccaaagccgtgaaagaattcgacgaaaccaaggtcggagtcaaaggtttgatcgattcgggaatcagaaccatcccccctttcttcgtccacccgcccgaaaccctagcggacctcaagcgcggaaccaaacccgggtccgcgccggagatccccacggtggacctcgccgccgaggagagctcccgcgccgccgtggtggagcaggtccggcgggcggcgagcaccgtgggattcttccaggtggtcaaccacggcgtnccggaggagctgctatttgcgaacgct

SEQ ID NO: 208825 - DNA, 526 bp, Glycine max
agaaaatgccgatgtcattataatggatgataacttcacgactattgtcaatgttgtcaaatggggacgtgcagtatacataaacattcaaaaatttgtgcagtttcaattgacagttaatgttgttgctctggttatcaacttcttttctgcgtgcatcactggatctgctccactcaccgctgttcagttgctttgggtcaacttgatcatggacactcttggtgcattagccctggctactgaacctcctaacgatggacttttgaaaagacccccagttgcaaggggagcaaactttatcaccaaacctatgtggaggaatatcataggtcaaagcatatatcaattaatcatcctagggattctaaattttgacgggaagaggctactcggacttagtggttcagatgcaacgaaagtgctcaacactttgatattcaactcctttgtattttgccaggtgtttaatgagataaacagcagagatattgataagataaacatattcagaggcatgtttgac

SEQ ID NO: 208826 - DNA, 232 bp, Glycine max
actcaatcagagataaactgatacatccaccaccctcatcagtggcatgagaaggtgtgggcttttcaccaatgaatccaacataatctccctgcctaattctatccaaaacataacgaagcctgttaatgatggttttattatcaggtaacccatcaatatttactctggcttacttacccacctactgaaggaggccaagagccacggatcttactctggatatggttag

SEQ ID NO: 208827 - DNA, 481 bp, Glycine max
  unsure (1)..(481): unsure at all n locations
gccgcgtgtgaatgaaccatccggacggacagccgaaattttacatgtggcgttcaaaatctgatgcaatagtagtgaaccaattgtatctgtaaacatggctgataacgaagattcggtgttcgatcctagccttctgaaaaagaagaagaagaagaagaccacagcatttgatatggatgcggctatggctgaaggttctcctgcggatgcatccgacaacactgacaaagagaacacggaacccgcatcaaacgtggataatatggacatggatgatttagaaagttttggaaaaaagaagaaaaagaagaagaaggctttcaatttggaagaattagacagtgctctaccaactgacacaacggcagacgaacccagttgaaccctgcangaagatatggttgatgatagctttgactatgatatggacttcagcanngacgaaaagaanaagaagaagaagagggcctagatgatt

SEQ ID NO: 208828 - DNA, 551 bp, Glycine max
  unsure (1)..(551): unsure at all n locations
ctaatccctcactcttgttcttcagtctcctcctattatccgccaccgtagccgccgccgaacggatcgacgatgaagacgaccttctgatccgtcaagtggtgccggatgcggaggaccaccacctgctcaacgcggagcaccacttctccgccttcaagacaaagttcggcaagacctacgccacgcaggaggagcacgaccaccgcttccgtatcttcaagaacaacttgctccgcgccaagtcacaccagaaattggatccctccgccgtccacggcgtcaccaggttctccgatctcactccggcggagtttcgccgccagttcctcggcctgaagccgctccgccttccctctgacgctcagaaggctccgatcctaccgaccaacgacctccctaccgatttcgattggcgcgaacatggagccgttactggagtaaaaaatcagggttcgtgcggatcgtgttggtccttttagcgccgtggagcgttggaggtgctcattntctttctacaggtgagctcgtgagccttagcgagcaacaac

SEQ ID NO: 208829 - DNA, 516 bp, Glycine max
gtccataatggattgagttcctcatcttataaaatgagccaaacttgttatgctttgtgctgatcacttttggagttcactttttattctcatcaagatatcatcataattccaatgtctaaacttgtgatttcactagatcattctcaaactatgcataaccattcccaagcctttcgaatttgtatagataatcattaggagttcttttatacattctgccattgaaggtctttcattactctcagtacggacacatcttgatgccagattggcaaacatgactatagactgaatggtgtaagaatttcgagccatctctggatctatcaccttacgaagcttcttgcggtcattcagtatgtgcctcacctgtagtacaaggttttgatcgttgggaccttggtttagatctacagctcgacgtccagtcaaaagctccaaaagaacaacaccaaaagcataaacatcactctgtagagtgagtttccctgtcgatgtatactcttgatcaaa

SEQ ID NO: 208830 - DNA, 545 bp, Glycine max
gtggggtggtgagcgtgccaaaatctatgagaatggaaaccttctcacactctcccttgacagagcctctggctctggctttcgttccaaaaaagagtacttgttcggaaaaattgacatgcagctcaagcttgtgcctggtaactctgctggaacagtaactgcctattatttatcttctctggggcctactcatgacgaatagactttgagtttttgggtaacttgagtggtgatccttacactctccacacgaacgtattcagccaagggaaagggaacagagaacaacagttccatctatggttcgaccccaccaaggacttccacacatactccgtccaatggaatactgcaagcatcatattctctgtggacgggaccccaataagggagttcaagaatttggagacgaaaggggttccattcccaaagagccgacccatgagaatatactctagtctttggaacgctgaggatagagccacaaggcgtgggcttgtgaaaacggattggagcatggccccattcacagactcatacag

SEQ ID NO: 208831 - DNA, 537 bp, Glycine max
cgtttctctctctggattttgttccctctgtaggtgatggcgagtacaaacacatagtggggactctgttgaaagcaacggggacaccgaacttggtggattattttccagtgttgagggtgtttgatccacaagggatcaggaggcacaccaccaactacattgacaagttgttcgatgtgttcgatcccatgattgatgaacgcatgaggaggaggggagagaagggttatgccactagccatgacatgttggatatcttgctggatatttctgaccagagtagcgagaagattcataggaagcagatcaagcatttgttccttgacctattcgttgcggggacggatacaacagcctacggcttagagagaacaatgacggaactaatgcacaatccagaagccatgagaaaagcgaagaaggagatagcagaaacaataggagtaggaaaaccggtggaggaatccgacgtggcaaggctgccatacctgcaatcagtaaaagaatctctgcgaatgcacccaccagcaccac

SEQ ID NO: 208832 - DNA, 545 bp, Glycine max
gttgaactcaagcccgactggtccaagggttacagccgtctcggtgccgcgcatcttggcctttcccaatacgatgatgctattttggcttacaaaaggggtctcgaaatcgaccctcacaacgagccccttaagtctggtttggcagatgcgcagaaggccttggccgcggcctccaggcctcgcccctcggcctctaaccccttcggtgatgctttctctgggcctgagatgtgggcccgtctcaccgcagaccccaccactagggcttacctccaacagcctgatttcgtgaagatgatgcaggatatccagagagatcctaataacctcaacttgcacttgaaggaccagagaatcatgcaggccctaggagttttgctcaacgtcaagattcaaacccctcccacgggggctgacaccgatatgccggattctccatcgccctctgcggcagcgtctgagaggaagagagctgcggaagccgagcctgctaagcagcccgagcctgaacctgagcccgagcccgtgcccatggaattgac

SEQ ID NO: 208833 - DNA, 513 bp, Glycine max
aataaaggctgcagcatcattcgctatgtgtgtgcggtgtaggttggtattatcctcctggggcttggatgaatgctacgtgtgaaggtgttgatgtttgatttgtggatgcataggatgcaataattctactgcttctaaatgaatataagtgtcgggtgtataaggggccttctactcccctcgcggtgctttcatctctagattagtactcacaccttataaaagagaaagaaaaagaaaaagagagtgatgaaagcggagatgaaggatggagctcctcaagttgtgatgaatcataatggtaaccacggcaaattctcacacctacttgcttcccaagatcgtgactatcttctctctccaactggggctcaggtgaaagtttctgatcttgaagggaaagtagtgggtctattattcgctgcgaattggtacccaccttgccgtggattcacccaagtcctagctggaatctacgaggagctaaaaagcagagtccctcaatttgag

SEQ ID NO: 208834 - DNA, 414 bp, Glycine max
accgattgctagaatggaatttcgatgctcagtcatctcttttaccattctcttctctcttgctcttgcaggagagagccatgtccatgcatcgctacctgaggaagattattgggaagctgtttggccaaacactcccattcccactgcactgcgagagcttctaaagcctctccctgcaggtgttgaaatcgatgaactccctaagcaaattgatgatacacagtacccaaaaacattcttctataaagaagaccttcatccaggcaaaacaatgaaagtacaattcaccaagcgtccctatgcacaaccttatggtgtatatacatggttaacggatattaaagacacctctaaagaaggatatagttttgaagagatatgcatcaagaaagaagcgtttgagggagaaga

SEQ ID NO: 208835 - DNA, 408 bp, Glycine max
gaccgtgaaaacactcttattacttgcaaaccgatcggggggagtcaaatacagacatacaggccataataaccatagacaagtattggttattttttttcaaagccaccatctataagccaaccacacacacctttttatatggggaaactggtgggaaatcctttgaaacacaaacctttctcacttgaacgatggagcaatgtgtatggaagctgaactggcccatgtcggcttttcaaacctggatcattgttcccctgtgggaattttccctcaatttctggccggttggttcccaaccttttgaaagctttcaatgcctttgaatccgcagtccaatttggattattcctttgggccagggagacctcatcagaagcatgccttgacaatatctctatcact

SEQ ID NO: 208836 - DNA, 454 bp, Glycine max
aagctacagcacggcactactactagcatcaccctccaccattgacgcgtcctttgcttgctccgcacgtcacttcgcgtttttctcagattcactctcgccgtcgcagatcccaaccaccatggatggttacgacgccaccgtcaggctcggcgccatcaacctcaagcacggtcgcgccgccgattttgactccgcctcccccgacgtatccgtctcctctccggtcacgcgccagaaagccgccgccgccaagcaattcatcgagaatcactacaaaaactatctccaaggattgcaggatcgcaaagacagacgcagagcgcttcagagaaaagtgcaggagtctcagatatcggctgaggagcaggaggaaatgatgaggaacttggagcgccgagaaactgagtacatgaggcttcagagacgtaaaaattgaatggatgacttcgag

SEQ ID NO: 208837 - DNA, 511 bp, Glycine max
cagatgctccacctacctagtttactcccctacggcagagcatgaaaaccaaccacgggcacattggcctgaacccattgtgcgccctcaatccttatccgaaaactgcgaacattcaatccctgaaaggtacatcaagccttatactgatagaccatccataaaaagttgtaattttgatgatgccaatattccaatcatggaccttgggggactatttggtgctgaccaacatgtctcagcctcaattcttaagcaaatcttacatgcttgcaaagaatggggctttttccaagtcactaatcatggtgtcaaccctgatttgatggacaaggtcagggaaacttggcgtgaattctttcacatgcccatggaggtgaagcagccatatgcatacttcccaaaaacctatgaaggctaccgaagcagacttggaattgagaaaggtgctttttctgattggagtgataactactttttcactaatctcccttttactcaaggactataa

SEQ ID NO: 208838 - DNA, 302 bp, Glycine max
cagcaggatgtccaacatctgcattctatgcagtagtcattgaccaagatatttcccaatgcaaagagggagttaaagtgattacttccaacataccaatgaagccttctctatttgccacagccaaaaatgtgaactatcttccaaatgtcctttcagtaatggaagctgaagagaaaggagcatcttcttctatatgggttgatgaggaaggttatattgctgaaggtccaaatgtgaatgttgctttcttaactcaagacaaggaacttgtcatgccttcttttgataacatcttacat

SEQ ID NO: 208839 - DNA, 531 bp, Glycine max
gctgaaactgcagaagcggctcgcagccagcgtcctcaagtgtggcagaggaaaggtttggcttgaccccaatgaagtcaacgaaatctccatggctaattctcgccaaaacataaggaagctggttaaggatgggtttattatcaggaagcccaccaagattcactctcgctcacgtgcccgccgaatgaaggaagccaagaggaaaggacgtcactctggatatggtaagcgtaagggtacaagggaggcaaggcttcccactaaaatcctttggatgaggagaatgcgtgtgcttagacgcttgcttcgcaaatacagggaatctaagaagattgacaagcacatgtatcatgacatgtacatgaaggtcaagggtaacgttttcaagaacaaaagagttttaatggagagcattcataagtccaaagccgagaaggcaagagagaagaccttgtccgatcaatttgaggccaaacgtgccaagaacaaggccagcagagaaagaaaaattgctcggagggaggagcg

SEQ ID NO: 208840 - DNA, 492 bp, Glycine max
cttagctcaaacctcaccttaataatctttcgtgctagctagcttaatcatattccggttccaacagaaccaaattctgctagctagctagtacgtcaaaggaaataaaataatatggcattcagcgggacccaacagaaatgcaaggcttgcgacaaaactgttcacttggtcgaaggtttatctgtcgatggggctgcttatcacaagaattgcttcagatgcagccattgcaatggccttcttgcgataagcaactactcatccaccgaaggggttttgtactgcaaggtgcactttgagcagcttttcaaggaaactggcgcctaccccaagaaataccagtcgtctggaaagccttcactcgagctgaatagagcaccaagcaaactttctgccttcttctctgggactcaagaaaaatgttcaaaatgcaagaaaacccgatatccattggaatagttgaccgtggaaggcgagttttaccataaa

SEQ ID NO: 208841 - DNA, 507 bp, Glycine max
ctcttcctcctcttcaccatagccaaagggcttcacaaccccaaatgtgatgctacccatcaacatgaccatgatggctcaaccctccaagtgttccatgtgttcagcccatgttccccatttaggccctcaaagccaatgtcatgggaagagagtgtcctaaagctacaagccaaggaccaagccaggatgcagtacctttctagcttggtggctaggaggtccattgtcccaattgcctcagggaggcaaatcacacaaagccctacttacatagtgaaggccaagattggtaccccagctcagaccctcctcttggccatggacactagcaatgatgcttcctgggtcccttgcactgcttgtgttggctgctcaacaaccactccctttgctccagctaagtccaccactttcaagaaagttggatgtggtgcttctcatgcaaacaggtacggtaccccacttgcgacggaagcgcgtgtgcattcaacttcacttatggca

SEQ ID NO: 208842 - DNA, 500 bp, Glycine max
  unsure (1)..(500): unsure at all n locations
cactccctcctcttcacacattttcttagctctctccaacaatccctctcgttcacactttcagattgtgtgaagatgggggctgggggccgaactgctgttcctcctgccaacaggaagtcagaagcttgancctttgaagcgggtacccattgaaaaacctcagtttagtctcagccagattaagaaggccattccacctcactgtttccagcgctctggtctccgctcattctcctatgttggttatgacctcaccatagccttctggctttattaaggttgccaccaattacttccacctctttccgggtcttttctctttcgtggcatggccaatctattgggctgtccagggttgcatcctaactggntgttggggtcattgcccatgagtgtggtcaccatgcattcagtgactaccagctgctngatgatattgttggccttatcctacactccggtctcctagtcccgtacttttcatggaaatacagcca

SEQ ID NO: 208843 - DNA, 569 bp, Glycine max
  unsure (1)..(569): unsure at all n locations
gaaatggagttccaagataagcgtttatctctgagatcgagcttgacgttcagcgagacgctgtgcgcagtgttcattccgttcataggaatagtcgaagctttggttttcacattcactagttgcttcgatttccaatctcccaggaataagaagaaacattcttctaccttcgacgacattctcaccctcgccgaggattctccatttagtattaatgaaatcgaggccttgcgtgagttgttcaagaagttgagtagttctatcattgatgatggcctcatccacaaggaagaactcacattggcactgttgaagaccaccaccggggagaatcttttccttgacagggtgtttgatgtctttgatgaaaaaagaaacggcgttatagaatttgaggagtttgtgcatgctctcagtatctttcatccttgtactcctctggaaaagaaaattgattttgcttttagattgtatgacttgagacagactggatatattgagagagaagaagttaggcanatggttgttgccattctgtcagaatgtggcatggatctggatgatga

SEQ ID NO: 208844 - DNA, 448 bp, Glycine max
ggcagaggaaacttagaggaggaggcaaatgtcaagcctccaaccccattgacgcttgctggagatgcaataaagactgggccaatgaccggttcaggctagccaagtgcggcaaagggttcggaagacgggccaccggcgggctcggtggtcccatctatgtcgtcaccgataattccgatgacgacatggtgaaccctaagccggggaactatccgtcacgctgtcacccaaaaaggccccttgtggatcatcttcggacacagcatgatcatcagtttgaggcaagagctgatgatttcctccgacaagaccatcgatggtcgtggcgcaaacgtgcaatttaggggcggtgctggcctcaccattcagttcgtgaacaacgttattatccacggagttcgcatcaaggacatcgtacctaaggatggtggcatgattagggact

SEQ ID NO: 208845 - DNA, 508 bp, Glycine max
  unsure (1)..(508): unsure at all n locations
gtcgagcccaaacacgtgcgacccggcattcgcgccctcctcggcaagctggaaagtgaattggaggagctcgaacggaacgtggaaccgtcgtggccaaagttggtggaaccgttggagaagatcgttgaccggttatctgtagtttggggcatgatcaatcatctaaagtctgttaaggatagttcggagctacgttctgctattgaagatgtacaggcagaaaaagttaagtttcagcttagactgggtcaaagcaaacctatttataatgcattcaaagccattcaggagtctcctgattggcagacactcagtgatgctcgaaaacgtattgttgaaagccaaataaaggaggcggttcttaatggagtttctcttgaagatgataaaagagaaagttttaacaaaattgaacaggagctggaaaagttatcacaaaagtttggggagaatgttctggatgcaacanagaagtttgaaaagctaatcacttgatagaaggaaa

SEQ ID NO: 208846 - DNA, 181 bp, Glycine max
attctgtatcaaatctcagtcttatattggctgtgtacatagggttatattattgagggactgtatttgtgttcaaattccaattccacatggtgaacataatttgattgctgttagttttccaggttatgtagactatgtgacaatgcaacattatttggattggcccaatattctggct

SEQ ID NO: 208847 - DNA, 611 bp, Glycine max
  unsure (1)..(611): unsure at all n locations
ttccaatatattccattctctctgtgtatttccctacctctcccttcaagatcttcgtcaagaccctcaccggcaagaccatcacccttgaggtggaaagctctgacaccatcgacaacgtcaaggccaagatccaggacaaggaaggaatccccccggaccagcaacgtctcattttcgccggaaagcaacttgaggacggccgtacccttgctgactacaacattcagaaggagagtactcttcacctcgtcctccgtctccgtggtggcatgcagatcttcgttaagacactcaccggcaagaccataaccctagaggttgaaagctccgacaccatcgataacgtcaaggccaagatccaggacaaggagggtatccccccggaccagcaacgtctcatcttcgccggaaagcagctcgaggacggccgcaccctcgccgactacaacatccagaaggaatcaacccttcacctcgtcctccgtctccgtggtggcatgcagatcttcgttaagaccctcaccggcaagactattaccctagaagtcgnaagctccgacaccatcgacaacgtcaaggctaagaatcaggacaaggagggaatcccc

SEQ ID NO: 208848 - DNA, 368 bp, Glycine max
ctttattttcccttcaatttggattaaggccagccatagttgtttcctctccaaaattggccaaagaggtaatgaaagacaatgaccttgagtgctgtggacgacctaaattactaggccaacagaaactaacctataatgggttagacatgggattttcctcatacgatagttattggagagaaatcagaaaaatttgtgttgtccatgtccttagctccaaacgtgtccaaagctttacctcaataagacattttgaggtcaagcagatgattaaaaaaatatctaggcatgcctcatcttcaaaggtacaatttaaatgaagtgctatattctttattaaactattggatgagaaatggtttggg

SEQ ID NO: 208849 - DNA, 443 bp, Glycine max
gtgacacagaaattaagctagagcttcatagtttcttcttcttttctcaccttccttctctcccttcagacaaagggacaaaaaatcagtgtgtgagagagagagagagaaattccaaaaccatgtcccacagtcatctaagtttcgcctttgggattctaggtaacattgcctccttcgtgtgctttctggcaccactaccaacattttatagagtttgtaagaagaaatcaaccgaagggttccaatcaattccatatgtggctgcactcttcagtgcaatgctttggatcttttatgcctatgtgaagaccggagaaacgcttcttatcaccatcaatgcattcggttgcgtgattgagacaatttaccttgccgtatttatcacttactgcccgaagaagctaggatgtcgacattgaggatgattgttttggtaaatt

SEQ ID NO: 208850 - DNA, 517 bp, Glycine max
  unsure (1)..(517): unsure at all n locations
atacgtgttgtaattagaagaattattggatatcatagataatctctttatcaagaattatatatcggaagatgcgattctagatatggaaaaaaatatgtatagaaagtattttgattggatgggaatcaatagagaaatactaaatcgttccatatcgaatccagaattttggttcttttcaaaatttgtgatattttatgacgcatataggggtaactcgcaggttataccaatcaaattactttttttttcttctaatgtaaatcaaaatgttagtgaaaataaaaagaacattactagaaagaaaaaaaatgaatctcttgaattggagttagagactcgaaatcgggcaaaagcagaataccctgatcaacgaaatcttgaatcatctatctcaaaccaagaaaaagatattgaaaacgattatgtaggatcagacagtgaaaagaatagtaagggtataaagaaaaagaaagacangaacangatggaggcagaacttaatttcttacta

SEQ ID NO: 208851 - DNA, 563 bp, Glycine max
  unsure (1)..(563): unsure at all n locations
gttcattccgctcttcgctttctttcacatccaatcaacgaaaaatgctggctgttttcgacaaatcggtggcaaagagcccagagggtcttcagagccctcactcaaattccgtctcagccctaaaagacggttttctcgcagagcacttctcttccgttcaccctggttccgtcaccgttaaccttggctcttccggtctcttggcctattctcttcacaaacagaaccccctcctcccaaggctgtttgcagtcgtggatgacattttctgtttgtttcaaggtcatcttgagaatgttgctaaccttaagcaacaatatggattgaacaaaacagcaactgaggtgatcattatcattgaagcatacaggactctaagagatcgtggtccctatcctgctgctcaggttgtgagagacttccaaggcaaatttgcatttattctgtatgacagtggttctaagactgcatttgttgctgcggatgctgatgggagtgttccctttgtctggngaactgatgctgatggaaatctcgttttctcagatgagacagagatc

SEQ ID NO: 208852 - DNA, 570 bp, Glycine max
atggaaaccatgccgggtgctagagttatgagtgacatggttttactccccaacggcgacgttttgattgttaatggagcagctgtggggactgcgggctgggaattgggccgtaacccggtgttaaacccgtttctttataaacccaacaagcgggtcgggatgagatttgaggtccagaacccgtctcatattccgaggatgtaccactccggtgccgttttgcttcgcgatgggcgagttcttctcgctgggagcaaccctcacacgtattacaatttcaccaaagtgttgtttccaacggaactgcggttagaagcgttttctccttggtatcttgagcccggattctctaacgtgcgtcccgcaatagtatctcctgcgtcccaaacaaaactcaagtacggtcagacgttgaggcttcggtttaaggtgagcgcgactttggttggggattcggtgtctgttaccatgctggcgccgccatttaacacgcactcgttcttcatgaatcagaggctgttggtgctgagcacgaccatttgagtggggttggagaatcaacgcacg

SEQ ID NO: 208853 - DNA, 241 bp, Glycine max
accgattgctaaaatggaattttgatgctcagacatcatttttaccattctcttctgggttgctcttgcaggagagagccatgtccatgcatcgctacctgaggaagattattgggaagctgtatggccaaacactcccattcccactgtactgtgagagcttctaaagcctctctctgcatgtgttgaaatctgatgaactctctaagcaaatcgttgatacacagtacctcaaaacatt

SEQ ID NO: 208854 - DNA, 474 bp, Glycine max
  unsure (1)..(474): unsure at all n locations
atataatattgcttcttggttcattctagctaattttgatggctcttccaatttgtctcaccgttattgcaattttcaccctttgttgtgtcattaattgtaacaatggcgttgaagcgtttcatgacatatacccggatcttcaatccatttcagcacgttcggtgagcaaacttcagagaactggataccattttcaacctcgtaagaattggatcaatgatccaaatgggcccatgtactacaatggaatctaccatctattttaccaatacaacccanaaggagcagtttggggcaacatagtgtggggacacgcagtatcaaaggacctcatcaattggaaagaacttgacctgccctatacccatcanaaccctttgacanatacggngtttgttccggtcagccactgtactcccgggtaagggacccgtatccttatactggagtcattgacaagcaaagcaatga

SEQ ID NO: 208855 - DNA, 552 bp, Glycine max
gacaaagaggtaaaggaagaagaacaaaaaggtggattcagggcttccatgtttatttttgtgttatcagcattggacaacatgggttttgtggcaaacatggtgagcttggttctatacttttatggggtgatgcactttgatctgtccaactctgccaacaccctgacaaactttatgggctcaactttcttgctctcactcgttggtggcttcatctcggacacttacttcaacagactaaccacatgtttgctttttggatcactcgaagttctggctttggtaatgctgacggttcaagctggtctggaccatttacacccagattattgtggcaagtcaagctgtgtcaaaggtggcatagctgtcatgttttactcatcattgtatttgttggctttgggcatgggaggagtgagaggctccttgactgcatttggtgctgaccaatttgatgaaaagaagaacccaggagaagcaaaggctcttgctagcttcttcaattggattttgctgagttcaacattgggatcaattataggggtcact

SEQ ID NO: 208856 - DNA, 434 bp, Glycine max
gaagcactgtgttcgacttcgtcaaaagcatcatgagccgctacgacagccgctccggcgacccagcttcctatcgtgatcggaggagtgattctgggctaggtgcacctacagggtttggtggctctgtacaacactcttcatcaaacaggagggattatgatgatggtgggtcaccaaagaggaacctcagtttggatggtttacctcattttgagaaaaacttgtacattgagtcaccagctgtaagggcaatgacagatgctgaagttaatgagtatcggcagcagagggaaataactgttgaagggcgagatatcccgaaacctgtcaagacctttcacgatgctggttttccagaatatgtactgcaagaatttacaaaagctggttttactgaacctacacccattcaatctcaaggttggcccatg

SEQ ID NO: 208857 - DNA, 490 bp, Glycine max
aatatcatctagctagctagctagctagcaaatagcaatgttaaaaaaccaaccacgaccagattggcctgagcccattgtccgggttcagtccttatccgaaaactgcgaacattcaatccctgaaaggtacatcaagccttctactgatagaccatccataaaaagacgtaattctgatgatgccaatattccaatcatcgaccttgggggactatttggtgctgaccaacatgtctcagcctcaatacttaagcaaatctcatatgcttgcaaagaatggggcttattgcaagtcactaatcatggcgtgaaccctgatttgatggacaaggtcagggaaactaggcgtgaattctttcacatgcccatggaggagaagcagcaatatgcaaactcgccaaaaacctatgaaggctactgaagcagacttggaattgagaaaggagctattcttgattggagtgattactactttattcactatctt

SEQ ID NO: 208858 - DNA, 527 bp, Glycine max
  unsure (1)..(527): unsure at all n locations
ctcgagccgctcgagccgcaattactactttctctctctttgtaacttgtaagcatggagtcctcaaagatctatgcttacctcttcctttgcatgctcttcctctcctccgccactcccattctcggttgtggctactgtggcaaaccccccaaaaagcacaagcctggtaaaacaccaaagacacccacagtacccgttgttaagccaccagtcacaatccctcccattgttaagccaccagtcacaatccctcccattgttaatccaccagtcacaatccctcccattgttaatccaccagtcacaatccctcccattgttaatccaccagtgacagttccacccgttgtgcttccaccaatagtgaagcccccgggttttctccctccaattcttaacccaccaagtacaccaacaccgtcgccggggaagggagggaacactccatgtccaccaccaaagtctcctgcacaggctacatgccccattgacacgctcaaactaggtgctngtgtggatcttct

SEQ ID NO: 208859 - DNA, 545 bp, Glycine max
  unsure (1)..(545): unsure at all n locations
cttagctcaaacctcacctcaataatctttcgtgctagctagcttaatcatattccaattccaacagaaccaaattctgctagctagctagtacgtcaaaggaaataaaataatatggcattcagcgggacccaacagaaatgcaaggcttgcgacaaaactgttcacttggtcgaaggtttatctgtcgatggggctgcttatcacaagaattgcttcagatgcagccattgcaatggccttcttgcgataagcaactactcatccaccgaaggggttttgtactgcaaggtgcactttgagcagcttttcaaggaaactggcgcctaccccaagaaatcccagtcgtctggaaagcctccactcgagctgaatagagcaccaagcaaactttctgccttcttctctgggactcaagagaaatgttcaaaatgcaagaaaaccgtatatccattggaaaagttgaccgtggaaggcgagttttaccatanatcatgttntaggtgtgcacatggaggatgtttcctgaccccttcacctatgct

SEQ ID NO: 208860 - DNA, 180 bp, Glycine max
attctgtatcaaatttcagtcagatattggctgtgtacatagggttatattattgatgcactgtatttgtattcaaattccaattccaaatggcgaacatatttgattgctgttagtttcccaggttatgtagactatgtgacaatgcagcattatttggatttgcccgatattctggct

SEQ ID NO: 208861 - DNA, 344 bp, Glycine max
ggagagagagaagcctggggagtataattggggagggtacgttgaactcatggagatggcgaagaagcatggcctgaaggtgcaggccgttatgtcatttcaccaatgtggcggtaacgtcggagactcttgcactattcctttacccaaatgggttgtggaggagattgataatgaccccgatcttgcatatactgatcaatggggaagaagaaactatgaatatatatcacttggatgtgatacttcgccagtgctcaagggccgaaccccagttcaatgttatgctgatttcatgcgtgctttcagagacactttcaagcacctccttggtgacaccattg

SEQ ID NO: 208862 - DNA, 474 bp, Glycine max
cccaaccactactactcactcactgcagatctcaattgcatcgctgtccatggctaccatcgttagcatcaaggcccgccagatcttcgacagtcgtggcaatccaactgtcgaggtggatttgacttgctccgatggtacttttgccagagctgctgttccaagtggtgcatccactgggatttatgaggcccttgaattgagagatggaggatctgactaccttggaaagggtgtatcaaaggctgttgacaatgtgaacaccgtcattggccctgctttgattggcaaggacccaactgagcagactgctattgacaacttaatggttcaacagcttgatggaactgttaacgaatggggttggtgcaagcaaaagctaggagcaaatgccatattggcagtgtctcttgcagtctgcaagctggtgctagcgtcctgaaaattcctctttacaagcatattgctaatatc

SEQ ID NO: 208863 - DNA, 516 bp, Glycine max
ggaagggcgcaagaacgacgaccacgtgtccctcgtgaagcactacagatccaaggtcgagaacgagctcacgcaggtctgcgccagcatcctcaacctcctcgactccaacctcgtaccctccgtcttcgccagcgagtccaaggtcttctacttgaagatgaagggcgattaccaccgctatctcgcagagtttaaggttggggatgagagaaaaaccgctgctgaggataccatgttgtcttacaaggctgcccaggacattgcttctggggatcttccccctactcaccccatcagattgggtctcgctctcaacttctccgtcttctactatgaaatcctcaaccagtctgacaaagcgtgtgccatggctaaacaggcttttgaggaagcaattgctgagctggacaccttgggagaagaatcctacaaagacagcacgctcataatgcagcttttaagagacaacctcaccctttggacttctgatgtccaggaccagctagatgagcc

SEQ ID NO: 208864 - DNA, 479 bp, Glycine max
tttggccagactcttgtggccaaagccttcagatcgctggttccggaggctttggccagactcttgtggcatgtttctttgtattccgcgatctgaaggagctcatcataaccgcgttcaacgccacggccgaagagatcgcgaaccaaatcaaaaactcgacgctctaccatgaactcgccaccgaccacatgacaaaacaggccacggacatctgcaaggaggtactaggttacgctgtcgacgacattcgccgatccgttcacacgttggaaaagttcgacctaaacaagttgaacgattacgcctatgacctcaaggtctggatcgcgggtactctagctcaccagcagacatgtttggatgggttcgagaacacgagcagcgaggctggaaagaccatggctaaggttctgaacgcgtctttggagctcagcaacacgcgttggacatagtcaacggtgtttcgagtctcttca

SEQ ID NO: 208865 - DNA, 409 bp, Glycine max
ctgcctctaaaaagaccagacttgttttcgcacggtaagcttcttggaccacaaaagggggtcctgttgtatggaccgcccggcactggaaaaaccatgcttgccaaagctattgccaaggagtcaggagcagtttttattaacgtgagaatatcgaacttgatgagcaagtggtttggggatgcccaaaagcttgttgctgctgtatttagcttggcttataagcttcagcctgccatcatattcattgatgaagtagacagttttttgggtcagcgtcgtacaacagatcacgaggctttgttaaacatgaaaactgaattcatggctctgtgggatggatttacaacagatcagaatgctcaagttatggtccttgcagcaactaatcgtccttcagaacttgatg

SEQ ID NO: 208866 - DNA, 568 bp, Glycine max
catctccctaccaactaatttaccctactacatgtatgcacgtaccaccttctttggggggggggggggggggggggggggggggggggggggggggggggggggggccccccccaggggggggatgaagatggtggggtgatttaagggaaaaaaaaaaaataaaaaaaaaataaaaacaaaacccccccaaaaaaactccaaacatatccccccctgtcataaatttacccccaaaaaaaaaacccccatataaaaaaaaaaaaaaaaaacaaacaacccccaaaaacacccaaaacatcaaaacccattcaaaaccccccaaacacaaaattatctgacccccccttttaacaaaaccaccccccccaaaagcccccaaaaattttttacccccaatttctccccccctctcaaccaaaatcacaacatttcccatttaacaccttccctaattaccccccccttcacccctccaatttttcccgcatatctaataaaaccccccctaaaaccaaaactaacccccccttaaaaaaaaaccgccccctaaaacctgaaacccccc

SEQ ID NO: 208867 - DNA, 518 bp, Glycine max
cttagaaacagcaactatgtctctcatgcagcttactagctcccctgttggctcactggtccgtttcattgtaatatttgctttatggtacagaaccatggctttggccaagttgccaccaaacgcttcatcagttccagcagttttagcgtttggagattccatcgtggacccaggcaacaacaacaacataaaaacattgatcaagtgcaacttcccaccttatggaaaggattttcagggaggaaacccaacgggtcgattttgcaatggaaaaattccttctgacttaatagttgaacaattgggtattaaggagtatttgcctgcatatttggatccgaatctcaaatctagtgatcttgttaccggcgtctgcttttgctccggtgcttcaggatacgatcctttgacacccaaaataacgtcagttctatcgttatctactcaactagacatgttcagggaatacataggaaagcttgaaggcatttgtggagagagcagaacaaactaca

SEQ ID NO: 208868 - DNA, 519 bp, Glycine max
ctcaatcccggtcagggggtcgatctgagcatagatcaaggtcacgttctcgttcacgctcaaagagcaaaaggactagtggttttgatatggctccccctgcctctgctatgttggctggtgcttctgctgttgcaggcaatgttgggctactagccccactctgctgacaattggcgtgagccgacatctgtagcttttatgtccacggaggaatcaatgcacctgtttttggtcagatcactggggctaaccctacaattcctggaatgtttccaaatatgtttccgttggctacaaatcagatgcaacaatttagtgctctccctgtcatgccagtgcaggctatgactcaacaggctactcgacatgctaggcgggtgtatgttggaggcctccctcctacagctaatgagcagtcagttgcaactttcttcagtcaagttatggctaagattggtggaaacactgctggcccaggtgatgctgtggtcaatgtttacattaatcatgacaaga

SEQ ID NO: 208869 - DNA, 479 bp, Glycine max
ctctttctttctctctctctcacagtctcacatacacattcgaatccttttaacaccgccccattattgcttgctcgttaattacggcaatgactcggctatttcgatccaagtcttgcggactggtcgagttcaacgctgctccacccagtccacttttccatgatgtgaaaagcgaggatgaatacaatgaagaagaggaagaagaagaagaagaagaagaagaagaagaagaagaattggacagtgatgatgatgatgaggatgcagacgaagatgatgatgtttcgagcaaccatgtttcaacgccgttcatgaatccagggtcaaaagggcatggctgccaatcgaaccagtttgcgatattggatattttggtggctgcgttgaagaagtcgttggtaacttgcagtgtggaaagagaggatgtttcttcgttggatattagctggccaacagaggtgcgccatgtctcgcat

SEQ ID NO: 208870 - DNA, 446 bp, Glycine max
atcccaataatttacgtactacatgttagcttgcacgtctaccttcttggggggggggggggggggggggggggggggggggggggggggggggggggggggggggggggggggggggggggggggggggggggggggggggacccctaaaacccccggtttttggggggaaacccccaaaaatttaaaatttcccttttataaaaagcgggtgcaccattaatatgcccaattggaaaattttccaaattttgaaaaaatcccaggtgttgaaaaaatttaatttaaaggtttattaaaccgggccgctaattaaaagcaactattttgggggattgggaaaagtagttattttagaaatgaaatttgtttgcccaaatggcctcggggtccttaaaatttggtaatttctggttttgcgggggataatttttaaaagccctttt

SEQ ID NO: 208871 - DNA, 477 bp, Glycine max
cttttaaaaccctcttttcttccccctccaccctaacccgattcgcttcttcacatctctcttttcactcaaaactacaaactttatttcctctccgtattctcacatttccacaacatggacgaggatttcgacatggcggcggcggagcccatgggcgaggacttcgacttcgccggcagcggcagcaaccccgtcctgaaggtcggcgaggagaaggagattgggaaagagggtttgaagaagaagctcctgaaagaaggtgaaggatgggacacccctgaagctggtgacgaagttcaagttcactatactgggacgttgcttgatggcacgaagtttgactctagcagagataggggaactcctttcagtttcacgcttggacaagggcaagttattaaaggatgggatcaaggtattataacaatgaagaaaggtgaaaatgcccttttcaccatcccagctgagctagct

SEQ ID NO: 208872 - DNA, 529 bp, Glycine max
gtttagtgttatatctccgcagtggatcaaatcaaacaaacacttccatccatcaccctggctctctgcttagggttttgatcgcatcggatcttcactctcttctccgatctcaaaatgcccgccgtttatggagctcgcttgaccaccttcgaagactccgagaaggagagtgaatacggttacgttcgcaaggtatcaggaccagtcgtcgttgcagatggcatggctggggctgctatgtatgaactcgtgcgtgttggtcatgataatctcattggtgaaattattcgtctcgaagggaattctgctaccatccaagtttatgaggaaactgctggcttgatggttaatgatccggtgttacggactcacaagcctttatccgtggagttgggacctggaatactggggaatattttcgatggaattcagaggcctttgaaaactattgctaaacgatctggtgatgtctatattcctcgtggtgtctctgttccagcactcgacaaagatacactttgggaat

SEQ ID NO: 208873 - DNA, 456 bp, Glycine max
gtggatattagagtagaagaagaagaagaagaatcccaaaaagagaaaccaactcaaacttgttttatccatgggttgatcatcccaaaaaagtttgctttgtttgggtaaatgacccttaaccctgtttgtgaataataatagagttaggaggttccgatgacggtcgatttggacaacgcttccaccgcttcaggtgaagcagccagtgtctcttcctccggcaatcagacaaaacccgccgctccaaagaaaaaacgaaacctcccgggcatgccagatccggaggcagaggtgatcgctctgtcgcccaagactctcttagcgacgaaccgtttcgtgtgcgagatatgcaacaaaggattccagagagaccagaatctgcagctccaccgccggggtcacaacctgccgtggaagctgcggcagaggtctagcaggaggtcagaagagagt

SEQ ID NO: 208874 - DNA, 435 bp, Glycine max
  unsure (1)..(435): unsure at all n locations
ctcacaaatcagctgttctcaatcagtttcaacagctccaaagtatgttatcacctataaatactaatttgctgtctcctaagaatgttgagcatcctctttttcaggcttcttttggtgtctctccttctggaaggatgtcaccaagaagtgttgaaccaatctctccaatgagtgctcgtttatctgcatttgctcagcgagagaaacagcagcaacagctgcgcagtgttagttcaagagaccttggtgccaacagtcctgcctcacttgttggctcccctgcaaacccttggtcaaagtggnggttctcctattgggaaagctgattgctcagtaaatggagactcccttggtcgtcagatgcgaagatcatcctcgtttgagcgcaagaacaatggggaagagcctgatctctcttgggtccaatctctg

SEQ ID NO: 208875 - DNA, 496 bp, Glycine max
tggagttagttctaaacagcacaacaattggagttggagttgtttctctgatcctcctcttgtacttgtttttgcgtggtggttcatggaagagtggggaagagggtcctccaacagttgcaggtgcatggccaataattggtcacctcccattgttgcttggttcaaagacacctcataaaacattgggtgacttggctgacaagtatggacccatattctcgatcaagattggtgccaaaaacgcagtggttgttagcaactgggaaatggctaaagaatgctacaccacaaacgacatcgccgtttcctccctccccgatcttatctccgctaacctcttgtgctacaaccgatccatgatagtcgtagcaccctacggtccctattggcgccaacttcgaaagattttaatgtctgagttcctatctccttcccgagtagagcaactacaccatgttcgcgtctctgaagttcaaagttccatcacggagct

SEQ ID NO: 208876 - DNA, 500 bp, Glycine max
aaaacagattacatatagtttaaaaataaaaaatacagacagcaggttcacacaactaacacataattaaatattagatactttcataacaactaggagataggcgtggtttaataagaatctcaagtggagtggctttagtgttggttgctctaaagacttcagtcatatcaagaggctcagttgatggatttaagatttcaaaggaatgcaaaaaactagcaagtgtcaaacgaactgtttgaaggcctaagtttattccaggacaaatcctcctaccacctccaaatggtaatagctgaaaatgttgacccttcatgtctatatctttatcagtcgtaaggaacctttctggtttaaactctaatggatttgaccaaacgttatgatctgtgtggatcttggaaagatttgtaattagacgagttccctttttgacagtgtagccacctatagtgcaatcctcttcaaactcacgaggtcttgagagaggagctgga

SEQ ID NO: 208877 - DNA, 450 bp, Glycine max
cttcacgttcgatctttcgcttctgaatctccaacgatggtgctcgaggcgactatgatctgtattgacaattcggaatggatgcgtaacggggattactctccttctcgatttcaagcccaaacagacgccgtcaatcttatttgcggtgctaaaacccagtctaatccagaaaatacggtgggagttctcacgatggcggggaagggcgttcgtgttttggtgacccctaccagtgatctgggcaagatcttagcttgcatgcatggactagaaataggcggtgagatgaatctagctgctggcattcaggttgcacaattggctcttaagcatcggcagaacaagaagcagcagcaaaggattattgtctttgctggaggtcctgttaagcatgagaagaaaatgttggagatgattgggagaaaattgaaaaaagatagtgtagct

SEQ ID NO: 208878 - DNA, 543 bp, Glycine max
ctacgagcaatttaacctactacatgtctagcactaccaccttcttgggggggggggggggggggggggggggggggggggggggggggggggggggggggggcccggcggggggggggggggggggggggggggggggggcgggggaaaaaaaaaaaactttaaaaacccctttaaataaccccccccaaaaaaattaaagagactatgacccgccatcaaattttaaaaaacccataaaaaacaacaaaacaaaaaaaaaaccccccagagaccaccccccagggaaataaaataaaacccccctaaacccccaaaattttttccccaaaccttataacaatcccaatttctttttaagcttttagccccaatttaaaaaaaatttccccggggccctttcccccccttgagccctaaattccaaaccccccccgggtttttcccaccttgggggcacttttaaaaacccccccacccaatttttacccccaaaggggcttcccccatataaagccccccaaaaatccccgcaaaaatttt

SEQ ID NO: 208879 - DNA, 491 bp, Glycine max
ggaatgggataggatctatgattatgatgtctacaatgacttgggcgatccagataagggtgaaaagtatgcacgccccgttcttggaggttctgccttaccttaccctcgcagaggaagaaccggaagaggaaaaactagaaaagatcccaacagtgagaagcccagtgattttgattaccttccgagagatgaagcatttggtcactcgaagtcatcacatcttctcgtttatggaatcaaatcagtggctcaagacatcttgcccgtgttgactgaggcgtacgatggcaatctttcgagcctagagttcgataactttgctgaagcgcgcagactctatgaaggtggagttacactacctacaaacttttttagcaagatcgcccctataccagtggtcaaggaaatttttcgaactgatggagaacagttcctgaagtatccaccacctaaagtgatgcaggtggataagtctgcatggatgactg

SEQ ID NO: 208880 - DNA, 504 bp, Glycine max
aaaggggtcacttttcagatccgagattgagctcctttacccatcatcatcatggagctcctcgggtacctgaatcagggtcacccttctagaggaacaacacttgttattactctttcattggtgctttcgacacttgtgtccttctccactttcacacatgccttctcttcttctgcgtttccggaactgaatcctataaaacctaggcactcacgtcttctcaggagtgccgtgcaacatgaaactcctacatcacagctttctgaaatatggtcacctctggaaagccaaggatggaaaccttatgttgaatcaaataagccaacattaccagagaagtccgagggatatatccaggtctttcttgatggaggtttgaaccaacaaaggatggggatatgtgatgcagttgctgtggcaaagatactgaatgctactctggtgattccataccttgaattaaatcctgtatggcgagattcaagctccttcatggatata

SEQ ID NO: 208881 - DNA, 593 bp, Glycine max
  unsure (1)..(593): unsure at all n locations
cgtcaatcttggagatcatgctcattatctgagcaatggaaggttcaagaatgctgatcaccaagcggtggtgaactcaaaccatagccgtttgtccatagccacttttcaaaacccagcaccaaatgcaactgtttaccctctgaagataagagaaggagagaagcctgtgatggaggaaccaatcacttttgctgaaatgtacaggaggaagatgagcaaggacattgagattgcaaggatgaagaagctggctaaggaaaagcatttgcaggaccttgagaatgaaaagcatttgcaagaacttgatcagaaggcaaaacttgaggccaagcctttgaaggagattcttgcttaattaataataattacatatgtatcatttgcatgcccccttggtgtttttagtattttttaagggccatgaattaataatagtccttacctttgtgcttttgtacgtcttatgatttatcctttgtggggatatcatgtgtngtgttcagtgcctatgtcttattagctagcttgctcatctatgtataccttataattgcctctattataatgaaaataagtggcactgtcttatt

SEQ ID NO: 208882 - DNA, 350 bp, Glycine max
ccatgatttcccaagaattcctggaaacaagcttcacaaggtgaaggagattgctccagagttttatgataatttagcgtcctacagatcttggagccagatcatttacatgtacattatggatcgaacagttggaccttttagccgaatgaagagaaaatccagtaaagccgaatagatgttcccatacacatcattcatccccacctttccctcttgtgatgtctcctactttgataatttttgtgcaagtgaagaatggaatgtagtttttgacccaaatagcaagtcatttgttcattagccaacattttgtataaaatatcttggatttggggcttcctccttct

SEQ ID NO: 208883 - DNA, 572 bp, Glycine max
  unsure (1)..(572): unsure at all n locations
ggaagcaatcacgagcttcattcccaaagaagagtacttggagggctacacaggttctacaactaattcatgcagatatttgttggtgttttcagggtttaaatacgctttaccagcagagtatggtatatggtttgccaacaatgaaaacaccaacaaaactgtgccaggacttcttggtagggaagcaatcacgagcttcattcccaaagaagagtacttggagggctacacaggttctacaactaattcatgcagatatttgtggaccaatcacacctatctccaacagcaaaaagaggtatctgctcacctttattgatgatttcagtagaaaaacttggatttatttcttgacagaaaaatcagaagctcttcctgtctttaagacatttaaaattcttggtgagaaagaagctgactcattaatcagaagtttgcgcactgatcgtggngggagagtttacatcacatgatttcaccaatttttgctgtgancatggtattcgtaggcaactgacagctgcatacacaccacaacagaaacggattgcagaaacggaaaatagaac

SEQ ID NO: 208884 - DNA, 380 bp, Glycine max
cagagaggagttatgatggctcggttgatcacagtggtgtggtgcggggtcatggtgctactgtgcgccgcggtggccgcgttgtgggtggaggatgcggcgaacccgatacgaatggtggccgatgtggaggcggaagtggttcgcacgatatggcagtgccggcgcgcgctgaagtttgctaggttcatgagcaggttcgggaatagttaccgtatcgaggaatagatgagggagaggtactagatattctcgcagaacctcaggatcatccgcttccacaacaagaaccgtttgccctacactctattctgttaatcattttgctgattggacttgggaggagttcaatagacaccgactttgcgctgtccaaaatt

SEQ ID NO: 208885 - DNA, 475 bp, Glycine max
  unsure (1)..(475): unsure at all n locations
caatatattccattctctctgtgtatttccctacctctcccttcaagatgcagatcttcgtcaagaccctcaccggcaagaccatcacccttgaggtggaaagctctgacaccatcgacaacgtcaaggccaagatccaggacaaggaaggaatccccccggaccagcaacgtctcattttcgccggaaagcaacttgaggacggccgtacccttgctgactacaacattcagaaggagagtactcttcacctcgtcctccgtctccgtggtggcatgcagatcttcgttaagacactcaccggcaagaccataaccctagaggttgaaagctccgacaccatcgataacgtcaaggccaagatccaggacaaggagggtatccccccggaccagcaacgtctcatcttcgccggaaagcagctcgaggacgggcgcaccctcgccgactacaacatncagaaggaatcaaccct

SEQ ID NO: 208886 - DNA, 466 bp, Glycine max
  unsure (1)..(466): unsure at all n locations
taaaaatattcattcaagctgaccctgcttgagcctaaaaggattttcttgtcaagagtcaagtataatttgaactagtcaattattattccaacttttgtatttgtgtaatggagtcttctaactagcttgttgatttataattctttttttacttatctgcataatcaaagtccaaatatgtaagttttaaattatttttttatttattcttcataaaaaaattatttaatttttttccttaaaataataatttatttaatttataaaaaaaatataagctatattaaaatatttaaaacttattaaaaaatataagttctaaatatgcaactcctttaaatatttagaagaaaaactttatgattcataatgattttatttcacttaaataaaagtatctcctataaaaaaatatatttgatctctacaaaaagatatttgattaataattacanttaagaga

SEQ ID NO: 208887 - DNA, 465 bp, Glycine max
  unsure (1)..(465): unsure at all n locations
ggactagttctagatcgcgatctagaactagctgttctcttctcttctcatcatttttattttttccaatcaaaccaaacaaaacataagcaccgctcttttctctccgaaatccccatctcccttcacttctgagctctggacgagatcccagatctcaccatctttcacgcactcttccatcagattcaccctttcgtttaacgcaaactcataacttgaaggttaatggctgctccaccggcaagggctcgtgccgattacgattatctcataaagcttctcttgatcggtgacagcggtgttgggaaaagttgcctccttctgcgtttctccgatggttctttcaccactagtttcatcacaactataggcattgattntaagataagaaccattgagctngatggcnaacggatcaagctccaaatttgggatactgcagggcaagagcggtttcggaca

SEQ ID NO: 208888 - DNA, 549 bp, Glycine max
  unsure (1)..(549): unsure at all n locations
taaagttagaataatattccctacaattagcagaaaaaatggttcagcaagaaatccgaaggggtccctggacagaacaggaggactacaaattggtgtattttgttggcatgttcggagatcgtagatgggactttatagcaaaggtatcaggtttgaaggtggagggagactgtaaataaaataggtatgaatatttggacatgctaagttatactatgaagcaccctttaaccacctcactttgttgtaggtttgaatagaacaggtaagagttgcagattacggtgggttaattacctccaccccgatctcaaacgagggaagctcacaccccaagaacaacacctcgtcatggaccttcattccaaatggggaaataggtttgagaaccatgcagaaattaaactataagctagctacctgctgatcatcactcatatttttaattactcttttcctaccctatatatagnactattaattagntcttncgcttatttaatttttattatttgtgaaaatctaatacagcgctcaatcaatcaa

SEQ ID NO: 208889 - DNA, 473 bp, Glycine max
taaagttagaataatattttcttcaattagcagaaaaaatggctcagcacgaaatccgaaggggtccctggacagaacatgaggactacaaattggtgtattttgttggcatgttcggagatcgtagatgggactttatagcaaaggtatcatagtttgaaggtggagggagactgtaaatgacataagtatgaatatttggacatgctaagttatactatgaagcaccctttaaccacctcactttgttgtaggtttgaatagaacaggtttgagtcgcagattacggagggttaattacctacaccccgatctcatacgagggaagctcacaccccaagaacgacacctcgatatggaccttcattccatatggggaaataggtttgagaaccatgcataaatgtagctataagctcgctgcctgctgatcatcactcatatatggaattgctcttttcctacactatata

SEQ ID NO: 208890 - DNA, 490 bp, Glycine max
  unsure (1)..(490): unsure at all n locations
gttggcagcttcactaactttggcagctgctagaaggatagttgaggcagatgagttcatgagagcaggattatatgatggatggctacctcatctatttgttggaaacttgctcaaggggcaaacagttggtgtaattggagctggtcgaattggatctgcttatgcaagaatgatggttgaagggttcaagatgaacctaatttattatgatctctaccagtccacacgactagaaaagtttgtcacagcctatgccgcattcttgaaagcaaatggtgaaaccccagtgacttggaaaagggcagcaaccatggatgaggtcctccaggaggcagatataattagtcttcatcctgtcttggataaaaccacttatcatctagtcaacaaggaaagactagctcagatgaagaaggaagcaattcttataaattgcagtagagggcctgttattgatgaagctgcactcgtggagcatntaaacata

SEQ ID NO: 208891 - DNA, 498 bp, Glycine max
  unsure (1)..(498): unsure at all n locations
gagacatggttttcagatccagatgtctgtagggaattagagttgtggtacacactttcaaagactttggctgaggatgctgcctggaaatttgtaaatgaaaacagcattgacatgatttctattaacccaactatggtggcaggacctctcttacaaccagagattaatgaaagtgttgagccaattttaaacctaataaatggtaaaccatttccaaataaatcttttggatgggtcgatgtgaaagatgttgctaatgctcatattctggcctatgaaattgcttcagctagtggaagatattgtttggttgagagagtcatacactactctgaacttgctacgattntacgtggtctgtaccccacattacaaattccagataagtgtgaggtagatgagccgtatattccaacataccagatttccacagaaaaggcaaaaaaggacttgggaatagagtttactcctttgggagtgagtctcanggagact

SEQ ID NO: 208892 - DNA, 512 bp, Glycine max
atcttgccaacagatttaccgctactacacgtgtagcactaccaccttcttgggggggggggggggggggggggggggggggggggggggggggggggggggggggggggggggggggggggggggggggggggggggggttttcaaaaggcctttccccaaaaggataagaaaaaccccataaacctggaaggctttttaacaccgtaccaaagggggattttagggatttgggaaagggtcccttgggaaaaaaaaagcccaattcccccccaaatttaaggggggattccccaaaacgtttggggcaaccttctttgggggtagccttttaaagccaatcccccccaaaatattctttgggggggggggcccaaaaattttcccggaaacccctaaaaggggggggtttaaaaccgggttaaacgggtttccaaatgtagggttaaccccccaaatggggggtttaaacttgggggcctttgggtcccccaaaatcccctgccccccaa

SEQ ID NO: 208893 - DNA, 498 bp, Glycine max
gagacatggttttcagatccagatgtctgtagggaattagagttgcggtacacactgtcagagactttggctgaggatgctgcctggaaatgtgaaaatgaaaacagcattgacatgatttctattaacccaactatggtggcaggacctctcttacaaccagagattaatgaatgtgttgagccaattttaaacctaataaatggtaaaccatttccaaatgaatcttttggatgggtcgatgggaaagatgttgctaatgctcatattctggcctatgaaattgctccagctagcggaagatattggttggttgagagagtcatacactactctgaacttgctacgattgtacgtggtctgtaccccacattacaaattgcagataagtgtgaggtagatgagccgtatattccaacataccagatttgcacagaacatgctaaataggacttgggaataaagaatactcctttggtagtgagtctcacggagact

SEQ ID NO: 208894 - DNA, 477 bp, Glycine max
tctatttgcatctcataacagagagctgagaaaggaagaaaaaagcgtgtgtcagagatacttaacaatggttgtagaagatacccaaaagtcagtcatcacggaggaccaataccctagcagggtcgtcagcgacaacaacaacgacgacgacgacgatgatctcgaagagggtgagatccccgtcgacggcgaagatagcggcgccaccgccacaacgaagcctccggccgccctcgcccgaaacccccaccctctggagaattcctggaccttctggttcgacaacccttcctccaagtccaaacaagccgcatggggcagctccatccgacccatctacactttcgccaccgttgaagagttttggagcatttacaataacattcaccacccgagcaagttgggtttgggggcggactttcactgcttcaagcacaagattgagccaaagtgggaggaccctatctgcgccat

SEQ ID NO: 208895 - DNA, 550 bp, Glycine max
agcatcgcctttctgcgactcgtcaactatacaatagctatgacagtcgcctacgctcagtacgtcagctgccgatcttgcttcgagatcccctcacttttgccgtgtcatctatatcacattgccactcaaggggattttggagtattggtgcaccattcatcttactacatcttaatattacgcataactcgaactctccataccttaaattttaactaccagctaggtccgacacagactaagcaatggcaacgaccgagttagaggtgactgttgagagcaagaacaaagacctcaagcacctggggtttgtgaggattgctgctattcaaacatttgtgattgtgtcaaatctgtatgagttcgcaaagcagaattctgggcctttgagatccgtcgtatgaacggctgagaacactgtaaccaccattctcggtcctgtctgcaacacattcaaggacgtccctgatgatgttcctgtttttgttgacacaaggtggatgaagcgttccacaagttcaatgagcacgctccttcttttgcttaa

SEQ ID NO: 208896 - DNA, 519 bp, Glycine max
  unsure (1)..(519): unsure at all n locations
gagcaactagagaatgttcgtgtctccgaagttcaaagttcgatcaaagagctcttcaatgtttggtcaagcaacaagaataatgagtctggctatgcgttgctggagctgaagcaatggttttctcaattgacatacaacatggttcttcgaatggtcgtcggaaagcgacttttcggtgctagaactatggatgatgagaaagctcagagatgtgtgaaggctgtgaaggagttcatgcgtctgatgggggtgttcacggtggcagatgctattcctttcttgagatggtttgattttggtggctatgagaaggccatgaaggaaactgccaaggatttggatgagatttttggtgagtggttagaggagcacaaacaaaatagggcttttggtgagaacaacgttgatggaattcaagacttcgtggacgtcatgctntccttgtttgatggaaaaacaatttatggcatagatgcggataccatcatcaaatccaatttacttgacataatttca

SEQ ID NO: 208897 - DNA, 443 bp, Glycine max
tgacaattgataatggtgtttttgaggttcttgctacaaatggagatactcatcttggaggtgaggactttgatcagagaataatggagtacttcattaaattgatcaagaaaaagcatggaaaggatattagcaaggacagtagagcacttggcaagctgaggagagaggctgagcgtgcaaagagagctctcagcagccagcaccaggtccgtgtggaaattgaatcactttttgatggtgttgatttttctgagccactcacccgagctcggtttgaggagttgaacaatgacttgttccggaagaccatgggtccagtgaagaaggctatggaagatgctggattacagaagagtcagattgatgagattgttcttgttggtggaagcacaaggattccaaaggtacaacaacttttgaaggactactttgatggaaag

SEQ ID NO: 208898 - DNA, 487 bp, Glycine max
cgttctaacaattctcattcaagtttcacctttcgccggaaaaagaaaaactcatcgccaacgctgaacctctccgtttctcctcctccgtcgaccgctccgccagctttccccagcggaactccgtccgcgccgtcgcggaggaggcggtggagacacggcggccggcagccagcctctacgatgtgttgcgagtcgagcgagacgcatctccgacggagatcaagtcggcgtaccggagcctcgcgaagctcttacatcccgacgcggcggtgcggcgttcgccagagacagacggaggcggcggttacgtcgacggagacttcattcagctccgaaacgcgtacgagacgctgtcggatccgtcggcgaaggcgatatacgatatgacgctggcggcgccgcacggcggaagacaccgccggttttctactccacttattcggaaccactcgtcggcgtttacacaacgcgaagggggaaacag

SEQ ID NO: 208899 - DNA, 516 bp, Glycine max
  unsure (1)..(516): unsure at all n locations
atcatagttgacattgatggagttgcaagatttgccagaaggatgcattgcaaaaatactgtcatacaccactcctgtggatgtatgcaggctctccttagtttccaaagcctttcgttctgcagctgaatcagacactgtgtgggattgttttctcctttccgatttcacctctatcattcctatttcctctacctctaagaaggatctctatttcactctctcagaccatcccaccatcatccaccagggtagaaaaagtgttcaattggacaaaaggaccggaaagaagtgttgcatgctttccgctagaaatctgaccattatatggggtgatactgttcaacattgggagtggacaagcctgccagagtccaggttccaagaagttgctatgcttcaggctgtgtgctggtttgacattagtgggagcataaatactcttaccttgtcctcaaatactcattatgcaactnttcttgtgttcaagatgatcaatgccagtggatttcacta

SEQ ID NO: 208900 - DNA, 454 bp, Glycine max
  unsure (1)..(454): unsure at all n locations
tggacgctggcggaaagatcaagaagggcgccggaggtagaaagggcggcggcccaaagaagaagccggtttcaaggtccgtcaaagccggtctccaattccccgtcggaagaattggccgttatttgaagaaaggaaggtacgctcagcgtgtcggtaccggtgctcccgtatacttggctgcagttctcgaatacctagctgccgaggtgcttgagttggctgggaatgccgcacgtgacaacaagaagaacaggattattccaagacacgtgcttttggcagtgaggaacgatgaagagttggggaaattgcttgctggagtgacaattgcacatggtggcgtgcttccaaacatcaaccctgttttgttgcctaagaagactgagagggcttncaaggaacctaaatctccatccaaggctaccaaatctcctaagaaagcttagattac

SEQ ID NO: 208901 - DNA, 424 bp, Glycine max
gattgaaaacaagggggtttccacttttcattaacgaagcaaacttactcctacaagcaacaaattgggacaagaattacagggttttcgaaacccataaaatatcctgttacaccaaaagcacctaaacaccgatttacaacactaaattaaatatggaaaataaaaaagtaatctaagctttcttaggagatttggtagccttggatggagatttaggttccttggaagccctttcagtcttcttaggcaacaaaacagggttgatgtttggaagcacgccaccatgtgcaattgtcactccagcaagcaatttccccaacttttcatcgttcctcactgccaaaagcacgtgtcttggaataatcctgttcttcttgttgtcacgtgcggcattcccagccaactcaagcacctcggcagc

SEQ ID NO: 208902 - DNA, 505 bp, Glycine max
  unsure (1)..(505): unsure at all n locations
ctcattcaataaaagaagcctgcatgctattggaagtacacctaacccttacgagaaggccatctctattattggcaagacattggctccctttgatgatgataacttgattccatgttttggatttggtgatgctactacccatgatcaagaagtgtttagctttcacagtgatcattcaccttgccatggctttgaggaagttttggcctgctaccagaaaatagttccaaacttgaaactttcaggaccaacttcttatgccccggtgattgaggctgctatagacattgtggagaaaaatcgtggccaattccatgtgttggttatagttgctgatggccaggttacaagaagtgtcgacacaagtgatggagaactcagtcctcaagaagaaaaaacaattaaagcagtagttgatgcaagcgcatatccgcttgcgatagttctggttggagttggtgacgggccttgngaagacatgagaaaatttgatgacaagata

SEQ ID NO: 208903 - DNA, 474 bp, Glycine max
ctagcttgccaactaaccgtactacatcgttagtactaccaccttcttgggggggggggggggggggggggggggggggggggggggggggggggggggggggggggggggggggggggggggggggggggggggggggaaaattttacccaaaaaaaaaaaaaaaatttttaccccccccaaaaaccgcccctttaaaattttaataaaccccccgaccaaaaaaccgggttatgggttttcagaagtaaaaggaaacccaaaaacccttttgggggaattttaaaacccgaaaaccttaaattttttttccccaaaaccccttaagggggaaagggaaaacccttttaacccaaaattccaaaaattcccaaattttgggaataatcccccaaaaaaaaagtttatttttaaaaaccccccgcggttaaaaccccttcccggaaaatttaaatggggggatttaaagggggg

SEQ ID NO: 208904 - DNA, 346 bp, Glycine max
ggaaatcgctgtgttaacggcgttttgaacgtcgttttcgtttgtgacatcgcaatggacataggaagcggattccaagtgtttgcaaagagagagacccaaatcgtcttgaatatcagctatcacaacgtgtgctccatgcttagagaagagtcttgcagtggcctcacctataccgctagcaccaccactgataagagccactttcccttcaagccttataaatatttgggtatgacatgttaggttagcaagaagacagctgtcacagttctataattttatctaagacaattggtatttgttaacgtatataatcctttattttagtatgaatgcattagat

SEQ ID NO: 208905 - DNA, 482 bp, Glycine max
caaaactataataatgggttcttcttctcctccggacactagcaagagcataaagctagagcgatacaacagctacatcaggagactcaacagcaccaaactcctcaacgcctcctccaaactcctcttccgtgccactatcttagtcgcactcatcctcgtcttcctcttcaccttcaactaccctcccctcgccccagacttcacctcccaccgccacctccactcccactcccacttcctctcctcctcctcctccttcgcctcctgggagaagcaggtccgccactcctccacccctcgccgccccaacggcctcaccgtcctcgtcaccggcgccgctggcttcgtcggcagccactgctcccttgccctcaaaaaacgcggcgacggcgttctcgggctcgacaacttcaacagctactacgatccctccctgaaacgctcccgtcaggcaatgctctggaaacaccaggttttca

SEQ ID NO: 208906 - DNA, 515 bp, Glycine max
ctcaatcccggtcagggggtcgatttttgcatacatcaaggtcacgttctcgttcacgggggaagatcaaaaggactagtggttttgatatggctccccctgcctctgctatgttggctggtgcttctgctgttgcaggcaatgttgggctactagccccactctgctgacaattggcgtgagccgacatctgtagcttttatgtccacggaggaatcaatgcacctgtttttggtcagatcactggggctaaccctacaattcctggaatgtttccaaatatgtttccgttggctacaaatcagatgcaacaatttagtgctctccctgtcatgccagtgcaggctatgactcaacaggctactcgacatgctaggcgggtgtatgttggaagcctccctcctacagctaatgagcaggcaggggcaactctcttcagtcaagttatggctcagattggtggagacactgctggcccaggtgatgctgtggtcaatgtgtacattaatcatgac

SEQ ID NO: 208907 - DNA, 305 bp, Glycine max
gggaagacgaaggactaaagcaccagctggatgcacttcccccttcttcacataatgctgcacgtaacataaagatctttaccattttattatgatacaaaatagataatgttctgtatcaaatttcagtcagacattggctctgtacatagggttatattatcgatgcactgtatttgtattcaaattccaaatggcgaacatatttgattgctgttagttttcaaggttctgtagattatgtgacaatgcagcagcaatatttggatttgtcccatattcacatgctattttaatttgcttaa

SEQ ID NO: 208908 - DNA, 464 bp, Glycine max
  unsure (1)..(464): unsure at all n locations
caggcatagcatgctacactcgcgggcctttcctgcctagtgtttcttccaagcactctccaccctccatctctccatcttttggcttgaggagtctgaaatcgagctctttatttggagaatctctaagagtggcatccaaatcaacactaaaggtttcaaagacaaagaatacttcactcgtgaccagatgtgaaattggtgacagtctggaagaattcctcacaaaagcaacaccagataaggggttgatcaggttgttggtgtccatgggagaagcattaagaacaatttccttcaaagtgaagacggcttcttgtggtggaacacaatgtgttaatacttttggggacgagcagcttgcagtggatttgctagctaatcagcttctttntgaggccttaaattactctcatttctgcangtatgctngctctgaagaaaatcctgagctcctggacatg

SEQ ID NO: 208909 - DNA, 522 bp, Glycine max
ctgccagcaatttaccgctctacatgtgtagtagtaccaccttcttgggggggggggggggggggggggggggggggggggggggggggggggggggggggggggggggggggggggggggggggggggggggccccctaaaacccaaaggggaaaaaaccccaaaaagaaaaacccttttgcaatccccaaggggcgggaaatttttaactggcggttccaaacaatttttagacgccccccaaaaaaaatcccttaataaggaaccccccaaaaagggaaaaaaatggttttttaggcccccgggctaaatttaattgaataaatacccgcccttaaaaaagggtttgggggggccaaaaattccccccccgaaaaaattccaaggaaaggggggcctgcggcccaaactggcaatttttgaaggccccaaaatttttggggccaaatttggggagggcgggcctttttaaaagccggggcggcccttgcttttaaaggaccccccaattgggtttgggg

SEQ ID NO: 208910 - DNA, 494 bp, Glycine max
ctcgagccgtctctctctctgagctcgtcgaattcgaaatctgatctccaacgattgatctcggtagaggctagtgcactctccaatctgcaaaaatgcctctcagactcgaaatcaagcgcaagcttgcgcaaagatcagagagagtgaaatgtgtggatctgcatccaacagagccatggattctggcgagtttatactctggaactgtctgcatctggaactaccaatctcagaccatggccaaatcttttgaggttaccgagttaccagttagatcggccaagtttattgcacgcaaacagtgggttgttgctggagcagatgatatgtttattcgtgtatataattacaacacaatggataaagtcaaagtatttgaagcacatactgattacattaggtgtgtggcagttcatcctacccttccttatgtgctttcatcatctgatgatatgctcataaagctctgggatcgggaaaaggctggatct

SEQ ID NO: 208911 - DNA, 469 bp, Glycine max
gcctgcaccagcattgttagatgtggcttccattgctgcagacaagattttgttgctagattcatattttagtgtggttatttttcatgggatgacaatagctcaatggcgcaacttgggataccagaaccaacaagaacaccaggcatttgcacaactattacgagctccgcatgacgatgcccaaatgataattagagaacggttcccggtgcctagattggtagtgtgtgaccaacatggttcccaggctagattcttattagcaaaactgaatccctcagcaacgtataataatgcacatgaaatggctgctggttcagatgtaatctttactgatgatgtgagccttcaagttttctttgagcatctgcaaaggttggctgtccaatcatgaggacagataatagtagagattgacattctatgggttctggactttgggtttgggaattcaccaatgatgtgt

SEQ ID NO: 208912 - DNA, 500 bp, Glycine max
tgaactcctccaccaacacctcgaattctcagtcaatggctgcagcagccagtgatgggtctgggaagaaggtaagaaaaccttacaccataaccaagtccagggagagttggactgaggaagagcacgacaagtttctcgaagctcttcaattatttgacagggactggaagaaaattgaagattttgtaggttcaaaaacagttattcagattcgaagccatgctcagaagtacttcttgaaagttcaaaagaatgggacagtggcacatgtgcctcctccccgtccaaagcgcaaagctgctcatccttacccacaaaaggcatcaaaaaatgttttggtgccactaccagcttctgttggttatgcttcatcaagaaatacgcttgcacctgggtttgcctcatgggatgaaacttccctgctgatgaatgccggagctgataaacccatgacctgtcaggatgaactcaacaatgttcatcatggaaatgaagct

SEQ ID NO: 208913 - DNA, 419 bp, Glycine max
gtcatggcagcaacattgatggcagcaacaacaagttctggtactcttaaagcaactcctttccttggccaaggcaagggtgccaatgccaatgctcttagggatgttgtctccatgggaactgggaagtacaccatgggcaatgatttgtggtatggaccagacagagtgaaatacttgggacccttctcagctcagaccccttcatacttgaaaggagaattccctggggattatggatgggacactgctggcttatctgctgacccagaagcatttgccaagaacagggctcttgaggtgatccatgggcgatgggccatgcttggagcactaggatgcatcaccccagaggtgctagaaaagtggttgagagtggacttaaggagccagtgtggttcaaagctggagcccaaata

SEQ ID NO: 208914 - DNA, 449 bp, Glycine max
  unsure (1)..(449): unsure at all n locations
gtgagttttgtttatttgaaattaacaagtagcaaagatgtttggaatcatcggaggaaacaagggtcacaagataaaggggaacttggtgattatgcgaaagaatgtgttggatatcaacagcattaccagtgttaagggtgtcatcggaaccggcattaacatcattggaggagtcgtcgacaccgttactgctttggcgtcccacatctccatccagctcattagtgccaccaaggctgatggacatgggaaaggaaaagttggaaaggctacaaatttaagaggacaagtgtcgttaccaaccttgggagctggcgaagatgcatacgatgttcattttgaatgggacagtgacttcggaattcccggtgcattntacattaagaacttcatgcaagttgagttctatctcaagtctgtaactgtcgaagacatttcaaaccacg

SEQ ID NO: 208915 - DNA, 474 bp, Glycine max
caagtttataaatatacatgacgttccttgttaatttcatgaagaaaataatacgtgcatacatagctatctatttatctatagcaagtgcgtcaagagacacgtggtaccctagctagagtgccattctgtggtttctttctttctttctttctgcatcacatcacaatttgcattgcctcgtgtcctttttcttctttgctctccaaaaatctcacacacacaggtatctagcaaatgggttctcaccaacaagaaccatggctattggagaatgggaaaccaagggttttgaccaaggagaccaggcatggccgttctgcacacagaatgtcctccacctctttgcgcaagaaatctagccgaactcttgtctcaaaggttccatgtgccactctcagaaactttctttcaaatttgcaagaggttattcttggcaccaagctttccattctcatccctgctattccagct

SEQ ID NO: 208916 - DNA, 412 bp, Glycine max
tgaaaagaagtatatcctgttttcggaactaaccgacgacatccctcgcaacattttctacaaactcgacgacgatcctcgccactgggctcgcttagcctgtgtctgcaccaaattctctttcctcgctagggaatttctgttggaagaccaaatgctccctcaccatcccccaagacctcctctccgacgacgcctccgacccccctctctccctccacaaactctccttctgctgccccggcctccgccacgccggcctcctgttcgacaccttcgatttcagcctcgaacgcgacctcggccccggcaacttcaacgtcatcaccgatgattctccttcgaacaccactccaccaccaccaccaccaccaccacaacaacaacaacaacaaccttctcaatccgatga

SEQ ID NO: 208917 - DNA, 554 bp, Glycine max
  unsure (1)..(554): unsure at all n locations
ggttgatttgacagcttatgtggagaaacatgagttttgttttgatgctgttcttgacgagaatgttaccaatgatgaagtaaggttgctccttatcaaagattgaatttttatgctgtttcttatttaaattaaattaaccttttttcttcagtagttatgacgccaatatttggcttgtttgttgttgttggtatttatgaaagtgattgcttgcctttgtcttggtcttgactcttgagttgttaatctaaggcatggttgctgctttgcaataacaggtatatcgagttactgtagaaccaattattcctacaatttttgagaaaactaaagctacttgttttgcttatggtcagacaggtaagcaaattattcttccttgttcatatcataattgtaccaaacattatgaataagcactatccaatttactttccaaaccttnttctttattcaatataatattctctatgtatgactntntatctgtgtgtgtgtgtgtaactagttgtgaatggttctntgaagtgttagtagctgagcataatggc

SEQ ID NO: 208918 - DNA, 474 bp, Glycine max
ggcggaataaaaaataatttacacttaaatccaatttgcaagggcattaaggtggacacaatatcacacgagggacaaatatacatttgagtaaatttaatttgaatacccaacaaaagatccttttttttttttaataaaatgaacaaaagcctttaaaactatattgctaacaaacacggagatattacatcaagaacatacacatcatcactgaacaagagaaatggagcctctcaacggggcactctttttctacttagtatctcttgttcttttagtcgatgttggaatcttgcaaggcgtgcttggagactaacgagactagctgctttgcgagaaagcacgaaactcaactgggttacgtagttgtcaataagacttcctggctggtccacttctgccagtagtttcatttcttcacgaacaatctccattgtgtcttcaatttcctttctatgagcagcaattagt

SEQ ID NO: 208919 - DNA, 449 bp, Glycine max
cttggtttatactataggtctcgcccattacctactctccgttcccaagagcacgcaccaggactattgcacttcttcctcgttctccctctttttcttcttcttcgctaaacccttttttctatctcactaacacaacaatgggagacgagaagaagggcaagcctgctgcttccggctgtgtggtccaccatcaagcctttcgtcaatggtggagcctccggcatgctcgccacctgcgtcattcaacccatcgatatgatcaaggtgaggattcaacttgcgcaaggatcagctgcgcaggtcacttccaccatgcttaagaatgacggttttgctgccttctataagggtctatctgctggattactcaagcaggctacatacaccactgcccgtcttgggtcatttaaaattcttgacggccaaagctattgatgctaaatgat

SEQ ID NO: 208920 - DNA, 504 bp, Glycine max
  unsure (1)..(504): unsure at all n locations
gaggtactcttattgatacggatggcagcaccattggcatgtgttgttgggagtggtttatccatacagagtaataaaattggcaaggacgtcaatggaagatatctcttctcatatcataggctttcagtactgagtaaggagtcaaagacaatatgcataaaggcttccttggatcaaaggaagcatgaaggtagaagaggatttctgaaattgttgaatgtgggagttggcttacctgtattattaggaggtgggaaagcttatgctgatgaacaaggaccttcctcctccagaatgtcttattctagatttcttgagtatttggataagggtagagttaaaaaagtggatctgtttgagaatggaaccacggctgttgtggaggctgtttctcctgagttgggtaatagggtgcagcgagtgcctgttcaacttcctggacttagccaagagcttcttcagaaattcagggaaaagaacattgattntgcagctcataat

SEQ ID NO: 208921 - DNA, 486 bp, Glycine max
  unsure (1)..(486): unsure at all n locations
cttttatttcactccatgatcatcactcacacatcaaacactactactagctccttgtatgagtgtcattccttctagctaaatctctctcttttggggtatggaattcaacaagttcagaatcagaagctatgaggggcaatctgatagggctcaagtggaagatcttgagagaagatgcgaggtagggccatcagaaagcgtgtttctcttcacagacactatgggtgaccccatttgtaggatccggaacagtcccatgtacatgatgctggtggcagagttggacaatgaattggttggtgtcattcaagggtctataaaagtggtcacagttcatggtcaccctccaaaggatttgcaaaggtggggtacgtccttggcctaagggtatcacctcagcacaggagaaaagggattggctcaagccttgtgagaaccactagagaatggttcacttcanaagatgtggactatgcatacatg

SEQ ID NO: 208922 - DNA, 484 bp, Glycine max
gtgagatcatgcatgctttaaacctctcttgggtctacaaaaagagctcttgttggtggggttttggttgttaattcatggaacttgttaatttgccccttcatttttcaacgcctttatgcaccacaagtcctccgggcatgagagccatttccaatgtgggatatggtggttgagctcatctcttcctccaacttcagtcacaatgatcctgcaattactctcatgcttggactcagtacccatgttgtgcacaaattggtacaaggccctaactatcttccctgaaaatggcccttcatggtgcaccccatacatgaaatagaacccaaatgggttgaagaaatcacgtatggatggcaatttcaaacatgggaagatcctatgaactaaccaccaacttttagagcataccaagcaagaaaaaggtgctttccctagccttaacttgaatatcttcccactattgcatacactaagcata

SEQ ID NO: 208923 - DNA, 451 bp, Glycine max
  unsure (1)..(451): unsure at all n locations
catccattcattgtcttaatgttagcaatgtcttcctctttctccatccatttcttcctcctcctctcaatagcccttttctcagtttgttgcttagcagcatctcaagctcccaccaccaaatcacacccctatatccttcccattaagaaagaccccgcaacaaatttgtactacacttcagttggcattggaactcctaggcacaactttgatttagtcattgatctttctggtgaaaacttatggtccgatggtgacactcattacaactaatcatcctacagacctatagcttgtggctcaaagcaatgccccgaaattggatgtgtgggttgcaatggccccttcaaaccaggttgcacaaacaatacatgccctgctaatgtaatcaaccaattagccaaattcatttacagtggtggcttangtgaggatttcatattcattc

SEQ ID NO: 208924 - DNA, 507 bp, Glycine max
  unsure (1)..(507): unsure at all n locations
cacaacaacactctgaaactaacaacaacaataaaagaccatgtcggtgaaggagtgcgagcaccacaaggggaagaagaggaagatcttccggcaagtgttctggtgcttagtggtgttccttttcatcgtgctggtcacaattcttttgatatgggcaatccttagacccaccaaacccaccttcacgctccaagacgtcaccgtctacgccttcaacgccaccgtggcgaacttcctcacttcgaattttcaggtcacgctcatctcgcgtaacccgaacgaccgcatcggtgtttactatgatcgcctcgaaaccttcgtgacctaccggagccagcaggtcacgtaccgaaccgncatccctccgacatatcaaggccataaagagatcaatgtttggtctccgtttgtttatggcaccaacatccccgtcgcgccgttcaatttcctcggcctcagccaggaccagagtaacggtaacgtcctcgtcaccatccgagccga

SEQ ID NO: 208925 - DNA, 547 bp, Glycine max
  unsure (1)..(547): unsure at all n locations
tttctttcatatactaccagtcacatttcttatacagaaaagcagtgtctgcagcacccaaacgaaacgacagtgaccaaaacagcaaaacgacattacagagagagagcgacgatgccggaagaaacgacgtcgatcgactacgtgatggaggcggcatctgggccccacttctccggcctgagacttgacggccgtatgccgtcctccgccaccgccgccgncgcgtcctcctctgccgattctaccctaacccccgatttcctccccaatcaacccttcgtcataggtgtttcgggaggtactgcctcgggaaaaaccaccgtctgcgacatgataattcagcaacttcacgatcaccgcgttgttctcgtcaatcaggactcgttttatcgcgggttgaatcctgaagagttggaacgcgttcacgagtacaatttcgaccaccctgatgcttttgacacggagcagtttgtagagtgcacgatgaagcttatcagtggcncaggcggtgcatgttccatttacgactttcagaagcaccaac

SEQ ID NO: 208926 - DNA, 407 bp, Glycine max
cacaaatggcaaaagatgaatcatgatagacaactatggaagttaggaacactgccgcctggtcttataacattctggaaacgcactttccaactgcaccgatcttggcatgtgttgggtcttggctataaccccaatatcaaccaaaaagaaattgaacgggctgctgttatacactacaatggaaacatgaaaccgtggctggagataagtattcccaagttccgaggttattggacaaagtatgttgactacaatcttgtgtatttacgagaatgcaacatcaatccatagaaggatctggtggcatgtgtagggcatgaaatttatttaaagcttttatgattattttttatacattttcctccctgtatggaaaaagatcccaagccaaaatcaagagtatg

SEQ ID NO: 208927 - DNA, 518 bp, Glycine max
  unsure (1)..(518): unsure at all n locations
ctcaaactctcggactcaaacacacagcacgacgaaacctagcagcctcacgccctcatcgcagcagggacctagccgtcgccggagacgcactgagtctgagagcagcggtgactaaatcaggtttgtcaaagaggaaaaggagagttacgattcaggtttgaagcactaaatcaatcaaaattgtagcaatgggtgagagcaagaaacgaaagagacacagaaacaaacgtggtggtaaggaggagcaaccggttcttccttctccttgtgctaagcgcacaaagctgaaggaaccctcnttctttcttcanaagatgcgagcaaggttgtctggtgggcatttcaggatgattaatgaaaagctctacacttgcactggggaggaggcgctagattatttcaaggaagaaccttcgctatttgatgtgtatcatacaggatacaaaacacanatgtcaaattggccagaacagccagtaatggaattataagtggctgaaaaacagagcctttct

SEQ ID NO: 208928 - DNA, 517 bp, Glycine max
ttcttggacgaggaagaacatggtcctgtcgttgaccatcccatctggtacatccgcaccaccggtctccaacaagcagtcatcaccgccatcaccgtctgcaattacaaaaaagacgaaggcttgatcgaaggtacagaatgttcagtttgcctcagcgagtttcaagaggacgaaagtctcaggcttttaccaaagtgtaaccacgcttttcacttaccttgcattgacacgtggcttagatcgcacaccaattgccccatgtgtcgtgctcctattgtcactgacccaacaagggttccttcttccatggaccctactgcgtttgaaacaagttcttttgtggaggagatttttgaaaatagtgcggagaatactcaaaatagtagtgatgatttgttgaggggtgaggaagaggaaagagtgcaagaagatgagcgtgtgaagagaacttggcttctgaacttgtggtgactgtgcagcagccgagaagatcggtgtctctggattcttcttc

SEQ ID NO: 208929 - DNA, 555 bp, Glycine max
aacaattaaggtgaatccaaagttatcacagcatgtgaattctgagtcgaagcaagtgctagaagataataaagtttctagaaatgaggatcaggttcttagttctgaaaacgaaaccaaaggcaccgaacatcttgcatttcatcaagttccttctgttgaacaaaatcagaatctagcatctaaacttccagacctcaatttggctgaggtttctaccagggagtctgataatgatactaaggtccaatcccagacttttcctttaactggaaacacaggccaagatgtttctcaagattttcccccagaagctaaatccagacctactcagggtgacattctgattgatatcgaggacaggtttccccgtgatttcctttatgacatgttctccaaagcaataatttctgaagattcctcaagcattggtccattaccaacagatagagcaggtttgagcttaaatatggacaatcatgagcctaaacgttggtcatattttcagaacttggctctaaaggggtttgataatgtatctctaatgatcaggat

SEQ ID NO: 208930 - DNA, 462 bp, Glycine max
cgtccaaaattcactttggaaatagcattaagtccaaatgttaatttgcacagcctatttatgtggtttttcacatgcacacatatacatattcacaatcaaatacaaaaagagcaggggccagaaaactacaatacaaacaactattgttggcccttgtataacaataatatatatcttttttggagcataattgaatgaaccgtgtgtggcaatcagatcaaatccgctggttttcatttagatgccttgtggccctgtcctttgatctgactagcggctgcagacatcacacgcaagcggcgagcaatttcggcaaaggatggccttactgctggattaggtgcccaacactgctccattagtgttttccactcaagatcacaataactagggattgtaggtcttaatgtgttattcacaatgcctcctatgattgcgccatagtgcatattagcatat

SEQ ID NO: 208931 - DNA, 423 bp, Glycine max
caagttttcccctacgcggaacaaaatggggatgggaactagcacctttgttacggagatggatcaactttctcaccatgcttttggccattgttgtgataatatttggagtgtggatgaacactcattatgatggttgcctaaagtctctcactgtgcctgtaataggcctcggagcagttattttcttaatatctgttgttggctttttgggtgccctgaaaaacaactccatactattatggatttatctgatcacgttgttctttgtcttggtgggaattctggtcttaacagtattggagttcatcgtgactatcaatggatcgggtcataatgttactggactgaggtataaggaataccaacttcaagaatttagttctttgttcttaaagagtaaacaattcttgaactgggaaa

SEQ ID NO: 208932 - DNA, 543 bp, Glycine max
ggactatccttatgcttctgatgggctagagatatgggatgctatcaagtcttgggtggaagaatatgtctcattctactacaagtcagatgaggaacttcaaaaagaccccgagccccaagcttggtggaaagaacttgtagaggtgggtcatggggatttgaaggataagccatggtggcaaaagatgcaaactcgtgaagagttggttgaagcttccgctaccctcatatggattgcttcagctcttcatgctgctgttaactttggacagtatccatatggaggtttaatcctgaataggccaactattagcaggagattcatgcctgagaaagggtctcctgaatatgatgcgttagctaagaaccctgagaaggagtttttgaagactattactggcaagaaagagaccctcattgaccttacaattatagaaattatatcaaggcacgcatctgatgagttctacctcgggcagagagatgcggtgactactgggactctgattgccggccattagaggcctttaagaggttggaa

SEQ ID NO: 208933 - DNA, 496 bp, Glycine max
agcagttgtagatggagcacgacgaatttgaagagccacctcttgctgttcagattcaagggaatgatgaatccgtttctcagcaatcttcttctgttggggtcactctcatcaccggttatcttggatcgggcaagtccactctagtgaatcatattttgaattcgcaacatgggaagaggattgctgtcattttaaatgagtttggtgaggaaattggcgtcgaaagagcgatgatcaatgaaggagataagggtgcattggttgaagaatgggttgagcttgccaatgcgtgtatatgttgcacagtcaagcatagtttggttcaagcacttgaacaacttgttcagagaaaggaaaggcttgaccatatattgctggaaaccactggattggcaaaccagctcctttggcatctgtctatggttggatgaacagttggaatcagaagtgaagctcgattctatagtcacggcggtggatgcttaaaatttgc

SEQ ID NO: 208934 - DNA, 534 bp, Glycine max
  unsure (1)..(534): unsure at all n locations
atgaaaatgggttcttctttgtggactttgtgtctaattttggcttcactagcctcttctgcattctgtgcctttccacggaggccagtggatgttccattcggcagaaactacgttcccacttgggcttttgatcacattaaatacttcaatggaggttctgagattcaacttcatcttgacaagtacactggtactggcttccagtccaaagggtcatacttgtttggtcacttcagcatgaacataaagatggttcctggcgattcagctggcacagtcactgctttttatttatcttctcaaaatgcggagcacgatgagatagattntgagttcttggggaacagaacaggacaaccttacattttgcaaacaaatgtgttcaccggaggcaagggtgacagagagcaaagaatctttctctggtttgatccaacataagcataccacagatactctgtgctgtggaacatgtatcanattgtgttcctagtggataacatcccaataggggtgtctaaaacctaaagg

SEQ ID NO: 208935 - DNA, 471 bp, Glycine max
  unsure (1)..(471): unsure at all n locations
gcccaccactaatttggtggtaggtggcagagttggacaatgaattggttggtgtcattcaagggtctataaaagtggtcacagttcatggtcaccctccaaaggatttggcaaaggtggggtacgtccttggcctaagggtatcacctcagcacaggagaaaagggattggctcaagccttgtgagaacactagaagaatggttcacttcaaaagatgtggactatgcatacatggcaacagagaaagacaaccatgcctcagtgagtctcttcatggacaagtttggctacaccaagttcaggactccagctattcttgtcaaccctgtgaaccatcattgctttcaaatatcacccaacattgagatagcaaggttgaagattgaccaagctgagtacctctatagaagattcatggggtccacagaggtcttccctaatgacatanggaatatacttaggaacaagc

SEQ ID NO: 208936 - DNA, 496 bp, Glycine max
  unsure (1)..(496): unsure at all n locations
gttaaactgtcgccattgtctccaaagattttagtgtatattgattggtctcagaagcttctggagaagtatgatactcatccacttgagactttgcctgaagttctaaaatatggacctgtaaccaagaaagctcgtactgaacctctctccttgtacacctgcttggaagcttttctgcgtgaagaacctctggtgcccgaagatatgtggtactgtcctaaatgcaaagagagacgacaagcaagcaagaagcttgatttgtggagactcccagaggttttggtcattcatttgaagaggttttcctacagcaggtcaatgaagcataaactggagacttttgttaactttcccattcatgattntgatttaaccaattacatagccaacaaaaacaacactcggcgtcaactgtacgaactgtatgcccttacanatcattatggcagtatgggtagcgggcattacacttgacatattaaagctttagatg

SEQ ID NO: 208937 - DNA, 498 bp, Glycine max
ttgatccgtgagaacttaaactcagactcctaaaatagtttgatcactttcgcattgacctgtaaccttttctctccggttaccaaaaccgtaagttgctgaacatggacccgcaatcgccggttcgggcggaactggagcctccggttccgacgttctccccacggttcgcgctcacatccagttcgcagcggaaaatcgcgatcgcggtcgatctgagcgacgagagtgcctacgcggtacgctgggcggtgcagaactacctgcgaccgggcgacgccgtgatcctcctgcacgtgcgtcccacgagcgtcctctacggcgcggactggggctccgtggatctgagcgcggcggaggacggcggcgacgaggagtcgcggcggaagctggaggacgacttcgacaacttcacggcgacgaaggcgagcgacctggcgcagccgctggtggaggcgcagataccgttcaagatctacattgtgaaggaccacgaca

SEQ ID NO: 208938 - DNA, 570 bp, Glycine max
gaaaatgtaattgagtcactgtttgcagaaaaaggatggtttatttaacatatgcacattcatagtcatttcattcttgagtgatgacaagataaaaatatagatgacgtccaagggtgccaccggtgcagaaaacagccaaagcattaaatacggtgtaatttacatcacattttgtcaaaatcttttttctacatttgttgagcaaatggttggtaggacttgttgtatatataaatttagagcatttgtatataagaatgatgataaaaacttaaaaacattcattctcctttgaaagttgagaaaggagaattgaggaaatggcaggagggtctttcacaacaggcactgtgagcaaggagagggcagagcagtacaaggggagagtcactgcttatgtcatcatctcttgcattgatgctgccacaggaggggctctctatggctatgatattggaatttcaggtggggttacatccatggatgactttcttatagagtgcttcccctcagtatacagacagaaaaagcatgcccatgaaaacaactaactgaagtatgacaatc

SEQ ID NO: 208939 - DNA, 586 bp, Glycine max
  unsure (1)..(586): unsure at all n locations
gtgaaagaaagaaaaaaacaccatgatcctaatctactacctctcggagcacccggctatcgtgggcttccggtggagccacgcccaatcatggggagccacctggtccttcctcttcacctcaatcgcctcctacctcttcctctcaatcctcctccacctctctctttctctcctcttccgccgccgtcaaatccctcttggcccattccccgccgtccacagcctctccgcgacacgcggtggttctggccgcgctccaaaacccccttacagtggctcctctgcttccccctcggcacgcgcccctcggggcgcgtgttcttctggtcctacgtctactacctctcccacttcctccacatgttccgcactctcctcacaatcgtacgccaccgcaggctatccttttttcatctgcttagccactcaatctccgccttcgcctcctttctctggctcgagttctcgcagtccttccaggtaatgagtataaacatctactagaatatatntgatgatattctatactcanagattaatttgtattctcatggtatgacttattcatcattatcaggttcta

SEQ ID NO: 208940 - DNA, 570 bp, Glycine max
  unsure (1)..(570): unsure at all n locations
aagacgataacaaatggcatcatctcagtcgaggaagagagttgacgccgtcgattctcgcgctgcttccgttctcgttcgcgccaaagatggcagtgcttttgctcgttgcgacgattgcaagaagaatgtgccggttgcactcatcgacatgcacagttgcagccttgaagctaaaattaaaatgaacctagacgctcaagttgtggaacaggctgctgaagctaagaagccggagaggaagaagcccaaatctaaagagcctatggcaaaaaaagctaaagttgggaaggggaagaaagtcaaggatcctaacatgcctaagcgtcctcccacagctttctttgtcttcttggatgattttagaaaatctttcaaagaagctaatcctgattctaaggatgttaaaagggttggtaaagaggctggtgaaaagtggaggtctatgactgatgaagagaagaagccatatcttgacaaagtngctgagcttaaggaagagtacgagaaagctatggaaagctatgaagctggtcaagatgaagaagatcaactgtgtctgataaggaa

SEQ ID NO: 208941 - DNA, 528 bp, Glycine max
  unsure (1)..(528): unsure at all n locations
gtttacgtgaagtcacagaaatcaaaagcctacttcaagaggtatcaagtcaagttcaagagaagaagagagggaaaaaccgattaccgtgccaggattcggttgattaatcaggacaagaacaaatataacaccccgaaatatcgctttgttgttcgtttcagcaacaaagacattgttgcacaaataatatctgctagcattgctggcgatattgttcttgctgcagcatatgcacatgagctgccacgatatggtcttgaagtagggcttacaaattatgctgcagcttattgtactggtctcctgttggcccgaagagtcctcaaaacacttgaaatggatgaggagtacgaaggaaatgttgaggctactggagaggactattcagtggaacctgctgagagcaggaggccattccgtgctctccttgatgttggtcttattaggactacaactggcaaccgtgtctntggtgcccttaagggagctctggatggggggttggatattcctcatagtgaccag

SEQ ID NO: 208942 - DNA, 416 bp, Glycine max
cgttaaactaaacaacttcctgatagaaacaaagcgtatatcataaaataaggtaagacatcaattcatgttgacacgaaattgaccaaaaatacggcttactcaacttcaaaaagtatccaaaattttggacctagaaaataaacagcacatgtaaataaaatgattgactgaacgcaaaataagagagttttagttgtgcaacgatgacatggaatctgcaatgaactttcactcatcatcttcatcattatcagcagcagagttgatagccgccacacgagcaatcaacttagccttcctctcctcataagtgagtttcttcagattgtacctcttgagttccttcgggggctgcttctcagatttcttgagagaaggatcagcacggatggcagcatgaaccttcttgtaca

SEQ ID NO: 208943 - DNA, 540 bp, Glycine max
acgaaaacgacttcggctggggcagacccgttgcgattcggagtgggaaagcgaacaagttcgacggaaagatctccgcgtttccggggagagagggaaacggcagcgtcgatttggaggtcgttttggccccggcgaccatggcggggctcgaaaacgacatggagtttatgcaatacgtaacgcaattcgtttgaataagtttgttcatgaagtttcggcacagtagtagtgatagtgaaactgggaggagggagggagtgaaaaaaaaattataagtcggtgatgaaacgacggggaaggtgggtggggtgattgcacgacaatagtaccatggggtgtgggcgtcgttttgtgtcagtcaaaggtcaaaccgttcgggagtggggtctcttttttaggctgtgtttgagtgtttcggtggttggcccaaatgatataatggtttttctgtacgtgattcccgggagggttttcagtcttcacttttcaggtgacccaatacaggacgaaataataatatggatgatgatgatgatg

SEQ ID NO: 208944 - DNA, 375 bp, Glycine max
ttatcgtttgttctttcttttttttttaatcagcctatggcggcttcaacatacttaactgttgtttaccaaagctcaaagctcgtcatcatcagcaaccagtaggatcatgaaagacctgtcttcgggaacaggcatagcgctgacggatcaacatgaccggtgtaaccgacagtagagccggtggatcattcgggccataccaccgcgacattgagacagagtctataatagagacccgattctgctaacgaagaaccgttggctgacacaaaacgacggatcacatatccagtggctatgggcgagcatcatgtcagatgttactgccggtgtaacatacacgacatgatcatacctggcaccgtgatcttt

SEQ ID NO: 208945 - DNA, 430 bp, Glycine max
ctcggaattcggctcgagccgagaagctctccgctctcaaatccgccgtcgccggattgaacgaaatcagtgagagtgagaagaacggattcatcagcctcgtcagccgctatctcagtggcgaagcgcagcatgtggaatggagcaagatccagacgcctacggacgaagtggttgtgccttacgacactttggcgccaactcctgatggttcttcggacgtgaagaatctattggacaagcttgtggtgttgaagctaaatggaggcttgggcacaactatgggttgcactggtcctaaatctgtaattgaagttcgtgatgggttgacatttctagatttaattgcgatccagattgagaatctcaatttcaaatatggaagcaatgttcctttggctctgatgaattcattcaccactcatgatga

SEQ ID NO: 208946 - DNA, 498 bp, Glycine max
ctcttttctcttctccctttttctctctgtctctctctctcggtctcgctcttcttctcatcaagcacagagttacagactcaccgatcttccgattctctttcgtcttggtttatgagctcgaaggagagacccactcttggtggcacgcggattaagacccgcaaacgaaatattgctgcgccgctggaccctgcagcattctcggatgcagtggtccagatttatttggataatgctggtgatctggaacttattgctaagagtattgaatcttcagaccttaacttttcaagatacggtgacaccttttttgaggttgctttcactgggggtcgtacacaacctggaactaccaagcctgatgagggggaccggcacccatactctataatagagtgtgagcctaagcgtgaagtcattttaccatctggaatctacatacaaaagattttgcggcgaaggccatttctcatcaagaaccttgaaaatgttatg

SEQ ID NO: 208947 - DNA, 509 bp, Glycine max
gaagacgcttttgtttctagggacattcatctcttacagatatgtagtgggattgatgagaatgctgtgggggcttgttcagagctcgtatttgctccaattgatgaaatgttccctgatgatgctccattggttccttctggtttccgcattatcccattagattcaaaaccaggtgacaaaaaggatgctgttgctacaaatcggaccctggatttgacatctggttttgaagttggtcctgcaacaactgctggtgcagatgcatcatcaagtcaaaacactcgatcggtgttgactattgccttccagttcccttttgacagcagtctgcaagacaacgtcgcggtcatggcacgccaatatgtccgcagtgtgatttcctccgtgcagagggttgccatggctaatatctccatctggtataaacccatcaattggagctaaactttctcctggttctccagaggctgttacactagctcactggatctgccaaagtatagtta

SEQ ID NO: 208948 - DNA, 543 bp, Glycine max
ctttcacgagggcatttggtagtgctatgttttttttctgctttcgtatgacaagtgtataattctcctgaatacccagcagaagctatcaacaaaagccacaccatgtctggacccctgtctccaaagacatctcttgaaaagagtgaccgtgttggttcattgaagaaaatgctgaggaattctctaacaaggagtaagaggcgaagcagcagcaaggtcatgtcggttgaaatcgaggatatccgcgatgctgaagagtccaaagctgttgatgagttccgtcaagctcttgtcttggacgagctactccctgagaagcacgatgactatcacatgttgcttagattcttgaaggccaggaaatttgaccttgagaaatctaagcaaatgtggtctgacatgcttcaatggaggaaggaatttggtgctgacaccatcactgaggattttgaattcaaggaactcgatgaagtcctgcaatattatcctcaaggacatcatggagttgataaagatggactgaccaattacattgagaga

SEQ ID NO: 208949 - DNA, 519 bp, Glycine max
  unsure (1)..(519): unsure at all n locations
gaaacagtgtgatgaaaatgaaggtccttgttttcttcgttgctacaattttggtagcatggcaatgccatgcgtacgatatgttccctctccgaatgaacactggctatggtgcccgtactccggaggtgaaatgcgcaagttggaggcttgctgtggaagcacacaacatctttggctttgagaccattcctgaagagtgcgttgaagcaacaaaggaatacatccatggcgaacaatatagatcagactccaaaacagttaaccaacaagcttacttttatgccagagacctcgaagtccatcccaaggacacatttgtgttcagtatagatggcaccgtactctctaatattccatactacaaaaaacatggatatggggtggagaaatttaactcgaccttgtatgatgaatgggttaacaagggcaatgcaccggcactgcccgagactcttaagaattacaacangctggtgtctcttggcttcaagattatattctggtcaggaagaacac

SEQ ID NO: 208950 - DNA, 493 bp, Glycine max
  unsure (1)..(493): unsure at all n locations
atacagaccaacctttgcaaatccaaatccctggattatccacaattacagccgatgattttccaaacgaatgcaaagaccccttgagttacgcttgccaagtcttccttcagatagcggaaaccatgatgggtggtgccgggattatagtaaacacatttgaagccattgaagaagaagccatcagagcgttaagtgaggatgcgacagtaccaccacccttgttttgtgtcggacccgtgatttctgcaccgtatggagaagaagacaaagggtgtctgagttggctaaacttgcaaccgagtcagagcgtcgtgttgctgtgtttcggaagcatggnaaggttctcgagggctcagttgaaggagatagcttttgggttggagaagagtgacaaaggttcttgtgggttgtgaagaccgagttgggtggtgctgatgactcggcggaggaactgagtctggacgagttgctgccagagggttttttgaga

SEQ ID NO: 208951 - DNA, 535 bp, Glycine max
  unsure (1)..(535): unsure at all n locations
ctcaccctcctcttcacacattttctgtgcgctctaacaaacattctcgttcacactttcagattgtgtgaagatgggggcgggtggccgaactgatgttcctcctgccaacaggaagtcagaggttgaccctttgaagcgggtgccatttgaaaaacctccatttagtctcagccaaatcaagaaggtcattccacctcactgtttccagcgttctgttttccgctcattctcctatgttgtttacgacctcaccatagccttctgcctctattatgttgccacccattacttccacctccttcccagccctctctctttcttggcatggccaatctactgngctgtccaaggttgcatccttcctggagtttgggtcattgcctatgagtgtggccaccatgcattcagtgactaccagttgcttgatgatattgttggccttgtccttcactccggtctcctagtcccatacttttcatggaaatacagccatcgncgtcaccacttcaacactggttctcttgagcgggat

SEQ ID NO: 208952 - DNA, 482 bp, Glycine max
  unsure (1)..(482): unsure at all n locations
ctcaccctcctcttcacacattttctgtgcgctctaacaaacattctcgttcacactttcagattgtgtgaagatgggggcgggtggccgaactgatgttcctcctgccaacaggaagtcagaggttgaccctttgaagcgggtgccatttgaaaaacctccatttagtctcagccaaatcaagaaggtcattccacctcactgtttccagcgttctgttttccgctcattctcctatgttgtttacgacctcaccatagccttctgcctctattatgttgccacccattacttccacctccttcccagccctctctctttcttggcatggccaatctactgggctgtccaaggttgcatccttactggagtttgggtcattgcccatgagtgtggccaccatgcattcagtgactaccagttgcttgatgatattgntggccttggccttcactccggtctcctagtcccatacttttcat

SEQ ID NO: 208953 - DNA, 519 bp, Glycine max
  unsure (1)..(519): unsure at all n locations
tgatattctgcttgatgccgcagtatatgctgagactgattacttgaggggagtcactgaaaacataatgttaggtcaacttgcccccattggcactggcgaatgtgccttgtatcttaatgatgaaatgctgaaaaatgccattgagctccaattgcctagttatatggatggtcttgattttggtatgactcctgcccgttccccaatatctggaactccatatcatgaaggcttgatgtctcccagttatttgatgagcccaaatttacggctctctccaactagcgatgcacagttttcaccttatgttggtgggatggcattttctcctacttcatctgctggttacagcccatcatccccaggctatagtccctcatcacccgggtacagtcccacttcacccggatacagtcccacgtcacccgggtacagtcccacgtcacctgcgtacagtcccacctctgcgacttatagtcctagctctctcggatatagtcctacaagtncagctta

SEQ ID NO: 208954 - DNA, 443 bp, Glycine max
attgcaaatgtatctttttataggggccaatatcatccgtcaaaactttacatgcccatgtggaataaatgttttcaagaggatgacccatcacaacacaggcctcaaaaaaggttcaagttcaaagcgaaatttgaattcatacttggacaaactggtccgaaaacattggtaacagagactcaaatgatccggatgattaatacaatgcaaactaatagccctcgaacagctcaaggggtgatcccagcatagcataaggcctctgtccagcctaaagttgacctcagcgagggcctacatcatccttcgcactagtttgtggagtgtaccgcctggttaaaaattgagagtaaccaggttgacttggggacgaacccggactgggactaaattggggcgaacttgggctatagactgggctcacaccagaattataaggg

SEQ ID NO: 208955 - DNA, 501 bp, Glycine max
  unsure (1)..(501): unsure at all n locations
cagaatcgtcatcctcaaaatttatgattatattttctttctctacttcgtcactacctctttctcatgagagagtatgttactgcgcaaagaacaacaaactaattaggtactgaccatttccgtctatatataaggccaataacccaacacgttctataaacatatagtgactaacctcccactgaagagtaattggtggattccagcaatggccgtggttcatggcagttgggtcaagcttgatcaaagaggagaagggcaaggagcgagaagctcacatgctatagccatagtagcacagaaggtgtatgcatttggtggcgaattcgtgccacgtgtccccgttgataacaaacttcacgtgttcgacctagagactntgacttggtccgtggctgatgcatcaggggatgccccaccgncacgtgtcggtgtcacaatggccgtagtgggagaaaccatatatgtctttggtggaagaganntgtgacacaaaga

SEQ ID NO: 208956 - DNA, 478 bp, Glycine max
tttaaacttggcagaataaccaccatagttatctcctctcctcaagtagccaaagaagtactacttgaaaatggtcaagtcctttctagcagaacaattccacattcagtccatgcacttgaccatcacatatactctactgtgtggctgccaccatcagctcaatggaggaaccttaggcgagtttgtgcaacaaaaatattctgtccacaattgcttgactccactcaaatccttcgccaacaaaaggttaaagatttattggattttgtgaaagaacgatgcaagaaaggtgggcgctgtggatattgcagaaggttgtctttacaacaatccttaattccatttcaaccactttcttctctatggatttgcctgattctacatctgaaaagtctcatgagttcatgaacattattcgaggcataatggacgaaattggtaggcctaatgttgcagacttgtttcccattcttcg

SEQ ID NO: 208957 - DNA, 489 bp, Glycine max
cctttaccataccattacaataattatcaaacctaaccagctaaaatggtgaccgtggaggaaatccgcaacgctcagcgttcccatggacccgccaccatcttggccttcggcaccgccacgccgtccaactgcgtctcccaagccgattaccctgactactacttccgcattaccaacagcgaacacatgactgatctcaaagaaaagttcaagcgcatgtgtgaaaagtccatgataaagaagcgatgcatgcacctgacggaggagtttctgaaagagaacccgaacatgtgcgagtacatggcgccatcgctggacgtgagacaagacgtagtggtgatggaagtgccgaagctgggaaaacaagccgcaacgaaagcgattaacgagtggggtcaaccaaagtcaaagatcacacaccttgagttctgcaccacttcaggcgtggacatgcaccgagcagattaccagctcacgaagcttctc

SEQ ID NO: 208958 - DNA, 522 bp, Glycine max
atttcttacctcttggcatggccattcaaatgtcttcttttgtctttggttctcttacaattttattttgcttctcttccttggagaagagttttgcctttcaaacaacaaaggaggacacagaaagcaacaatcttcatcaatatactcatcttgttcacctcagctcactccttccttcatcttcctgcagctcttctgccaaaggtcccaaaagaaaagcatcattagaagtggtacacaaacatgggccatgctcccaactgaataatcatgatggcaaagcaaagtctaaaacaccacacagtgagattctgaaccaagacaaagaaagggttaagtacattaactcaaggatctcaaagaacttgggccaagatagtagtgtgagtgaattggactcagttacactaccagccaagtctggtagccttattgggtctgggaattactttgtggatgttggtcttggaacacccaagagggacttgtcactcatctttgacacttgcagtgatctca

SEQ ID NO: 208959 - DNA, 480 bp, Glycine max
  unsure (1)..(480): unsure at all n locations
cgcaagcaaaaagaaagaatcccaggcgaggagaaagatggaggggaaggagcaggatgtgtcgttgggagcgaacaagttccccgagagacagccgattgggacggcggcgcagagccaagacgacggcaaggactaccaggagccggcgccggcgccgctggttgacccgacggagtttacgtcatggtcgttttacagagcagggatagcagagtttgtggccacttttctgtttctctacatcaccgtcttaaccgttatgggagtcgccggggctaagtctaagtgtagtaccgttgggattcaaggaatcgcttgggccttcggtggcatgatcttcgccctcgtttactgcaccgctggcatctcagggggacacataaacccggcggtgacatttgggctgtttttggcaggaagttgtcgttgcccagggcgattntctacatcgtgatgcaatgcttgggtgctatttgt

SEQ ID NO: 208960 - DNA, 531 bp, Glycine max
  unsure (1)..(531): unsure at all n locations
gagaatggctcccaagggtttaacctttctggctgtgttaatatgcgtttcagcactgtcactgagtccttctgttgcgggggaagggcaaaataatggccttgttatgaacttctacaaggaatcatgccctcaggctgaagacatcatcacagaacaagtcaagcttctctacaagcgccacaagaacactgctttctcctggctcaggaacatcttccatgactgtgctgttcagagttgtgatgcttcactgttgctggactccacaagaaggagcttgtctgagaaggaaacagatagaagctttgggttgagaaatttcaggtacattgagaccatcaaagaagctttggaaagagaantgccctggagttgttcatgtgctgatatcctcgttctctctgccagagatggcattttttcgctggaagtccccatatccctcttaagactggaagaaggatggtagaaggagcagagctgatgtggttgagcagttccttccagaccacaatgagtccatttctg

SEQ ID NO: 208961 - DNA, 457 bp, Glycine max
cattagccattggctaaacactcatgcggttgtggagccattcgtcatagcgacaaacaggcatctgagcgtggttcaccctatttacaaacttctgtttcctcactatcgtgacaccatgaacattaattcacttgcccgcaaatccttggtcaatgccgacggtattatagagaaaacattcttgtggggtaggtactctatggaaatgtctgctgttatttacaaggattgggttttcaccgatcaagcattgcctaatgatcttgtcaagagaggagttgctgttaaggatccatctgcttcccatggagttcgacttttgatcgacgactatccttatgcttctgatgggctagagatatgggatgctatcaagtcttgggtagaagaatatgtctcattctactacaagtcagatgaggaacttcaaaaagaccccgagctccaagcttgg

SEQ ID NO: 208962 - DNA, 472 bp, Glycine max
cgaagaagaagccacagagaactagtctcctactctcacccgcaagaaaaaaatggcatctcacatcgttggatacccccgtatgggtcccaagagagagctcaagttcgctctcgagtctttctgggatggcaagagcagcgccgaggatttgcagaaggtgtcttctgatctcagggcatccatctggaagcagatggctgatgctgggatcaagtacatccccagcaacactttctctcactatgaccaggttctcgacgccaccgccaccctcggtgccgttccaccaaggtacggctggaccggcggcgagattgggtttgatacctacttctccatggccagaggtaatgctaccgtgccagctatggagataccaagtggttcgacaccaactaccactttattgtccctgaattgggccctgatgtgaacttcacctatgcttctcacaggctgttgatgaata

SEQ ID NO: 208963 - DNA, 393 bp, Glycine max
gcacaaaactggtaaaattccagatcaataaggattgcggcgaagccgcaaagatacaacattcattagggaaaacaggagtggggaaaaataaggggggaggggttgaggaagaatcaattgcttacagagcatgctaagacacctaactatttcacacacagttattgaaacaacccaatatagagaaaatttttctacggtgtattataatataaagcagagccaaatgactaggaagattctactttcttataccattcacttggcaagtttcgtgcggatgagtgttgctgcggcaaccatgtctgtgagggctggcttcacctaagtgtacttacgggtcttgagcccacagtcagggttcagccacaggatgtgcttttacgagca

SEQ ID NO: 208964 - DNA, 531 bp, Glycine max
  unsure (1)..(531): unsure at all n locations
cgcacgggtgcgtagtgcgtaccccagcaggaaatggattacactaggatacagaagtaatctgttatcgttattccttccaccctgcccggtggaaccaaacgaagaagacgttccgttttccctctgcttttccaagttttcatcgactcaaccatgctattcttacataactagggttaggagttagggcgttcttatcgttttcgctccgttaattacaacaacggccaacatggttgttctttcgctttcacctcccagcctctctaccgctttcctcgcaaagaaactgtctccccaagaacacgcggtgaagctagcgacctttcgcaacaattcatttcgcattagatgcgcggtggatacgccctatggaggggaatgttcaaaaattccctcgaccaatgtttgggatccttaccgacgccttggtattagccctgatgcctctgaagaagaaatctggngatcaagaaattntctggtgcaacaatactctgggcatgaaaggagtgaagaatcaataga

SEQ ID NO: 208965 - DNA, 499 bp, Glycine max
  unsure (1)..(499): unsure at all n locations
aaaaataacaattaaccacacgactcacgacccagtaaccgggttctgcaaatttcgccacttgcagatgaaaagttccaaactttccactccaatccccggttaaatcctaaccccttgttcctttcactgtaagcattcctcaatttgacaattttctcctctctccacaaaatgatgtgtgtgccactttctctctcctcaattggggtgtgaaagtttccacctttttctttctttctttctttctttctttccattatctatgttagttttgcattgtttgttgtttggcttgcaatcttgttgcatgctggtgttggtgttggtgtcccaattcactctcaaatttcacggttcttagaactactaggaccttgccaccaccatggctgccaaaaaggcatgtgagacattctcaaagtcattgattgaggatgtgaatagatggngttgcttgaagcagacaggtgtgagtctcaggtacatgatggaattc

SEQ ID NO: 208966 - DNA, 502 bp, Glycine max
  unsure (1)..(502): unsure at all n locations
attcggctcgaggaaggctgccaaccttttgatggatgaaaattgtgtacaatgtttcctttatctgttgtttcttaaaagtataatctgatgcaatgcttcttctgctcctccccccctcaatgactaacataatatagcacatgtgtggctaaatacagtgaattctataaactgggcatacagaactgaaagtagtacatttgttccattgcagactgtaaaggtcgctgattttggggttgctagagttaaagctcaatctggcgtcatgactgcagaaactggaacatatcgatggatggctcctgaggttatagaacacaagccgtatgatcacaaggctgatgtatttagttttggaattgttttatgggagttgctcaccggaaagcttccatacgaatatttaaccccactacaggcagctataggagtggttcaaagggtttgcgacccaccatcccgaaaacactcatncaaagttgtggagcttcttgag

SEQ ID NO: 208967 - DNA, 550 bp, Glycine max
  unsure (1)..(550): unsure at all n locations
gtttctgcttgcggccaaccaagcagcaataaacgcaaacttacaaactggtttattctcaaacactttctttttctctctcttcaagctctctcccttcttctatacgatacgaagtttcctctatcttctcttctctgagggtagctttgattcattgaaggtttttccttcaccaactttccagaggaagaaagtgacttgatttctgggcctgctcgttctattactgagaaaccaaatacatgatactaaaaactcaaatggaagaaaagcagttagattttaatcagcctcttttatcggtaaggcgaatctcatcaacggcggcctctgaaaatgacaataaaagaaaagctgagtaatcagtgcggaaacgacctcctcttccgttttacaaatcagagttaaaatcaggtccagtgactaaccctggaactgttacttttgtatgggagaagactcctggnagacctaagaatgaaagcaaactacaaacaagggctgtcgaacggccttccgttgctccaaagcttccacccgggagggt

SEQ ID NO: 208968 - DNA, 525 bp, Glycine max
cttcgtcaagactctcactggcaaaaccataaccctagaggtcgaaagctctgacaccattgacaacgtcaaggccaagatccaggacaaggagggaatccccccagaccagcaacgtctcatcttcgccggaaagcaacttgaggacgggcgcaccctcgccgactacaacatccagaaggaatcaacccttcacctcgtcctccgtctccgtggtggcatgcagatcttcgttaagaccctcaccggcaagactataaccctagaagtcgagagctccgacaccatcgacaacgtcaaggctaagatccaggacaaggagggtatccccccagaccagcagaggctgatcttcgccggcaagcagctcgaggaccgacgtacccttgctgactacaacatccagaaggagtcaactctccacttggtgttgcgtcttcgtggtggtatgcagatcttcgtcaagacccttacgggtaagactattacccttgaggtggagagctccgacaccattgacaatgt

SEQ ID NO: 208969 - DNA, 535 bp, Glycine max
  unsure (1)..(535): unsure at all n locations
gagatgagtggatgaattaattgatgaatgaaattcaaatactaattgttgctatcacaattcacaagagattggattttggaatggaaagggtgttgtcagtagatgagatatcggagcaatactgggtggctgcatcatcttcttcatcatcatcatcatcatcgttcaagtcaaagatgaaccggagcgaatccgaatgggcctttcagcagttcctacagcaggaagctgcttcttcttcatctaattctgatcatgatgatgatcatcatcatgctaaactcaaaaaggaatccaacaccaacatccctgttactctacatgttgattcccaagactaccatgctattcttaagaccaagcttaatctcgcatgcgctgctgntgctatgactcggggatctttggtcaaatctcaaaaccctgacagtggaccacaggcatctaatttttctgaagttggatcgcatggctaccttaaaggatctggcccttttggaaatgatgatcccctctaattacaaaataaaga

SEQ ID NO: 208970 - DNA, 487 bp, Glycine max
  unsure (1)..(487): unsure at all n locations
tgtctgtcagtcccatttcatttcacctctctttcctaacccccaacgccacgccactgtcactttctttctctcacaaatcacaatgtgctccgataactacaatctctcaattccccattaattaaaatcaaaatcaaaatctaatctgggtttctcccatcagaggacaaagcttccgactttgcgggattcgttcgtatttgtttcagtgctgtgatggggaaggtcgcggtgggagctgccgttgtctgcgccgccgccgtatgcgctgcggcggcgctggtggtgcgccaccgcatgattagttcccggaagtggagtcgcgccatggcgatactgaaagagtttgaggagaagtgtggcaccccaattgtgaagctaagacaagtggctgatgccatggatgttgagatgcacgcgggtctcgcatctgaggtngtagcaagctcaatatgttgatcagttntgtcgataatctcccaac

SEQ ID NO: 208971 - DNA, 546 bp, Glycine max
gaagcgccttgtgccagtgggtctaggtgatgatgatcaatgcattgaggatgactttactgcatggaaagaagaactgtggccagcattggatgaattgcttagagatgaggacgatgcaactgtgtctacaccttatactgctgcagttttggagtaccgggttgttattcatgatccattggaagcatctgtcgacgaaaagaagtggcataatgtaaatggtcacgccattgtggatgctcaacatccagtcagggcaaatgtggctgtgagaaaggagcttcatactcctgcatctgatcgatcttgcactcatttggaatttgacatttcaggcactggagttacatatgaaactggggaccatgttggtgtttactgtgagaatttgtctgaaactgtggaagaggcaataaggttaataggtttgtcaccagatacctatttctcaatccatactgatgatgaagatggcaaaccacgtagcggaagcttcttgccacctacattcccaccctgactctaagaacagcacttacacga

SEQ ID NO: 208972 - DNA, 505 bp, Glycine max
acctccaaacatttttttatagttcatacagtacaaggaattgtctgcgtctctgaacctttctttgaggttcatcatacattacaaaaagaaaactgaagtaaaatagttcatagtctaggtataaacagtatataataaattacacgaaccaaaaagaatcctttagaaaatatagtgaaaaagaatcgtaggaaatgtcgtcgcgatggcaacaagcgccccccctcaattttgagggcactaatgaaaggtggcacaaataaggccctttcaaaatcctctagccacaactctatgtgttattaatatcttcgtcacccccacggattgcattcagatatcatcaccatacatcgcgcaaatatctgccagtagtttgtagattctttaccatgctctcagccttggaactatcgagagaaccctgctcttgcaaaattgtgtgcagggcgcggtgtacatccctggccatgaccttggatcaccacacacataaatgtaa

SEQ ID NO: 208973 - DNA, 476 bp, Glycine max
ctcaaaagcctgaaagaaaaaaaaaatcatctttctctttctcatattttctctgtgtgtgaatttgttgttctttcacaatggaacaacctccttcctcgtctcttcaggtggagacagcacaacaaccgggacctagtcctctccgaaaaatgttcgctgtctcgtcaatcgccgcgggaattcaattcgggtgggccctacagctctctcttctgacaccgtacgtccagaccctcggcgtccctcacgcatgggcgtcgttcatttggctctgcggcccaatctctgggctgcttgtgcagcccattgtagggtacagcagcgaccgatgcagatcccgctttggtcgccgacgtcccttcatcttcgtcggagccatcgtcgtcgcaatagctgcgttcctcatcggctatgcagccgatataggacacgccgcgggtgatgacctcacgaagaagagccgtccacgcgcg

SEQ ID NO: 208974 - DNA, 437 bp, Glycine max
aatacgaagcatttgatggatttataattttttaatgttggtgtacatatatttattagagaaaacaaggataaaacttaagcccaccctaaagagttatttgatgggtctaatacctaaatgatacacactcaccaaatttaaattaaaagtctccatctaatattgtcccatgcatgtaaaactctataatatatactaatggaaactcccagcagtgacggaagtaaccttggtcacatctgctggctatggtgttggcagcagaacaaccgctaacacggcactcacggcagtcgccacggcacccaacacaaacgccggtcagttggcaccaccaaaccacttatcccactgtccacttatagccgatactatcatctgtggcacgacaattgcaacattgaggacaccccaggataaaccttggcctgctc

SEQ ID NO: 208975 - DNA, 502 bp, Glycine max
ctttgtcaagactctgattggtataaccataatcctcgaggtatgaagctctgacaccattgacaacgtcaaggccaagattcaggactaggagtgaatcccgacagaccagcaacgtctactattttccggaaagcaacttgaagacgggcgcaccctaggcgacttcaacatacagaaggaatcaacgcttaacctcgggctccgtttacgagctggcatgcaaatctttgctatgaccctgatagtgatgactatgaccctagaagtcgacatgctacacaccatctacatccgtaaggctaagatccaggacatggatggtgtactgccacacctgcagacgctgatcttcgtcggtagcacctcgaggacggacgtacccttgctgactacaacatccataaggagtcaactcatgcacttgtgaagcatcttcgtggtagggtgcagatcgttagtatgacccttacgggtaatactattacccttgaggtgtata

SEQ ID NO: 208976 - DNA, 476 bp, Glycine max
  unsure (1)..(476): unsure at all n locations
gggaagaagaggttttcgtttggttaagcaagatggatttggaagcagagaaagagcatgaagctgcatttgcagtggcctcactctccctctctctccccaccattttccccttcgtccaacccacgaatatcccatcaaccacccttcaaccaaccaagctcaaagtcccaacccaagcctcatccctcacacacctttctctctccaccaccactcctcctccttccaaaacctccttcaaatccaccgtctccgccaaccccctccacgcccctctctccctcgctccccaccgcccccgcgacccttccaacgccgccgccctccgacgcgccgccgtcgtctggttccgcaacgacctccgcctcctcgacaatgagtgcctcaccgncgncaacaacgactccctctccgtcctccccgtctactgcttcgacccctccgactaccgcaagtcggcatccggcttcgac

SEQ ID NO: 208977 - DNA, 538 bp, Glycine max
  unsure (1)..(538): unsure at all n locations
ctctctctatactataggtctcgcccaatacctactctccgctcccaagagcacgcaccaccactattgcacttcttcctcgttctccctctttttcttcttcttcgctaaacccttttttctatctcactaacacaacaatgggagacgagaagaagggcaagcctgctgcttccggcgtgtggtccaccatcaagcctttcgtcaatggtggagcctccggcatgctcgccacctgcgtcattcaacccatcgatatgatcaaggtgaggattcaacttgggcaaggatcagctgcgcaggtcacttccaccatgcttaagaatgagggttttgctgccttctataagggtctatctgctggattactcaggcaggctacatacaccactgcccgtcttgggtcatttaaaatcttgacggccaaagctattgaggctaatgatgggaagcccctgccactgtatcagaaagctctatgtgggctgactgtggtgctatcggagcaactgttggagtccagcagatntggcactca

SEQ ID NO: 208978 - DNA, 538 bp, Glycine max
  unsure (1)..(538): unsure at all n locations
aataaagcacagaacagttgaagtgaatggcataaaaatgcatgttgcagagaaaggagagggtccagtggtgttgttcctccacggcttccctgagctctggtactcatggcgccatcagattctctctctcagctccctcggctaccgcgccgtcgctcccgatctccgtggctacggtgacaccgaagcaccaccttcaatcagcagctacaactgcttccacatagtgggtgatctcgttgcgcttattgactctctgggtgtccaacaagtgttccttgtggctcatgactgngggagccatcatagttggtatctatgcatgtttcgccctgacaaagttaaggcctatgtctgcctcagtgtccctctcctccgcagagacccaaacatcagaacggtggatggcatgcgtgctttgtatggagacgactactatgtctgcagatttcagaaaccagnggaaatggaggctcagatggctgaagttggcactgagtatgttctcgaaaacattcttacaactcgcaatcct

SEQ ID NO: 208979 - DNA, 506 bp, Glycine max
  unsure (1)..(506): unsure at all n locations
tggatctcttcaacccaataatcaaactcaccattttcaacaacaccctcagcctcaggggcagagttttggagcttcggctccggctaacggtggcggttcgggtcagccgaagcagagggttagagccaggagaggacaagccacggacccacacagcatcgccgaaaggttacggagggagagaatcgcagagcgaatgaaggccctacaagaactagttcctaatgccaacaagactgacaaggcctccatgctggatgagatcatcgattatgtgaagttcctacagctccaagtcaaggttttaagcatgagcagattgggcggtgcagcagctgtggcaccccttgttgctganggtggcggtgactgcatccaagccaaacgcagcaactcaaacgacagcctcgccatgacggagcaacaggtggcgaagctgatggaggaagacatgggttccgncatgcagtacttgcagggcaagggtctatgcctgatgccta

SEQ ID NO: 208980 - DNA, 515 bp, Glycine max
cccatccaaggcacccaagctcactgcattcttgggttacaaggccggtatgactcacattgttagagaggtcgagaagccaggatcaaagcttcacaagaaggaaacttgtgagcctgttacaattattgagacccctccaatggttattgttggtgttgtgggttatgtgaaaactccacgtggtctccgaacattgaacactgtctgggctcagcatttgagtgaggaattgaaacgtaggttctacaagaactggtgcaagtccaagaagaaggccttcaccaagtactctaagcagtatgaaactgaggagggaaagaaaaacattgaggcgcagctggagaaactgaagaagtatgctactgtggttcgtgttttggctcacactcagatcaggaaaatgaaagggttgaagcagaagaaagcccatatcatggaaattcaggttaatggtggtagtattgcacaaaaggtggactttgcatacagtttctttgagaaacaggttccta

SEQ ID NO: 208981 - DNA, 437 bp, Glycine max
gaaattcattaaacacggataatatagataaactcataaacaaaatttgaaataaacgatcagtcttccctgaaacaaaagtttggccaacttaaggagaaaaaaaactcactacccgagaatccataatatcaaaacagaaacactacaaagtttataagtgatggcaaccaaatagaattccagcatttccatccaattaacataattatgctttgaggcgtccaaagaacttctgcttctcctgtgtggtctggaagcgaccatgcccaaactttgaagaggtatcgataaacttgagtttgatctccttaagagcaacacgagaagtctgcttaaggagggattgacgcaatgtaatgaccctcttcttgggaccaacacagcatcccttgaccatgataaaatcatccttaacaacaccatagtgagggaaa

SEQ ID NO: 208982 - DNA, 507 bp, Glycine max
  unsure (1)..(507): unsure at all n locations
cgaagcaggaactaaatatggctgacttgttggaatggtcaaagcaagataagaaacgaatgcttcatgtcgtctaccgtgttggtgaccttgatcgcaccatcaaattttacacagaatgtttaggaatgaagcttttgaggcaaagagatatcccagaggagaaatatgctaatgcttttcttggatttggccctgaagaatcccattttgttgttgaattaacatataattatggggttacctcgtatgacattggcgatggctttggacattttgcaattgcaactcaggacatttataaattgggttgagcacatcagggccacagggtggaaacatcacaagggaacctggtccaagtcaaggtggaactactgttatcgcctttgtaaagatcctgatggttatacttttggacttatccaaagacctacagtccatgacccattntgtcaagtaatgcttcgtgttggtgatttagagcgctcaattaagtttatgaaa

SEQ ID NO: 208983 - DNA, 384 bp, Glycine max
gataaactagtagattaatcataggtagcatgcagaatgaggtttcaattgcggttttaagtcaacaaaagaacccataaaagcaagaaaacaagttgatgactggtactgatacaaaacgcacaatgataaaatgcgagacaacttattcatacaaaagcagcaggactacttatttcatataaagcttgctcttcacttcagttcttccaagaaatcaacgttgtcaaccaagacaggtttccatccatctggatctaaaaacgaagtggtttttgtattaaggccaggaattggccctggatgccgagtaatcttccctccaaccttttttatgacttggttaactacctcagcactcttatatacatcatcagtaccaat

SEQ ID NO: 208984 - DNA, 438 bp, Glycine max
  unsure (1)..(438): unsure at all n locations
cttcacttcactaatacatcatggcagacgagacccagaacaagtatgagagctctgaggttgaggtccaggatcgtggtgtttttgactttctcggtaagaaaaaggatgaagaagacaagcctcatcctcaggaggaggtcatcgccaccgagtttcaaaaagtcactgtctcagaccaaggagagaacaagcacagcctcttagaaaagcttcaccgatctgacagcagctctagctcttcaagtgaggaggaaggagaagatggagagaaaaggaagaagaagaagaaggaaaagaaagggctgaaagagaagatcgaggagaaaatagaggngtgatcatcatcatcacaaggatgaggacacaagtgtccctgttgagaaagttgaggttgttgaaacagcacatgctgaagaaaagaagggggtcctcgac

SEQ ID NO: 208985 - DNA, 413 bp, Glycine max
ataaaacacaaatgaaacacactattattccattttcagtacatatttaatttctttttacttcaaagaaggaaacctacacaaactttatcttttgtaaatggaagagatcaatacacaatgatatagtcaattaagtatgcatgaagaaacaccaacgaaacccacacggttgtcatatgatgaaatgaaacctaagcactgcacaatcatgcatctgcaaccaaccaaaaagccttgtctcaatcttaaatatcgatgagcactcactctgcttcagcttttacttttcctcctctgtcttggagtgataaccaggacgctaatctttcatctggaataatatacccttgttgtccttggactctccttcatgatgagcacctttaccatgctccaatgatgcaacatgt

SEQ ID NO: 208986 - DNA, 454 bp, Glycine max
  unsure (1)..(454): unsure at all n locations
gctcgtactgaacctctctccttgtacacctgcttggaagcttttctgcgtgaagaacctctggtgcccgaagatatgtggtactgtcctaaatgcaaagagagacgacaagcaagcaagaagcttgatttgtggagactcccagaggttttggtcattcatttgaagaggttttcctacagcaggtcaatgaagcataaactggagacttttgttaactttcccattcatgattttgatttaaccaattacatagccaacaaaaacaacactcggcgtcaactgtacgaactgtatgcccttacaaatcattatggcagtatgggtagcgggcattacactgcacatattaagcttttagatgagaacaggtggtacaattttgatgacagccacatatcactcataagtgaagatgaggttaacactgctgctgcctatgtgctattntacc

SEQ ID NO: 208987 - DNA, 517 bp, Glycine max
  unsure (1)..(517): unsure at all n locations
gtaggagcccttacaccttgcagagtcatctcaacattcccaagggctcctactacgcaataacgccaagctcgatctcaaattaatatatcatttattcctcttaatcaaatattaaataagaaaagatgggagagatgtcaaacttccaattgggtgtgattggtgcactatttctctcggtggcttcttctgtctccattgtcatctgcaacaaagccttgatgagcaatcttggcttccctttcgccacaacgcttactagttggcatttgatggtcacattttgcacccttcatgcggctcaacgcttgaatctatttgtgtccaaatccgttgacttgaaaacggtcatgctttttggtattctaaatggcatttccattggatttctcaacttgagtcttggctntaattccattggattctaccagatgacaaaacttgcgatcataccattcactggattattagaaactattgtcttaaagagcagttcagctcgaaataaaatctc

SEQ ID NO: 208988 - DNA, 544 bp, Glycine max
  unsure (1)..(544): unsure at all n locations
cttgtgttgtgtccctcttttaagctatttccttctcttaacacaattggttgtgccaattgccatagtcaccaaccaattaacaaaggtatatatatcatcatatcatcaccaaatgaaaaatattgggttgtttttttcttgtggtggtggctacttttgtggtggcagccacagctggtagcttttaccaagactttgaaataacgtggggtggtgagcgtgccaaaatctatgagaatggaaaccttctcacactctcccttgacagagcctctggctctggctttcgttccaaaaaagagtacttgttcggaaaaattgacatgcagctcaagcttgtgcctggtaactctgctggaacagtaactgcctattatttatcttctctggggcctactcatgacgaaatagactttgagtttntgggtaacttgagtggtgatccttacactcttcacacgaacgtattcagccaagggaaagggaacagagaacaacagttccatctatggttcgaccccaccaaggacttncacacata

SEQ ID NO: 208989 - DNA, 514 bp, Glycine max
  unsure (1)..(514): unsure at all n locations
cacaaacacagacccttcccttccttcctccctccctcattcccttcttcaatttcatcaacacaaccatcaatttcatcaaccatcgcataataatagtattatcatgatagccgtggcccgaaaggacatggaccggatcaagggcccgtggagcccggaggaggacgaggcccttcagaagcttgtggagcggcacgggcccagaaactggtcgctcatcagcaggtccattccgggccggtctgggaagtcatgcaggcttcggtggtgcaaccagctgtcgccccaggtcgagcaccgggccttcacaccggaagaggacgagaccattattcgggcccatgcccggtttggtaacaagtgggccaccattgcgcgcctnctctcgggccgcaccgataacgccatcaagaatcactggaactcaaccctaaaacgcaagtgcgcgtccttcatgatggcgggtgatgaagccgtcgccgtgagtccgaggccgctcaagcgatccttc

SEQ ID NO: 208990 - DNA, 509 bp, Glycine max
tttggtttggcaaaatggcttgtgaaaatgacaacaacaacaaaggcctattactggccctagggctagtactttgtgtcaccctgtccttcttcccaagggtcacagaagggagggtgccctttgcatgcgaccctaggaacggtctcacgaggggtttcaagttttgcaacacgcacgtgccaatccacgtgagggtgcacgacctcattgcgaggctcacattgccggagaagatcaggctcgtggtcaacaatgccatcgacgtgcccaggctcggcatccaaggctacgagtggtggtccgaggctctccacggcgtctccaatgtgggccccggcaccaagttcggcggagccttccccggcgccaccatgttccctcaggtcatcttgaccgctgcttcgttcaatcagtcgctgtggcatgaaattggacaggtggtgtctgatgaagcaagagcaatgtacaacggtggacaggctggtttgacgtattggagtcctaat

SEQ ID NO: 208991 - DNA, 532 bp, Glycine max
agcagttgaagatggagcacgacgaagacgaagagccacctcttgctgttcagattcaagggaatgatgaatccgtttctcagcaatcttcttctgttggggtcactctcatcaccggttatcttggttcgggcaagtccactctagtgaatcatattctgaattcgcaacatgggaagaggattgctgtcattttaaatgagtttggtgaggaaattggcgtcgaaagagcgatgatcaatgaaggagataagggtgcattggttgaagaatgggttgagcttgccaatgggtgtatatgttgcacagtcaagcatagtttggttcaagcacttgaacaacttgttcagagaaaggaaaggcttgaccatatattgctggaaaccactggattggcaaatccagctcctttggcatctggtctatggttggatgaacagttggaaatcagagtgaagcttgattctattgtcacggtggtggatgcttaaaaattgcgcttccagcttgatgagcatcgtgatcatcttca

SEQ ID NO: 208992 - DNA, 443 bp, Glycine max
  unsure (1)..(443): unsure at all n locations
cttcaaagaccatcaaggtccctgaaggctttgactatgagctctacaaccgcaatgacatcaacaggatccttggccccaaggccaattgcatctccttcaaggactctgcatgccgttgctttggctacatggtctccaaaaagaagtacatctacaccattgatgatgactgctttgttgccactgatccatctggacacaagattaatgcacttaaacagcatatagaaaacctcctctgtccatccacacccttttttttcaacaccctctatgaacctttccgagaaggtgcagattttgttcgtggttaccctttcagtctccgggaaggtgtaccaactgcagtttctcatggtctttggctcaacatcccagactacgatgctnctacccagcttgtgaagcctcttgagaggaaacactagtatgtggatgct

SEQ ID NO: 208993 - DNA, 407 bp, Glycine max
agcttggcatagagaaaagcaaaattgatgacttgtccaacctcctctacaagaactatggaacaactatggctggtttaagggcaattggatatgactttgactacgatgaatatcacagttttgttcatgggagattaccttatgagaatttgaaaccagacccagttctgaggaacctcttgctgagcctaccctataggagactgatcttcacaaactcagacaaagtccatgcagttaaggcactaagcaggctaggattagaagactgctttgaaggaatcatatgctttgagacccttaatcccatccacaaaagcactgtctctgatgatgaagatgacattgaatttgtgtggggttcaggcacaaccaatccaaccacaaaaaaagatgctagcagc

SEQ ID NO: 208994 - DNA, 320 bp, Glycine max
gttcatcaatgatctaagcagtcacagatgtctccacagcaagcttgccaggataagcaacttctgattttatgtcatcttcccatagttctggcactgcctccctaaggttgtggatgctttctaatgcataatctgctcctttaattctctgagattttccaaccagcacagtgtgaagacccacacgttttccagcttgtgtgttgcggacactatcctcaaagaacaaagttctttgtggattaaggttggctatcttgagggccaactcaatggcattttctgatggtttgcaaataattggtgtctttggaaac

SEQ ID NO: 208995 - DNA, 477 bp, Glycine max
aacttcactccactgttactttttttcttttacaaattacaatgtgctccgataactacaatctctcaattccccattaattaaaaatcaaaatcaaaatctaatctgggtttctcccatcagaggacaaagcttccgactttgcgggattcgttcgtatttgtttcagtgctgtgatggggaaggtcgcggtgggagctgccgttgactgcgccgccgccgtatgcactgcggcggcgctggtggtgcgccaccgcatgattagttcccggaagtggagtcgcgccatggcgatactgaaggagtttgaagagaagtgtggcaccccaattgtgaagctaagacaagtggctgatgccatggatgttgagatgcacgcgggtctcgcatctgaaggtggtagcaagctcaatatgttgatcaagtttgtcgataatctaccaactgaggattacgaaagcctctattatgcattgg

SEQ ID NO: 208996 - DNA, 521 bp, Glycine max
gtgttatcaatggcggaacactggaaggccaaaattctcccatataaacaggccgttgcagcctatggcactgccatagtgggcctcccttcacaaattgcctatggtggttgacaaaaaaaccgccatgccagtctgccatggcggccttagcgccgccatttatcaacattgttagcaaatgagaaaaatgttatctcctgcaatatttattctcatcatcagaaaacattctgatgggttcaaaagatttaatttcgtggcagtggatccaaatgaggggtgtagagtactagagagttcttcttggggagagttgggtatctgtgaagatcatgctattcaggaaccatatgaaggcatggaatttgaatctgaagatgctgctaagctattctatgatgaatatgcccggcgattaggatttgtcatgcgtgtgatgtcttgtcgacgctcagaaagggatggtaggattcttgcccgcagacttggatgtaataaagaggggtattgtgtcagca

SEQ ID NO: 208997 - DNA, 467 bp, Glycine max
agaaatccaccaatgtatggtggtaattctcagcaaggctaccaagctcgggcacccactagctggggtcccactgctgctcctatgccacaatccggttatggctatgcgcatacagcagcatactatggtccacactactataacatgcctcaccaacaatatgcaagctatcctcctcagccatctggacagatattctgccaccaactgggatcagtccactgacccacagcagcagtcaacccatgcatggtatgattactatagtcaacagcagtagcctaatcctgcaccttcatatgatgggactgctgacaattacagccatgccaccttactctggacataaccaacacgtacaggtctaatctcaggatggctatagaggatatcatgcaccaccacaattacgggatcgtcaggcaccatcatatgatcagcagcaaaggtatagctcatccccc

SEQ ID NO: 208998 - DNA, 485 bp, Glycine max
cccacattttcaaaatggcttgtgaaaatgacaacaacaacaaaggcctattacttgccctagggctagtactttgtgtcaccctgtccttcttcccaagggtcacagaagggagggtgccctttgcatgcgaccctaggaacggtctcacgaggggtttcaagttttgcaacacgcacgtgccaatccacgtgagggtgcaggacctcattgcgaggctcacattgccggagaagatcaggctcgtggtcaacaatgccatcgccgtgcccaggctcggcatccaaggctacgagtggtggtccgaggctctccacggcgtctccaatgtgggccccggcaccaagttcggcggagccttccccggcgccaccatgttccctcaggtcatctcgaccgctgcttcgttcaatcagtcgctgtggcaggaaattggacgggtggtgtctgatgaagcaagagcaatgtacaacggtggacaggct

SEQ ID NO: 208999 - DNA, 523 bp, Glycine max
  unsure (1)..(523): unsure at all n locations
atcaattaatttccaatggccgatcagctcaccgacgaacagatctctgagttcaaggaagcctttagcctcttcgacaaggacggcgatggttgtattaccaccaaggaacttgggactgtgatgcggtcgcttgggcagaacccaactgaggctgagctgcaggacatgataaatgaggttgatgctgatgggaatggtaccattgatttcccagaattcctcaatctcatggcgcgcaagatgaaagacactgattcagaggaagagctgaaggaggctttccgtgtgtttgacaaggatcagaatggtttcatctctgccgcagagctccgncacgtaatgaccaatctcggtgagaagctgaccgatgaggaagtcgatgagatgattcgtgaggctgacgttgatggtgatgggcagatcaactacgaggagtttgtcaaagtcatgatggccaagtgaggaccaatcaaccataacaaaaacatttgaaagcacatgaacagaanagggacagggc

SEQ ID NO: 209000 - DNA, 530 bp, Glycine max
  unsure (1)..(530): unsure at all n locations
tagaaacagtgtgatgaaaatgaaggtccttgttttcttcgttgctacaattttggtagcatggcaatgccatgcgtacgatatgttccctctccgaatgaacactggctatggtgcccgtactccggaggtgaaatgcgcaagttggaggcttgctgtggaagcacacaacatctttggctttgagaccattcctgaagagtgcgttgaagcaacaaaggaatacatccatggcgaacaatatagatcagactccaaaacagttaaccaacaagcttacttttatgccagagacctcgaagtccatcccaaggacacatttgtgttcagtatagatggcaccgtactctctaatattccatactacaaaaaacatggataggggtggagaaatttaactcgaccttgtatgatgaatgggttaacaagggcaatgcaccggcactgcccgagactcttaagaattacaacaagctggtgtctcttggcttcaagattatnatctngtcaggaagaacactgggacaaac

SEQ ID NO: 209001 - DNA, 513 bp, Glycine max
  unsure (1)..(513): unsure at all n locations
ctttcttcaccgttcgctctttctttctcccctacacaaaacatggctttgcccaatcagcaaaccgtcgattaccccagcttcaagcttgtcatcgtcggcgacggtggcacaggaaagacaaccttcgtgaagaggcatctcactggtgaattcgagaagaaatatgaaccgaccattggtgtggaggttcatccgttggattttttcacgaactgtggaaagattcgcttctattgttgggatactgctgggcaagagaagtttggtggcctcagagatggatattatatccatgggcaatgtgcgattatcatgtttgatgttactgcccgtctaacatacaaaaatgtccctacctgggcaccgtgatctttgccgggtctgtgaaaacatcccaattgttctttgcggtacaaggttgatgtcaagaataggcagtgaaggcanagcaggttactttccacaggaagaagaattgcagtactatgagatatctgctaagagcaacta

SEQ ID NO: 209002 - DNA, 565 bp, Glycine max
gaagtgagtcagatacgaagaagcaaaagcaaaacagaagcaaacaccaccacgcattcagcttcagaagaaagtgaacctatttggtgttttcctaaccgaatcaatctttattctttggttattcttcgacttctacatgggtcgccttcttctctttctcattattcccagccttgtcgcattgtctttcctctcagaggtacaatcagcgtcgttcaagattgtgaacaagtgccgtcacacgatatggccgggattactctccggtgccacctcgacgccgattcccaccaccggattcaccctcgagagcggcatatcgaggaccataaagcttccaaagtcttggtcgggtcggatatgggcacggacactctgcggtcaagactctgacggaaagttctcctgcgccaccgccgattgcggctccggtaaagtagagtgcgtctgctgagccaaaccgtcggcgactttggcggagttcactctcaacggcgccgacggattggacttctacgacgtgagtttggtcgacggatacaaccttgcgatgctgatcgtc

SEQ ID NO: 209003 - DNA, 481 bp, Glycine max
ctctcccctgctatctctaaattgaacgtgttttctgctacttttgcgcgtgtgcattcctcttcccttcaaagctagcactttacccaccaccacaacaaccccttttgctcccacgtgcacagagtcaaacccaaagctctttttttctctccaaacccacaacaacaaaaacagagcttctctgttttctccattcccaaaacacaaaataaaataaaaaaggaatctttttcacgcataattctgctgaatttcggaacagaaaatgggtgctggtgagtactacaagatcctcaaggtgaaccgcaatgccacagatgaagaactcaagagggcatataagagattggccatgaagtggcacccagataagaaccatcaacaccaccatgttacgaaggaagaagctgaggcaaagttcaagcaggtttcggaggcttatgatgttctcagcgacccaaagaagcgtcagatctat

SEQ ID NO: 209004 - DNA, 462 bp, Glycine max
ccgagaacaaaaaaaaaaaaaaaaaaaaatccgcgattcgctcttctcttggaaaagtgaaaaccagaagtacgaacgaaagagaagagcgatttagaagtgagagaagatggggttgtcgttcacgaagctgttcagcaggttgtttgcgaagaaggaaatgaggattctgatggtaggtctcgatgctgctggtaagacaaccatcttgtacaagctcaagcttggagaaatcgtcaccactatccccaccatcggatttaatgttgagactgtggagtacaagaacatcagcttcactgtgtgggatgttggtggtcaggacaagatccgtccactgtggaggcattatttccagaacactcagggtctcatttttgtggttgatagcaatgatagagatcgagtggttgaggcaagggatgagctgcacagaatgttgaatgaggatgaacttagaga

SEQ ID NO: 209005 - DNA, 525 bp, Glycine max
  unsure (1)..(525): unsure at all n locations
ctcgagccgaatcggctcgaggagaattcccaaatccatgatgcctatgttaagctacagatcggtaaccagattttgaagacaagacctgttcaatcaaggaccatgattctgcgttgggatcaagagctgatgtttgttgctgctgaaccctttgaggaacctctgattgtttcagtggaaaatcgagttggtcccaacaaagacgagactattggagctgttattattcctgtagaccaaactgacaagcgagctgatgatagacttatccacactaggtggtatcaccttgaagaatccatatcatctgtgatggatggggaacaaggaaaaaaggagaaagataaattttttagtagaattcactgagtgtctgtctgatggtgggtccatgtttttgatgggtcaacttatatagtngtgatctcagaccaacatcaaagcagctctggaagaagccaattggtcttttagaaattggcattctagtgttgatggacttcatccaacgaaaaccaggga

SEQ ID NO: 209006 - DNA, 334 bp, Glycine max
ttttcttttttttttttttttttttttttttttttcttattaactattttgctttggttttttttatttgtttttttttttttttttattttgtccaaagaaaaaaacacgccgccccaccccctgttgaacaaacgggagaccggccggggggctcccccaacaaagtggagggcggccccacgggctggcgtttattacccacccccaggggggatgcccccttgtctctcccccccccccgcaaaatttacttgacccccgggctgcggaagacattgttgaagactgtaaaaccccccaaagaatccctttccccggtgtttgtgttgga

SEQ ID NO: 209007 - DNA, 562 bp, Glycine max
cagcaaacagcaagagagaaatggaagcagcatcggccacaattctgctactgatactaattcttgctctgatatgctcatggaaggttctgaactggttatggctgagaccaaagagactagaaaaactgctacgagagcatggttctcgtggcaatccatacaccctttactttggagactccaaggagtttctcaagatgagaaaggaagccgtatccaaacccatgaccctctctgatgacatagtgccacgtgtctctgcctatgtccaacatagtgttaacaagcatggtaagaattcttttatctggttcggaccactgccaagggtgaccatcttagatccgtagcagatcaaagatgtatttaacaagaactatgacttgccaaagcctaatttgaatccacttgtcaagttactagcaactagccttgcaggctatgaaggagaaaagtggagcaagcacagaagaataatcaaccctgctgtcaatttagaaaaagtgaagatcatgttaccattgttcctgcaagttgcaatgatcttgatagcaaatgg

SEQ ID NO: 209008 - DNA, 239 bp, Glycine max
gggtggtggtgtgtttatagactggaaatatatcttttttgatgatgtttttagtgctgttgatgcacacactggcactgaaattttcaaagaatgcgtgaggggggctctgaaaggcatgaccgttatttttgctcacaccaagctgactctctacataatgcggattttataggggtgaagagggacggaatgatattccaatcggagaagtacgatgatctacttgcgtctggaat

SEQ ID NO: 209009 - DNA, 418 bp, Glycine max
  unsure (1)..(418): unsure at all n locations
gcccctggcgcgatccgccggtgttgaaggaaaacctctccgccgccggaaaggggaagccgccgctgacgcaaacgcggaggaataataatgaaggtggatgggatgattggggtaacgaggcgaagtccccggagcaagagcaagtcgaccggggattttaggaatttgaacggcggcggcggagcgccggcgaggtcgaggtcgacggaggatatctacacgcggacgcagctggaggcgtcggctgcgaaaaaggaggacttcttcgcgaggaagattgcggagaacgagtcgcggccggaggggctgccgccctctcagggagggaagtatgtcgggtttggatccagtcctcagccgcctcagcggcggaatgaagcgcanaacgattacttctctgnntgttcgaggggat

SEQ ID NO: 209010 - DNA, 479 bp, Glycine max
gctgaaaatatatttaaccttaacaaaatctttcttcttgcacattgggtctgagtttaaaaaggaacaatgggattaaaagttatagccaacaataaagtatcatgtttggttagtggcatccttgcttggcctgcatgccatcagtgcgtaaactacagtgtttttttgtcacttaaggaagaaatcatgaaactggtaatgaagtccaatcaaccctggtccaagaagtataacaagtgataacttgtttcaaattatgtacttgaaatcttagagaaagcctccctctgtccaagtgccatctgatttcccattatgaccaacacctttcttattagatgcaccttcataataattatcgaatccatcatctttggcattatcccagccagcccaatcctcgttattatggagagctgatcctttagctggttcttccttcctagaatctctgtgttcccaatcatcccaagagc

SEQ ID NO: 209011 - DNA, 553 bp, Glycine max
gggattgtggtgttaaggatatcatttcgaaacccttcccctttccttttcaatatcagtatcatgtggttggttggttggggttcatagagtgagtgaatggagtctgttatgagaagcataaaaaaaacatgaagagcaaagagtattattaggcgaattatagatgtcctaattttattgaaggtagcctcaacaacttctgctacttcctactccaaccgcacttctgctccgcaattatcatgggcaaggtcaagatcggaatcaacggatttggaagaattggccgtttggtagccagagtggctctgcagagagacgatgttgaactcgttgccgttaacgaccctttcatcaccaccgattacatgacatacatgtttaaatacgacagtgttcatggacactggaagcatcacgatgtcaccgttaaggacgagaagacccttctcttcggtgacaagccagtcactatttttggacacagaaacccctgagagatcccatggggtcaactggagctgacatcattgtgagtcccaccgagttt

SEQ ID NO: 209012 - DNA, 594 bp, Glycine max
  unsure (1)..(594): unsure at all n locations
cttctcacccccacactcccatctcacacacccctcgcatccaacaatgtctctcaccattccctccaacctctccaagcccgccgccctccgccccaaactaagcccaaagctaaggtccgccgccacaaccaccatcgtctgcagcaccaccaacaacaacaacaacaacaacgtgtcctccgacctgaaggcgttctccgccgcgctggccctctcctccatcctcctctccgcccctctccccgccggcgccgacatctcggggctcaccccatgcaaggagtcgaagcagttcgcgaagcgtgagaagcagtcgataaagaagctggagtcgtcgctgaagctctacgaggcgggcagcgcccccgcactggccattaagggcagcgtggagaagacgaaagtgaggttcgacaactacgcgaacagngggttgctgtgcggcggcgatgggttgccgcacctgatcgtgagcggagaccagaggcactgnggtgagttcatcacaccccgaatactattcctggacatctcgggatggatccgctgggtgggtcgagctacctgattgnatcagggacgagaagaaac

SEQ ID NO: 209013 - DNA, 410 bp, Glycine max
agcaagaacccttcttacattaattgaattggaaaaagaggttgattggggttcacatgccttaaattacatcatatcatgtcccctttataaaaaaagttattccaaaaagagcgcgtaaagatcccatccccatacaaattctccaggctttcctccaatggagccatccccccttttttatttaaacatccttggcaatgagggcgcccctgatgaattctttttaggcagcaacgggccctcttaaaccccttaaaagcaagcgagaagcccaaggaacatcgatgatgacccccctcatgggggggtttttctcggccctgatcgcaatcaggtaggtccgacccacccagccgatccatcccgagatgttcaggaattgttttccgggtgtgatgaacccaccc

SEQ ID NO: 209014 - DNA, 562 bp, Glycine max
ccattatctcagcaagcatggagttagtgcaatcaggaggctgaggaaaactgataataatagaattgcaaaggcttgtggtgctgttattgtgaacagaccagatgaattgcaggagtctgatgttggtactggtgctgggttatttgaggttaagaaaattggagatgagtactttgcatatattgttgattgcaaagaacccaaggcttgtactgttctactaaggggtgctagtaaggatctattaaatgaagttgaaagaaacctacaggatgccatgtctgttgcaaggaacattataaaaaatcctaaacttgttcctggaggcggtgctacagagttgacggtgtcggctgccttgaaacaaaagagttcatctattgagggcatagagaagtggccttatgaagctgctgccctagcttttgaagccataccacgaactttggctcaaattggggagtaaatgtcatccggactatgactgctctacaaggaaaacatgcaaatggagaaaatgcatggatggtatagatggaatactgcagatcactgcatg

SEQ ID NO: 209015 - DNA, 470 bp, Glycine max
  unsure (1)..(470): unsure at all n locations
gggattctggtatatgaagccattgatagaatcattgccggtcctaaaagtgtggatggttttttaatgtttttagttgctgcatttggtcttgtggttaatatcatcatggctttgttattgggtcatgatcatggccacggacatgatggtcatggtcacggtcacggtcacggtcacggacatggacatgatggtcatggccacagtcatggatttacagtgtctacccattgtgatgcaaagcatacaaaagatgagcaccatcacacacatgatgatcatgcacaccatcatgatgaaaacctttcaaaagatgctcaccatcatactgaggaaagatcacttgcaccatcatgctcacaaagatgttactgaacctcttcttggtgaatcaaaggtggaactaagaagaagaagcaatggaacataaatgtgcaggnggcttatctccatgttcttgnggactc

SEQ ID NO: 209016 - DNA, 522 bp, Glycine max
gcttcttgttgttggaaagaaaccctagcaagcggaacaatggcagacgttgaggtcgatgtggcggctgcagcagcagcagggcagccgaagaagagaacgttcaagaagttcagtttcaggggcgtggatctcgatgcgcttctggacatgtccaccgatgaactcgtgaagatgttcagtgctcgcgcacgtagaaggttccagagaggcctcaccagaaagcccatggccttgatcaagaagcttcgcaaagcgaaaagagaagctccaccaggtgagaagccagaacctgtccgcacccacctccgcaacatgattattgtgcctgagatgattggtagcattattggagtgtacaatggcaagacctttatcaggttgaaatcaaacctgagatgattgggcattatctggcagagttttctatttcatacatacccgttaagcacgggagacctggtattggtgctactcactcatccaggtttattcctcttaagtgaaaactggtactgggaa

SEQ ID NO: 209017 - DNA, 524 bp, Glycine max
aaagatcctaccaagaacgaaattccattctatccattaacacgttcaaatagcatggagaatcggcctttgattccatcaagtcccaaattcgtttaaataccatttcaacaaaataaaactaacttcaaaagattaaacagaaaaatcttgatactatggaattaagtcatgataaaccatacgtccaaaatcatagataggcaactcaaaatcaaatgcgcaacaacaaacaaaatctcttataggagttgaaattttcttgagaaccactacaaactaaaatgtagcttcccagtaacagttttcacttaagaggaatcaacctggatgagtgagtagcacctataccaggtctgccgtgcttaacgggtttgtatgaaatagaaaactctgccagataatgcccaatcatctcaggtttgatttcaacctgattaacggtcttgccattgtacactccaataatgctaccaatcatctcaggcacaataatcatgtttcggaagtgggtgcggacaggt

SEQ ID NO: 209018 - DNA, 653 bp, Glycine max
  unsure (1)..(653): unsure at all n locations
gattcatcgtgtccttaaaataaaacttttgaattcaaatgagatctaattagtaattaccttatatatatatatatatatatatattgaccaattaacaatctgccacttttaaccatgatcattatttatatatatacgtacaatagttttgggcactggcgatgggaataaagtagtggtccactgctacatgtatgaacttagagctatgattaatgtcaatgaagttattacttaaaaatgttaatacaaaattgaggcagacttcattccttttttttaataagaaaggggccattaggattttgaacttagaattttgttcaagctgctctttccatttaggtcgatcctagtgaatttcaaaacttatagctcatttctatatactgtctattatagtagacatacctgttttaccacacaatatttaattctaattctcttattccatgaacgaacacactataattaatacatgactntgagaaagagattatgtgttaaaattctcttactaaccagaattaaccattnnatattatcaatcanaagaagaaattanaaaaatcaacctcagaatcttcattgtaaatatttatatatatatagatatatatatatatatatatatatatatatatatatat

SEQ ID NO: 209019 - DNA, 456 bp, Glycine max
gttagaatatctaatacactaaactaaacattaatttgaagcaaaagtattactcatcattttcaacaattataaaatcatttaattatataatacaaaaattaacataattaatgagagtctacaaattttctctaaatttacattactataaaattgagaattcttgaacttataagcaatttaaaagtatgaagggaggaaaaaaaaagactaactagtagcagcatcaacaaattttccatcaaataagagttgggatgtgttctactttaactagtggtttaattggttcttcaatggcagcagcagtgctgaatttactgagccctgcaccaagagcaccacttccacttgaatatcagacaaaagggtcaatttattaaaataaaataagaccattaatgaaagctccaaagcctaaaaacaccaatcataaggcatgatcattcatca

SEQ ID NO: 209020 - DNA, 584 bp, Glycine max
  unsure (1)..(584): unsure at all n locations
ctcgagccgaatcggctcgaggtttgtcacgagacccatagtgctgccaaattatagtaactctctttctctatctgaagaagaagaagttctgaagaagcatgtgtggaggtgctatcatctcagacttcattggtgtgaagcgtggccgcaacctcgccgcgcaggaactgtggtccgagcttgaccctttctctgacctccttggcttcgataccaccaccaccaccaccaaccaaccaccccttccagacaaaaaagtggtgtcatcatgtgagaagaagaagaagaaaagtgtgagtgcagaaaagaagagtggtgggcgagctcggagaacgtgtacagaggaatcaggcaagggccgtggggcaagtgggccgcggaaataagggacccacatagggggctgccgcgtctggctcggcaccttccccaccgtcgaggaatgccgccgagcctacgacgacgccgtcaagcgcatncgcggcgacaaggccaagctcaacttcccgggccaccgttccgcacccttcaaaanacaacgctgcctcagccctgacaccaccaccgaacanagcagcagc

SEQ ID NO: 209021 - DNA, 556 bp, Glycine max
tgaaaagaagaagaacctgttttcggaactaaccgacgacatcgttctgaacatcttctacaaactcgaagacgatcctcgccactgggctcgcttagcctgtgtctgcaccaaattctcttccctcgttaggggatttctgttggaagaccaaatgctccctcaccatcccccaagacctcctctccgccgccgcctccgacccccctctctccctccacaaactctccttctgctgccccggcctccgccacgccggcctcctgttcgacacctccgatttcggcctcgaacgcgacctcggccccggcaacttcaacgtcatcaccgatgattctccttcgaaaccactccaccaccaccaccaccaccaccacaacaacaacaacaacaacctcctcaatccgatgattggtcttcctcttgttggtccctttacgatgacctctactacgacacgctctacgtcccaaccgagtccgagtcgccgcgattaacgggaatccgtagcgtaagagcgggcgtggatgtggcttcgatcaggcgtgcagcaaga

SEQ ID NO: 209022 - DNA, 433 bp, Glycine max
aaacgcgaatgggttttgaatctcataaaagaaaaacctaaaaaggcttttccactgcaatcacactgcgatcggaatttcacaaagcagatttccaatcttaagtaatagctgaaataatggaatggaatgtgaaaacagcgtatagcggccttctcaggagttatttaaaggagaaactaagatcgcgaaaatgaaaatgacataaattaggcataaaacgcagtagagagttcaagtgtagatgggaagatcggtccaggcaccagagacatgtccattctcacaaacataagccctaaccataggctccccatcgtcatggaagccaaagccaggcctcaagcaaaaggaagagtgcagatcccacgtgaactcacacgcgcagaaggcgcaaggcagatccatcttcctgttcttcccatcctgaata

SEQ ID NO: 209023 - DNA, 512 bp, Glycine max
  unsure (1)..(512): unsure at all n locations
agacattccaaaccatggaaccattcacttcatatgtaactcctgggtttacaattcaaaacactacaagactgatcgcattttctttgccaacaatgtaagctacttagtgcctaccatgagaaccaaataagacaccacttgtatcaaaaattgaagttattaattatgtaatgcagacatatcttccaagcgagacaccggctccacttgtcaagtacagagaagaagaattgaagaatgtaagaggggatggaactggtgagcgcaaggaatgggataggatctatgattatgatgtctacaatgacttgggcgatccagataagggtgaaaagtatgcacgccccgttcttggaggttctgccttaccttaccctcgcagaggaagaaccggaagaggaaaaactagaaaagatcccaacagtgagaagcccagtgattntggttaccttccgagagatgaagcatttggtcacttgaagtcatcagattttctagcttatggaatc

SEQ ID NO: 209024 - DNA, 524 bp, Glycine max
aaaaagttcaaacctgcatgattgcatttattattttggtttccattacacaaacatggtttattaatgacaaatacaagtacattcagccactccaaatacataacttaaacatacacaactgatgaaggaatcagattccttctatttcacatttatttaaagccagggacagtacttcagcaaccatagagcccttagatagagatactgttgggaattcctctgaaagtcaatccctcctcactagaaggatagagcaaagtgtaaggcattttagccggcccatagcggtttctcaatgtctcattattgttcttctctataagcttcttttcaatctcttcaagattctttccaaacctcttaaaggcctctaatggcccggcatcagaagtccagtagtcaccgccatctctctgcccaaggtagaactcatcagatgcgtgccttgataaaatttctataattgtaaggtcaatgagggtctctttttgccagtaatagtcttcaaaaactccttc

SEQ ID NO: 209025 - DNA, 597 bp, Glycine max
  unsure (1)..(597): unsure at all n locations
tagactttgagtttttgggtaacttgagtggtgatccttacactctccacacgaacgtattcagccaagggaaagggaacagagaacaacagttccatctatggttcgaccccaccaaggacttccacacatactccgtccaatggaatcctgcaagcatcatattctctgtggacgggaccccaataagggagttcaagaatttggagacaaaaggggttccattcccaaagagccaacccatgagaatatactctagtctttggaacgctgaggattgggccacaaggggtgggcttgtgaaaacggattggagcaaggccccattcacagcctcatacagaaacttcaattcccaaacttcttgctccactggccaatcactggacgccacggggcaggcaaagatccgttgggtgcataagaattacatgatttacaattattgcactgatatcagacgtttccctcagggccttnctncagaatgctccattgcatgagaatatntagatcactgctgcatatcattataaaatgatcctcatgacgtgacacacatgtgttgcctatacgtaaattaccttctgggtaata

SEQ ID NO: 209026 - DNA, 440 bp, Glycine max
aaaaactccaacaattttattaatgaaaatactttacaatttcagcacatataccctgccatgaatataattttgcacgctataattatttttcgccacaaacaatggagtagtgctcaacaaagcacaaaccaacaataataacagttttagttgcattaatttacacaagaaagtaaattaacgttataggcaacacatgtgtgtcacgttcatgaggatcattttataatgatatgcaacattgaattaaatattctcatgcaatggagcattctggaggaaggccttgagggaaacgtctgatatcagggcaataattggaaatcatgtaattcttttgcacccaacggatctttgcctgccccgtggcgtccagtgattggccagtggaggaagaagtttgggaattgaagtttctgtatgaggctgtgaatggg

SEQ ID NO: 209027 - DNA, 523 bp, Glycine max
  unsure (1)..(523): unsure at all n locations
gaaaaccctagtgagcatgaggctatgcgaaaaatgaaaaatgagtttatggtaaattgggatggtctgcgtacaaaagataaagagcgtgtacttgttcttgctgctacaaacaggccttttgatcttgatgaggctgttattaggaggcttcctcgacgattaatggttaatttgccagatgctccaaacagagaaaaaattctcagtgtcattttggcgaaagaagatttggcacctgacattgattttgaagcaatagctaatatgacagatggatattctgggagtgacttaaagaatctgtgtgtcacagcagctcactgtccaatacgagagatcttggagaaggaaaagaaggagagaagcttagcattgtctgagaacaaacctttacctgagttgtgtagcagcggtgacattcgtccctaaagatggatgattntagatatgcacatgagcaggtggtgtgcagtgtgtcatcagagtcaacaaatatgaatgagctactcccatggaatga

SEQ ID NO: 209028 - DNA, 300 bp, Glycine max
ctttcgtgtacccatcggactttacttaacttattcttctccaatcaacagtagaggtactgtcctacttattttgcggggtctctcctgaaaaacacaaaacagagagagcgagagagtgagacaatgaaccccataaattagaagggtgagcacctaacagacccataccacccaggctttctcttgttgctctttcgacgagccagaccctctcaaatacttgatcccactctttatctaggccccatactacctaaacgatgagatcccacgagacaaatgctgagacactctacc

SEQ ID NO: 209029 - DNA, 320 bp, Glycine max
caacactggtatgagcatgctcttatgcagagaggggcctgagttataaaaagggggggacaggctaacatggctctctcatccccatcctggggtggcagggaacagcaatctggccccaacaaccccagcagcgggctgggtgagcatgaggaaaaccgcacccaagcaggtctccccaggatccccagggtacgagggcataccgaatgaggtactcggacccattctgtggcggcgcgcgtcctgcctctgcggtgagttgccatgcgactaccggtgtgacactggtgtgttctaatgacacccactcaccttcc

SEQ ID NO: 209030 - DNA, 521 bp, Glycine max
  unsure (1)..(521): unsure at all n locations
agtantttcggacgttagcagtgccgatttatttttatttcgacgagcccaatctcactaggccgcggccgccctttttttttttttttttttcatttccaaacacactatctcgtgtatattaaattggggtgtgccaaaattttgcctacaataaaaccacaagtgaaaccaggaatataaacaaactttcactggttttttcgagggttccctctcgatcactgtgaaaacactaggcaccgcatcagcatgatatatccctccaagggaacactgtgaaaaacaacggtctaaacggttaaacccggcccgaatccgaatagcaccccccactctaacccttctccagtggtactcttcccttcctcctaagagttattcctcatcccatccagaatgaacaaaacacacgcgcttgacatgtttccgcactcactcaccacatgccgggtggactggaacttctccggattgagccggagcttttccttgacttgatcgaggatcgcgggaccacc

SEQ ID NO: 209031 - DNA, 499 bp, Glycine max
  unsure (1)..(499): unsure at all n locations
ggaaaacggcttccatgtccctgagcatatgttccacaaactcatctcagccatcacttaatctcaccatagcaaaaaatcatcaccaatcctcaagaatctcattagccattgtggcagacttcaatattcccatctctctttggacctctagacctttcaaacctagcaccaaaaccatgaggttaaatgatgatgaaaccctttccaatctccttgttaatttcatagaagagatccttcattatggctccaacaagcacagtattattccctatatcaagttccccaaacttgattctgtttccaacttccaagacattttcaaccttgcttttctcaccctcttgttcctagtttgcatatatgaagccccttctgatcttcgttctggttgccttagcactttgaaagaacaattggcagggtgtcaatcaaggcaagcatcaaaatttctgatgaaactctngggttccaacctggaagagcagtggatgcg

SEQ ID NO: 209032 - DNA, 468 bp, Glycine max
acaatcagtcattaaaattaaattcccatggaaatgatcgggtgtttgtgaaaaatgaaaacagaccaataatttcactccgttatcatttcctttaaaattataattaaccacatgttcaataaaacgaagaaaaaaaatacatatttgtgatataataaattggtttctatggtccaaatcaaagttgattgatatattcctatgcgtgactcctaagctatgcaattttgaggtagaccgtttccctgaactcgaacctcctggtttcatggtagaaggtcttgtgcttgttaggccaatacgttatccatatccaaccccttatctcccactccattgtcttccccacagcacctttgtccactttccaacacacactttctccatactcatcaccagcaaagataacccctccttgcctcgtgaaaggacgataagcacttgagtacctgtctttgaaccatg

SEQ ID NO: 209033 - DNA, 590 bp, Glycine max
  unsure (1)..(590): unsure at all n locations
cacagattcccctctttcgaatttcgatactttgatcagatccacaacacttcttcatccatgacgcttggttcttcaggatccagtgtcgtggttccaaggaacttcagattgctggaggagcttgagaaggggagaaaaaggaataggagatggcacagttagttatggaatggatgatggcgatgacatttacatgcgctcttggactggaaccattattggtccctataatactgtacatgaaggaagaatttatcaattgaagctgttttgtgataaagactaccctgaaaagcccccgagcgtccggtttcattcacggatcaatatgacttgtgttaatcatgaaactggagtggttgaatcaaagaaatttggtcttcttgcaaattggcaacagaggtttaccatggaagatatactgacccagctgaagaaggaaatggcggcttcacataaccgcangcttgtccaaccttctgaaggtactcactattagtgtccaagatcacactgatattgatcatattgcatttgagtatgcattatatagatgtaatactctgatccttctaaatcagacatac

SEQ ID NO: 209034 - DNA, 540 bp, Glycine max
  unsure (1)..(540): unsure at all n locations
ataataagaaaagaacgctactttaagagttgctttcaatatttaggaccaatcagagagcatcccttcaacaaagttgacaatgtattgcaacaaaactctatggaggtaaagatgaagctctttcgagcattccccagtatgttcttgaatttagaaggatccagagtattacatactatatattgcatactgcaaatgcaatatgatccaatatcagtgtgatcttggacactaatagtgagtaccttcaggaggttggacaagcttgcggttatgtgaagccgccatttccttcttcagctgggtcagtatatcttccatggtaaacctctgttgccaatttgcaagaagaccaaatttctttgattcaaccactccagtttcatgattaacacaagtcatattgatccgtgaatgaaaccggacgctcggaggctattcagggtagtctttatcacaaaacagcttcaatggataaattcttccttcatgtacagnattatagggaccaataatggctccagtccaagagcgcat

SEQ ID NO: 209035 - DNA, 551 bp, Glycine max
cggctcgaggagaaatagagagagaacttcaagtgagggtgagagtgacacaaatctagagagagcactagtactctaaaagtctattatattcttcaaaatatgaccatgcatcgcgagtcttgggcttttgtcttcggcgttatgggcaacatcatctcctttggagtgttccttgctccattgccaaccttttaccaaatctacaagaagaaatccactgaaggtttccagtcacttccttatgttgttgcactgttcagtgcaatgctttggatttactatgctttcgtgaaaagggaaactgccctccttctcattaccattaacacatttggaattgttgcggagtcaatttacctttctatcttcctaatttatgccccaaggaagccaaggcttacaaccatcaagcttcttctcttacgaatgtgtttggattcggggccatgcttctatcaactctctacctgtcaaagggagcatagcgtcttgctatcataggatggatctgccttgctttcaacatcagtgctttgctgcacctctct

SEQ ID NO: 209036 - DNA, 441 bp, Glycine max
gccgccagcgcctatgcctgcagcgaggccaatttccccagccgctggccgccgttctggcggacggaggagctcgccctcctagatatcgatttcttcgccagagtcatcgacgccatgaaagcatcgcagctccaaaggctcttaccgacgtcgctgcgctcatcacctacacggagcgcgccctacgagatctcgtccgtgaccacaccggcaacggaatccggtcctcagatctcggcgattccgattccagatccaaacagcggaagcttctggaagcaatcgtggatcagttcccctcggagaaagccgcgtttccgatccacttcctctgctgcctcctccgatgcgcgatctacctacgtgcctacgccggctgcaaaaccgagctcgagaagcgaatttcagcgatcctcgagcacgttaccgtcgacaacc

SEQ ID NO: 209037 - DNA, 477 bp, Glycine max
aactcgacgcgccacccaccagccagaaaatgcttggtgtgattgcttgggtcttctcttggtgggtgacgcaggccgtgccacttcccgtcacctccatgtgtcctctgtttctgttcccaatttttgggatagcttcagctgatagcgtggcgcactcttacatggacgacgtcatcaccctcgttttgggaagcttcattctcgctctcgccgtcgaacgctacaacgttcaccggagattggccttgaatgtaacactgctgttttgtggcgacccggtgaatccagcgctgttactgttagggctatgcgcgacaatattcttcgtgagcatgtggctgcacaacgtggcgacggcggtgatgatgatgccggtggcgatgggatcgtgcagcggctgccgcaggcgcacgagcagtcggaggcggtgaacaaattctgccgcgcggtgattcaacggtggtttacgccacg

SEQ ID NO: 209038 - DNA, 443 bp, Glycine max
  unsure (1)..(443): unsure at all n locations
aagcaactgtgcaggtcgtggatttgcaagttttccttttgcctcgtattacttcgaagcctttggttcctagctatccttgctttgcgaacatatacgtctctctcatggaaaagccacatgttgactttgggcctaagctcataggggctgatcttatgtctattccgggggtctataggattgctcaggagcttattaaagatcaggctgccaacatgtatctatggcccaaaaccttggaagttcaagtgttagatatgtcacaagccttgaagaggcctgttggtattttacatgtaacggttctgcaagcaattaagtcaaagaagaatgatcttcttggtgcatctgaccgttatgtgaagctaaaagctactgaggatcaattgccatcgaanagactactggtgagcacacgagctcaaatctgaatgaatgaa

SEQ ID NO: 209039 - DNA, 507 bp, Glycine max
ctggactacaggcgttcagaagtttggattgatttctgccgtaccctatgtctcactattgcaggtcgctcgccctttttcaatatataatttttttttttacgaaagcatattacttagagaataggaaggggattggccctagaacccttccccaaaaagaaaaatggaaagagagaaacatatactatattcaatcattttggggtaatacattttaattttcttccctaaactgatcatttctttagtaaagacaccatagtaaattgcatagctttacttattgctcatcttcagttttaacttattgtgcacacatcactcggttcgtgcttttacatacagctctcgcttgtgttctgaattaccctcaggcagcgagtaacttctggatttccttttcaatttgaaaaggagacgcttgtggtgggtatttttcaataactttaccatttttgtaaaccaaaaatttttcaaaataccacttataagatcacccaaaaa

SEQ ID NO: 209040 - DNA, 512 bp, Glycine max
  unsure (1)..(512): unsure at all n locations
agaaatttaagtgaggagctagagaatgatgatgaagtctgctatgtgtgcagtggtggttgtagcacttcttcttctggcggaggtggggcccatggctgaggctgtgacatgcaccccaacagagttgagtccgtgtcttccagcaatcacttccggtgctaaaccttccaatgcttgttgcacgaagctgaagcagcaaaaaccatgcttatgtggctacctcaaaaacgctagcttgaagcagtatgttaactctcctaatgcccgaaaaaccgttgcttcttgtgggattccctttccaacttgttaattaattaagccttcttataattaaagtgtgggatatatatatatatatagataaacagtttaatttatacancactttgatcctacaaagcatcttgacacaagcattcaataggatttcaccactttatcgcaacattntaacatgatgcgggtataaagtaaattcttggtgaatattttgataacgatgttatata

SEQ ID NO: 209041 - DNA, 418 bp, Glycine max
ataccccactctagaacatcattatttatttatttatttatttatttatagctcttaacacatataattccctggatacaacatgtatactggtcatattcaactctagagagctttatctgatatgatcatccttaacatattcaaagatagctaaatacttaactgtttaatatatcacacaaacgttgagggacctatatagagtaaataataaatataagtttaatttatacacccaaactatgagtatataacatcgttatccaaatattcaacaagaatttactttattaccgcatcatgttaaaatgttgcgataaaggggggaaatcctattgaatgcttgtgtcaagatgctttgtaggatcaaagtgtgtataaattaaactgtttatctatatatatatatatatcc

SEQ ID NO: 209042 - DNA, 425 bp, Glycine max
tcgtccttttttttttttttttttttttttttttttttttttttttttttttttagggggaagggtttttttccttaacccggacgggcagacgcgggtgattggggtccacatgccttaaaaaaaaggggaaccggccccttttataaaaaaagttcctaccaaaagagcgccgtaagatcccatccacatacaaattttccaggctttcctccaatggtgccctccccccttttttttttaaacatccccggccacgagggccccgttggtgagttccctttaggcagggacgggccaactgaaacccctgaaaagcaagcgagaatcccaaggaacactcgggaggatcccctctctggggggaaagttttcattccttatctcaaagggggggctccgacccacccaggcgttccattccc

SEQ ID NO: 209043 - DNA, 471 bp, Glycine max
  unsure (1)..(471): unsure at all n locations
aggaattgaagctcggggtttcatttttggttctcccattgcactggcaataggagcaaagtttgtaccattgaggaaaccgaaaaaattgcctggcaaagttatttctcaagagtatattctggaatatggaagagactgtcttgagatgcatgttggagctgttgaacctggtgagcgtgctttagttgttgatgatttgattgcaactggaggaacactctgtgcagctatggacttactagagcgagtgggagcagaggtagtggagtgcggatgtgtaattgaattgccagaattaaagggccgtgaacggttgaacgggaagcccttgcatgtgttagtggaatgttttgagtgctgtgaatagatgaagatgtaaatgggggagatgcgtcaccaccaagtgggtactttcctatatggaaatnctctgcttncttcttttaacgattaatgaaatagaaagac

SEQ ID NO: 209044 - DNA, 515 bp, Glycine max
gcattgcgtctcaccagatccttggaaatgaaagcctctcagcttctagatgcaatacctaaaccatttttgtctcttcatcttcgttttgagccagacatggttgcttacagccagtgtgagtacccggacctgtctcctgcttccattaaagccatagaagcagcacaagtggacagaaaaccatggactggagagttagcccgtgtttggagactacgtgggaaatgcccacttacacctaacgagacagctttaatacttcaatctctttccatcccactaacgacaaatatatacctggcagctggagatggtttgatggaaatcgaagggttgatagatacctatgccaacatagttactaaatcaagtcttctcagtagagaagacttcacaagcatgcatggcaacacaaaagctgctttggattattatgtatctataacagtgattcatatatagccacatattttgggaatatggattagatggtttcaagcatgagagctttc

SEQ ID NO: 209045 - DNA, 568 bp, Glycine max
  unsure (1)..(568): unsure at all n locations
catatatatatatatatatatatatataacacaaactattagcatagcattatagtaggagttgcataatattttcttttatgaaaatggcgcgtggcaagaatctgttcctccaaattctgtggtgtttttccttgatcggtcttagttcccaagcacagaattacacttttgttgtgagagaggccaagtatacaagactctgctccacaaaaagcatattgactgtgaatggagaatttcccggaccaactattagagccaacagaggagacacaatttttatagatgtttacaacaagggcaacttcaatattactttacactggcatggggtgaagcagccaaggaatccatggacagatggcccttcatacatcactcagtgcccaatccaacctggaaggaaattcacacagaggttgatttttactttcgaggaagggaccatatggtggcatgctcatagtgaatggttaagagccactgtctatggtgctatccacatatatccanataagaataatccctaccctttttcccacccgatgcagagattcccatcata

SEQ ID NO: 209046 - DNA, 560 bp, Glycine max
  unsure (1)..(560): unsure at all n locations
cggctcgagacttcaggtcctttgggcccatctgaaaaggttcactcacttccctatgttgatccaaggcaaccagttccagtaagaattgtggacccatcaaaggacttgaattcttatggtctgggaaatgttgactggaaagaaagggttgaaggttggaagctcaagcaggagaaaaatatggtgcaaatgactggtagatacactgaagggaaaggtggagatgttgaaggaactggttctaatggagaagaacttcaaatggtagatgatgctcgacaacctatgagtcgtgttgtgccaattccttcatctcagctgacaccttatcgtgttgttatcatcctccggttgattattcttggtttcttcttacatattcgtgtaactcaccctgtgaaagatgcatacnccatgtggttgacattcagtatttgtgagatttggtttgccttatcctggctcttggatcagtttccaaaatggtctcccattatcgtgagacttatcttgaacgacttgctttaaggtatgacgtgaaggagaacccatcacag

SEQ ID NO: 209047 - DNA, 392 bp, Glycine max
aaagaacaaaacacaggaccttgttggctttcattaaatattcgcataaacaaatttatattcagtgggaaaaaaatataacatacacctcaacatgactgattattcttgtaaggaacatgttgataaataaatataaataatagaaacagagagggtaacattcccatctatttcaggggttcaatcctccagacaaccttgataggctgaaaattcttgctatatacacgacagcaaccttgtcatgaatcttacaagagaactaacagttgataccacattgaccattggttaatttgttggagtcagaggtgaagggatcaatcctcacccacagcaaggagaatattgaagcaagaagaacggaccaaacaataacaatggttggg

SEQ ID NO: 209048 - DNA, 519 bp, Glycine max
gctaatgtggcttgtaaaagtgtgagaatgagaggtaaggataggccttcaatggacaaagtgacaacagttttggagagagcacttgcacagttaatggggagcccttgtattgagcagccaattttgcccactgaggtggttttgggaagtaacagattgcacaagaaatcatcttcaaacaggtcagcctcagaaagcactgatgtggaggatcagaggtttgagtttagagcaccatcatggatcactttccccagtgtcacttcttctcaaagaagatcgggctcggaggccgaagtcgaggggaaaaatgcagaaggaaggaatttgagcaatgttgacgacgtgtggctgtttgcagaagtcttgatgaagagattggtcttgcctctcctcgagagagattgttcttggcacacaacttttaaccgtgggaaatttgaaggaagcagatggtattagtaaattctggtctgctttgcttaactgatgagtttcatcatgcatggatgcaac

SEQ ID NO: 209049 - DNA, 448 bp, Glycine max
agtagaataatatattttataagatgatgaaattgaagtagattacagcgatgcacttgaaaaacatattaagcggactaattctccctggtcaagcaagaaaaaaaccagctgtgagcaaggtagagagattatacacagaatagtactagccctgcaattgccaaaaactccattgcagtagcagccacctaagagacactaagacctagactagaccatacataataggacacttcacagagaatcccaatcgatctcataagaggggtacttctggagattataattatccgaatcaccttcccactgagcctcgctcacgtcagcaaacgtcagatccgaaagcggcgaagaaccttccgacgaccaggacgcagcttccaccttacaagagttgttgttctccttgtcggaaacaaccttctccgcgagtttggaacgcgac

SEQ ID NO: 209050 - DNA, 483 bp, Glycine max
tgacgaaggagaaagaacttgtcctctctgtgctgaagagatggatttgacagatcagcaattgaagccttgcaaatgcggttatgagatctgtgtctggtgctggcaccacataatggacatggctgagaaggatgacactgaggggcgatgcccagcatgtcgatctccttatgataaggaaaagattgttgggacagctgcaaactgtgacagattggtgaatggagttaatattgagaaaaggatgaagactcagaaaacgaagtctaaatcaactgatgggcgtaagcaactcagcagtgtgcgagtgattcagaggaaccttgtttacatagttgggttgcctctcaatcttgcagatgaagatcttcttcagcgaagagagtattttagtcagtatgggaaggtcttaaaagtgtcaatgtctcgaacagcagctggtgccattcaacagtttccgaatgatacctgcagtgtata

SEQ ID NO: 209051 - DNA, 437 bp, Glycine max
tgtcgccctttttttttttttttttttcttttttttgaaagccatatttccctttattaaatagggattgggtattggtttataatctgttcctcctaattacaaatataatgagtataaccttttctttattcaattattttggggtaatacaagtataattttcttccccaaactgataatttcttttttaaaaacaccaaaggaaattgcatagctatacttattgctcatcttcagttttaacctaattgggcacacataactcgggttgtgctcttacaaacagatcaagtttgggttctgaattacacctaagcagcaagtaacctctggataatctttttaatttgaaaaggagacgccgttggggggaatctttcaataacctttacccttttttggcccccagaaattgtcaaaaataccccttttta

SEQ ID NO: 209052 - DNA, 419 bp, Glycine max
cctcgcccttttttttttttttttttttttttttttttctacacattttttttctttgggtttggttcattttttttttcctttttttcctggagaaaaaaggggcggtcaaattttccctttttaaaaaaataccccggcccttaagggggtttccgcccccatcccacaaggggtctttaaaaaacccaaaactggtcccccctccccaaggaaaaaccttaaaggtccaaaaaaggggttttggccccccaacaagataccccctgggtttcaaaaaccctttttttccacccctttttttttttttgggccagaaccgtctatcgcactttatgaaaaaccctccgggtttaaggggaaaacccccttccttgagtaaaccccccaaaaaaaccttttggcaccccatcccaaaa

SEQ ID NO: 209053 - DNA, 482 bp, Glycine max
cccagaatcaatttgttttggcatcacaacagcaacaggtcttggcacaggctcaggcacaaaataaccttggaaattctaattatggtgacatggatcctcgtagactttctggtcttccacgaggtagcttaagtgcaaaggatggtcagtctactagaaatgatggatctatttgctcccaaatgcagtcagattcacctaagatgaagattgctcagtcacaacattcattatctcaacagcaggagcaattacagcagcagagtaacagaaaaagaaaatctggagctgccaatagcactggtacaggtaacactgctgctcctttccctacttcatcaccatcaacacataccacctggtgatggattaaatacagcaagcagcatgcagcatgtccaaaagagcatgatgatgtatggtacagagggcacaggaggccttgcatcatcgtcgaatttgctggacgacatggatcg

SEQ ID NO: 209054 - DNA, 554 bp, Glycine max
  unsure (1)..(554): unsure at all n locations
ctaaaagcaaaattgtttttatatttatgtactaatagtctagtataccttattacaacatcaacggtgggagaaaccaactaagattaagctagtgatgaggtttggatagactcaaacctcattgccactattatataaaaataaaaaagaaaactttcagagacccctttttgctttcaatataggtctctgatttctttcatatacagtactactgacaaagaatatatgcgatgttagaacctaaatcaggaattttatttccacagctttacatagttgtcatgacttgcagaggcaaccattccagtgacagaagactgagccaaagcagatattacattttcatgtgtagtaattgtcatgcttttgttctctgtcatgttccataactccaaggatgaaattcctccaaccaccaacaaagttgaataacttggatggaaaacacaggaatgaaattggttcccaggggagctgaactcatgaatgcattctcctnctgaggtcagactccaaaccttcaccaaatttgaactcacagatgccca

SEQ ID NO: 209055 - DNA, 301 bp, Glycine max
gccgtttgattacggtgccggacacgtcgatcccgtggccgctcttgatcctggtctcgtctacgatgccaacgtggacgattacttagggtttttctgcgcactaaactactcgtcatttcaaatcaagcttgctgcgagggggggactatacgtgtgacccggagaaaggttaccgaggggaggatttttattattcctcttttgcgggtcctatggatacagcttccgggattgggggagggtccgatactctgaagaccgggaaggactcttggggtttgacttacgtgggagctcc

SEQ ID NO: 209056 - DNA, 557 bp, Glycine max
  unsure (1)..(557): unsure at all n locations
gggaagatatggataattcagattcaaagccattatgatacatacatacagatgcgaccattatctttttctatgtacaattattgttattattccatatataaagttttctcctgaacttcagcctacggaataaaaacagcaaagtgaataagtgagatacataataaaaacaagccgtatcgggccgggcccaaaagcaaaccacgaagagcctacaacacttgagtgggcccttttatttgggtcatacattttccacagcccatcatgtccagctgaacgcaattggactaccaaccttatgcttcccatccgtccattccaaacgtgcgaagctggtcgtcccagacggcatcgaagtgtatgtaaacgacaccgtatagtccttcttctcgtacaattccgtgaaactcaacgtattcggttccaccacagtcttcacttttcgaatcccccacgacatcaccgaagctttgtacgttcccggagnctccacgttagtcaaaaccctagagtacttcacggtcttcagagtatcggaaccctccccaatc

SEQ ID NO: 209057 - DNA, 397 bp, Glycine max
aaaacactcataacacaaagcacaaagcaaagctcatccttgagttaaaaaatggcagcagcttcttccatggctctctcatccccatccttggctggcaaggccgtgaagctgggcccatcagccccagaagtgggaagggtgagcatgaggaagaccgtcaccaagcaggtctcctcaggaagcccatggtacggcccagaccgagtcaagtacttgggcccattctctggcgagcccccgtcctacctaaccggtgagttcccaggcgactacggctgggacactgctgggctttccgcagacccagaaaccttcgccaagaaccgtgaactcgaagtgatccactccaggtgggccatgctcggagccttgggctgcgtcttccggagttgct

SEQ ID NO: 209058 - DNA, 516 bp, Glycine max
gtaaaaagcaagtaacattaagttggattcggatacacaagataattcacattatctgaagtacttcaccaaacacaaatctaaaaactctcaaaagtcatttcgttctttgacgctcactttccggggacgaagttggtggcataggcccaggcgttgttgttgacagggtcagcaaggtgatcggcgaggttctccaatggaccctttccggtgacaatggcctgaacaaagaagccaaacatagagaacatggccaatcgtccgttcttgagttccttcaccttaagctcagcaaaagcctctgggtcatcagcaaggcccaatgggtcgaagctgccacctgggtagattgggtcagtgacctcaccgagggggccaccagcaatacggtaaccttcaacggcacccattaggataacttgtgtggcccagatggcgaggatgctctgggcgtggatcaggcttgggttgcccaagtagtcgagcccaccctcgctgaagatctgggacccg

SEQ ID NO: 209059 - DNA, 511 bp, Glycine max
  unsure (1)..(511): unsure at all n locations
tcgattctaaattgttgccggctccagcaacctctgccaatctttaatgggtgtgattgatttctacaacactggtgctttgtgctgggttaagtccaacgccaatctgaagcagcaagtgggtttggcacccaagacccatttgttcatttgaggggaataatcagaggaagtttgtggcaatggcttctaccgttcctgtggagcaagtcaacaatggccccctgcaggtgacaggtgactccttcatcagagagcatctgaggaagttggctccttatcagcccattttgccctttgaggttttatcagctcgccttggacgtaagcctgaggatatcgtgaagttagatgctaatgaaaatccttatggtccccctcagaggtcatggaagccctaggatcaatgcaattcccatatgtctatcctgacccagagagccgcagattgcgcgcagctcttgcccatgattcangccttgaagctgaatatattcttgcanggtgtggt

SEQ ID NO: 209060 - DNA, 514 bp, Glycine max
  unsure (1)..(514): unsure at all n locations
gatgcaacttcaagaaattgcaaaacacaatatttatcatggtagatttaggtcaataatatataaagctacatccacatcccttgccaaaatcaacatattttcttctaattttgacggctctatataaagattagctaagaggagtttagcatgacgtgttacaatatttattacatcaaattttcctcctacgagagtctcttgaggcacttcataagtgtatctgtttgttcaggcttcccaacagtcacacgaacgtaccctttcagctctttcttgtcatagtgacgaatcatcacacccatttgtgctaggtcctcctttagcttctttgcatcctttcctgatgtaacctcacaaagaatgaagttagaatggcttggaaatggccggaggaatggaacttctttcaaaaggtcataaagtctccctctttctttcaacaaagcattntttacattctctagataggtaggattttgcaatgctgcacatgcagaaatttcagcag

SEQ ID NO: 209061 - DNA, 524 bp, Glycine max
aagcaatggctcaaaccatgttgctcatgtctagtgtctctagcagttattccgtggatttgaagaaagaccttttcctccaattgcagagtcaaagtttaaggcctaagttctctcagctctcattcaaccccacttccatcatcaacttcttccttttcttcaccccgtacattcacaactctggccctcttcaaatctaagaccaaagccgctcctgctaagactaaggttacaaagccaaagcaaaaggttgaagatggtatctttggcacttctggaggatttggttttactaagcagaacgagctctttgtgggtcgtgttgctatgcttggttttgcagcatcactgttgggtgaaggaataactgggaaaggaattctagcacaattgaatctggaaactggaattcccctttatgaagcggagcctcttcttctggttttcatcctcttcaccctgctaggagccattggaggtttaggtgaccgtggaaaatctgttgatgacgaacctactac

SEQ ID NO: 209062 - DNA, 459 bp, Glycine max
  unsure (1)..(459): unsure at all n locations
atgatgaactcaatgcattttatgatagatgagcaaacgagtatttgtttaaacacaaacaaacaaaagggttagtgtctaatcatcctccccctcatctgtaacgaatttgccagttccaggattcaaagcagcaatgaagaagaaaagaacattgaacaacactaggggctcgatttcgttgattggtaccccagtctcaatgttgagttgggctagtgctccctttccggttataatttctccaatcaatgagaaaacgaaacccaattgagccaatcttcccacaaatagctcgtttgctttcgtgaatccaaataaaggacctgaaccaagaccaagagcttccctgaagcctttgcctggaggaataacaccntcagtagtaggttcgtcatcaacaaattttccacggtcacctaaacctccattggcntctagcagggtgaagaggatgaa

SEQ ID NO: 209063 - DNA, 502 bp, Glycine max
ctttcctgtctctagctgtaacgccgattatttatttattttaattatgatcatctcatctcacccaattcaattcacgtaccttggaatcgattcttagggtttctgactcctttatgtgtttgtctcgcaattgatcatcgcaaccacaatgtccggtcccctcgatcgttttgccagaccttgctttgaggggttttcgggcagtgacgagaagaaggagaggagatctgacttcgagaactccgaggatgaaaggaggaccagaattggatctctcaaaaagaaggcacttaatgcatcctccaaattcaaacacactcttagaaagaagagtagcaagaggaaaagcgatggccgtgttagctccgtttcaattgaggacgttcgcgatttcgaggagctccaggctgtcgacgcctttcgcccatccttgatcatggacgaattgctccccgaagcctttgatgattaccatatgatgttaagatttttgaaagcg

SEQ ID NO: 209064 - DNA, 538 bp, Glycine max
  unsure (1)..(538): unsure at all n locations
caaatccttggcaagcccatgatccagagaacatgggaaagggcaaagctggcagctacattggatcatattgttgtggcaactgatgatgaaaagattgctgattgctgtcgacaatttggagctgatgttataatgacatcagaatcttgcagaaatggtactgagcgctgcaatgaagccctacagaagcttgggaaaaaatatgatattgttgtcaacattcagggtgatgagccacttattgaacctgagataatagatggtgttgtgaaagctttgcaggcagctcctgatgcagtgttcagcactgcagtcacatctttaaagcctgaagatgcacantgatccaatagagtgaaatgtgtggtagataatcgtggttatgccatttatttttcacgaggattaatcccattcaacangtcaggaatggtcaatcaacagttcccgtatttgcttcatcttgggattcagagctacgatgncaaagttctgaatatataccctgatcttcaacctactttcgtgcaactcg

SEQ ID NO: 209065 - DNA, 488 bp, Glycine max
  unsure (1)..(488): unsure at all n locations
gaaaaaaccaaatttgcttaacctaagcgaccatgctataaggagcaaacatctaaggtgtgtgtcttaattgcatttgcatagcatggacatcaaaacctttgctttcgccccatcttctccgccgttacccggtaatcgccgccgccaagctcgccggaatctctccctcgattgatacctctctctctcctgactcacctcccgcatttatcttctccgatgggctcaagttgcatggagcatatgctcttctacgttatatcggccgagttgccagccttcccaatttctatgggcaaaatgcattagaatctagccagactgatgaatggctggactatgctcctatcctctcatctggccctgcttttgagaatgcatgcaaatatatagatgagtacctggagaagtgtactctgttgggtgggtattcactgtcaattgcagacctagcaatctgagcaggtcctgcangttctggaaag

SEQ ID NO: 209066 - DNA, 458 bp, Glycine max
gtcccaaaaataacaaagacgaattttccaattactagtaaaaaatccagatataatggtttgcatataaacagtacaatgtgatggtaaacataaaagtagttccacaaacttgttatcaccattaccaactattctgagtgtgaatgtggcccaaacagtttcaagaccaaaaagattacttcaaacttgtctgttgcctgccatcagggattgcatatagcacgattggttgtgaggggcgaatgaagggtaaatcacacctgaaatatccctttctctccagttgcaataaatctccacgctgaagatttcgcatgttggagtctccataagctaaagtctcctttttggtacatgggttaaccacatcaatgaaatcctccccttcttcaagctttttctttgtaattagataatcaaactccactaatgtcaggctaactagttcatctatc

SEQ ID NO: 209067 - DNA, 466 bp, Glycine max
  unsure (1)..(466): unsure at all n locations
ctcccacaatggacctccatcgccggccgccgcccgccgctgacgacggagcaatccaccccaagaagaggagggacacttcctctcccaaggcctccgacgctctccctctccctctctacctcaccaacgcgatcttcttcacgctcttcttctccgttgcttacttcctcctccaccgctggcgcgacaagatccgcagccacacccctctccacgtcgtcactctctccgagatcgccgccattttctccctcatcgcctacttcatctacctactcggcttcttcggcatcgacttcgtccagtccttcatctcacgcgcctgcaacgacgcctgggacctcgacgacgcccgtacagattctncctcttcctctccctctacctctacctcgcccgcaattaccaaaatgccctcacgggatgcctcgattatattatcctccgaggatgacgaggagat

SEQ ID NO: 209068 - DNA, 438 bp, Glycine max
cttctctgcaccctcgccgtaccttctagaaccttccctcagatctcaattccccttccgctttctcctttcatggaaatggcttccactccccgcaccgtcgaagagatcttcaaggactacaccgcccgcagaaccgccatcgttcgcgctctctctcaagatgtggatgaattctacggactctgcgatccagataaggagaacttgtgcctctatggacatccgaatgaaacatgggaggtgactttgccggcagaggaagttcctccggagcttccggagcctgcactcggaatcaattttgctagggatggcatgaaccgcagggactggctttctctggttgctgtgcacagtgattcgtggttgctctctgtggccttctatcttgaggctcgtcttaaccgcaacgaaagagacgtttatttagcttga

SEQ ID NO: 209069 - DNA, 482 bp, Glycine max
caagcaaaatatagattaatagacaaaaataaaatgtatggaattctattctataaaattatataacatacactgatgattaatcttggtagaagaaattaacttaatctgaaagattatgatcagacatagatactataccgtttacaagaacttctataaaagatacaacaatattacagtatctttgtcggccatgaaacagcattattcacttcacattttgccttcggcttagggcctgcctcgcctcaagctgcatgatggacatttgtattgctttatgctctcagcttttgcaggagtgatcttcacacatttcccatggaaccacctctcacatatatcgcagccaatccaaaattcatctgcattgtaatttccgccacagctcccacaaagggtttcactgtgctcatcatcctcgtcttcataaccatcatctgcaaactttgggttgctcttaacttgcccatcacttg

SEQ ID NO: 209070 - DNA, 489 bp, Glycine max
  unsure (1)..(489): unsure at all n locations
ttttaacagatgatacagcaatgctttggggagttaagttctacaatgattttctcatgcaagctggccctcttggtaatgtacaatcagaactactattcagaaaggataaatcaactttcacttttgacaagggttgggccttccctcggagagtctatttcaatggcgacgtttgtgtgatgccgccacccgattcttatccatggttacctaatgctggttccaagcaagaggtttccctgcttgctttggtgatgtcctctttggtagccttggtattatatgcatatgcttaaagtttctaataatgccacactcatcaaaagtcttcagtgtgacaagttttgactcaattttgggacaccaatttggaatttgaaccaagccagggtaggatatccagtgacaattcaagagtagctcagttctcctatgattntgtttttctaattttcagcatacgaggaaattgaatctgctaatata

SEQ ID NO: 209071 - DNA, 357 bp, Glycine max
aaactctgtttatttatgacaaatacatgttcgataaaacaaaccaaataccaagcccaagacctacacaaatggcgaacgaaccagatgcctcctctgccaggaacacaaaagccagaagacggacttgggtgacacaaaaagccacaagctagagatacgggagggaaaaccacaggaagtcaaggccccccaaccaaaaggatagagcaagggagcaggcctggaagccggaccatagcggatcccgaagggcccaaaatgggccacaaccagcagcagattgaaaacctgataaagaaagggtccaaaccgggggaaggggtgtaatggtcaagcaccggaaacccaggaggg

SEQ ID NO: 209072 - DNA, 580 bp, Glycine max
gccccacataccatttgttattcatataaaaactcgttttccttctccatttctcgtcgcaccttttcctcttctctctctttctctctttctagttcgtgttcttcgtcgcaaatccgaagtaggatctctcttgttttttctctaggtttttcgcgatggcgtcgaagcgaattttgaaggagcttaaggatttgcagaaggatcctccaacatcttgcagtgccggtcctgttcatgaagatatgtttcattggcaagctacaattatgggtcctccagacagtccctatgctggaggtgttttcctagtgactattcatttccctccagattatccctttaagccacccaaggttgcattcaggaaatagggtgttccacccaaatataaatagcaatggaagcatttgccttgatatattgaaggagcagtggagccctgctctaaccatttccaggtggtgctctcaatttggtccctgttgacgggacccaatcctgatgatcctttgggtccccgaattgcacacatgttcaagacagacagggaccaaagtcgagtcaactgcaagaagct

SEQ ID NO: 209073 - DNA, 497 bp, Glycine max
  unsure (1)..(497): unsure at all n locations
ccattatactagtaagcatggtgttagtgcaatcaggaggctgacgaaaactgaggataatagaattgaccaggctagcggtgctgacattgtgaacagaccagatgaattgcaggagtctgatgttggtactgggtgctggtgcatcagcggttacgacaattgcagatgagtactctgcatatattgctgatcgctaagaacccaatgcttgtactgttctacttacgtgtgctagtacggatctattaaatgaagttgacagagacctacacgatgccatgtctgatgcaaggaacattgtaaaacatcctaaacttgttcatggaggcggtgctacagaggtgacggagtcngttgacttgcctcaaagtagtcgatatagtgagggcatagagaactaggcttatgaagctgatgccgtagattttgaagccatagcgcgaactttggctcacaactgtcgagtacatgtcatccggactatgactgctcta

SEQ ID NO: 209074 - DNA, 399 bp, Glycine max
agggcgacctttagtgattgtgctttagaatgttgatgaatttctgtttgtgtgcaggggtgggtgttgctctttttcttctggcggaggtggggcccatggctgaggctgtgacatgcaccccaacagagttgagttcgggtcttccagcaatcacttccggtgctaaaccttccaatgcttggtgcacgaagctgaagcagcaaaaaccatgcttatgtggctacctcaaaaacgctagcttgaagcaggatgttaactctcctaatgcccgaaaaaccggtgcttcttgtgggattccctttccaacttgttaattaattaagccttcttataattaaagtgtgggatatttatatatttattgataaaccggttaatttatacacacttttgatc

SEQ ID NO: 209075 - DNA, 521 bp, Glycine max
  unsure (1)..(521): unsure at all n locations
atggcttcttctacatcacatccatccttttggtccctcctgaacctgtctgcatccattcccatttcttcttccgtatgcatgttcccaccgtctaaaaaacctagcaaagcaacaaaacggcgtcatgcttggngaagtagcatgcaatggtaaccctagaaataggagggacattctgatcggccttggaggactctatggtgctacaacaagtctcacaagtaacaacactggttctgcatttggtgcttcattgtcgcctccagatccaactaactgcgttcaaccggacccagaaaaagaccctttttgcccaccaccccccttcaaagactacgagctccctccacacgatgacaagacattaccccttcgaattagaccagctgctcatttggtcactgatgattacatagccaagtacgaggaagccgtgaggcgcatgcaagaccttcacctgatgatcctcgcagtttcatgcaacaggccaatgtccaccgtgcctactgcgatggtcg

SEQ ID NO: 209076 - DNA, 332 bp, Glycine max
ggggaccgtagctccaggttctttttttggttctcccatcgcactgtcaatgcgagggcagatcgatccatggaggaaacccaaaaaattgggcggcacatggatgttctcagagtatatgctggcctatggcagagacctgcttgcaatgcatgctggaactgttgaaccgtgggcacgagccctaggtgtggataattagaccgcgactggaggatccctgtgggcagccctgtgtctactaaagcgacgaggatcatacggtaatggcttgccgttccgctatcgacttgccatacctaaaggccggagacggttggacgggaatccct

SEQ ID NO: 209077 - DNA, 565 bp, Glycine max
  unsure (1)..(565): unsure at all n locations
cagagagtagaaaagatggcgcggttgatcacagtggtgtggtgcgcggtggcggtgctactgtgcgccgcggcgggcgcgtcgtgggtggaggaggcggcgaacccgatacgaatggtggcggnggtggaggcggaggtggttcgggtgatagggcagtgccggcgcgcgctgaagtttgctaggttcatgagcaggttcgggaagagttaccgaagcgaggaagagatgagggagaggtacgagatattctcgcaaaacctcaggttcatccgctcccacaacaagaaccgcttgccctacactctctctgttaatcattttgctgattggacttgggaggagttcaaaagacacagactaggcgctgcccaaaattgctctgccactcttaacggcaaccacaagctcactgatgctgntcttcctcccacgaaagactggaggaaagaaggaatagtgagtgatgttaaagatcaaggcagctgcggatcatgctggacattcagcacaactggngctttagaagcagcctatgcacaagcatttngggaagagtatctct

SEQ ID NO: 209078 - DNA, 595 bp, Glycine max
  unsure (1)..(595): unsure at all n locations
aactatgaactatcaatatatgatcgttatttatgtctgtgatacacacaattcaggccatgatattcttacgtgatttacagcaacttctaacttatttaatacatcataccaacccaactaggagcaattttcattatacaatgacacttatctttaaactctgaagcatgacaaggtggtagtcaccagggaccatattcttatgcaatttatgccacaactggataagacgcacaagttgcaacaccacacatgttcttccccaattccattttgaagtagccattctcaccccaactttctccccatgaatttttttatgagccaatatgggacgccattttcaactccataccccacagcaaggacggcatggttcacatcctgngaagtgctaccgcaaatgtcactagtgtaaactccattctcgtagaaatggaacccattcaccacctgaaaggccacactaaccggccgaacaaatgcaactgcatgttttaattcattctcagcacccaaggtgatattgaccgagtcaatgacttgaaacgggcacattttcagctgagaatttgcatacaccatctttttc

SEQ ID NO: 209079 - DNA, 612 bp, Glycine max
  unsure (1)..(612): unsure at all n locations
gtacaatttggctaattgccaaggcatatgttgttgtcaatgactcctgctatcatcaactcatgagccactggttaaatactcatgctgtgattgaaccatttgtcatagcaacaaacaggcatcttaatgtgctccaccctatttataaacttttgttgcctcactatcgtgacaccatgaacatcaatggactcgcaagacaatcactcatcaatgcaggtggcattattgagcaatcatttctgcctgggccatttgctgtggagatgtcttcggcagtttacaaggggctgggttttcactgatcaagcccttcctgcggatcttatcaagagaggaatggcagtggaagatccatcctctccctatggccttcgccttgtgatagatgactacccttatgctgntgatggactagagatatggagtgctatccagacatgggttaaggactacgtctccttgtactatgccacggatgatgcagttaagaaagactcagaactccaagcttggtggaaggagctgttgagaagggcacggtgacttgaagacaaacatggggcctaagtgacactcttaagactgatcacattgctgcatatatat

SEQ ID NO: 209080 - DNA, 366 bp, Glycine max
acatacgggtatcaaatccaagttggggacatagagaaatttgatttgacattcatagatcagaatatcagacttacatacgggtgaacatgatacgggtgaacatgataggagcacaatactatacataaaaactgacacaacaccctattagatatgaaaaactagatagcatccaattacaaaacttaagcatacataagaaaattatgcacacataagtttgcacgtttatttgtcaatgagaggtacgttggaaggaaagaaaaccacacaccacacaccacacacttttattagatagagatgctgttgggaattcctctgaaagtaaggccttccccactggtaggaagaagcacagtg

SEQ ID NO: 209081 - DNA, 531 bp, Glycine max
  unsure (1)..(531): unsure at all n locations
ctttctctaatccaaatatctctccgttaatgctctcaccacaaacttcaatagactagccaaaagctaacaccaactataggccaaatcaccaataaatattatttcccgttcttttggcgtgttggccacccactgaacacatttgcactcacacatagaagcagagagaggccattggttggtttcagagatgggaagcatgcacatagaaaccccagaaacttttgctgatggtagcaaaaacttcgatgatgatggacgagctaaaagaactgggacttggattactgcaagtgctcatatcataacggctgtgattggttctggagtgctatctcttgcatgggcaattgcacagatgggttgggtagctggtcctgcagtgctctttgtcttctctttgataacatacttcacctncactcttctcgctgactggtaccgttcacctgaccctgtacatggcaagcgaaactacacatattctgaggttgtcaaagccaacctatgaggaagaaaatttcagct

SEQ ID NO: 209082 - DNA, 490 bp, Glycine max
attccatcctcttccatcaatctaaacataacctaacaaaaaagaaaaaaaaacagctaccaagaagaaaaccatgtaacatagcaaactaaacattttattatattactttagtataacaagttgtctcgatttcgagaattgaaaatataacaactatttcaaaacatagtaatacaaattttgtcgccctcaatagaaactcttggctcaagttggaatactaagtatgaaagttctattgttctgcttggaagggcttgtatttcttgatactaaccgaaaggccttggatggaacccacaagtgagataatagaaatgatcaagcaaacccaactcaatatcttgagccaagtccaggtgaaggaaaatctttgcatatttgacttcttaatgtacatctctatagggaagtaaaccgtcaatggccagaaagagagtgcaccaataagggccaaaaagtcattgaagaatgggagtaacatagc

SEQ ID NO: 209083 - DNA, 489 bp, Glycine max
ggcagcatcaacacatgatcaagatgtcttcagtttctatccagatgaacgattttgcaatggatttgaagaagtgttgagtcagtatagggaaattgttcctaatattcgacttgcaggtcctacttcatttgcaccaattgttgaaatggccatgacaatagttgagcagagtggaggccagtaccatgttttggtgatagttgcagacggccaggtaacaagaagcattgacactgagcgtgggaggctaagtccacaggagcagaggactgtggatgccattgttgaggccagtaaatttcctctttcaatcatattggtctggtgttggggatggtccttgggacatgatgaaggagtttgatgacaatattccagctcgggcctttgataattttcagtttgtgaatttcacggaaattatgtcaaagaatattcctccttctcgaaaagaagcagcatttgcacttgcagcactgatggaaa

SEQ ID NO: 209084 - DNA, 548 bp, Glycine max
ttgttctacaatgaaaagcctctgccttgggccgtttcttgctgctagtgccccagttggtagaagagcctatggaggccacttaagcagaaagtgctttcaaaagcaacttcacttccactcacgttgtgttgctttctcttcattcatatgttctgcaactatatcagtgatgccagaattagaagagaagcaagtgtttgatggagagaaggctaatttgctagttaaagatctcagaaagagctttgattcaggcatgactaagagctatggatggagggtttcccagttggaagccatagctaagatgttagaagagaaagagaaggaaattactgaagctctatataaggaccttggaaaacctcgacttgaagcatttataaccgagatttcccaggctaaatcctcatgtagtgaagcacttaaagagctgaaagaatggatgaagcctgagaaggtgaatactttcatcacaacatatccatcatcagcagagattgtgccagaaccaccggggggttgtgtggtcatctcaacatgga

SEQ ID NO: 209085 - DNA, 443 bp, Glycine max
cgaggggaaaattgtaattatcttttgccacttcaaccaaagtgggaagccacgagtcactgcccttgcacattgttttagtacagtacttctaattcatgaacgttttttttttttaaagggaccttatcatccttaagaccaccccaaaagagaaagaataatttgaacaatattgccactaataagggccttcaataatttttccttctgaggtgtatacggagggtacctaatggtagaatctgcatcaaaacttctatagagaactgacttcctgtggctgaaactatcaaaagagaattttccatggtaacaacccattccactctcttcaactgctccaaaaggcaacccacgagttgcaacatggatgacggcgtcattgatgagcatcccttcagaagatatcttatccacataatccttcttcagctggtcat

SEQ ID NO: 209086 - DNA, 394 bp, Glycine max
  unsure (1)..(394): unsure at all n locations
gattggagagcgcggaatcaacctaagtgggggtcagaagcagcgcatacagcttgccagggctgtgtatcaagactctgatatatatcttcttgatgatgtttttagtgctgttgatgcacacactggcactgaaatattcaaggaatgcgtgaggggggctctgaaaggcaagaccgttattcttgttacacaccaagtagacttcctacataatgtggatcttatagtggtgatgagggacggaatgatagtccaatcggggaagtacgatgatctacttgcgtctggaatggatnttagtgctcttgttgcagcacatgacacctctatggaactagtggagcagggtgcagtcatgactggggaaaatttgaacaagccatttgaatca

SEQ ID NO: 209087 - DNA, 460 bp, Glycine max
  unsure (1)..(460): unsure at all n locations
tccatggcttcctccaccgctttcttcacacccctccatgatttcactcaagccagaacaaccccatcaccccctttgcctttcatcaaatcctcctttgcttcctccaagtcaaccttttttcaccctgccctttccctacaaacctcttccaactttcccaggctttttggaaagcctaagtttttctctgttcatgcaagggctgccacagaaaaaaccatttatgattttactgtcaaggatattgacagaaaggatgtttctcttagcaagtttaaggggaaggttctattgattgtcaatgttgcttcacgatgtggtttgacatcatcaaattactcggagctgtcacgcttgtatgaaaaatataagaatcaaggtttggagattntagctntcccctgcaatcaatttggtatgcaggaacctggatcanatgaagatattaaagcatttg

SEQ ID NO: 209088 - DNA, 480 bp, Glycine max
gaaagcatattacttagagaataataatataaatggccagagaattcttccacaaaaagaaaaaaagaaagagagaaacatatactatattcaatcattttggggtaatacagtataattttcttccctaaactgataatttctttagtaaagacaccaaagtaaattgcatagctatacttattgctcatcttcagttttaacttattgtgcacacatcactcggttcgtgctcttacatacagctctcgtttgtgttctgaattacactcaggcagcaagtaacttctggatatccttctcaatttgaaaaggagacgttgttggtgggtatctttcaataactttaccatttttgtcaaccaagaatttctcaaaattccactttataagatcacccaaaaagcctccagcactcgatttcagaaactggtacactggagttgtaaatggtccattgacatcaaccttatcaaaaat

SEQ ID NO: 209089 - DNA, 459 bp, Glycine max
  unsure (1)..(459): unsure at all n locations
catcttcctagctcgctccgtttttctctctctctcgccaaacgcttcttccactatgccttcccaatcggttctggttaccggaggagccggttatatcggtagccacaccgtccttcagcttctcctcagcggttaccatgtcttcgccgtcgacaacttcgacaattcttccgaaaccgccatcaacagagtcaaggaactcgccggagaattcgcaaataacctttccttttccaagctagacttgcgggacagagctgccctcgagaaaatattttcaaccaataagtttgatgctgtgatacattttgctgggctaaggcantgggtagaagcgtggataaaccactgctctactttgacaacaacttgatagggacaatcgttctatttgaagtcatggctgcccacggatgcaagagcttgtgttctcatcttcagcaactgtatatggct

SEQ ID NO: 209090 - DNA, 452 bp, Glycine max
ggaaaatcaaaagcatataaggctatgtaaaactttattatggataatgaggtaaggtaagattatcccggttagtcatactctataatggggggtttaaatttacaaaacaggatgcagtcatgttcatgaagaacatgaaagaatccccattcaatattctgtgagttggaacctaaagaatcgctaagtaaactaaaccactacttatttaccactttattataattcataataaactaggaaatgatttaacttccaccttaaaatagctaaagaaaaactttagggacctattgggcgacagggttcaaaatgaccccaaaagagaacatatttcctatatccgacattcatcgacatcaattggaggaatctgcagatgcaccatagccataagggtttttgctagcccaattccattgatcgcggcacatatcatcgatgcttta

SEQ ID NO: 209091 - DNA, 460 bp, Glycine max
caaccaaaaggtggtggtccataacataccaaaagtgtctaatctaacgaaacaaactcaacctgaaaactgtatcaaagccagtgcagaaaataacaatccatcatcactacgtaaactccaaaatataaaccttaagaaacaaggttgtcattaagagataacgaaacaaactcaacctgaaatctgtatcaaagccagtgcagaaaataacaatccatcatcactaagtaaactccaaaatataaaccttaagaaacaaggttgtcattaagagataaggaagccagctgatcagcagtaccgccagcctgctgctgagcaacattccttaggacgtccattgcctcagccacctttgctttcagggcttctggcgactcaagcaaatgcagaacttcagtctggtccatctcaagaagcatgcctgtcactttggcagcattatcaggctctaact

SEQ ID NO: 209092 - DNA, 497 bp, Glycine max
tgcaaaaacaagttgtctctctacactccctcattttctctctctagctttttagagagagaaagatcatatcccagaagaagaagaagaagagtctgaaaacatggagaagaagagatttggtgtgttgatgtgcgcagaggattcagagtacgtgaagaaagtgtacggaggatattctggagttttcgtgagaatgctggcggaggagggagagacatgggacgtgtacaaggtggcgtgtggggattttcctgatgaagatgacttgggtctctatgatggctttgtgatcactgggagttgcagtgatgcacatggcaacgacacatgggtgaatgatctcctcaacttgctccgcaaactcgattccatgaacaagaaaatcctcggaatttgcttcggccaccagatacttgggcgtgcattgggagggaaggtgactcgttctcctactggatgggaccttggtgtcagaaccataacactgtcaccat

SEQ ID NO: 209093 - DNA, 529 bp, Glycine max
gcaccatccaacccatcaaatatgcatgtgaaaggatctagttcagatgtttttcgtgttagtgtctcatgtgcacccagcacatccagtcatggatctgcacctgatgattatgatgctcttggggatgtatacatctggggggaggttatctgtgagaatgttgtgcaagttggtgctgagaaaagtgctagttattctagcccaaggacagatattctgctacccaggccattggagtccaatgtggttttagatgtgcttcaaatagcatgtggtgttaaacatgctgctctattcacaaggcaaggtgaactttttacatggcgcgaagaatctggaggacgccttggccatggtgttgctaagaatgtggatcaacctcgtctagttgaagcaatggcttctacaactgctgattcttgcgcctgtggggagttccatacctgcgctgactcaatggctgctgaactatatacatggggcgatggtactcataatgccgggcgttttggtcatggcactgatg

SEQ ID NO: 209094 - DNA, 504 bp, Glycine max
gaagaacattgagaagagtcttgttgaagcttttgagcccatcgggatcagcgactggaactctatcttctggatcgcacatcccggtggtcccgcgatcctcgatcaagtcgaggagaagctccggctcaagccggagaaactccagtccacccggcatgtgctgagtgagtacggaaacatgtcaagcgcgtgtgttttgttcattctggatgaaatgaggaagaagtctaaggaggaagggaagagtaccactggagaagggttagagtggggggtgctattcggattcgggccgggtctaaccgttgagaccgttgttcttcacagtgttcccttggagggataaatcatgctgatgcggtgactagtgattaagagtgatcaataaggaaccctcggaaataccagggaacgtttgctattattactagtttcacttgtggacttatcgtagcatactgttgtacaagaataatttaatatgaacaagatcgtgtgttt

SEQ ID NO: 209095 - DNA, 478 bp, Glycine max
caataacaaacacacgatcttgttcatattaaattattcttgtacaacattatgctacgataaatccacaagtgaaactagtaataataacaaactttccctggtatttccgagggttccttattgatcactcttaaatcactagtcaccgcatcagcatgatttatccctccaagggaacactgtgaagaacaacggtctcaacggttagacccggcccgaatccgaatagcaccccccactctaacccttctccagtggtactcttcccttcctccttagacttcttcctcatttcatccagaatgaacaaaacacacgcgcttgacatgtttccgtactcactcagcacatgccgggtggactggagtttctccggcttgagccggagcttctcctcgacttgatcgaggatcgcgggaccaccgggatgtgcgatccagaagatagagttccagtcgctgatcccgatgggctc

SEQ ID NO: 209096 - DNA, 337 bp, Glycine max
  unsure (1)..(337): unsure at all n locations
cacaaaacttgctatagcagtaagctataactcatttgaggctctgtgagaattgagaaatggctaaagatgttgaggttcaagagcaaggaggagagtactctgccaaagactaccatgacccttctncagcacctttgttcgacccagaggagctcacacagtggtccttctatagagccctcatcgctgagttcatagcaacccttctcttcctttatgtcactgtgctcaccattattggctacaaaaggcagactgatacaacggtaggtggcaccgactgtgatggggttggcattttgggcatcgcttgggctttggtggcatgatcttc

SEQ ID NO: 209097 - DNA, 491 bp, Glycine max
  unsure (1)..(491): unsure at all n locations
tgtaaatgcattgacaaggccttagagattttccattctactcttgagaagaatattgtatcttggacatctataatccttggtcttcgcatcaacaaccggtgttttgaagctttatttttcttcagggagatgattcgtagactgaagccaaactctgttactttagtttgtgtcctttctgcatgtgctagaataggagctttgacatgtggaaaagagatccatgcccatgcattgagaactggagtaagctttgatggttttatgcccaatgcaattttagatatgtatgtaaggtgtggaagaatggaatatgcttggaaacaatttttctcagttgatcatgaagttacctcatggaacattttgctaacaggatatgcagaacgtgggaaaggagcacactgctactgagcttttcagagaatggtagagtcaaacgttagtcctatggaagtacatttatctncatattatgtgcttgcagc

SEQ ID NO: 209098 - DNA, 481 bp, Glycine max
  unsure (1)..(481): unsure at all n locations
aacacactctgtgaaaaagggggagtttcttattccttctagacgcttccattgatcggcgatttctgatacatggcggagcatcacgaacacgaggaagtgaagggtgagtccttgttggagaagatttctgggaagatccacgaccacgattcctcgtcttcgtcggattccgacaacgacaaaaccagcgccactgattccttcaagtctaatgttttcaggcttttcggcagagaaaagcccattcatcatgttcttggcggtggaaaaccggctgatgtttttctatggagaaacaagaagatatccgcatcgacactcggagttgcgaccgctatatgggttctgtttgaattgcttgagtaccacctcctgactttggtttgccacttcctgatccttgctctggcggnggtggtcttgtggtccaatgcatccactttcatcaacaagagtcacaaagatcccacagtgcaca

SEQ ID NO: 209099 - DNA, 502 bp, Glycine max
  unsure (1)..(502): unsure at all n locations
attcattcctctttctctctgatcgcaaactgcacctctacgctccactcttctcattttctcttcctttctcgcttctcagatccaactcctcagataacacaagaccaaacccgctttttctgcatttctagactagacgttctaccggagaagcgaccttagaaattcattatggtggcaacagctgctacttcatcatttttccctgttacttcaccctcgccggactctggtggagcaggcagcaaacttggtggtgggcctgcaaaccttggaggactaaaatccaaatctgcgtcttctggtggcttgaaggcaaaggcgcaagccccttcgaaaattaatggaaccacagttgttacatctaaagaaagcttcaagcatgatgatgatctaccttcgcctccccccagaacttttatcaaccagttgcctgattggagcatggctcttgctgctatcacaacaattntcttggccgctgaaaagcagtggatga

SEQ ID NO: 209100 - DNA, 541 bp, Glycine max
  unsure (1)..(541): unsure at all n locations
ggtcacaaggaaaattgcatctttaattgggccaagagaaaaagaataataatatacatgcctagctattttgaacaagcaattaaatattgaagacagcctagcagtagcgcaatcagagatgaaatgaaatatggagcagcagaaagagagaatacagcagttgctaattacaatgagaatgagatttactgctgcttttcccccttacccaccaaagtatcacaaattagaaggtgtatatatataaagacatgtagattgattggatagacacaagcaaaactctccccagggaccagaataagtctaaacatagcaaggagactgatgcaactccaatcgttaaccatttcaaaatcttaggtgctttctgctggaacctggttcacaacaccaaagttgttcacaggtttgggcctccactcagtcctgcccctcacaatctcagcaccattttccagtcgaagcaaatgcttgcactcaacatgcccgctgtgagctagattgcccatgtcggncccagatacagcagtcaggg

SEQ ID NO: 209101 - DNA, 420 bp, Glycine max
caaatcatacattaataatcaatacatgaagttgatttttcgaattaaaaagccctgtatggcattcaataacagcttcaacctgcccaaaatgctacggtagcacagatcctcaggccatgactgataaccatatcagtaactggttttatacaaattaaacttcatgcctgacgtgctaaaggcctgtgtggctttggagcattgggatttccttgctcatagaatgttcgaaagagaagaacagcttttgatgccattatacatccagtacatttgaaacactttccgggtgaaacttcattattgagcgggggggtgttacttaaatgcaatgacagtttcgatccacagcctccaaatttatcatttgaacagccataaaatacttcctttatacctaaaattgataaagcagat

SEQ ID NO: 209102 - DNA, 386 bp, Glycine max
cgtgcctgcccctatacctcaccccacttactattattattgtacaacacaaccaggtccctgaatgctttttagagagagaaagagtaataataataaagtggaagaaaaagaattaggagagtgaaacaagaagaagaagaagaagaagaagaagaagaagaattgagaagatggtgtttgaggaaactgagctgaggctgggactgggactatgtctccctggaaatggaaccacggcaacaactgaagctgctgctgcggaattaggagtgaggaagagagggttctctgagactgaaactgatgaaacagccaccgttgatttgatgcttaacctctcacccaaggaagctgctgctgctgatggtgcagatccacgtgag

SEQ ID NO: 209103 - DNA, 504 bp, Glycine max
  unsure (1)..(504): unsure at all n locations
gcaacataatttagagtcattatcgtttgtgttcataatttatacttacgacatctcacaactttgtttgaaatatatattatataacaaaccataatgatacacagatttacttaactatattttttaacaccctgctctctccctctgtgtctgctgcagcttaaccttgcttcagttactaagtcaactaggcaccgctaatgatgatggagcagattttggactggtaactactagtctagctcctgttcttgcatttctccacggctcttggtgccagtccaatagcttcctttcctttcatgatacgtaaacgcttgcatgattcaacaaacatctcccatggcacatcaccgacaagcatccagtcgccatccctgtcttcataggtcgggacatagtcggagctgttcaaaagatccatcaactngctctcattcatgaaatccttgaagccttgtgattcacattttcaatggtgtaagagctaaacattttgcc

SEQ ID NO: 209104 - DNA, 469 bp, Glycine max
gggtttgcaaattatgatggcgacaagtgggctaaacacagaaagatcgtgagtccagcattcaatgtagagaaaatgaagctcttggtaccgatattttgccagagttgcgatgatttgatcagcaaatgggagagtttgttatcttcgtctaatgggtcttgtgagttagatgtgtggccttttgtccaaaacgtgtcaagcgacgttcttgctcgtgcaggctttggaagtagctatcaagaagggaaaaaaatattcgaacttcaaagggaaatgattcagcttacaatgacgctctttaagtttgctttcattccaggttacagggtttctgccaacgcataccaacaggaggatgaaagcaattgacaaagaaatacgagaatcacttatggtaatcatcaacccgaagattaaaagcatcaaagcaggggagcctactaacaaatgacttgtaggcatactc

SEQ ID NO: 209105 - DNA, 418 bp, Glycine max
gcaaaagccaaaaggtaaactctatcaatttaaaattcaaacatgataaagtttatataaggaggagtaattacaccagtaacttaggcaaaacaggtatatattgatcttggaaatagatttgaagtgaaggttcagatctatcgtctacataagaaactagcaggaataggaaaactaaaattgccaacacgcctcaaatgaagaagccttatttagactaaaaagtgcattctagagtttgcgtaaaatgagatgagccccacgctcaggctgaagagtgataattaaggagggggcatgagcataggagggggaaaaatggagggagaaacgtcttaggatcattgacacagatacttttgcttttaacaagccaaagttttgttctatgcagagtcgtggaccccatccaaat

SEQ ID NO: 209106 - DNA, 536 bp, Glycine max
  unsure (1)..(536): unsure at all n locations
ctcggactcaaacacacagcacgacgaaacctagcagcctcacgccctcatcgcagcagggacctagccgtcgccggagacgcactgagtctgagagcagcggtgactaaatcaggtttgtcaaagaggaaaaaggagagttacgattcaggtttgaagcactaaatcaatcaaaattgtagcaatgggtgagagcaagaaacgaaagagacacagaaacaaacgtggtggtaaggaggagcaaccggttcttccttctccttgtgctaagcgcacaaagctgaaggaaccctcttcctttcttcaaaagatgcgagcaaggttgtctggtgggcatttcaggatgattaatgaaaagctctacacttgcactggggaggaggcgctagattatttcaaggaagaaccttcgctatctgatgtgtatcatacaggatacaaaacacaaatgtcaaattggccagacagcncagttatgtaattattaagtgggctgaaaaacagagcctttcttttgtggttgccgattttggtgt

SEQ ID NO: 209107 - DNA, 531 bp, Glycine max
ataccctgtcctgtgccgtgacatctttaagccaattgcaatcaaacaaagtttcagtttttggtgttccatttttcttcctccatctttatcttaaacataacttgaactctccattccttaaattttagctacgagctagttccgacacagacaaagcaatggcaaagaccgagttagaggtgactgttgagagcaagaacaaagacctcaagcacctggggtttgtgaggattgctgctattcaaacatttgtgattgtgtcaaatctgtatgagtacgcaaagcagaattctgggcctttgagatccgtcgtaggaacggttgagaacactgtaaccaccattctcggtcctgtctgcaacaaattcaaggacgtccctgatgatgtccttgtttttgttgacaaaaggtggatgaagcttcccacagttcgatgagcacgctcctccttttgctaaacacattgcggatcaagccagggtgtgattcagaaagtgacttgtgaggcagggaaagtagcaagtgaag

SEQ ID NO: 209108 - DNA, 542 bp, Glycine max
gcaataactcgttgtacattcctagtgtgtgggagagacatggctaagatgtgtgttttggtgttggttcttgctctggctgtggccacaagtgccagaaacgttcccaaccccaaggatgctggtcttaaagaccagaagaacttcatcagctatggtggagttggtggttattccgggattgggaacaatggactgccttttggaggagctggtgccggaataggtggtggttttggcggaggtggtggacttggtggtggcctcggcggtcctaccggtgggatcgcagggtttggcggtaccggtagcggtgtcggtggcggtattggtggtggcgttggaactggcgttggtggtggatgcggtgttcttcctttcccttgaaatgatgaacatgcatgcatgcatgcatatatgctccgtcacgtttctttggattacactagtctttatttttcgttcgggaaataattgtggtttgtgcttgtacgtgtcgttaatcgttcaagcttctgtctagtgtttctctcgcctgtgga

SEQ ID NO: 209109 - DNA, 415 bp, Glycine max
catataaaaatagagggatctccttctcttatccagagaagcatatatagagaaagaaagaaggccctgccctatatagctgaaggcagtgtgcacaaactctgagactgcatattagagtttgagtcttcactctgaagcctaacttgggtttgtgtctctcatagcaagatgatggaaaacggtggcaaacagacatttgaagtctccaatgacacgcttcaacgagtaggttccaagagctttgatgatgatggccgtctcaaaagaactggaactatttggactgcaagtgcccacataataacagctgttattggttctggggtgctatctttggcttgggctattgctcaactaggttggattgctggtcctgtggtgatgattctattcttattgggacttattatac

SEQ ID NO: 209110 - DNA, 454 bp, Glycine max
aaggaactgggtctggtaccaggaattcctgttgggacatcattaattgatgctcatgctggtggtgtgggggtaattgaaagtgtgccacaatcagaagctgcagatcatgacaaggaagcaatttgcaaccgtatggtgttagtttgtggaacttctacatgccatatggctgtatcgcggagcaaattgttcattcctggggtttggggtccattttggtcagcaatggtaccagaatattggctaacagaaggtggacagagtgctactggtgcattattggatcatataattgaagaccatgctgcttctgcatgccttgcaaatcaagctgcttcccaaaagatttcattgtttgagcttctgaacaagatgttggaaacaactgatggttgagctgaacctatcctttattgcagccttgactaaggtgtacatgttcttcctgact

SEQ ID NO: 209111 - DNA, 419 bp, Glycine max
caaaacactcataacacaaagcacaaagcaaagctcatccttgagttaaaaaatggcagcagcttcttccatggctctctcatccccatccttggctggcaaggccgtgaagctgggcccatcagccccagaagtgggaagggtgagcatgaggaagaccgtcaccaagcaggtctcctcaggaagcccatggtacggcccagaccgagtcaagtacttgggcccattctctggcgagcccccgtcctacctaaccggtgagttcccaggcgactacggctgggacactgctgggctttccgcagacccagaaaccttcgccaagaaccgtgaactcgaagtgatccactccaggtgggccatgctcggagccctggctgcgtcttccggagttgctgtcccgcaccgggtggaagttc

SEQ ID NO: 209112 - DNA, 470 bp, Glycine max
ggaaaaagcaagtaacattaagttggattcggatacacaagataattcacattatctgaagtacttcaccaaacacaaatctaaaaactctcaaaagtcatttcgttctttgacgctcactttccggggacgaagttggtggcataggcccaggcgttgttgttgacagggtcagcaaggtgatcggcgaggttctccaatggaccctttccggtgacaatggcctgaacaaagaagccaaacatagagaacatggccaatcgtccgttcttgagttccttcaccttaagctcagcaaaagcctctgggtcatcagcaaggcccaatgggtcgaagctgccacctgggtagattgggtcagtgacctcaccgagggggccaccagcaatacggtaaccttcaacggcacccattaggataacttgtgtggcccaaatggcgaggatgctctgggcgtggatcaggcttgg

SEQ ID NO: 209113 - DNA, 427 bp, Glycine max
aaaccaaaacaaaaaaggcaaagccatacataaacacacacaaacatagtgagagtgagtgagtgtagtgtagtattgttttgtagctaagcaaaaatgagtttcaccttcaccaccatgaccttgaacttggtcctcttaatggccatggtggccaccaacatcctctccctctaccacctctcctccaccctccaatcccccaaatcccccaaaccacccccacctgtccccgaccaactcctccaccagctccacaccatacgcgccaccatcaaccacctcacgctcctccagaacactaacaacccaactaaaaaatccaccatcccctcagatctactcttatactcccacctctccccaatagcctcctcctgccacaaccaccccgaactccttcacatgtacatgacttacacacctt

SEQ ID NO: 209114 - DNA, 395 bp, Glycine max
ggccttcaatttcacccttcacacgtggtggtggtgttgttcttcttctcttcccctttctttttcttcttctgagcttgtttaagctctttctatttgattccattaacatatattatcacaatgtgtggcattcttgctgctcttggttgttctgatgactctcgagccaaaagggtccgcgtgcttgagctctctcgcagattgaagcaccgtggccctgactggagtgggctccatcaacatggtgactgctttttagcacatcaacggttagccatagttgatcctgcttctggggatcaacctctctttaacgaggacaaatccgtcattgtcacggtgaatggagagatttacaaccatgaagagctcaggaaacagctgcctaatca

SEQ ID NO: 209115 - DNA, 433 bp, Glycine max
ccatcatgaactgataatagaaacacttttattaagacttcaaatcacagcattcaagataatacaatacgctacacttttagaaagccttatatctatatctatacactacaaagctttgccaagataaaagtacactgcaggcaaatttttcatacacgtttagcatagttcattctcccccaattattctttgtcacagctttatattatccctggattgcaacaccaagaggagcagcatccataggtataatcttctcaatttctacacccttgttgtggttctggttttcataggctgaaatgtgcactccaagtgctgctctaccagaaggatcaaggttgttagaccaagcagcatcccactcaacagctttggctgtgctacatgcaacacttgctcctccaggaacggtgagcctagctgagt

SEQ ID NO: 209116 - DNA, 453 bp, Glycine max
  unsure (1)..(453): unsure at all n locations
gttttagcgcagcttcttctagatttaaggaagatgggtaaggaaaaggttcacatcagtattgtggtcattggccatgtcgactctgggaaatccactaccactggtcacctgatttacaagcttggaggcattgacaagcgtgttattgagaggtttgagaaggaagctgctgagatgaacaagaggtctttcaagtatgcctgggtgctggacaaacttaaggctgagcgtgaaagaggaatcaccattgatattgctttgtggaagtttgaaacaacaaagtattattgcacagttattgatgcgcctggacatanggatttcattaagaatatgattactgggacactccagctgactgtgctgttcttattattgattcgacactggtggttatgagctggtatttcaaggatggacagactcgtgacatgctctgcttcattcacc

SEQ ID NO: 209117 - DNA, 402 bp, Glycine max
ggaacactacaaatagaaaggtgacatttaataaaccaaagcaacacaacgcagcaaagtcctgaaactcgctgcgcttaacaaaaatgtaatcaggggttccgacaaacacaacacattaaaacacagataaataaaagcaattttgccaccgtcgatcaagaacccagttctgggaacaacagttgcgagatgatgggggagacttcaaactttgtccgaaaaacaagcttcctagaaaagaagacacatgagtccagaaaagaaaccaacatttattgtaaccaacatcccctgatgaaccagcccgcacgattcacttctttttctgggcagccttggtgaccttggctccggtaggatccttcttctcaacgttcttgatgactcccacagcaacag

SEQ ID NO: 209118 - DNA, 316 bp, Glycine max
caagttttcccctccgcggaacaaaatggggatgggaactagcacctttgttactagatggatcaactttctcaccatgcttttggccattgttgtgataatatttggagtgtggatgagcactcatcatgatggctgccgaaagtctctcactgtgcctgtaataggcctcggagcagttattttcttaatatctgtagttggctttttgggtgccctgaaaaacaactccatactattatggatttatctgatcacgttgttctttgtcttggtgggaatcctggtcttcacagtattggtgttcatcgtgact

SEQ ID NO: 209119 - DNA, 358 bp, Glycine max
tcgaggtggggtaggtactctttggaaatgtctgctgttatttacaaggactgggttttcactgatcaagcattgcctaatgatcttgtcaagagaggagttgcggttaaggatccatctgctccccatggagttcggcttttgattgaggactatccttatgcttctgatgggctagagatatgggatgccatcaagtcctgggtgcatgaatatgtctcattctactacaagtcagatgcagcaattcaacaagatcccgagctccaagcttggtggaaagaacttgtccagtgggtcatggtggatttgaaagataagccatggtggcaaaagatgcaaactcgggaaaagttga

SEQ ID NO: 209120 - DNA, 497 bp, Glycine max
aaggacaacccttgctgtaatggaaatcgtttacataagatgatgatttattctagtttgcactttgccatgccagctatcattgttgaaacatgcgcgagaacacttaacagcaatttatacaaacagaatttcttcattaacacttaacagcaaacacgagaacattcaatcaccccaaatacataacttaaccatacataggtagatgaaggaatcatattccttctattcacttttattgaaaaccagggaaagtactgcaacaaccatagagcccctagatggagatactgttgggaattcctctgaaagtcaatccctcctcactagaaggatagagcaaagtgtaaggcattttagccggcccactgcggtttctcaacgtctcgtccttgttcttctgtataagcttttgttcaatctcttgaagcttctttccaaacctcttgaaggcctctagtggaccagcatcagaagtccaatagtcaccacca

SEQ ID NO: 209121 - DNA, 525 bp, Glycine max
  unsure (1)..(525): unsure at all n locations
gcaattgaagttgaagtcttgcccttctctcttcaactccaaacacaagacatcatcatccatggctgcctccgtctccactgtcggagctgtcaacagagctcttttgaacctgaatgggtctggacctggggtttcagctcccagttcatccttctttgggagcagcttgaagaaggttattggctcaagggtccccaacacaaagatttcctctggaagcttcaagattgttgctgtagaagagaagaaagagattgaagagacccagcagaccgacaaggacagatggaagggtcttgcctatgatatctcagacgaccaacaggacatcacangaggaagggttttggntgactcccttttccaagctccacaggatgctggaactcactatgctgtcatgagctcctaccagtaccttagcactggacttcgncagtacttggggacacacatggatggattttacattgctccagcttttatgggacaaacttgtgttcacattacccagaacttcat

SEQ ID NO: 209122 - DNA, 507 bp, Glycine max
aagtggacactttaactcaaaattatagaggaagacagtccaatatgaaaaatatagtaaaatcatctcaaacttggcatcttctctttgcacctaagacattgagaattctaagaatgttacacgcaagtcccatcacaacttctagcacttggatcagcacaaccttcaggaacagaaatatttacttgccaagtttgctttgcctccaattcaagattggaagaaagttcccctgttaatagcatcctcgttagcatttccaagtgcagcctcgttcaagtacttgtcagccaattggactctcttgacattctcttgttcttggacaagcatgttaccatacgtcaagagcttctccagagtcatcttgggctgctcaaaggttggaggtccatcttttgagttcacaagcttcttcccaatgccgtcaacaccaacaccagaaatccacttcctcacttcgtcatcatatactctggccctcagtgcaccaaagaaatcaat

SEQ ID NO: 209123 - DNA, 468 bp, Glycine max
  unsure (1)..(468): unsure at all n locations
cctgcagagacgcgctggagaagaagatagggctgcaactcgaagaagccacgctcgacgaccttctcgtgccgagttactcgtacctgaacgaaacgctttacgacgtcgattgcgtggagaggattttgagtcactttttggaaggtatggaagcaagaaacgccacgaagacggaggatgcggcggcgacgaggtcgccggcgctgatgctcgtcggaaagctcatcgacggatacctctccgagatagcttcagacgcgaatctngaagccgagaagttctacaatttcgccatctcacttcccgacgaggccagactcttcgacgacggtctctaccgcgccgtcgatgtgtatctcaagggcacatcgtgggttttggaagaggagagagagaagatttgcggattgttggactgtcagaagctgacgctggangcgtgcacgcacgcggcgcanaacgaga

SEQ ID NO: 209124 - DNA, 502 bp, Glycine max
  unsure (1)..(502): unsure at all n locations
ttccatatggctattaccaaatgggatgaaactgtgtcaagagaaatggagctcatggtcaaggagaaaggcatcaactcttttaagtttttcatggcatacaaaggagctcttatgatcaatgatgagcttcttctggaaggatttaaaaagtgcaagtctcttggtgccttagctatggtccatgcagaaaatggagatgctgtgtacgaaggtcaggaaaaaatgatagaacttggaataactggtcctgagggacatgctctttcacggcctgcagtgttggaaggagaggcaactgcccgtgctattcgtttagctgattttgtgaacactccttatatgtggttcatgtaatgagcattgatgcaatggaagaaattgctaaggcccggaaatcaggacanagggtaattggagagcccgttgcctctgggttagcccttgatgaatcttggctttggcatcctgactntgagactgctgcnagtatgtcatgagt

SEQ ID NO: 209125 - DNA, 544 bp, Glycine max
gaaaaaatgggttcttcttcttctatgtggacggtgtgtgtgattttggcatcactggcctctgcagcactctgtgccaacccacgcaggccagtggatgtacaatttggccgaaactacgtgcccacatgggcctttgatcacatcaaatatttcaatggtggttctgacattcagcttcatcttgacaagtacactggtactggcttccagtccaaagggtcttacttgtttggtcacttcagcatgtacataaagatggttcctggagattctgctggcacagtcactgctttctatttatcttcccaaaacgcggagcatgatgagatagactttgagttcttggggaacagaacaggacaaccttacattctgcaaacaatgtgttcaccggaggcagggtgatagagagcaaagaatctatctctggtttgatcccacgaaagaataccacagatactccattctctggaacttgtatcagattgtgttctttgtggacgaagtgccaatcaggtgttcaagaacagcaggacttgga

SEQ ID NO: 209126 - DNA, 434 bp, Glycine max
gatgaataattattttggtcatattaaataattaataattcaaggagaaactgacatgataggatataattatataaaattgtacataggaagtggaaatgtgaatgtgtggcagggtgataaaaatgaaaagagaagcaacaataataaagtgaatgagaaatttaaatatcacggactaaaatatctattcactcgaaatttaaatgtcacggtctcttttgcactcaggaggagagatatgaggatagcgtttagtgtcagtgcagtagttgtagatggtgtatttctggcgcacccatctgagcctacgccactgggcggcgtcaaggtcacggaactcaggctggtcccaccacctcttggcctgcgtgtcgcaaaacttggcgttcaccgaagcctagcacccgtcgatgtgaaaccccttgtacgct

SEQ ID NO: 209127 - DNA, 522 bp, Glycine max
  unsure (1)..(522): unsure at all n locations
ataagcatgggtttgtggaacacaacgaatgcagtgtcttgccgctttcacaagtttggtgatgaccaaaagaatctggtcttccaaggtgatgccacgtcttcttccaggggcatagaactcacaaagttagacggtggaggaaaaccagtgggtggcagtgtggggagagtgttatactcttctccagtgcacctttgggaaagctctacagtggtcgcaagctttgaaaccgacttcaccttttccatctcatcagactctactactccaggtgatggccttgccttcttcattgcaccatttgacactaaaatccctccaaactctggtgggagcaaccttggactcttcccatcaacaatgttgttgctgtcgagtttgacacctaccctaatcgtgataagggggatccagattatagacacattggtatcgatgtcaactctattgtctccaggcaactgtangtgggagtggcanaatggcanaatagccactgtacatatcagctataactct

SEQ ID NO: 209128 - DNA, 554 bp, Glycine max
actcttaataacataatattcatattcattacttataaaagtgaaataacagacacgtacgtacataattaagcagtagtggactaggtagtacgtactctagtctccttatttgtccttaattattggcacacaacacaacacaacatagcatagctagatgagatttattaagatggaaagtgaatgaccagaatcatccgatactgttgttgaaggctaaagaccatgagtgaatggtatttgcttgtttctgctgtccagttgaagcagataatccaaccctaacccattcaggaagcactttgttgagctcaatatcatgggagagtgtcacagtttgagtgccaggatagaaagcagcaacagtgagtctcttagaggcagagttatagctgatatgtacagtggctattttgccattttgccactcccacctagcagttgccttggagacaatagagttgacatcgataccaatgtgtctataatctggatcccccttatcacgaatagggtaggtgtcaaactcgacagcaacaacattgtctgat

SEQ ID NO: 209129 - DNA, 407 bp, Glycine max
catgaaatattctttcaaagtcattgaattcagctcaatgaactcaattgctttttcttatccttgtagtcaaccactacatataattgaggaaatgagattgtcttaaaagtggatcaagatatataaaaagatacaattgtttcagaacatattacattacttgggataaagaatggtcagaagcttatggcgacaaaatgaagcatgatgacatcttcaataggaagcagcaagatatgactatttcgtgtcaacagcatgtcagcatttcctaacactttcaggagctcccgagtattacattgaatgtttcttttactttccgaaccaaagcttccctgtcgggtttgaaaactatgttcttgtatacaaaccacccagtgtatgcaatgccctcgagccca

SEQ ID NO: 209130 - DNA, 530 bp, Glycine max
tttgttttttttttttttttttttttttttttttttttttttttttttttttttttttttttgtttttttttttttttttttttttttttttttttttttttttttttttttttttttttttttttttttttttaaaaaaaaaacccccccattcttggtttttggggccgcccccccccaacggggagaactaccccaaaaacccacgcggggggagggggagattaacaacacgggtcttgggtctccaaacacaatcccgtgcccctttgcaggaaaaaaacatttcccctttggagccccccgggggttcttcaattagggaccaaaagggggggggccccgggggggaacccgaccggccccccctttttggttttttttccccccccgggggggggaaccacaaaaaaggacgggggggggcttttgggccttttcctgcaacaaaacttttttgggccccccccaaaaaaaaaaacgcggccccctcccccacgaaaaaaaggctttttgggggggggccccc

SEQ ID NO: 209131 - DNA, 448 bp, Glycine max
gttaatcaaagcaattttaaaaattttcattaaaaatatttccggtagacctccaaagataaatacaaagaataacaaattgtctacggactatgaccctcatcatcacactctctaacagtactcaattgatgatgcatggatatgtgtttgtgtaatttcaattaagccttcatgaagctaagtgcgtgaggaacacggagagctttcaaccagtcgcttccaccgttggctccagcctgtaggaactgggcaggggtgaattgggtagcttcttcgcggctaataagaccacggtaacccttccacttgatccttccgttaacgttggcaccaggtccatcgttgttgtattcagcatagtacaaggtgtcttcgaagtgttcaccggcccatgggcaccatccttcggggtgaaggaagtcacccacggtggattccatcacaa

SEQ ID NO: 209132 - DNA, 436 bp, Glycine max
  unsure (1)..(436): unsure at all n locations
aagttaaaatcacttaatagaattagaagaaaaaaaaaatcaaaatcaagattctagatattcattgccaaataaacaacgaactttgacagaagctgaaccagaaaagactaacaataactgcttaaaataaaatcatgccagacactgaattatgtggtcctattgattaactgaaagctccttccgcttatatcggaccatcactttccccttcactcccacaaccatggcattccaatcgatctctggaaaaggtgacaccaactccagctcaaaattcctaagcagatgagtccatattgcttttatctgcagatatgcaaatggctccccaaggcatccatgtctgccccctccaaatgaaatgtatgagaatgcacctgccaccttgtnctcttccctccccacagcaaatcgatcgggatcataccta

SEQ ID NO: 209133 - DNA, 410 bp, Glycine max
  unsure (1)..(410): unsure at all n locations
gggagaactcaaattaatttcattcaggttacttgcaataactataacagggggtaatgatttggggctagactagctagcatagagaattacagaataaaagcctaaacatgtgcttagcagtttcctccttcataacattacattgngcaaattatttcnacactaccaaaacttnnnccccttccacacanaaggcatccatccttatatttaattgttagaaacatgtatagcagcgacaggtgagaccatcgagtccaccccacatacattgcgacctctgcagatcttgtaatatccctcttctccccagctctccccccatgaattctttatgatccagtaaggcttttccttaaaacgaattggagcataagcaccagaaccataccccaccaaaagaaccc

SEQ ID NO: 209134 - DNA, 480 bp, Glycine max
gggtgctaaagatgagtttatttcattaaaagctacacaaaattcattcgacatgctaaaattacagtcgaacaggaggtaatgtaaaatgcaaaaaactcataacttacggcatggcacatttgattctgaaagtacataaccctgactaatttgcatataacaactaatgctctcgcacgcttcaaatactcaaaggtatcatcttggttgattccagaattacgtgttccagcaactttggcaaggcagtgagctattattccatgttttaggaattggcttccctagcacgatgagaatttcatgacagtagggtaatcttcacttcatttcaagttttttcaaccaataatcaagttggctggcaacacatgctgacccggtggagccataagagacaaatttcttaatcgcattttctactccaagaaattcatacacatcctcctcaaagactggatttatacttctcagctc

SEQ ID NO: 209135 - DNA, 501 bp, Glycine max
  unsure (1)..(501): unsure at all n locations
aaataaacttattattatgcaagcacacaagtaaagaaataagaaagtcttgcaacataatttagagtcattatcgtttgtgttcataatttatacttacgacatctcacaactttgtttgaaatatatattatataacaaaccataatgatacacanatttacttaactatattttttaacannntnntnnnnnnntnnnnnnntnnnaaaaattaaaaattaaaaaaataataatttaaatantntcctctcatgatgatggagcagattttggactggtaactactagtctagctcctgttcttgcatttctccacggctcttggtgccagtccaatagcttcctttcctttcatgatacgtaaacgcttgcatgattcaacaaacatctcccatggcacatcaccgacaagcatccagtcgccatccctgtcttcataggtcgggacatagtcggagctgttcaaaagatccatcaacttgctctcattcatgaaat

SEQ ID NO: 209136 - DNA, 440 bp, Glycine max
  unsure (1)..(440): unsure at all n locations
aaatagctcgtcaacaatcgccttcattagcaaaaacaggcaccacctgctaatgactgaggtacattatagacagcagcaaatctactcttgccgccaaatcatggaaataaagaaaaagaaatacagcttttcaaatgtaatcaagaacgaacaaggttaanagtngngnnnnatttttttttttatttttnnnnnnttntttatatttnntatatataaaaaatttaatttaaatttattttatttatttanaaatttttttttattttatcctggagccaggtaagtacaggggattaaggagagtctttatgtaaagctcatgcacctcttggaagaagctcttgataccatcatcattacgggagtcatgtagcaacataaatcgggtatgaccagctgtaacatacactgacaccacaagttcattaaacctg

SEQ ID NO: 209137 - DNA, 395 bp, Glycine max
  unsure (1)..(395): unsure at all n locations
ggcaatgtagtagcttatcgtgctaggggagtacaacaccatggacagaaggctaaaagttagacctctttttgtagaaaacaagagaataagaggttttattggttctacttgattcatttatttgnactaatttctagctgactattttttagtttcgacgtgcagatttcatgctccatgcttttaggtattccacggtgatatgctcagtaccgttattgaacacaaacaaatgagcttttttctttattgctagggtaggataaaccctagacaagatgtttgttcttccttcggctccaaaactctccactactgagtgatcaatcaaactcttgagagagagctttttatttttggctaaatccacattcacaaagcctgcaaatgat

SEQ ID NO: 209138 - DNA, 458 bp, Glycine max
aacattatatatatagagagcactctgcaaaagttacaggtagcaaataatgtacacacctctctcacaaaatgcaacaagcggcaattcatgagtactgctgtgctgtccagtgcacatcctacttttaatatatatatttactttgttttatttaattattaattaactaatacacattaaaaagaagattgattttaagtttgaggtagagtaggtgatgaggaggatcagaaggaagaagccttggcgagtgacttgatggtaacatcgggacccagaacaactggtttaaaatcgaacgtaaacgtgtcgtaacgcaggaagaattccaccaagtagagcctgcacatgagcaccaccagattcttggcgggacactgtttatcatccggtgtgggctcctccgtctggggtcccgtggaccacaagacgtgtctcaagagcttttccccgtc

SEQ ID NO: 209139 - DNA, 484 bp, Glycine max
ctagaacatgattttattcaactgaaccataatatgtaccacattagttcattacaaagatgaaaaaataatactcaaatttggaaggccgagtaaattgacattaattaaaaaacagaatatgaaactatagatttatttgcttatagaaagctctatctgtcacaacctaatttgtttccatctcttttatctttaattatatctcaatatttttcagacgtggtctatatccatgactcccttgctcgtgttgaggttcggtgttacctgacttactttctcacctataattattcacatacttaatacttatcattctgttggtgctatatacagtaacttgagtgcaagagacacacatccagcagaaattatggcacgcggcactcttctatgttccaaatttccttggcatattgagcaattgtccggtcactgctgaattttccactccctgcagtgcttaggatggacattttta

SEQ ID NO: 209140 - DNA, 498 bp, Glycine max
caaagtgaagattttatcttaaaatgttatgtacattagagtatcataaagaaagctaggccaataaattcaagttgttaaagcagacgtggataaatcaaagactgaaaccaacacaactagtaatcaacatttggagttcattttgtcgttctggatggggttgtccgactccaaaaatttgccccagatggggtgtttctgccaaaccatactcatttcctcaagtgggatgccctttgtctcaggcaataacttcgcgatgaataaggtcatgatcaccacaaagcacccaaagaagatgaacaaaccaaactttatgtgacagagcattgatgtgaaaaattgagctatgaagaaagtgctgatcatgttgacaccaactgtgatactctgagcagcaggtctaatcttcaggggaaagatttcacttggtatcaaccagcctagaggaccccatgaccaagcaaaacctgaaacatacacacagatgatccc

SEQ ID NO: 209141 - DNA, 516 bp, Glycine max
  unsure (1)..(516): unsure at all n locations
ttttttttttttttttttttttttttttttttttttttttttttttttttttttttttttttttttttttttttttttttttttttttttttttttttttttttttttttttttttttttttttttaaaaaaaagggggggggggaaacatttggaaccccccctaaaaaaggaggggttctcccccacccccggggaaaggccccctccccccccccaatnaaagtgtgttggggggggnnnnccccccccaaaaatttccccaaaaaaaaaaaagggggcccaaaaatggggttttttaaaaaaaaaaaaacccccgggggggggaacccctttccccccaaaaaaaaaaaaaaaaaaaacccccccccccaaaaattttaaaaccccccacggggggggggcccccccgggggggcgaaaaaagccctcccccccttttgggaaaaaaaaaagagcccccccccacagggggaaaaaaattttctcccacacaaaaagggtctcccccaattt

SEQ ID NO: 209142 - DNA, 471 bp, Glycine max
aatcaagttgataatcaattgttaaaggtctttgcagtatacaaagtgaagatttcatcttaaaatgttatgtacattagagtatcataaagaaagctaggccaataaattcaagttgttaaagcagacgtggataaatcaaagactgaaaccaacacaactagtaatcaacatttggagttcattttgtcgttttggatggggttgtccgactccaaaaatttgccccagatggggtgtttctgccaaaccatactcatttcctcaagtgggatgccctttgtctcaggcaataacttgtagatgaataaggtcatgatcaccacaaagcacccaaagaagatgaacaaaccaaacttcatgtgacagagcattgatgtgaagaattgagctatgaagaaagtgctgatcatgttgacaccaactgtgatactctgagcagcaggtctaatctcaggggaaagatttcac

SEQ ID NO: 209143 - DNA, 425 bp, Glycine max
atactaggactagctgtcgatgtatcgctaggaatgtagccaagtgcctgtacacccagggcgggcagagttgatcagggcaagcatccgctgcgtccggtttgggcgggggtagccgggtactgggaacagacattcgaaaacttggtgtgactagcacggggggagggtataacggcggaaaccacaataggacgtggatgcgaagtagatgagtttggccaaggggcttcgattaaaaaaaaaaagaaaagaaaaaaaaaaaaaaaaaaaaaaaaaaaaaaaaaaaaaaaaaaaaaaaaaaaaaaccctccttcttgatgacgcactgtcgtcatttcccaaggaaggttccattccgattgcaagctcgattactgggtttgagacgcacgtcgaggacactggcctcgaagtagccgtag

SEQ ID NO: 209144 - DNA, 504 bp, Glycine max
catcaatcaaattgtatatatttggtgttttgttaagcattttctagccaaaatccaaccaaatgaagaaatttgaggaacaatttgcaatgatctaattgaattcaaataaattttggtaataaaagccaaagttgtgaaagtacaaaatcaaatatcacagccattgcactaatcaagtttcatactcatacaccaattttttttggaatgattgttactcttccatagcatctccttcaatcacttccaccttctccttcaacggtgtaatctttgttaagaggacctctgtctttttggggaaatcaaagccttttggattgacataggtacgaggatttggtagaaggtggttcctgagatattccttatgtcccttggttatcacacaaacatcaacattacttccacttcctaggtcattaaatataccagcacatatcgcctcaacaactagcttaatgccttcatccctactcaaactttccttgtacttagact

SEQ ID NO: 209145 - DNA, 327 bp, Glycine max
actgaaaaaccgccgaaggcatttcccattgaaaatatatctgtccaacatattaacatgatatactggtaaatcttggcaaccccagtaaaagctttcaaatagcttctaacctaaaaatgtaatacagtttgtttcctccccaacccccccaaaaaaaaaagaaaaaaaaacttgtcaaccaaatccgaatccttcatttgcttcatgaatggcaagcaggaacctttcttccaaatgttgtttagatggatactctggcaaatctaattgattgaaacaggtatgagcagaaggcaagtgatcagaactcccatatgccttatg

SEQ ID NO: 209146 - DNA, 484 bp, Glycine max
aacacgaaaggacaacacacacaaactttcctcattcaacaaattgcaacatccactgcaacatgtaacactcttacaaagcatttccttcacgaagattagaaaagaaaaaaaaaaatacttgcaagctcagaaaaacaaaactcaatatatttcaagactaaaaaatcggtaatgattttcaagcaatattgtggtatggtttaataataatagtataatctatatatatgaaggcaaacattatgcagcttgcttgagcttctttgtgatgccggcaatgtacttgccttggtggaatgcttgctgtaactcgagctcacttggctgtcttgagccgtcaccggcataagttccggcaccatatggacttccacctttcactttctccatctcgaacatgccagcaccaaacgtgtaaccgattggaatgaatatcatcccatgatgaaccagttgagtgatagcagtgagcgctgtagtc

SEQ ID NO: 209147 - DNA, 522 bp, Glycine max
  unsure (1)..(522): unsure at all n locations
gtacatgcatgggaaaataagttaaattacaaatggcaaaaattggcacgaatttcactcgaccttccaggctcccaactgtcataattacattgcaagaccagagaagtatgacacacgaccttaatgagatattccatgtattgctctgaaaactcagtagctgaagatcgttctgaatttcttcccttgaggcaccggctggtttcttcaagtataacaattgaagcagagtcatattgttaaacccctgctgcagcttttgcttgagagcccgacttaccctcagacgattcactctttcgtatcttcctagtaggtgtcctcatggtaacaaattcctcagctgcacttgggtgaatgcctacagtggcatcaaagtcagccttggtcaagcgagctttaagagcaactgcaaacccctgcacaatttcaggagcatcttctccacacatnatgcaacctagaacttcatttgttttgcacagactactaatttcataaaaacccggtctggaagcc

SEQ ID NO: 209148 - DNA, 189 bp, Glycine max
gttcagctacaaggcagaatttgaattcatacttcgacaaactgttgcgaagacattgtcaacagagactaaaatgatacagatgattaatacaatacatactaataggccttgaacagttcaatgcctgatcccagcataacttaagtcctctgtccagcccttggttgtcctgttcattttctccct

SEQ ID NO: 209149 - DNA, 535 bp, Glycine max
aaaagcagaaaatttacatcttcattactgccataaaagcatatggcggagattcatgtttttccatggacttgttatcatttccttatccatgaacttgttatatatagaatagaaatttatctattgttgttgtttggtcgcagcaatatggctaaaatttcagagaagtgaggacgttttgaaggggtgttgttccagcactttgtcataatgtgttttagagtttgttggcagtcttttgggatttcaggtcgaaggccacatgcagcaatgccaactgctgcttgtacaggtgaaaatgaagaataagctgcttcaccagttaccatctcccaaattaccatcccaaaactataaacgttactcatccatgtctctgtcacattctctggatcccctgcaattatctgttcccagcccaacaaaaaatgagagtaaaaccagtcagcatgggggcattgaaaacaatgtgtactaaaaaaatgtcatatttgaattaaataaatactatatgcatcaacaatgtaaaaga

SEQ ID NO: 209150 - DNA, 466 bp, Glycine max
attgaagaaacattatatatatgataattattttaccatagtcacgttgaagtatttattcacaggagaatacaattactagacacctccttttttaatggggatggcttgcttctctacataggaaaaatagtaaaagaaaattgataaggaaaaaggccattattgttgctcattctaggctgcacaagtaggagcttttcctgttattgtgggcttgacattagcacatttagctgttgctgcacttccgttgaatgtcagatcaatatcagccatctctacagcctcacatggtacaccactactacaaacaagaaccaccccttctttagttcctgaagtgcccttaatgttcttgaaggaaaccttgcttatcttgattcttgacggattctgtttggagcattggttccaaggacaatactcttggtctatgatgatagggttcataacattattcatg

SEQ ID NO: 209151 - DNA, 348 bp, Glycine max
agatgcaagtatttatacgagttgtcgatattataaatgtataatgcagatacaaggggaatgcatccaagattagagcataaaatttgaaacttctcaagggagaaatctggctgtacaggacaatgattcaagttgtctccctagtgtacattattttgcttacaagccaagagcaccaaggggtgtcttgccctggccagcctcaaagtagaaaatcagcatagccaacatagcaatcctagcatgcttaatctcagccaatttcagtctctctagcttgtcggcatccggaatgtaaacgccatccttgatagctccagcaaatcccaaagggtcaaagaattt

SEQ ID NO: 209152 - DNA, 436 bp, Glycine max
ctcgagccgcttcgcttccggcctcatcgttaacctcattcaggcaatatgctacgtggttgtgcggccggtgtcgaagaatctgtaccggcggatgaacagggtggtggcggagctgctctggctggagctcgtgtggattattgattggtgggccggtgttaaggttcaagtattcacagatcctgaaacctttcgttcaatgggtaaagagcatgctcttgttatctccaatcacagaagtgacattgattggcttgttggatgggttttagctcaacgttcaggttgccttggcagcactcttgctgtgatgaagaaatcatcgaagtttctaccggtcattggttggtcaatgtggattgatgaatatcttttactggagagaagttgggccgaggatgaacgcgcattaaagtcaggcctacagcaactg

SEQ ID NO: 209153 - DNA, 431 bp, Glycine max
aaccacataatcaaacctgctgaagaatatatagagtagtatacatccacgatggagctcaacaaaatacaatgcataaatagttaacagtttctgatatgccttctttcttggaaaacttttgaataatgataagcctattgaaagaatagggtacatttaaatatggaagaaactattgagaaaattgataatctaatatcaaaagaagtgtatgccagctttgttaaacagagaaagcaggtataggaattcctgcaatgtgagcttggatgaccttttctttttaaaatctccctttttcagaacacccaaaaccttgtccttgaattcagattgcacctcatctgcttgcccatcctcaacttccatttgatcataatctgctgcatcatcattcatgtccataccttgatcatcaccaaaactag

SEQ ID NO: 209154 - DNA, 538 bp, Glycine max
  unsure (1)..(538): unsure at all n locations
gaaacatcatttgtgagagctcatgcttctttttggacaagatattcaatcttcttctatataggatgcttctttagacaattttataggtctgtgggcaaggctgactacttggctttgcgcaatggatttatcacggtccacctggctcctggaagtaaatttaacttccaaaagtatatcaaaagatccttggaggatgacttcaaggtagttgttggagtcagtcctgtcctctgggcatcatttgttgtttttctgctactaaatgttaatggatggcatgctatgttttgggcatccttaattcctgttgtgataattttggctgttggaacaaaacttcaagccacactggcaaacatggctattgaaatcacagaacgacacgcagttgtccaagggattcctcttgttcaaggctcagacagatatttttggtttggtcggcctcagttagttcttcaccttatccattttgctttgttccagaatgcgttccaaataacatanttcttggtgatatggtattcttttg

SEQ ID NO: 209155 - DNA, 431 bp, Glycine max
accaacttgttcaacaactaattttgtattttgaaagaaattacaattcaaattcatcttcaagcttcaaggcctctgcggcagcctcttcctcttcgtcatcgatgacaaaatacggattgtgagcctctggcttgaacttgtagccagtaaagaaatagaaagcaagggtggccaactcagcagcaaccacactggtccaagaataacgataggaggtaatagtctccaaggcataaacgacaaccctggtgaagtaaatgtaacagataacgacgacatagtagtgcctgaagagagtaagcttcatcaaattaacagcggccttgccgtcggtcctagcggcctcacggaggttcttgatggaccagacaatggggaaaagcacagcgcagcaacagacgacgtcaacaaggaggaagacctgtttc

SEQ ID NO: 209156 - DNA, 524 bp, Glycine max
gtttgttgtgagctataagctagtttatcgtgaggagaatatgaagttgtttgttttctttgttgctgcagtagttttggtagcatggccatgccatggcgcaggctaccaaaggttccctctccgaaagaaaaactggctatggtgagcgttcttcggaggtaaaatgcgcaagttttaggcttgctgtggaagcacacaacatccgagcctttaaaaccattcctgaagagtgcgttgaaccaacaaaggactacattaatggcgaacaatttagatcagactctaaaacagttaaccaacaagctttcttttatgctagtgaacgcgaagtccatcacaacgacatatttatattcggcatagataacaccgtactctctaatatcccatactatgaaaaacatggatatggggtggaggaatttaatgaaaccttatatgatgaatgggttaacaagggcgacgcaccggcattgccagagactcttaaaattacaacaagctgttgtctcttggcttca

SEQ ID NO: 209157 - DNA, 518 bp, Glycine max
ggaacaagggcagaagatttattaaagccgcgtaagagacaacaagtaggtacgtggagtgtcttaggtgacttacccacataacataaagtgacattaacaaacatagctaatgctcctatttgaatagtgcatatcagcataccttattacatatagataggagcaaactctagctagattgttgagagaggtgaaggtactactcaatgtagtacatgggattaggaagcttaaaggtcctgctttcgcctctgtggtctccaagcagatcgctccattggtctccaatgattccaacaattctgtatccctgcctcaacagattctctctcattgctgatttgtatgaaagtgcatttggagtgataagatgtggatccttgagaattaactgctcccatgtgtggaagccagccttctttaggtttgcttttgttacggccattttgtcaagatatcttcctgacaagaatacaatcttgaagccaagagacaacagcttgttgtaattttta

SEQ ID NO: 209158 - DNA, 450 bp, Glycine max
tggcgttgttctcttctgccgcaaccgttcttcctcggaacctggcattcaccaaactctccctctctcactctcacactcttctaccgcgcttcctttctttcccaactcccaagtcatcaaaccctcggcaaccgcgtcgcagtctctctccaaatcccacgcgctcaatccgccgcgtccgcttctccctccgcctccttccacggcctctggtacgtcggcggggaccatatcgacaccgaccagatcattcccggccgagtacctaaccctcgtcctttccaagcccgacaagtacaagaggctcggttcctacgccctcatcggcctccccgccacctacgccacgcgtttcatcgaacccggcgagatcaaaaccaagtacgccatcgtcatcggcggtgccaacttcggttgcggctcctcccgcgagcacgcccccgtcgc

SEQ ID NO: 209159 - DNA, 536 bp, Glycine max
agattgtgcatctaattccaaattcacccataaaaatacttccttttgctcaccagccatatattatgatggagggagatgagaatattcaagcatcatcaaagggaaaatatgttgaaagcttcaactgctcggaggcaccaaggaagaaaagcaagaagatagaaaacaagaggaggtttagtgatgaacagataagatcactagaatgcatatttgagtcagagtcaaagcttgagccaaggaagaagatgcaactggctagagatcttggcctgcagcctcgccaagtggctatatggttccaaaacagaagggcaaggtggaaatcaaaacgaatagagcaagagtaccgaaaactcaaagatgaatatgacaatttagcatcaaggtttgagtccctaaagaaagagaaggactctttgcaattagagaaactaagtgatttgttggaggcatgtcaagatgatggaagggaagacaaggctggcaaagaaaacagcatagaagatggtggctcatgcagtggatacagc

SEQ ID NO: 209160 - DNA, 494 bp, Glycine max
  unsure (1)..(494): unsure at all n locations
agttaattgagttgggtcttgaggattgtgtggatgaaattgatgctcagcaagtctttggctatgctctgtataaggatggcaaaaataccaaactctcttatcccttggaaaattttggctctgatattttctgggagaagctttcataatggccgtttcatacagagaatgcgagaaaaggcttcatctcttccaaatgtaaaattagaacaaggaactgtcgcatctctacttgaggaaaaaggaaccatcactggggtgcactacaaaaccaaaagtggtgaagagttcacagcaaaggctcccctcaccatagtatgtgatgggttgtttttccaacttgagacgttctctttgcaatcctaaggtttgaagtaccctctcattttgttggtctggtcttggagaattgtaatcttccatatgcaaatcatggacacgtcatttanggtgatccttcccccttttgttttatcccatcagtagcactg

SEQ ID NO: 209161 - DNA, 501 bp, Glycine max
ctccgaattagttatcttgagaaacattattcccattgctatatattatggctagcatgaaggttacatgggtggttgtgatcatgtgcatggccgtggtgggtgcaccgatgatggcgctagccatgacatgcaatgatgtgacggtgaacatggcacagtgcctatcctacctgatgcaaggaggaacaccttcaacactttgctgcagcggagtcaagaacattcttggctctgctgtcaccaccgttgacaaacaaactgtgtgcaactgtctcaaggcggatgctgctaggtacaacatcaatgaccagtatgctcaagcactccctggtttctgcaaggtcaatgtcccttacaagatcagccgctccacttactgtgcaagcatcaagttctgaacaagccatggacagatttgctcatttctgcagcgggatactgaggcagcagtgaagcacttactatcagaataagagaaatcgagtgtgactgtagggc

SEQ ID NO: 209162 - DNA, 454 bp, Glycine max
ggtatgcaattttcaaaattgcatatggagttattatatcaaatacgtgattgttacatgcaacaatcaacttagatacatctagtgatcactcacacccaacaacaaagactatgaagtgtctgaagaaatagaaactaatacaataaatggctcgcatatgtgaagccctacagtcacactcgatttctcttattctgatagtaagtgcttcactgctgcctcagtatcccgctgcagaaatgagcaaatctgtccatggcttgttcagaacctgatgcttgcacagttagtggagcggctgatcttgtaagggacattgaccttgcagaaaccagggagtgcctgagcatactggtcattgatgttgtacctagcagcatccgccttgagacagttgcacacagtttgtttgtcaacggtggtgacagcagagccatgattgttcttgact

SEQ ID NO: 209163 - DNA, 552 bp, Glycine max
agtaaattgggaatggtggtggttgtgccaggtgtctgtctgaggagaaaatagaataaaaagctatgaaattttggcacaaggtctgattgtagaattgaagaagatgactggggggggtatctctatgcaatcgacgccgggaagctcaagatacttggatttgtatccagagcggaagatgtcctttttcaaaaatccttacattctcggactggctgctgtcgccggcatcggtggtctcctcttcggctacgacactggtgtgatatcaggggctcttttatacattaaggatgattttgaggaggtttgaaacagcaatcttctccaggaaacaattgtcagcatggctattgccggggcaatcgtgggagcagcattgcgtggttggattaatgatgcctatggtcgaaagaaagccaccctctttgccgatgttatctttaccgccggagcataatcatggcttctgctccagatccttatgttctcattttgagacaccctctggttggttgggtgtgggcataacttctgtcactgctcccg

SEQ ID NO: 209164 - DNA, 508 bp, Glycine max
gcgaaccaaatcaaacagtatgatatataaagtcataataaaatgcttatgtgaaatgtacccacacgatacatctatttaggccaacaagctcacactttattaattaggaactacttccctgctcaagaaggttttgtgtgttggggttcttgccccaagctctctccctccatattacttccacttcatcaaaggtcaatcctttggtctctggaacataaacaagcacatattcaaatgctaccacagctatgacaccaataatcagaaaagttgaaccaatccctataccctccgcaattgaaagaaaggtctctgagacaatcaaatttgagacccaacacacagtagctgacatgcccccacagataccttgatattcttccggatatatctctgaactcagagtccatggcacaagccccattcctggcgagaaaaaaccaatatacaaggcttagcctacaactgcaagccatccatacaactcatttgacgtggatga

SEQ ID NO: 209165 - DNA, 507 bp, Glycine max
gattgttctggtttgtcgttctttctctcgcaatcttcactacattcaccgagcatttgcattcacattgaatatggctgagactacacaatctaatgctgagttgttggagtggcctaagaaagataagcgccgcttcctgcatgttgtgtatcgtgttggtgatcttgatcgcaccattaagttttatactgaatgttttgggatgaagcttttgaggaaaagagatattccagaggagaaatatgccaatgcttttcttggatttggccctgaacaatcccattttgttgtggaattaacatacaattatggggtgacctcatatgatattggaactggatttggacattttgctatcgcaactccagatgtttacaaattggttgaagacatccgggctaagggtggaaatgtcaccagggagcctggtccagttaagggtgggaaatctgttattgccttcgtgaaggatcctgatggttatgcttttgagctcattcaaag

SEQ ID NO: 209166 - DNA, 455 bp, Glycine max
cgccgttttctccgcgctatgtgctttgtaattcgacgacgttaagatcgtggttaccgaaacaggttggccttctaagggagatagtaatgaggtgggtgcgagtgttgacaacgctgctgcgtacaacgggaatctcgtccgtaagatcttgaccgctggtgggacccctctcaggcccaaagcggatctcatcgtttttctgttcgcgctttttaatgagaaccagaagcccgggcctacttccgagagaaactttgggcttttctaccctgacgagaggagggtttacaatgttccgttaacgacggaggaactcaaggactaccacgatcgtccggcgccggtgagcggcggcggacagctgaagggaacgccggcgccggcgccggttgtgagcggcggagtcttcaagagtaccactggataccgtggtgcgttgcaaacccggatgc

SEQ ID NO: 209167 - DNA, 481 bp, Glycine max
  unsure (1)..(481): unsure at all n locations
attataaaattgtattctttattttactgtatacgtgcttttcggatgaattcaaacatgatagatgacacataagtttgacttgacatatacattattgatgaacataaaaataaacagacactttgaatattgtgactaacttactagcatataaattcataaaaataaccaattttgctgagatcgacaagtaacttcttcttttcacatacgtgtctgaaaaatattactacttctctttgcctgaagagtgttgttttttcagttgttcaaataaacttccatcgtaaacacctcggattgtttctttctgcagtaatccactcttatctttagcaagtttgtaaagaattttccattcaaccacactaccaatccttcctgagaaatctttaggctctctatttgcctttatcatctncgttaactcatcatatgtcaaaagcatttggatgtgtatgtgcatgcttgttaaaaa

SEQ ID NO: 209168 - DNA, 388 bp, Glycine max
gtcatcggagtcatcgacaccggaatctggccggagcgacagagcttcaacgaccgcggcctcggccccgttccctccaaatggaagggcaagtgcgtcgccggagaaaattttccggcaagttcgtgcaaccggaaactcatcggcgcgaggtggttctcaggcggatacgaagccacccacgggaagatgaacgagaccactgagttccgctcgccaagagactccgacggccacggcacgcacactgcgtcgatcgccgccgggaggtacgtctctcaggcgtccacgttggggtacgcgaagggcgtcgccgccggcatggcgccgaaggcgcggctcgcggtgtataaagtctgctggagcgacggctgctacgactccgaca

SEQ ID NO: 209169 - DNA, 475 bp, Glycine max
  unsure (1)..(475): unsure at all n locations
caaaggttgctgtaggagataagattgcagtagtgctaagtgctaacacctgcagtgaacaatggcctctgcatcagcatctctgctcaagtcttcacttgttcttgacaagtctgagtgggtgaagggacanacccttcgccaaccttctgcatcagttgtgagatgcaaccccaccaccccatcaggcctcaccatcagagctggttcctatgctgatgagctcgttaagaccgcgaaaacagtggcttcaccagggaggggtattttggccatggatgagtccaatgctacctgtgggaagcgtttggcttcaattgggctagagaacactgaagctaaccgccaggcataccgtaccctcctcgtgacagttccaggccttggtcagtacatctctggtgccattctctttgaggaaacactctaccaatccacaactgatggcaggaagattgttgacgtgctgcttgag

SEQ ID NO: 209170 - DNA, 378 bp, Glycine max
tggattcgcaaggaaaacgtcactgttttcatggtctccctgtgatagtgaagctgacggtacacaaccggtaggcgatggtgacggtggggtcctacagcgtcgtgcttgtcatcactgcgcttaagggaccctgatacgataggaagaacaccaacaacatcaagcacagcgggaacaatcttcctacacaacggcgatgagatcgccagggttatgagtcctcgctccatgggcaaggatcttagcggggccattaacgagattcttgggacttgcgtttcggttgacagctccgaatacagtaccggccgccatggtctgtggcaggacattaccgatggcgaggtcgagggtcactctcgaatgaagttgctg

SEQ ID NO: 209171 - DNA, 486 bp, Glycine max
gcaaatttgactacacattgagacctgatgcatttgaagcatctgtgttggctattaatgagaagtttcagctttatttgacgaaagaacatgttaaaaatcgtcttagaacatggaagaaacagtatgccattctgaaggaacttatgacccagagtggctttgaatgggatgagaagcgaaaaatggtaattgcaaatgattctgtatggactgaatatattaagaaaaatcctgatgctcgaattcttaaaggacgagttatcagaaactacaatgaattgtgcataattctaggtcattgtgatccagcagatagttccattaatggtgcttgtgcttatatgggtatgactacagacgatggtgttatggaggttcatgagacaaaagaaaaagaaaaagttaagaatgctgtgacatggacagatgagatggatcattgcttgacagagttgctagtcaatcaagtaatgttgggaaaca

SEQ ID NO: 209172 - DNA, 479 bp, Glycine max
gttaaattcatttcaaatctctcatttagagcagtttgagcagctatatatgcggaggtcttgaaaaatttctcaagcctgtttcccaacattacttgattgacttgcaactctgtcaagcaatgatccatctcatctgtccatgtcacaacattcttaactttttctttttcttttgtctcttgaacctccattacaccatcgtctgtagtcatacccatatttgcacaagcaccattaatggaactatctgctggatcacaatgacctagaattatgcacaattcattgtagtttctgataactcgtcctttaagaattcgagcatcaggatttttcttaatatattcagtccatacagaatcatttgcaattaccatttttcgcttctcatcccattcaaagccactctgggtcataagttccttcagaaaggcatactgtttcttccatgttctaagacgatttttaacatgttc

SEQ ID NO: 209173 - DNA, 534 bp, Glycine max
ctcgagccgcttgaatcattatcattcgggtaatggacacatcactagtgtttactgtgaggaggagtgaggcagagctgatagctccggcgaagcccacccctcgtgaagtgaagctactctcagacatagatgaccaagatgggttacgtttccaaattccggtgatacagttctatcgccacgacccatcaatggcagggaaagaccctgtcgatgtgataagaaaggctgtggccaaaacgcttgtgttttactatccttttgcaggtaggcttaaggaaggacttggtcggaaactgatggtggattgtactggggaaggtgttttgttcattgaagctgatgcagatgtcactcttaagcaatttggtgatgctcttcaacctcctttcccgtgctgggaggaactcctttatgatgtacctggttctcaaggagtgcttaacactccccttctgcttattcatgtaacgcggctcaagtgcggaggtttcatattagctgtccggctgaaccacacgatgagcgacg

SEQ ID NO: 209174 - DNA, 410 bp, Glycine max
cttgagaaatggcacaagaaacctttctattcacatctgaatctgtaaacgagggtcaccccgacatgctgtgcgaccagatctctgatgcagtacttgatgcgtgccttgaacaggaccctgacagcttggttgcctgtgagacatgcaccaagaccaacatggtcatggtcttcggagagatcacaaccaaggccaacgtagactatgaaaagattgtccgcgacacatgccgcgaaattggattcatctctgatgatgttggtcttgatgctgacaaatgcaaggtgttggtcaacattgagcaacagagcccggatatctgccatggtgtgcacggccacttcaccaagcgcccaatggatgttggtgctggtgaccagggtcacatgtttgggtatgccaccgat

SEQ ID NO: 209175 - DNA, 480 bp, Glycine max
cctgagaaggaggatccctgtgctagctcgatcaaagatcaaagatggaggagcggactcgcagcattctgattttgatgaccttgctttccatctccattgctggcggcaatgcaggtggcttgcagcatcataagggtaggcatggtaagcatggtcgtcatatgtctgctcgtaatgtgacttacgacggtaagtcactgttcattaacggaaggcgcgagatccttttttccggctccgtccattacacacgaagcaccccagatatgtggcctgacattcttgacaaagcaaggcgcggaggcttgaacgtcattcaaacttacgttttctggaacgctcacgagccagagcccggcaagttcaacttccaaggcaattatgatcttgtcaagttcattaggctcgttcaagccaaaggcatgtttgtcactctcagggttggtcccttcatccaagccgagtggaaccacggag

SEQ ID NO: 209176 - DNA, 531 bp, Glycine max
caatccaatgtgccacacgccacgtgcttttttatccatcagacaactttataatataatattcttccaacgtgataacaagaaccccactgttcagattaccataacatctactttaacctaatgaatgcttctcgatgacttgaccttggataatccgcaacttggtaatataattaccctaatacgtgaactttgagagcagcaagcaattttttcgttatacatgatatgaaaaatactagtagaactatattaaacaagatcgaaaatgtaaaaagaaaatgaatggcatacgaacctaatttgatacataaaaaatttcatatgagaaaaaaagccagtttgggcataattaagcataatcaggcatggtttccttcaaaaatgtaattggacgagaatcttcaggggcaagttcgtcgaaggcaacataattttgctccttgtcgtacacatgacacactgtcatgattgtcttcatcaatctccaattccaactagcctcattcagatactgtccccagtttt

SEQ ID NO: 209177 - DNA, 543 bp, Glycine max
  unsure (1)..(543): unsure at all n locations
aagaacaagtagttgagaactaagaaggagaagcaaatggcttcctcaatgatctcttccccagctgttaccactgtcaaccgtgccggtgccggcatggttgctccattcactggcctcaagttcatggttggcttccccaccagaaagaccaacaatgacattacctccattgctagcaacggtggaagagtgcaatgcatgcaggtgtggccaccagttggcaagaagaagtttgagactctttcctacctgccagaccttgatgatgcacaattggcaaaggaagtagaataccttcttaggaagggatggattccttgcttggaattcgagttggagcacggtttcgtgtaccgtgagcacaacaggtcaccaggatactacgatggacgctactggaccatgtggaagctgcctatgtttggttgcactgatgcttctangtgtttgaggagcttcagaggctaagactgcataccccaacggcttcattcgtatcatcggattcgacaacgttcgcccagtgcagtgcatcagctt

SEQ ID NO: 209178 - DNA, 271 bp, Glycine max
agctctcatccattaattttcattgaagtccgaaaacagaaaccaaaaatacaggatgatgaaatcttaaaaagcaaaaacaaatgggaatgtagtttaagtgcaaacaaacaaagtggggtggcggttacaaatgctttgcaaatttttcacacttaaaagcctgggggcttgtaggccataaaactgaagcactgcacttggcagaacgttgacaaatccgatgatacggatgaaaccgatggggtgtgcaatcttagcctgttgaagc

SEQ ID NO: 209179 - DNA, 525 bp, Glycine max
  unsure (1)..(525): unsure at all n locations
gtttacgtgaagtcacagaaatcaaaagcctacttcaagaggtatcaagtcaagttcaagagaagaagagagggaaaaaccgattaccgtgccaggattcggttgattaatcaggacaagaacaaatataacaccccgaaatatcgctttgttgttcgtttcagcaacaaagacattgttgcacaaataatatctgctagcattgctggcgatattgttcttgctgcagcatatgcacatgagctgccacgatatggtcttgaagtagggcttacaaattatgctgcagcttattgtactggtctcctgttggcccgaagagtcctcaaaacacttgaaatggatgaggagtacgaaggaaatgttgaggctactggagaggactattcagtggaacctgctgagagcaggaggccattccgtgctctcttgatgttggtcttattaggactacaactggcaaccgtgtctttggtgcccttaagggagctctggatggnggtttggatattcctcataatgaca

SEQ ID NO: 209180 - DNA, 388 bp, Glycine max
caagacaagcacaacaagctttctgttattctcttatttgctagcatcaggagtagtagcaattaaccttgaaaataaagcttcatctaattttatcttccataggtagaaaagcgatcaagagaatacacatgtcaccaggtgggaatgtaccatcatcaccaacaccaaggaaaaaacattcattcttcttccagaatgccaatcccctctgagaggcacatgttccttcaaacaggaaatggatctggtgattctggacttgtgctttcaactgatgctaagcctatattaaaatggacaccatatcttcatgccatgtttatagaagcagtcaaccagttagggggagctgacaaggcaactccaaaaacagttatgaaactca

SEQ ID NO: 209181 - DNA, 423 bp, Glycine max
tgatggttcagctatgttgaccttttttgctctttctgaaacagctgagcttgcaaagaagtgggtgcccttttgcaaaaagcacaatattgatccatgtgccccagtgttttattctgcccagaagattgattacttaatggacaagattcagccctcgtttgtaaatgagcgacgggcaatgaagagagaatatgaagaattcaaagtacggatcaatgcccttgtagccaaagctcagaagatgccagaggaaggttggacaatgcaggatggaactccttggcctggaaataatcctagggatcatccgggaatgattcaagtgtttttaggtcatagaggggggctggatacagatggaaatgagctgcctagacttgtttatgtttctcgtgagaagcgaccaggcttccaacatca

SEQ ID NO: 209182 - DNA, 350 bp, Glycine max
aaacactcttcttcatcggacccgctttgggtcttgtgatacatgcgcattgtaaaggagctgggtgggtctttaaataccacacactcctgcacaaggaccccgaccgctttctgtgcccgaatttatgagagccctacaggtccctattgggtgcccgcactgacatcatccacgatcctggccgagggactcctatcaattaagtggactgttgactgccgttgcagcccaagatgcaaaactagctttggatcgccggccaaggtctgtacaccctccattgcctgtactagcagcctgaaggccaccctggaaggatgcaatgggttgcctgtcctatccatggg

SEQ ID NO: 209183 - DNA, 414 bp, Glycine max
catgtctccgccaccatggtgttggtctgccccgggttgcaaaaggggcaggttagggttgagcactacgcctctaaaagaaccaagttcatcatggctcatgattcccgaatcgcgtgttttgcactcacgcacgatggcaggttgcttgcaaccgccagctccaagggcacactcattaggctcttcaataccctcgacggttcactgctccaagaggtacggaggggtgcagacagagcagagatatacagccttgctttttctcctactgcacagtggctggctgtctcaagtgacaaggggaccgttcatgtcttcaacctcaaggttgattccggactgttggggcatgatagatcgcacagtacttctgaggcaaatcttgctagccccaccgcgatgtcgtctctt

SEQ ID NO: 209184 - DNA, 439 bp, Glycine max
caaggaactaatcatgtcataatttacatccatacaatggattaaaacaaaaagattcacatgaatttccaaatgaagaagactccagatacataaataacaactaatacaagccagcacatacaaaaacaagagcctaagcccttgtcttgaaagggatggctcggatgactatctggtgatacacagcagcaagggcagctccaatgaaaggtccaacccagaaaatccattggtcatcccatgcatggtctctgttgtagatgatggcagctccgagactcctagctgggttaatgccagttcctgtgatgggaatggtagccaagtggaccaagaacacagcaaatccgatgggaagtggagccaaaataggaacgtgtgagtctctagcgtttctcttggcatcagtggcagagaaaacggtgtagacaagaac

SEQ ID NO: 209185 - DNA, 524 bp, Glycine max
tgtggctcctcccttccagatagggattcaaggcagttgggtcgacccaattccgagaatggtggagggcaggacgccaagaatctaagggtcaagcttgttctcttaggtgattctggtgttggcaaaagctgtattgttctacgatttgttcgtggtcagtttgatccaacatctaaggtaactgttggagcttcttttttgtcacaaacaatagctctgcaagactctacaacagtcaagtttgaaatatgggatactgctggtcaagagaggtacgctgcgttagcaccactctattaccgtggtgcagcagttgcagttattgtttatgatataacaagcccagaatctttcagcaaagcacagtactgggttaaggagctacaaaaacatggaagccctgatatagtgatggcactggtcggtaataaagctgatcttctcgagaagcgggaagttgctgtccaggatggcactgactatgcagagaagaatgatatgtttttcatagagacatctgc

SEQ ID NO: 209186 - DNA, 483 bp, Glycine max
agttcaatattgccattcagtttaggtacgtaacaggagcagcgaagcataaaagcaatgcatccaaattaaaaccacatcggtactggtacacatctgaacatcaaacacaacagaaaacagaccacaagaacaagaatctgaagtagattctagtagtcttcatcctcttcctggccctcaccagactcagcacccacttcttcataatccttctcaagggctgcaaggtcctcacgggcttcagaaaattcaccttcttccataccctcacccacgtaccagtggacaaaagcacgcttggcatacatgagatcaaacttgtgatcaatgcggccaaacacttcagccacactggtggagtttgaaatcatgcaaactgccctctgcaccttggcaaggtcgccttcaggaacaacggtaggtggctggtagttaataccacacttgaaaccagtagggcaccaatccacaaactgaatg

SEQ ID NO: 209187 - DNA, 478 bp, Glycine max
cccaattcctaattgtttaaacctaattctcatttcttcatcgttcgattcttctcctcctaaagatgcagatcttcgtgaaaactttgaccggtaagaccatcacccttgaggtggagtcctccgacacccatcgataacgtgaaagctaagattcaagacaaggaagggatcccacctgaccagcagagacttatctttgcgggtaaacagcttgaggatggtcgaacccttgccgactacaacatccaaaaggaatccactctccacctcgtgcttcgcctcaggggtggcatgcaaatctttgtcaagactttgactggcaagaccatcaccctcgaggtcgaatcctcggacaccattgataatgtcaaggccaagatccaggacaaggagggtatccctccagatcagcagaggttgatatttgctggtaaacaacttgaggatggaagaacccttgctgattacaatattc

SEQ ID NO: 209188 - DNA, 492 bp, Glycine max
gtgaaacgatattgatatttaaaataaaaacataaacaacatactttcgctgaaacgagttcaatacatcattttaaaacataataaacagcagcacttaaaccagagatgcaaagcacaagttcaagggagacactgaacaaacagataagacatatgagaacacttcataaaagggattccccttagcaaccaccacgaaggcgaaggacaagatgcaaagtggattccttctgaatattgtaatctgccaaggtacgaccatcttccaattgcttcccagcaaaaatgagcctctgctgatctggagggataccttccttgtcctgaatcttagctttcacattgtcaatagtatcagagctttccacctccaaggtaatggtcttccctgtcagagtcttcacaaatatctgcatacctccacgaagcctcaacaccaaatgcagagtggactccttctggatattataatcagcaagagtacgacca

SEQ ID NO: 209189 - DNA, 538 bp, Glycine max
tatttatctatagatatctttagaaaaaaaaaaagaaaataaacaaataagacgtatcattttatgtatagtagtggggaattatgggacaaaaaataaatccgcttggtttcagacttggtacaactcaaaagtcatgattctatttggtttgctcaaccaacaaattattccgagaatatacaagaagataaaaaaatacgagattgtatcaaaaattatatacaaaaaaatataagaatatcctctggtgttgagggaattggacagataaagattcaaaaaagaattgatcttattcaagttataatatatatgggatttccaaagtttttaatagaggggtaagtctcaaaaaatcgaagaattacagacgaatatgcaaaaaaaactgaattgtgtgaatcgaaaactaaacattgctattgtaaaagttgcaaatgcttataaacaccctaatattattgcagaatttatagctggacaattaaagatagagtttcgtttcgtaagcaatgaaaaagctattgattaactg

SEQ ID NO: 209190 - DNA, 533 bp, Glycine max
  unsure (1)..(533): unsure at all n locations
ctgaatattcagcctgtgatatggggtacctcaattcagttttgtcctcttcaagccaggttcatgctgcagaagattcacctgtcagtggagggggcctcagtcagaatggaaaattcagctatgggtatgctagctcccctggcaagagatcttcaatggaagatttttatgagacaaaaattgatggtgttgatggtgaaattgttggcctttttggagtttttgatggccatggtggtgctcgtgctgctgagtatgtcaagcaaaacctatttagcaatttgatcagtcatccaaaattcatttctgacaccaaatctgcaatagctgatgcatataaccataccgactctgaatttctgaaatctgaaaataatcaaaacagagatgctggatcaactgcttccactgccattcttgttggcgacccgttgcttgttgcaaatgttgnggactccagagctgttatatgcaggggtggaaatgccattgcttgttctcgggatcacaagccagatcaaactgatgag

SEQ ID NO: 209191 - DNA, 505 bp, Glycine max
atgatatcaccttagtatcttttcaatcagtctccaaaggctaccacggggagtgtgggaaacgaggaggttatatggaggtgactgggttttctgcagaagtgagggaacaaatatataaagtggcatctgtcaacctttgctctaatatctctggtcaaattcttgctagcttagtcatgagtcctcctaaggttggagatgagtcctatgagtcattcaatgctgagaaggagaatattttggagtcccttgctaggcgtgccaagacactagaagatgcattcaacaaattagagggtgtaacatgcaacaaagcagaaggggcaatgtatctgttcccccaaattcgcctgtcccaaaaggctatcaaagctgcaggagatgcaaatacagcacctgataatttctattgcaaacgcttgcttaacgcgaaggagtagttgttggtcctggttctggttttggacaggttcctggcacatggcattttaggtgcaccata

SEQ ID NO: 209192 - DNA, 445 bp, Glycine max
ctccgactcagttatctagagaaacttttttctcatagccatatattatggctagcatgaagggtacatgggtggttgtgatcatgtgcatggccgtggtgggtgcaccgatgatggcgctagccatgacatgcaacgatgtgacggtgaacatggcactgtgcctatcctacctgatgcagggaggaacacctttaacactttgctgcagcggagtcaagatcattcttggctctgctgtcaccaccgttgtcaaacatactgtgtgcaactgtctcaaggcggatgctgctaggtacatcattaatgaccagtctgctcaagcgctccctggtttctgcaaggtcaatgtcccttactagattagccgctccactaactgtgcatgcatcatgttctgaacaagccatggacagatttgctcatttctgcagcgagatactga

SEQ ID NO: 209193 - DNA, 480 bp, Glycine max
ggccaggacatgattcgtcccttgtggtggctctacttccagaacacccagggtcttatttttgttgtagacagcaatgatagggacagagttgttgaggccagagatgagttgcataggatgttgaatgaggatgaactgagagatgcagtattgcttgtgtttgccaacaaacaagatcttcctaatgcaatgaatgctgctgagattaccgacaagttgggtctacactctctcagacagcgccactggttcattcagagcacctgtgcaacctctggggagggcctttacgaaagtctggactggctttccaacaacattgccaataaagcttaatgcctttgggagtcttgcggattggtaattctggatgcaagggtgaacattatctagcttttatttcttggtcctcttccaagacaactcgaatttgtgctcatgtaatgcggtttaagacatctcgaatttgtgctcatg

SEQ ID NO: 209194 - DNA, 604 bp, Glycine max
agaaagatccgattctactaacagatccgatcgtatttgctcgcgtgcgtaagctgctcactcgtctggagacgcccttgggaatggtggaggttgttccttttttctgtctgaggagaaaattgaataaaaagctatgaaattttggcacatggtctgattgttgaattgaagaagatgactggggggggtattactatgcaatcgacgccgggatagctaagatacttggatttgtatccagagcggaagatgtcctttttcaaaaatccttacattctcggactggctgctgtcgccggcatcggtggtctcctcttcggctacgacactggtgtgatatcaggggcttttttatacattatggatgattttgaggaggttagaaacagctatcttctccaggaaacaatagtcagcatggctattgccggggcaatcgtgggagcagcattgggtggttggatttaatgatgcctatggtcgaaagatagccaccctctttgccgatgttatctttaccgccggagcattatcatggcttctgctccagatccttatgttctcattttgggacgccttctggttgggttgggtgtgggca

SEQ ID NO: 209195 - DNA, 535 bp, Glycine max
gagaagcccaaagagaacaagacttcctctgctgaacctcctccagctaatgatccagcttatccacctgcaaaggcacaagtggtgggttggccaccagttaggtcatttagaaagaacatagttcaaaggaacagcaatgaagaagaggcagagaagagcacgatgaatgctttcgtgaaagtgagcatggatggtgcaccgtatctacgaaaggtggacattaagttgtacaagagctaccaggagctgtcagatgcgctggctatgatgttcagttccttcacgattgaaaagtgtgggtcccaagggatgaaagattttatgaatgagaccaatggctctgactatgttcccacatatgttgacatggacggtgactggatgctcgtcggtgatgtgccctgagagatgttcgttgaatcatgaatgcgtcttcgcataatgaaaggctccgaggctatcggtcttgcgccaagagccgtggtatagtgcaagaacagaagctgaagatgtgatttcatctgcgtcacaa

SEQ ID NO: 209196 - DNA, 377 bp, Glycine max
  unsure (1)..(377): unsure at all n locations
ccgctccgagttgtatgttttgcagagctagaagaaatcaacgatgcctcgctatgatgataaatatggtaatacccgcctctatgttggacgcttgtcttcgaggactcgttcccgtgacctggagcgtgtcttcagcagatatggaagagttcgaggcgtagatatgaagaatgatttcgcctttgttgaatttagtgatcctcgagatgctgatgatgctagatacaacctggatggtcgtgatgttgaaggaagtcgtattattgtggaatttgccaaggggggtcctcgtggttcccgggaccgggaatatatgggtcggggtccacctcctggatctgggcgatgctntaactgtggcattgatggtcatt

SEQ ID NO: 209197 - DNA, 552 bp, Glycine max
  unsure (1)..(552): unsure at all n locations
ctcaagtccaacctacccctttttcttctcccaccaacttcaccgtcttcttcctcgatcatgtctcacttcaagggcaagtaccatgatgagcttattgccaatgctgcttacattggcactcctggaaaggggtattcttgctgctgatgagtcaacagggacaattggcaagcgtttggccagcatcagtgtagagaatgttgaatccaacaggcgtgctcttagggagctgcttttcaccgctcccggtgctcttaaatatctcagtggtgtcatcctctttgaggaaactctctaccagagcacagctgcaggcaagccctttgtggaagtcttgaaggaggctggtgtgcttcctggcatcaaggttgacaagggcacagttgagcttgctggcactaatggagaaaccaccactcaaggtctagatggccttggtcagcgttgcgccaagtactatgaagcccgggcacgttttgccaagtggcgtgctgtgctgaagattggtnccaacgagccatctgagctggctatccatgagaatgccta

SEQ ID NO: 209198 - DNA, 532 bp, Glycine max
aaaaaatctcttccaaattccacacttttccatttcccaaacccaccctccaatccatggcttccctgaacctccttccccaccctccacttttctcttctttccttcacagaccacactgcaacacccaatcttcttctcacaccaaaaccttctcaacgaaggccttctcttgtggtcaaatctactgtgggtgtggctgacccttctccatcttcttcttcctacgctggggatacctctgattccatctcttctttgaagctcaatctgctgagtgctgtttctgggctaaatagaggccttgctgcaagcgaagacgatcttcgaaaggcagatgatgctgctaaggaacttgaagctgctggaggacttgtggatctctcgcttggtcttgacaatttgcaaggaagatggaaactcatttatagcagcgcattttcgtctcgaacccttggtggaagccgtcctggtcctcccataggaagactccttcctattactcttggacaggtttttcaacgaattgaca

SEQ ID NO: 209199 - DNA, 543 bp, Glycine max
ctcgttagtcgtttgtaacgcctttgtttgcgttttttgcacagaagaattaacacgtatatagcaagcatggcagtcacactctacgaccttagctctgcctctgggttgaagaagcttgatgagtaccttctcccacgcagctacatcaccgggtaccaagctacaaaggatgatcttactgtttatgcagctttgccaactgctccatcagatgaatatggaaatgtttccaggtggtacaagcacattgatgctttgttgagaatctctggtgtttctggcgagggatctggtgttattgttgagggatccctggttgcggagcctgttgcaactcccccagctgctgacactaaggctgctgttgctgaggatgacgatgatgatgatgttgatttgtttggtgaagagactgaagaagagaagaaggcagctgaggaacgggcagctgcagtgaaggcatctgcaaaaaagaaagagtctgggaaatcatctgttctgttggatgtaaaaccatgggatgatgaaactgacatgaag

SEQ ID NO: 209200 - DNA, 451 bp, Glycine max
catatacacaaaagagcactgaccaaaccattttattttatttttgaatcaagggtgagggccttccatggcttccgcttgtgcttcctctgcaattacagctgttgccatctctacgccgagttccgggcaggaggaatggatcaggaggttgttttcttagtggaaggaaattgagggtgaaaaaggagagagcagcaattggaggacgatcgatgggcactacagtgtgcgcagttgctgagcctgacagacctctatggttcccaggcagcacccctcctccatggcttgatggcactctacctggagacttcggctttgaccctcttggtcttggatctgacccggagagtctgagatggaatgttcaggcagagctagtgcactgcagatgggcaatgtttgggtgctgctggcattttcattccagaattcctaaacaaagatt

SEQ ID NO: 209201 - DNA, 391 bp, Glycine max
aataattacagaattaaatggcatattattaaaaactgttttcgttacgcttcagaaatacaacgagctgatagaggagacaagaaaagaaagagaaagagtttgcagagttgaattccgaaaggaagaatggcgaagcacgaggagcttcctatcccgattaacaataacctagaacccgtctatggcggaggttccgcactcgaagaagctcagcttcgtttcgataatttgaagtccaaattcgtcgaaatcttcggtcatcatcctcaaatcttcgctcgctcacctggaagagtgaacttgattggggagcacattgattatgaaggttattcggtgctgcctatggcaattcggcaagacacgatcgtggcgattcggaaaaatg

SEQ ID NO: 209202 - DNA, 521 bp, Glycine max
agggtaccctacgtggttctctgcttctgatcgcaggctacttgctaagatgaaccaaggaggtgctcccccacccaatgcagtggttgccctagatggttgtggtcaatttaaatccgttaagcaagctattgactcctaccctaagaatttcaaaggcagattcattatttatgttaaagctgggatttataacgagtatatcactatccctaagaagtcagagaatattttgatttatggagatggccctacaaaatccattattactggtaacaaaaactttatagatggcgtcaagacaatgcatactgccacctttgccaatactgcacctggattcattgccaagtcaattgcattcgagaacacagcgggtgcaaagaagcaccaagcagtggcattcagaaaccaaagagacatgtcggccatgttcgactgtgccatgcacggtttcctagacacattgtacaccctagcctaccgtcaattctaccgcaactgcgaaatctcgggcacca

SEQ ID NO: 209203 - DNA, 428 bp, Glycine max
  unsure (1)..(428): unsure at all n locations
ctctcctccaccatctcctaccaacatgccttacatctatgcgtcacctccccctccttaccactattagctagcatagctctatggatatgaagaatatgtgcaacgaataaaagaaagcgatagaaaaggaagaagaagcgcttcgcgatgcacgaaagagaagaattggaagcaaagtttcggcgttttgtcttttataaaaaaaatgttaaatcattataattttctatgatagggattggtttcttggcttttttcttttgtttatgaatatcggggtattttaacagttgtaaagcactgcgccctcgctgcatgatcatgtagttttcaaccagctgcgttagcggggttgtaaaactaataacatatataatcaaataaattatattatttatcanaaaaaaaaaggaaaatatttactg

SEQ ID NO: 209204 - DNA, 477 bp, Glycine max
  unsure (1)..(477): unsure at all n locations
tgcgtgaccgagccagatcncanttccatgctatttgttcgcgtgcgtaagctgctcacttgtctggagccggacatatggcacaagaaacctttctattctcatctgaatctgtaaacgagggtcaccccgacatgctgtgcgaccagatctctgatgcagtacttgatgcgtgccttgaacaggaccctgacagcttggttgcctgtgagacatgcaccaagaccaacatggtcttggtcttcggagagatcacaacctaagccaacgcagtctatgattagagcgcccgcgacacatgccgcgaaattggattcatgtgtgatgatgttggccttgatgctgacaaatgcatagtgttggtcaacattgagctacagagcccggatatcgtccatggtgtgcacggtcacttctccaaacgcccagaggaggttggtgctagtgaccatggtcacatgtttgggtatgccaccg

SEQ ID NO: 209205 - DNA, 266 bp, Glycine max
gttaaaatcctggcgtgacgcgaattgcgtaccccgcacccctacgtcaactgggtctataaggctggggatcaaatacctgccacccgggggatccgctatatatatacctgccgccaccaaaggggagggcccactggtgttgcctctacacaggtttcatgacccgctggactcatggagccatcagactgtctctctcaggtaaactgggtaccgctgccaatgctccccatcttcgtggctacggagacaccgaagcacca

SEQ ID NO: 209206 - DNA, 489 bp, Glycine max
gcatgacaagactaagtttatttagcaagtaccaaaccatacagtattattatcagttaattaatacaaacaagcataggaaggttgatggtatggaggttttctgcagttgatgaatcctgcccataaaaaagatctcgataccttaaatatcaaaacaaaagcgcaattataacaccctttcacttcagctgcgactttatatctggttgaattcgtttttggacaagatcagaacttgttgataaaatcgtatatgtaattatcgatttcctctgctgcttcttgattattgaagtgagccactcctttctgcacaatcacttgttctaaatttggcacatcttgcttgaaccctccgccgtggatatactccttcaagttcagcgagttgtataccatgtccaactcacctgttatgtattttacgggcaccttgatttgcccttctgtccatggtgccgtcaacttccaatttaagttgaaatt

SEQ ID NO: 209207 - DNA, 474 bp, Glycine max
  unsure (1)..(474): unsure at all n locations
agccagccgttagggaaatcaagcacagctcaatcattgaatcttagcataaacacatacagaagaaggaaaagtggcaccctgggaggagctgatattgaaggagggtttggaagaaaaagaattttgttttgagatatatatacatatatgtgcaagtgcataggaaattaacacaaaaagatgacatggtgcaatgactctgatgaggatagggttattgaatcaacgacgccaacaataactattactcctaacactgatggcataaagctcaccgaagaaattagaaccataacatgcccctcgtgcggccataacattgaattcaaagatcagggtggaatccatgacttgccggggttaccagctggagtgaagtttgacccaaatgaccaagaaatattagaacatttggaggcaaaagtggcgtatgatgcatgcaagcttcatccncttattgacgagttcata

SEQ ID NO: 209208 - DNA, 444 bp, Glycine max
gcttcgaaacaatctattctgtaattatttatcgattgaatatacattgaaaaatgttgcatgcaaaaaaaccagattgcttcatgtcaacatgaccacctcatgaaaatttatcatactaagctcaattcatctttagtatttgatatttttaagtcgtctttaaactcagcgtcgagcttcttccgcaatgccactaattcttcccctgcatcgcagatataggccgaagcttgtctgccagacaaggttgcaccttccatgctgtctatgtagtcctgctttgtgtaagagccagcaagaaagaaattcctcactggtgtcttttgatcaggtctatatgggatctttaccaggaccctcacggtacagagattggccaattttaacaacagaagacctagtcacttccaaaccttgagatgatgggaacagtgccaaaac

SEQ ID NO: 209209 - DNA, 420 bp, Glycine max
gtaagctgcatgagagacatagttgctgtttctaagtatgcttactagctcccctgttggctcactggtccgtttcattgtaatatttgctttatggtacagaaccatggctttggccaagttgccaccaaacgcttcatcagttccagcagttttagcgtttggagattccatcgtggacccaggcaacaacaacaacataaaaacattgatcaagtgcaacttcccaccttatggaaaggattttcagggaggaaacccaacgggtcgattttgcaatggaaaaattccttctgacttaatagttgaacaattgggtattaaggagtatttgcctgcatatttggatccgaatctcaatctagtgatcttgttaccggcgtctgctttgcctccggtgcttcagatacgatcctttga

SEQ ID NO: 209210 - DNA, 389 bp, Glycine max
gggtgccatggttccaatccgcgtccacactgtgctcatctccacacagcatgatgagactgtcacaaatgatgagattgcagctgatcttaaagaacacgtgattaagcctgtgattcctgagaaggtcccttgatgagaagaccattttccatttgaacccttctggcaggtttgtcattggagggccgcatggcgatgctggtctcaccggccgcaagatcatcatcgacacctatggaggatggggtgcacatgggtggtggtgccttctctgggaaggatcctaccaaggttgatagggagtggtgcctacattgtgaggcaagctgcaaagagcattgttgcaaatggacttgctaggagggaaattgtgcaagtttcctatg

SEQ ID NO: 209211 - DNA, 369 bp, Glycine max
gaaaccaattacaaattacactctttgcctcgcaccttcaacttaaccttttctactcataatcttaacaacttgctagaagaagataaagaaagagaaaaagtgtgtgtgtgtgagagagagcaatggctgggctcgtgggcacgccgttctctgattgttctggctatcatttccttcggatgtttatttgcaatttccattgctaaggaggaagccacaaaattggggacggtcatcgggattgatcttggaacgacctattcatggtgttggtgtttacaagaacggccatgttgaaatcatagccaatgatcaagggtaaccgtatcaccccatcgtgggttgctttcaccgacagtgagagac

SEQ ID NO: 209212 - DNA, 548 bp, Glycine max
gcaccaatgtgtcccgtgccacttcaaggagggacatggcgacccagatgagcccacagggtagctcacgctcctctcctaatctgaggccttctttctctgcctccaccccatcaaccttgcctgtcacagaattgcggactgctggttcctctaaagtggatattagggatgtgcaagtagatgaacacgttaccgtgacaagatggtccaagaaacatagggccctattcactggcagaggctcagaaaaagtcgaaagctggaaaaaaagaactatgcactcaatcgtcaacttgggacgtttctgaaacgtcaaagcctgcctcaaagacaagaagtgaggaagccaaaatctctgcatgggagaacttgcaaaaggcaaaagcagaagcagcaatacggaaactagagatgaaactggaaaaaaggcgagcatcctctatggataagatcatgaacaagcttagattggcccagaaaaaagctcaagaaatgagaagttcagttccacacaaccaatccgatcgggttgtatgacttcacac

SEQ ID NO: 209213 - DNA, 561 bp, Glycine max
gtgacatccacactcaactcaaaaaccaattccaataatggcgaccttatctatgtcatcttgatcgtaatccccgtcatcaaactctttctttattctacgattcacaatcaaaacccaacaacttcaactctccaatctctatcctcaattcaacccttttggtggcaacttctatttatgctacaaaaaatgctgcgattgcacttcaccaccgcactctctcactttgcttccaaggcctcaccttttcctctcacacccgtttccgttaccgtttccagagctattgtttgcaacaaccccaccaggttcagatcgcaaatgggttctttctccacttgctcttcctcttcctccaaactcttgttccgccagctttttgagaaggaatcttccacctacacttaccttctcgctgatgcctcgcacccagaaaaacctgcacttctgattgacccatctgataggacagtagacagggacttgtcgatcattgagcaactggggctgctgctagtgtatgccatgaacacacatgtgcatgcggatcatgtcact

SEQ ID NO: 209214 - DNA, 544 bp, Glycine max
aagatctgcttctgggctttttaggatacaaaatgggtgagaaagactcagagaagctcatttgggaacagatgagaaccccgacagctgccactcccattgctgcaccccaacagcaccgcacattaccaaggcttcttgtccttctcatcctcttcgtctccgtcacctacgtcgtctacacgctcaagctcgtctccacctcacgcgcctgcaacaacgacgcccctttctccaccgacaacttctccaaaaccatcctctccgtcaatgccaccgccgcagttctccgccgaggctccctcgagacgaatcccgaggaccggacggacctccgccacgtggtgttcggaatcgcggcgtcagcgaagctttgggagcagaggaggagctacatcaagttctggtacagggcgagggacatgcgccagcgttgtgtggctcgacagggaggtgaaatcggaggagagcagcgacgcactccgccggtgagaatctccggcgacacggcgatgttcaagtacacgaacaggcaggggcaccg

SEQ ID NO: 209215 - DNA, 462 bp, Glycine max
ctcgaatattcatgcctgtgatattgggtacctcacattcagcttgttctcttcaagggaggttcatgctgcagaagattcacctgccagtggagggggccttagtcagaatggaaaattcagcctatgggatgctagctcccctggcaagagaacttcaatggaagatttttatgagacaaaaattgatggtgttgatggtgaaattgttggcctttttggagtttttgatggccatggtggtgctcgtgcctgctgagtatgtcaagcaaaacctatttagcaatttgatcagtcatccaaaattcattttctgacaccaaatctgcaatagctgatgcatataaccatacccactctgaatttttgaaatctgaaaataatcaaaacagaaatgctggatcaactgcttccactgccatttttggtggggacccgttgcttgttgcaaatgttggggac

SEQ ID NO: 209216 - DNA, 453 bp, Glycine max
  unsure (1)..(453): unsure at all n locations
ctgtgacttgtaggtgatggaatgggaagcattgctgtaccgagtagtgagcgtgccaggacagattggactgcttctatggagcagttttttatagagcttttgctggatcagttgggtaggggaaataaagtggataatggattcaataaaaatgcgtggacagatatgctagccatctttaatgctaagtttggatgtcaacatggtagaagggttttaaagaatcggttcaagaaacggttgaaacattactgtgatataacaaatcttataaaacaaggctttttgtgggatgaacaacaactaatgcttttggctgatgatgatgtctggaatgcttatgtcaaggcacatctgcacgcaggaacatatagatcanaaactttgncaactatcgtgatttagaattaatattcagaaacatggctgaaaatgagatcagtaatttgc

SEQ ID NO: 209217 - DNA, 570 bp, Glycine max
  unsure (1)..(570): unsure at all n locations
cattgcgaaggaaaccgcgaaggactggaagggcctccgcgtgacggtgaagctgacagtacagaaccggcaggcgaaggtgacggtggtgccctccgccgccgcgcttgtcatcaaggcgctgaaagagcctgagagggacaggaagaagacgaagaacatcaagcacagcgggaacatctccctagacgacgtcgttgagatcgccagggtcatgagtcctcgctccatggccaaggatctcagtggaaccattaaggagattctcgggacttgcgtttcggttgggtgcaccgttgatgggaaggaccccaaggatctgcagcaggagatttctgatggagatgttgaggttcctcttgaatgaagttgctgaaatttcagtggttttttgttggttcgtttatgttgtttttttgggcaattttggtttttttttctttttttaaggaatttgagtcatagaatgtatgatagttagactttggtaatgatatcacattgtggttttgagtatnttgaatggagtggatttgattgttgcaaaacattgtcaatttaaggtgatcg

SEQ ID NO: 209218 - DNA, 505 bp, Glycine max
  unsure (1)..(505): unsure at all n locations
ctctctttcacgaactcacgctctgtttcagatctgaagccacataaccctaaccatcaaacggctaggtgtcgctgggacttcaatggcagtgactgaagctcagaatcctcttcttggagaaaacacatgtggttccttgttaaaaaagcttcaggaaatatgggatgaggttggtgagagcgacgagcaacgagacaagatgcttcttcagttagagcaggagtgcttggatgtgtacaagagaaaggttgagcaggctgccaagtcaagggcgcagctacttcaagctctgtctgatgctaagcttgagctttccactcttctatcagcacttggagaaaagagctttgctggaattcctgagaatacttctggaactatcaaagaacagcttgcagctatagcaccagtacttgaacagttatggcaacaaaaggaagaaagaattaaggagttctcggatgtacagtcacagatccaacanatatgtggagagatagct

SEQ ID NO: 209219 - DNA, 458 bp, Glycine max
ctgccactctctgagtaggactacactgccatggctgcctcagtctccactgttggagctgtcaacggagctccactgagcttgaacagctctggagctggagcttcagttcccagttcagccttctttggcaccagcttgaagaaggttattgcctcaagggtccctaacgtcaagatttcttctggaagtttcaaaatcgttgccgcggaaaaagagattgatgagaaacaacagacagacaaggacagatggaaaggtcttgcctatgatgtttcagacgaccagcaagacatcacaagagggaagggtttggttgattccctcttccaagctccacaggatactggaactcactatgcaatcatgagctcttatgagtaccttagcactggacttaaacaggtcaacttggataacaacatggacggtttttacattgctcctgctattatgga

SEQ ID NO: 209220 - DNA, 535 bp, Glycine max
gtttccccctacggcgaccactggcgcaacctccgccgcatcatggcgctcgaggttctctccacccaccggataaactccttcttggaaaatcggagggacgagatcatgaggctcgtgcaaaagcttgctcgggactcgcgcaatggcttcaccaaagtagaacttaaatccaggttttcggagatgacatttaacactataatgaggatggtgtcagggaagaggtactatggtgaagactgtgatgtgagtgatgtacaggaagcaaggcaatttagagagatcattaaagagttggtgacgttaggaggggctaataaccctggggacttcttggctttgcttaagtggtttgattttgatggtttggagaagagacttaagaggattagtaagagaaccgatgcgtttttacaaggactcattgatcagcatcgtaatggaaagcatcgtgccaatactatgatagatcatcttcttgctcaacagcaatcacaacctgtatatttcaccgatcaaatcatcaaaggac

SEQ ID NO: 209221 - DNA, 475 bp, Glycine max
ataaagcactactataaattttattttacatatataagttcttcaaaaacattataagatgtttatgcttttaacagcactagaagttataaatatccttaactgtcagtgattggcacacttggcacatagcttctaagggatatttttttgacacagtaagtccctttccttcagtcatatcaatttcttttttagtagtccttttccactcaaaacattggattaataaggccagagttatgctcagtgtgcgttgagccatgtttgctccagggcaagccctcctccctatcccaaatggaagtaacttgtttgcttcactttcattctctaacctctcaggcttaaagtgtgttgggtcactccacaacttgggatctctatgaatggcccaagcattctccaacaatattgtgttctgtgggatattatattctcctatggcgcaatcttctgaagacaatatggggtc

SEQ ID NO: 209222 - DNA, 498 bp, Glycine max
ccatatccccccctagctacagagcttccaaaggggaggaataataataagcctatattctaaggccggaaaaataaaaaaggaataacaaaaatgtctggaaaggtaattatctcggctgtttctctcatcctggtggttggagtggccataggtgtggtggtggccgtcaacaagaaaggcgaggatcccacacttcaatctcaacaaaaatcagtaggggttatctgccaaaacactgatgaccagaagctctgccacgaaaccctaagctccgtgaagggcatggacaccgctgatccaaaagcttacatcgccaagtcggtgaaagccaccatggacagcgtgaccagggccttcaacatgagtgataggctcattaccgagtacggaggcttcgattacggaaccaagatggcccttgatgattgcaaggacctcttgcaatccgctatcgagagcctccaactcagcattgacatggttcacaacaacaac

SEQ ID NO: 209223 - DNA, 451 bp, Glycine max
ctaattctcatttcttcatcgttcgattcttctcctcctaaagatgcagatcttcgtgaaaactttgaccggtaagaccatcacccttgaggtggagtcctccgacaccatcgataacgtgaaagctaaaattcaagacaaggaagggatcccacctgaccagcagagacttatctttgcgggtaaacagcttgaggatggtcgaacccttgccgactacaacatccaaaaggaatccactctccacctcgtgcttcgcctcaggggtggcatgcaaatctttgtcaagactttgactggcaagaccatcaccctcgaggtcgaatcctcggacaccattgataatgtcaaggccaagatccaggacagggagggtatccctccagatcagcaaagttgatatttgctgggtaacaacttgaggatggaaagacccttgctgattacaata

SEQ ID NO: 209224 - DNA, 482 bp, Glycine max
aaaataaaaacataaacaacatactttcgctgaaacgagttcaatacatcattttaaaacataataaacagcagcacttaaaccagagatgcaaagcacaagttcaagggagacactgaacaaacagataagacatatgagaacacttcataaaagggattccccttagcaaccaccacgaaggcgaaggacaagatgcaaagtggattccttctgaatattgtaatctgccaaggtacgaccatcttccaattgcttcccagcaaaaatgagcctctgctgatctggagggataccttccttgtcctgaatcttagctttcacattgtcaatagtatcagagctttccacctccaaggtaatggtcttccctgtcagagtcttcacaaatatctgcatacctccacgaagcctcaacaccaaatgcagagtggactccttctggatattataatcagcaagagtacgaccatcttccagct

SEQ ID NO: 209225 - DNA, 461 bp, Glycine max
agacatcaaatgtatttattttgcagtaacggaagagagtggaactgtatccccgtcatcggataaacacaatagctgtagatagagaagagtgccattattgattcgcagaagaagataagcgatggttggggttaatcggaagaaaggcctctttgttgggaggatcaggaagaagaagaagatggttgagcttcgcagcagcagcagcagcaacaaccactaccaatggtggggccatggaggagttgctttcacagctccaatctcatgtccagaaggctcttgctggtggaggacccgaggcagtgaagaggaacacgagtaggaacaagtttctgccccgtgaaagaatcgatcgcctccttgatcccggttcttccttcctcgagcttttacagcttgcaggacattacttgtatgaagaacctttgccttctggagggggtgttactgggata

SEQ ID NO: 209226 - DNA, 464 bp, Glycine max
acgtaagctagctttggcatctttttcccctttttcctccaagcctataactatattcaacccaatctgcactggaccaagtgtaaaaagacattttcctgatcttctgctgtgccaagaaagcagtaatctccatgagcttctattgaattgatactttgatcaagatggatgggaaaaactctcttcaaataactagaagtggtattggtgcttatgatgatgatggacatgccaaaaggactgggaatttgcagagtgctgtagctcatatcattactgctgttattggttctggtgttctttctcttgcatggagcacttcccaattaggatggattggagggccattttccttgctttgttgtgcaattgtcacctatatttcttcattcctcctgtctgattgctacagaactcctgatcctgtcactgggaaaagaaactactcttacatggatgct

SEQ ID NO: 209227 - DNA, 441 bp, Glycine max
ccgaggtgctttatttactgcactggtggtcatatatgctctcacatctggcattgctggctacactgctacttccttctatattcaacttgaagggactaattgggttaggaacttattgctgacaggatgcctcttttgtggccccctattccttatgttctgtttccttaacaccgttgccattgcttatagtgcaactgctgccctgccatttggcacaattgtggtgatagtcctaatatggacattggtaacttcaccattgcttgtgttgggtggtattgcaggtaagaatagcaaaactgagttccaagcacctgtccgcactacaaaatatacccgagagattccacctctgccttggacaggagtaccattccccagatggcaatggcaggatttcttccttttagtgccatctacatagagctgtactac

SEQ ID NO: 209228 - DNA, 532 bp, Glycine max
  unsure (1)..(532): unsure at all n locations
gatccccttctccttctctctctctttttcgcctcattccattttcatctatcaatggctccagtagcagcagcatcttcagattcaatcaagccaagagatgtttgcatcgttggtgttgcacgtacacccaatgggtggatttcttggtactctgtcatctctatctgccaccaagctaggctctatagctattgaagctgctcttaaaagggccaatgttgatccatcccttgtggaagaagtattttttgggaatgttcttagtgctaatttggggcaagctcctgcaagacaagctgctcttggagcaggaatatccaattcagttatctgcactaccgttaacanagtttgtgcatcaggaatgaaagctgcaatgcttgctgcacagagtattcaattaggcacaaatgatgtttgttgtggctgggtggtatggaaagcatgtctaatgtccccaagtacctggctgaagcaagaaaggatcacgccttggacatgattcactttgtgatgggatgttgaaaga

SEQ ID NO: 209229 - DNA, 572 bp, Glycine max
tgatggttcagctatgttgacctttgaagcactatctgaaacagctgagtttgcgaagaagtgggtgcccttttgcaaaaagcacaatattgaaccatgagccccagagttttattttgcccagaagattgattacttaaaggacaagattcagccctcgtttgttaaagagcgacgggcaatgaagagagaatatgaagaattcaaagtacggatcaatgcccttgtagccaaagctcagaagatgccagaggaaggttggacaatgcaggatggaactccttggcctggaaataatcctagggatcatccgggaatgattcaagtgtttttaggtcatagtggggggctggatacagatggaaatgagctgcctagacttgtttatgtttctcgtgagaagcgaccaggcttccaacatcacaagaaggctggagctatgaatgctttgattcgagtttctgctgtcttgaccaatggtgcatatcttctgaatgtggattgtgatcactatttcaataatagcaaagccctcaagaagccatgtgtttcatgatggatcctgttcttgg

SEQ ID NO: 209230 - DNA, 476 bp, Glycine max
gcatgaacaaatttattttctggggggaaaaaatttaacattcacctctacattacttctgactattcttgttaggaacatgtagataaataatagaaacagagagggtacattcccatctatttaaggggttgaatcctccaaacaacttcaataggctgaaaattcttggtatattcacgacatcaaccttgtgtatctccaagcataagggaattacagcactaaatgaatcatacatgagaactaacagttgatgccacattgaccattggttaatttgttggagtctgaggtgaagggatcaatcctcacccacagcaaggagactattgaagcaagaagaacggtccatacaataacattggttggggtacgactttgcctgcccaagagacccttcaagaatgggtatagatgggcaatgacccagattgcataaaacatctcgccaaatagtggaccccaacactggc

SEQ ID NO: 209231 - DNA, 552 bp, Glycine max
aaacactcttcttcatcgtcgtcgctttgggacgtgtgatccgtgcgcagcgtaagggagcaggctcggtcttcaagtcccacacgcaccaccgcaagggccctgcccgcttccggagcctggatttcggagagcgcaacggctacctgaagggtgtcgtcactgacgtcatccacgatcctggccgtggcgcgcctctcgctaaagtcgccttccgccacccgttccgctacaagaagcagaacgagctcttcatcgccgccgagggtctctacaccggccagttcatctactgcggcaagaaagccaccctcgttgtcggcaatgtgttgcctcttcgatccattcctgaaggagctgtcatctgcaacgtcgagcaccatgtcggcgaccgcggcgtcttcgctagggcgtctggagactacgccattgttatcagtcacatccctgataatgacacctctaggattaagctcccatctggttcaaagtagattgttccaagtgactgtagggccatgattggtcaaagtgcatgtggagggagaactg

SEQ ID NO: 209232 - DNA, 415 bp, Glycine max
aaaatagcaataatctgcagcattgaacatgcaaccaaacaaatattgaagaccgtctattgaaaactccatatgttgggaagaaattggctctgaagaaggtgcccaaatagtctaacaaacaaactatcagataaaagaaaaacaatactgaaaaacttgcaatcaaatatattatccctaacatcgttctctttaagccttatcagccttggcagcagttgcagcagcttgtcctctaagacgaccagtcctcctagcagcaatgagaccaacctcttgtgcaggaggagcatcacgcctgacagtacttgcgtgaccaatatgctggtgattacctcctccgtggggatgctcaacagggttcattgcaactccacgaaccttgggccagcaattcctcttcactctgaac

SEQ ID NO: 209233 - DNA, 569 bp, Glycine max
cagaaacagaaaccgtagacaacccgaatcccttattaagcaggggtttcgcggcgcgagacggtgacactggcagagtggaatttccgccgccattcgaagctacagcgatggccataaccgccaccatttccgttcccttcacatcccccagtcgccgcactctcgcctccgtcaatagcctctctccgcgttctacccgatccactttgcccacaccgcaacgcactttcaaataccctaattcgcgcctcgtcgtgtcttccatgagcaccgaaacagccgtcaaaacttcatccgcctccttcctcaaccgcaaggagtccggcttcctccatttcgccaagtaccacggcctcggaaacgacttcgttttgattgacaacagagactcctccgagcccaagatcagtgctgagaaagcggtgcaactgtgtgatcggaacttcggcgttggagctgacggagttatctttgtcttgcctggcatcagtggcaccgattataccatgaggatttttaactctgatggtagtgagcctgagatgtgtggcaatggagtgcgatgc

SEQ ID NO: 209234 - DNA, 431 bp, Glycine max
tttctttttttttttttttttttttttttttttttttaaaacaagcataaaggccacctttcatacaaatattattcagcaattcctaattccatattgggtttaacaatgggggccacctattaaaggggggaagatccgtaataaactacatcggctgaccctggcagtataaacatgattatcttcctccctccattcaatctgaagaggtcctccagagagatcaaccgtgcaattcctctccagcacgaccctcaagaactggtgcaacaacagctggacaagctccaattccacaagctagggttggtcctgctccccgctcccagacacccattttcaagggagaattaaaccacacttgttccaactctgtgttaattcctgcagggaacaccccatgatggtcaaactgtgggccaattttt

SEQ ID NO: 209235 - DNA, 584 bp, Glycine max
  unsure (1)..(584): unsure at all n locations
ggaagtgtgaagaacagttctgtttctgccaaagttagtgatggggccagcagtcttgcaaagacaagtgggagtgccaagatcagcaaccgagctgattttgttgagagtggtaagagcagtatttgcagaggaagcacaagcagtgatgtgagtgatgagagtacttgtagtagctttagtagcaccataaacaaacctcacaaggcaaatgacttgagatgggaagctatccaagcagttcgaagtagagatggggtgttgggtttaggtcactttagattactgaagaggctgggttgtggggatattggcagtgtttacctctccgagttgagtggaactaaatgttactttgcaatgaaggtaatggacaaagggtctctagcaagtcgtaaaaagctacttcgtgctcagacagaacgagaaattctgcagtctcttgatcacccttttctcccaactttgtacacccattttgagacagaanaattctcatgcttggttatggaattctgnccaggtggtgaccttcatactcttaggcagaagcaaccagggaagcattttnctgagcaggcagt

SEQ ID NO: 209236 - DNA, 587 bp, Glycine max
gtacattattatcgaaattagtggtttaagttcattcaccccaaaaagaaaatatttcttgctaacaatatttttataaggtttactggttagcaacccagtgtgtgattcctcagttcaacaactctcagcaacatgcacaatcctcccccgccaggcggtccaggccctcaccaccaccccggcccaccggctccgccaccacatgctcatccatctcctccgcctcctgggcctccacaccaccaccacggcccacccggcccaccgcatgcttatccaactcctccgcctcctgggcctccacaccaccatcccggcccacccgaaccaggctttcatcaacaccatggcccacccgggccaccgtatgctcatccaactcctccgcctcctgggccaccgggacctccccctccagggcctccacaccaccaacaccaccgttgctgatgtaatgcatatggagcttatgaataacgatcctacatatatatgatgtaatgttgaatgctttttaatttctgaacactttatatagcaagggcaaaatttggttgtgtcactaaataaaagctttgtagttc

SEQ ID NO: 209237 - DNA, 382 bp, Glycine max
caaatgccctaccatatcttatcatttggttggcaccaaaaagattcaacaggaacttgcaaagcctggtgttcttgagaggtttgtagaaaacaaagaccacattgccaaattgcgtgcatgctttgcaggattgtggagtttggaagactcggatattgctaaaaaagcaattgaaaatccagagttatttgtgatgaagcctcaaagagaaggaggaggaaacaatatttatggtgatgagttgagggaaacccttcttaaattacaggaagcaggttctgaagaagatgcagcatacatccttatgcagaggatatttccagccacttctccagcaattttggtgcgtgatggtaattgggataagggtcatgtcatt

SEQ ID NO: 209238 - DNA, 577 bp, Glycine max
  unsure (1)..(577): unsure at all n locations
gtactctccgtccttccttcttcgatccagatctctctccttctccctcaaatggcttcccttctgcaatgttccatgcccctcgtctctctttccaatcgagctctggtacccggtaccaggatctccaacccaagttcagtttccctttcaattaagggaagaagtttcccatccgttacattgcagcccagagggcgtcggtttcagcttagatgtgcggcaaaaccagagacagtgaagaaggtgtgtgacatagtcaagaagcaattggcactgccagatgaatcagctgttactggagagtctaaatttgctgcgcttggagctgattctcttgacacggttgagattgtgatgggacttgaggaggaatttggtattaccgtggaagaagaaagtgcccagagtatcaccaccgttcaagacgctgctgatatgatcgataagcttcttgaaaccaaagcttaaactagtaaaaaggacaagcatgtcccatttagagttttttgctatgtcgacggaaggggtttttaatctttatctttggtattacaactngattgtctaagtaact

SEQ ID NO: 209239 - DNA, 559 bp, Glycine max
  unsure (1)..(559): unsure at all n locations
gcacaatcaagagacaacaaatttccatccttgagatcttataattctggcagtttagttgattttttctcagaaccagtccaagcttcagaaccacttcagaataaagcatttggcattcccagaccacctggtcctacaagatctgttagcatggacctctccaaggcaccactggaatcagcttcatctgttgatctttttcagttaccagcagcaccatctcaagctccaacattggatttgtttcaatcatctctttcatcggcagatccatctttcaacgagaatcaacttagtcaaacatcccatcttgcatctattgattttttttccgatttttctccgcagccttctactgtaacctcagatgggaaggcactggaattatctgtccctaaaaatgaaggatgggcaacttttgatatgcctcagagaacctcctctactgcacaagtggaaattccaaccactgtaccctcaaatgctaaatctttagaagaaaatttgatccattntctacctcaaatgcaaacatgcaatggccatcttttgatat

SEQ ID NO: 209240 - DNA, 525 bp, Glycine max
  unsure (1)..(525): unsure at all n locations
aaaaattactcgagcttctatcagaacctaataaaaactataattaaaccggaaaaaaaaaaaccgtaatccgcatttatacatgaattggacgtgcgtgccaatcagaggctctcatataattacaattatattataattatgaacaaagtgaaaaataccctcaatagtctctcagtaaagttcaataccagccagatcactaattaaacatcaagaaaactatcactcaattacagtattgcaaatgcatgatctggcccgaatatatatgggggactaaaaattgcaaggtggtcctcaagtggaagcgaagtgatgaactacattttgctcttaacaaaacattacaattacttccacgctcaactgcactggctgccaataaatttctatgaaaaggaatagtacattctacagcacaatcctatgcaaaaggatttncccggatcgaatcaactgattccggtttctggatgttctgtatttgcgtacttggtgattgcatagccatgaatgacaaac

SEQ ID NO: 209241 - DNA, 508 bp, Glycine max
  unsure (1)..(508): unsure at all n locations
ttcagggttaagcggtgagatttgcgaatctgagaaatggcggattcttctcgggaggagaacgtttacatggcgaaattggcggagcaggccgagcgttacgaggagatggttgagttcatggagaaggttgcaaagactgtggaggttgaggagttgacggtggaggagaggaatctcctctctgtggcttacaagaacgtgattggtgcgaggagggcttcgtggaggatcatatcctccattgagcagaaggaggagagcaggggcaatgaggaccacgtggccattataaaggagtacaggggcaaaattgaggctgaactcagcaagatctgtgatgggattttgaacctccttgagtccaacctcattccttccgctgcatctcccgagagcaaagtcttttaccttaaaatgaagggtgattaccacaggtaccttgctgagttcaagaccggngcagagaggaaagaggctgcagagagtactttgcttgcttacaaat

SEQ ID NO: 209242 - DNA, 417 bp, Glycine max
accagcgacaataaaaaatttataaatcactaaaccacatttttttcatccataaaacacattagacaatcccctggaacaattgtaaatcccaagcgcaacgcgcccttgaaatcataaaattcattaataccataatcccactatgggaggccacattggatccatattatggggaatacatatccaatcaactaccacattggaactggcatcggctattcgcctgggtggtgcttaaatgtttccttgatctcatttccaacatcggccgggatgtctggtgtccccaaagccaaattgtcccgggaaagttgcctgaacaatggactatctttggatgacccttcccccaatggggcaagctcggaaattgcctcatcaaaagcccgcttgggaagattacaagcacgatct

SEQ ID NO: 209243 - DNA, 443 bp, Glycine max
  unsure (1)..(443): unsure at all n locations
cgtcaaacttgagttcaaacactctcatcttcttattcttctgctttcactctctgactcaatcgttctaatccacaaaaaatgaccttaaattacaacattgccctcgccttctctgcggtgctcacgctgctcctctttcccctactgaccgtaggggagctcgtggaggagcagccactagtcctcaagtaccacaacggccagctcctgaagggccgcatcaccgtcaatctcatctggtacggcaccttcaccccgatccaacggtccataatcgtggactcataaatcttcgttaagcagcgcgccaaacgcgctctatcccctcgaccgccacngtggtggaaaaccacggagaagtacaaggtgggaggagggatcccctgcgcttcgtcgtagggatgcacgttcctacacccggcttacacgctagggaaaaa

SEQ ID NO: 209244 - DNA, 402 bp, Glycine max
ggcagaaagcaagctcatcctagagttttaaaaatggcagcagcctcctccatggctctctcttccccatccttggctggcaaggccgtgaagctgggcccatcagcccccgaagtcgggagggtcagcatgaggaagaccgtcaccaagcaggcctcctccggaagcccatggtacggcccagaccgcgtcaagtacttgggcccattctctggcgagcccccgtcctacctcactggcgagttcccaggtgactacggctgggacactgctgggctttcggccgacccagaaaccttcgccagaaaccgtgagctcgaagtgatccactccaggtgggccatgctcggggccttgggctgcgtcttccccgaactgttgtcccgcaacggggtcaagttt

SEQ ID NO: 209245 - DNA, 563 bp, Glycine max
  unsure (1)..(563): unsure at all n locations
atatccttttgccaaaccccacaaggaagttcctatcatatttggagagtggtggaatgcagatcctgaggcaatcataacacaagcccttcaaaccggtggaggaccaaatgtatctgatgcctacacaattaatggacttccagggccattgtataactgctctcacaaagatacattcaagttgaaggtgaagccagggaagatttaccttctacgtttgatcaatgcggcactcaacgacgagctatttttcagcattgcaaatcacaccctcacagttgttgaaacagatgcagtttatgtaaaaccttttgcaaccaacaccatccttataaccccaggccaaaccactaatggttattctcaaaaccaattctcactaccccaatgccacattcctcatgactgcgagaccatatgctactggccttggcacttttgacaacacaactgtggctgccatattggaatacaaaaccccatcaaatactcaccattcagctgcttcactgannaaccttccactcctcaaacctattctncctgcactcaatgacact

SEQ ID NO: 209246 - DNA, 496 bp, Glycine max
ctttggcaaaaaagttataccgtaatcccaatttgggaacaactagcagtaaccgtgacgactctgatcagaagaagcctatttctaaaattcagaaagagcggcaaaatggtgctggcttgagtaataaaaaaagataggccatctccattgccagctaaaagacccctagataatagtgattccttgcatgcctctgttaagaagccaaaggtctcagatccagttgcatctatcaaaactaagccagtctcggtgaaacatgagctgaaggtagaggatgatgatgatgatattcctatttcccagagaataaagaaatcagccatgtcaggtgataaatcatctgccacaaagaagttgctgacaaaggttactaaagttaataagtctggttcaaaaccttttaagaaacagataaagaagacagttaaaaaatcggcagtggttcagaatattccaaatctacaaagcttcttcctagctctggtgatgg

SEQ ID NO: 209247 - DNA, 406 bp, Glycine max
gcaatcgctgtgttgaagggtttgatcaccattgcaggtggctgaataactgtgttgggaaaaggaactacacaaccttctttcttctcatgattttcgtcttgttaatgcttttgattgaaggagggactgcaattgctatatttatcaggtgctttgttgataggaggggaatagaaaaagagcttcagaggaagctttatgtagattttccaagaagagttcttgccaccatatgtgtatttcttctcttattgacagcgtatagttcaacagcattgggacagctgttcttctttcatgtgggtctcatacgaaagggaatgaagacctatgactatattctagccctgagaaaagaaaacgaagcaatggatttggaatcattggatgattctgatttctc

SEQ ID NO: 209248 - DNA, 602 bp, Glycine max
  unsure (1)..(602): unsure at all n locations
taaaaagagaggaaaaaaaaaagcctacaccaccctcttcttccctattcccttctacttctggcgccatttgcagcttcaaaactccatctttatttttcttctctccttccattattagaaacaccctcatggaatcagcagcaacagcattgaacaacatcatcaacaacaacaacactgttcctgcagtgtcgccaccaccaccaccaccaccatcctcagagcctcagccaatgaacatgaatgtcaacatgaacatgaacgtggtcaacaccacagaaggaacaacaccaacaccaaccccaacaacaatggttcccccaacaacaatggttgttcctgcagtgccagctccaacaacgacaacattagcagtagcaacaacaacaccagggagtttggatttgtttgggaagaagaagagagggaggcctagaaagtatgatgcagatgggaacctgagagtgagtgcaagaccaacaccaacaccaccatcgggttttactttgtccacaccttctgagtactcttcttccaaaagagagcgcggcanacactacaacacaactntngccaacaacagctaccaacaacaactc

SEQ ID NO: 209249 - DNA, 576 bp, Glycine max
cttctctgattctctccatatattatctcaaacccctctcacagaatgggaagtgctggaggaactgactatggtgcatacacttatgagaatcttgagagagagccttactggccatcagagaagcttaagatttccatcactggtgctgggggttttatcgcgtcacacatagctcggcgcctcaagacagaggggcattacattattgcttctgattggaagaaaaatgagcacatgactgaggacatgttctgtgatgaattccatcttgttgatctcagggtcatgaataactgcctcaaggttacagagggggttgatcatgttttcaatcttgccgcagacatgggtgggatgggttttattcagtctaaccactctgtcattatgtacaacaacacaatgattagcttcaacatgattgaggctgccaggattaacggcattaagaggtttttttatgcctctagtgcttgtatctaccctgaattcaaacagttggaaactaatgttagcttgaaggagtctgatgcatggccagctgagccacaagatgcatatgggctagagaag

SEQ ID NO: 209250 - DNA, 432 bp, Glycine max
  unsure (1)..(432): unsure at all n locations
gaaagggcgaaaatggtcaaactgagcacgaaaaccacatgagtttcctaaaccagtcacacgacaattcactcaccccttcatttgaacacaacttaacataaaaaaatatccaagacaagagtgtgttgtttgaatttgaacggaaattcaattctctcctctcccatttcatgtctcacaaacaaaaaccgatgcaaaatctcaaaaccccagagagagatgtctgacgcgttctgcagcgactgcaagagacagaccgaggtggtgttcgaccactcggcgggggacacgagtgtgttccgagtgcggactcgtcttggagtctcactccattgatgaaacctncgagtggcgaaccttcgcgaatgagttcggcgacaacgaccctgtccgtgtacggtgggctcaccaacccgctactaaccgacg

SEQ ID NO: 209251 - DNA, 490 bp, Glycine max
  unsure (1)..(490): unsure at all n locations
caaacacaaacctactttgaagcccaaagtgcaacgtactttgcaaaaaccctaaaccctctctttctctctccgcgactctgtactcatcaatggcgacgcaatcgttagacgaagaaacaactaagaaagtcatacgacaggtcgagttttatttcggcgacagcaaccttctcaccgatggtttcatgaggaagagtatcactgaaagcgaagatggcatgattagtttggcgctgatttgctcgtttaatcgaatgcgaaaacaccttaatttgggtgatgttaagcccgatgaagtggcccaagaaaccgtgaatactgttgctcaaactttgagaaattcggcttcactcaaggtctccgaagatgggaaaaaagttggcaggaaaactgaacttccaagctagaagatgttgagcaggtggagataagaacactngctgtatcaccatttgatatgatctgaagctngaagatgtggagaaat

SEQ ID NO: 209252 - DNA, 488 bp, Glycine max
attgcattctgctatttaattccactacgtacacgcacattctcctcaaagacaacaatggcaccaacagccaagactctgacttacctggcccaggagaaaaccctagaatcgagcttcgctcgggacgaggaggagcgtcccaaggttgcctacaacgaattcagcgacgagatcccagtgatttctcttgccggaatcgacgaggtggatggacgcagaagagagatttgtgagaagatcgtggaggcttgcgagaattggggtatattccaggttgttgatcacggtgtggatcaacaactcgtggccgagatgacccgtctcgccaaagagttctttgctttgccaccggacgagaagcttcgttttgatatgtccggcgccaaaagggtggattcattgtctccagccatctccaaggggaatcggcgcaggactggagagaaatagtgacatacttttcgtacccaaaaagagagagggac

SEQ ID NO: 209253 - DNA, 412 bp, Glycine max
gaacagtgttgagtggaatcctaaatacaatttacttgcatatgctggtgatgacaaaaacaagcatcaggctgatgaaggtgtttttcgcatttttggttttaaaaatgcttagtatatatggtaggggcactgtttttactggtttgagaatgcaaacaaatgggaagactgagagagcctaatggaggttgatttgtaatctgaataaatttgattattatgtgtagaacaaggggcagcattcacggacatgaatagtaagtaaaagggatattttttttttttccattctttttagtaattgtatggataaatgatatcgttcaacagcacattgccctatacaagttgtgacacaagttgtgaccaaattgttatgtatttagacataatagttcttttacttttt

SEQ ID NO: 209254 - DNA, 553 bp, Glycine max
  unsure (1)..(553): unsure at all n locations
ggcacagctatgccaccaaatccaaccaacacagggtcgtcaaaacccctggtgggaagctcgtttatcagaccaccaagaagagggccagcgggcccaagtgccccgtcactggcaagaggattcaggggattccacacttgaggcctgcagagtacaagagatcaaggttacccagaaaccgtaggactgtcaaccgtgcatatggcggagttttgtctggaagtgctgtcagggagaggattatccgagctttcttagttgaagagcaaaagattgtgaagaaggtcttgaagatccagaaggcaaaggaaaagcaagcctcaaaggcttgaatttgaacaacacaatgagacatctttttggaggacttttaggtttgagtggttatagttaatcacaaattttatagagttgtcatgttaattgtcttttattatnttgcctgtttgaactctttctaagcaagtgttatctttgtcgacatgtcattatatacagntttgtttctcattntctttgatgggtattgggtatctgttctatatattct

SEQ ID NO: 209255 - DNA, 537 bp, Glycine max
  unsure (1)..(537): unsure at all n locations
cttgtattgacatcaattttcattgccgtgaaaccttgctttttctctctcggatagaagcaggttccaagcaattgaaaatgggcaatcggaagacagaagaggaaaggattgaaagagtaattcggagtcttttaaaacttcccgaaaatagaagatgcatcaactgcaatcttttgtctatcttgtaaggaagattgcaagaagttcacaagggaaaatcacgtacaacataaagagtaacatgcaaagagaagaatatactagaaaagttaaagggaccacaatatgtgtgtacaactttctcgacttttgtctgcacaaattgcagtggaatacaccgagagtttacacatagagtaaaatctgtgtcaatggctaaattttctccagaagaagtcactgctcttcagcaggtggcaatgagagggcaaagcagatttatttaaagaatggaatcctctgcgccattctcaccccgaatccggtaatatacacanacttcgagatttcattaggcacgtatatgtggaaaga

SEQ ID NO: 209256 - DNA, 568 bp, Glycine max
tgcattttctacattgcaacaccgcgatatgaacgatgcaaaatagtttcagatacgtcgcgttgattgattgatatgaagtggttgactttctggaactgcatatctatcctcgtgttgtcttttgctttcttcttcttctattgtcacacatacacatctactccttccctcatggctgagcaatcttccaagtccatttacgatttcacagtcaaggacatcagtggaaatgatgtgagtctgaataattacagcgggaaggttctactgattgtgaatgtcgcctcacaatgtggtttgacacagacaaattacaaagaattgaatgtattgtacgagaagtacaagaatcaaggatttgaaatcttggcatttccatgcaaccagtttgctggacaggaaccaggaaacaatgaagaaattcaggaagttgtttgcacaaggttcaaggctgaatttcctatctttgataaggttgaagtcaatgggaagaatgcagcgccactttataagtttttaaaggagcagaaagggggaaatattggtgatggtatcaagtggaact

SEQ ID NO: 209257 - DNA, 513 bp, Glycine max
ctctcgctgagcaaatgcagataaacagcagcaacagctgcgcagtgttagttcaagagaccttggtgccaacagtcctgcctcacttgttggctcccctgcaaacccttggtcaaagtggggttctcctattgggaaagctgattggtcagtaaatggagactcccttggtcgtcagatgcgaagatcatcctcgtttgagcgcaagaacaatggggaagagcctgatctctcttgggtccaatctctggtgaaggagtccccacctgagatgatcaaagagaagtttgcatctcctatgcctactgcatctgctgatggaccgaattcaaattcccaaattgaatccattgaccattctgttttaggagcctggcttgagcaaatgcagctggatcagcttgtagtctagtcaaaattgaccctttactatcttgttgagataggtatttaatttcgtaaggtacatattcttttggtgaaattttttgggaagacaacagggaagaagtg

SEQ ID NO: 209258 - DNA, 566 bp, Glycine max
  unsure (1)..(566): unsure at all n locations
ctcagacaagaaaaatgttaataacatattttctaatacactcttttaaatatgtttattagtgacggaatttagtgatgtattgccttttcgtcactaattctaaagttacaaaaactttagtgatgaatntttcaaaagttacatatgaaatatttcgtcactaaaatttattgaaaattaaatctggaaaattcatggttattttttttatgtgattttatagtttttaataaatttaaactaatcataaaaaatgtgttaaaatgagtgtaataaagaatatgttattgacacttgtggtatgtatactctactcgatccgatccagtgtatttttataggtaccaatttcttcttccactgttgttattgtacgtgtaccttgtgtacgaattggtcgttagatgtttctattttacgttttgctatagaaatgtgaagcagacaaagagtctcagatatagcaaaattacaagatgcaagatggagactaaatgtaattgagctacgatggcaataaaatntcttgtttcaatttggataacaatgagatgagagtgtga

SEQ ID NO: 209259 - DNA, 569 bp, Glycine max
attaattgcaagaatggcacttcgttgcttggtgatgtccctttctgttctcttcactcttggtcttgcgagagaaagccatgcctgagacgaagattattggcatgctgtgtggccagacactggattcgagaacattgcgagatcttctaaagcctggccctgcaagtgttgaaatcgatgatcaccctatgcaaattgaagaaacacagtacccgaaaaccttcttctataaagaagaccttcatccaggcaaaacaatgaaagtacaattcagcacgcctccctttcaacaaccatggggtgttggtccatggttaaaggaaattaaagacactactaaagaaggatatagttttgaagagctatgcatcaagaaagaagccattgagggagaagagaagttttgtgcaaaatccttgggaacagtaattggttttgccatttcaaagctgggaaagaacattcaagtactttcaagttcctttgtcaataagcaagaccaatacactgtggaaggagtgcagaatcttggagacaaagcagtgatgtgtcatacgctaaatttc

SEQ ID NO: 209260 - DNA, 487 bp, Glycine max
cttagagagcggtatgaaattcaccacaagctccgctatactgatgaggctcttgtagctgctgcacagctgtcctaccagtatatcagtgatcgatttttgccagacaaagctatcgatttgattgatgaagctggttcacgagtccggcttcaacatgcacagttacctgaagaagcaagagaacttgacaaggaggtgaggcagattattaaggagaaagaagaagctgttcgcaaccaagactttgaaaaggctggagagctacgtgatagagagatggatcttaaggcacagatctcaacacttgtagagaaaggcaaggagatgagcaaggcagagactgaggcaggggatgaaggtcctattgtgactgaagctgacatacagcatattgtctcatcctggactggtattcctgttgagaaagtctcaacagatgaatctgatcgccttctgaagagtggagagactttacataggcgag

SEQ ID NO: 209261 - DNA, 601 bp, Glycine max
tcctaagccaattctctattggttttcttctgattggttcaccattcaacgagggtccttggaaaatgtcaccttcacatctgatccagaaacttttgaacttggatttgattaccatgtggccaattcttcatctggtggcaatagaatccttggcaggccagtgaacaatagcaccataacatatctcaggcttggaattgatggcaacattaggttctacacttacttccttgatgtgcgtgatggtgtatggcaagtgacctacactctatttgatagagattctgatgagagtgagtgccaattgcctgagagatgtgggaaatttgggttgtgtgaagataaccaatgtgtggcttgtccattggaaaatggactacttggttggagcaacaattgcactgccaaggctgtgacatcatgcaaggctagtgatttccactactacaaaatcgaaggagttgagcattacatgagcaaatacactacaggggatagagtgagtgagagtacttgtggaaacaaatgcaccaaagaatgcaagtgtgtgggttatttctaccacaaggagaattcaaggtgttgggagcttatgatc

SEQ ID NO: 209262 - DNA, 581 bp, Glycine max
ctggctggttcagctgatttcaagactgaacttagtcagtcagatatgtttgatcctcgacttcaggcaaaaatactcaatgttgttgatgtctcctacggaggcgagaatgggtttaatcaggctattgaactctctgctgaaattctgtccaatgtgaagtttatccaggagaagcgattgattggaaaatactttgaggaaatcagccaggatactgggaagtatgtttttggggttgatgatactctaaaggctttagagatgggagctgttgagacacttattgtgtgggaaaatctggatatgaataggtatgtcttgaaaaatagtgctactggtgaggttgtcattaagcacttaaacaaggaacaggatgccgatcaaagcaattttcgggatcctgagagcaatgctgattttgaggttcaggagaagttgtctctgctggagtggtttgcaaatgaatacaaacgcttcggttgcactcttgagtttgtcaccaataaatcacaagaaggctcacaattttgcagaggttttggtgggataggtgggatcttgcggaccagctggatatg

SEQ ID NO: 209263 - DNA, 435 bp, Glycine max
  unsure (1)..(435): unsure at all n locations
gcttttccatggatattgtcagaggaatggcctatcttcacaatgaaccaaatgttataattcatcgagacttaaagccaaggaatgttcttttagtcaattctagtgccgaccatttaaaagttggagattttggattgagtaagcttatcacggtccagagttctcatgatgtatacaagatgactggtgaaactgggagctaccgctacatggctcctgaagttttcaaacatcggagatatgataagaaggttgatgtgtactcctttgcaatgattttatatgagatgcttgaggtgaccacctttgcangtcgtgaaccttatgaaggagcaaaatacgctgcagagggacacangcctcattttcgggcaaagggtatacccctggattgcagagttaacagagcagtgttgggctcatgacatgagt

SEQ ID NO: 209264 - DNA, 550 bp, Glycine max
  unsure (1)..(550): unsure at all n locations
cgaaaccggccaggtggtgagccaggaagccatcacctggtcggtctcgggttaccccaccatgaccctagaggacatggtgggagtacttgaggttcccctcaagagcaccgaattcaaccgctccatcactaaacgcggtgtcaatttagcagacctggcatgcttgccaatctcttcagggtggtatgggacacaagtggaggagaatacaaggttgattaaggtgcagtgctattccaaagaaggcactgtgaacttctacatgaaaccaattgagggtgtgactgccttggttgacatgaataaaaaagaggtgctgtcaatttcagataatggccaaaacatccctgtggctaatggaattaacactgactaccgttactccattcagaagctgaatggaggagagttgaggatgctgaatccaatatccttggagcaaccaaaaggtccaagcttcacaattaatgggcacttggtgaaatgggcaaactgggaatntcatctgagaccagacccaagagctggggatcataattcacaagcc

SEQ ID NO: 209265 - DNA, 545 bp, Glycine max
  unsure (1)..(545): unsure at all n locations
cactggcgcagctaccctgaggcttctcttctcttctcttctctgtcgtgagtcaccatggtgagggttagtgtgctgaacgatgctctgaagagcatgtacaatgctgagaaaaggggaaagcgccaagtcatgattaggccatcctccaaagtcattatcaaattccttttggtgatgcaaaagcacggatacatcggagagtttgagtatgttgatgaccacagggctggtaaaatcgtggttgaattgaacggtagactgaacaagtgtggggttattagtccccgttttgatgtgggcgtcaaagagattgaaggttggactgctaggcttctcccctcaagacagtttgggtatattgtattgactacctctgctggcatcatggatcatgaagaggctaggaggaaaaatgttggtggtaaggtattgggcttcttctactagtttaatttttatcaaggatgtcagggatttcaattntgagattcatcggttgtaatggaggataatgctagccccctagtagtatcaatcatagc

SEQ ID NO: 209266 - DNA, 507 bp, Glycine max
  unsure (1)..(507): unsure at all n locations
ccaacaatggcaatggcaacccaagcctctctcttcaccccacccctctccggtctcaaacccagcgaccgagccaccgcgccatggaaacaatcctccaccctctccttctccacctcgaagcccctcaagttctcgcgaacaatcagagcagcagccaccgaccagaccacagaggcaccggttgggttcaccccaccggaactggacccaaacaccccttccccgatcttcggaggcagcaccggcgggctcctgcgcaaggcccaagtggaggagttttatgtcatcacatgggactccccgaaagaacagatctttgaaatgcccactggcggcgctgccatcatgagggagggtcccaaccttctcaagttggcgaggaaggagcagtgcttggctcttgggactaggctcaggtcaaagtacaagatcaagtaccagttttccagggtcttccccaaggngagggtcagtatttgcacccaagggtggtgtgtaccctga

SEQ ID NO: 209267 - DNA, 571 bp, Glycine max
  unsure (1)..(571): unsure at all n locations
cacaaagtcacaatggaccccctctctctcttctgcaccggagccctcctcgccggcggcctctactggttcgtgtgcgttctgggccccgccgagcagaagggcaaacgcgccaccgatctttccggcggctccatctccgccgagaaagtccaagacaactacaaacagtactggtccttcttccgccgcccaaaggagatcgagaccgccgacaaagtccccgacttcgtcgacaccttctacaatctagtcacagacatctacgagtgggggtggggccagtccttccacttctccccctccatccccggcaagtcccaccgcgacgccacgcgcctccacgaggagatggccgttcgatctcatcgaggccaagcccggcaacagaatcctggatgtgggcctgtggcgtgggcggtcccatgcgggccatcgcggcccactcgcggcncaacgtagtcggcatcaccatanacgagtaccaggtcaaccgcgcaaggatgcacaacaagaagcagggttggagtccctctgcaagtcgtgtgcggaattttctcagatgcccttc

SEQ ID NO: 209268 - DNA, 555 bp, Glycine max
ttcaacaccggaataagtgggaaattgtcttcactgacgatgaaggtgacatgatgcttgttggagatgatccatggcctgaattctgtaatatggtgagaagaatcttcatttgttccagccaggatgtgaagaagatgagttgtggaagcaaactgccgatctcctcagtggaagacgggactgtaataagctcagacacaaccgaaacctgaaacttttgacattctttcctgtggttttgcgtttgtttgtcagcagcacccaaatgctgatccttcttgttgcttcaaattgtttgtgggaaggaagttggtctatttgggctggggtaagtttcatgttatcagatgtgagacactagctaattgtaacttaatttgtagagacaccaccaccaggcattaattgtgctagaaaaaaaaagacctaaacagatttctttaataaattagtaagtgggaagatggcaaatttaggcttagtatattggatattcatgtcaagttggaagaagaatgtggggggtttgatgttttgaaagacttgcctttt

SEQ ID NO: 209269 - DNA, 472 bp, Glycine max
cactggcgcagctaccctgaggcttctcttctcttctcttgtctgtcgtgagtcaccatggtgagggttagtgtgctgaacgatgctctgaagagcatgtacaatgctgagaaaaggggaaagcgccaagtcatgattaggccatcctccaaagtcattatcaaattccttttggtgatgcaaaagcacggatacatcggagagtttgagtatgttgatgaccacagggctggtaaaatcgtggttgaattgaacggtagactgaacaagtgtggggttattagtccccgttttgatgtgggcgtcaaagagattgaaggttggactgctaggcttctcccctcaagacagtttgggtatattgtattgactacctctgctggcatcatggatcatgaagaggctaagaggaaaaatgttggtggtaaggtattgggcttcttctactagtttaatttttatcaaggatgtc

SEQ ID NO: 209270 - DNA, 567 bp, Glycine max
  unsure (1)..(567): unsure at all n locations
ggatgccttctctgctgcagttattgtcaatattgctttctcttttatacctgcctcatttgccgtttcaattgttaaggaacgtgaagtgaaagctaagcagcaacaactaatcagtggggtttctgtcctgtcatattgggcttctacatttatttgggacttcgtgagcttcttgtttccggcctcttttgccatagttctcttttacgtctttggtctggatcagtttgttggaggggtttctttgttaccaacaatcctcatgcttttggaatatggacttgcaatcgcatcatcaacttattgccttacatttttcttttttgaccataccatggcgcagaatgtggttctcttgatccactttttctctggattgatactgatggttatctcattcattatgggactcatgccatcaacaatgagtgccaattcttttcttaagaattttttcagaatatctcctggattttgtttcgctgatggtcttgcttcactagctcttttacggcaaggaatgaaagataaaacaagtgatggngtgtttgattggaatgttac

SEQ ID NO: 209271 - DNA, 515 bp, Glycine max
ttgatcacaagaccctctattatgatgtagacctgtttctgttctatgttttatgtgaatgtgatgatcgaggttgtcacatggttggctatttctccaaggaaaaacattctgaggaatcttacaatttggcatgtatcctcaccctaccaccttaccaaaggaaaggctatggcaaatttctaattgcattctcatatgagctgtccaaaaaagagggcaaagttggcacacctgaaagacctctttctgaccttggactgctaagctacagaggatattggaccagggttctcttagacattctgaagaagcataagggaaacatttctatcaaggaactgagtgatatgactgccattaaagctgaagacatattaaccactctgcagagcctagaattgattcaatacaagaaaggtcagcatgttatatgcgcagatcccgaagtgttggatcgccatcttaaagctgctggcagagggggcctggaggttgatgttagcaaactgatc

SEQ ID NO: 209272 - DNA, 470 bp, Glycine max
gaaaaacacacacacaaacaccctttgagttcattaacctcttcagaaaaaacaacaacaacaacaaaaaaaaacatcatcatcaaaaaaacttccgagagtttaatggcaacacgcgtgatccctccaagaatcctcaagaagctccgttacaacacaacaaccaagccactcaacgctgcccacccctcaatctctccagtcatcgccccaccgtcactcttcgagaggtcgccgtcccctgtcgcggatgctgtttcaacaacatccacgactatggagacggcgaatctcaacctcgacgacgcggagcggcttttcgcgtcagtatcgacggaaaagctgctccgggtcgtcccgcggttttgcatgcgacggcggtggggcccatggtagacctgggaatgtggttgatgaagtctcccgtgttccagaccgggctgccaaaggatctcatcatgggccgcacg

SEQ ID NO: 209273 - DNA, 549 bp, Glycine max
  unsure (1)..(549): unsure at all n locations
ggatggcaaacacaaacagcgacaccaaagaagaaagcaaaaaaatggatgaaagagagacaatacctctcctcacctcatacaagatgggaaattttaatctatcccacaggattgtgttggcaccgttaacacgatcaaggtcttacaacttcgttcctcagccgcatgctgctctgtattattctcaaagaactactaagggtggcttcttgatcggggaagctactggtgtatctgatacggcaaaggatgggtaccctaatacacctggcatttggacaagagaacaggtggaagcttggaaaccaattgtgagcactgttcatgagaagngaggtattttcttttgtcaactttggcatgctgggaaagtctccaactatgatgaattccaaccacatggtgaagccccaatatcaagcacaaacaagcagcctcgtaaggaaatccccacgctgtcaatgnattcgtaattgcggccaaaaatgccatggagcgggttttgatggaatagaactacatggagcagatgggtacttgctggat

SEQ ID NO: 209274 - DNA, 563 bp, Glycine max
  unsure (1)..(563): unsure at all n locations
ctcgagccgattcggctcgaggcgctacgtctgtgatcatctcttccaacatctaaaacgatttgcatctgagcagaagtccatgtctatggaggttattcggaaggcataccaagccacagaagaaggttttttgtcagtggttaccaaacagtggcccatgaatccccaaattgctgctgtgggatcttgttgtttggttggtgtgatttgtggtggtatcctctatattgctaaccttggtgattcccgtgctgtgcttggccgggtggtcagagcaactggggaggttttggcgatccagctttcgtcagagcataatgtggccatagaatctgtgagacaagagatgcattctttgcatccggatgactcaaaaattgtggttctaaagcacaatgtatggcgggtgaagggtctgatacagatttctagatccattggcgatgtatacctaaaaaaggctgaatttaacaaggaaccgttgtatgctanagttcgtgtgccggaaggttttaagaggcccattttgagctctgacccatcaatttctgtccatgaac

SEQ ID NO: 209275 - DNA, 556 bp, Glycine max
ctcggggaattccaattccacattttcaagaaataaggaggcaaaaatgttcatatatgaattggaattatttgttttcttattaggcctatcctgaagccaaaggaaatgagatcggaattcctcggggaattccatttcacattttcaagaaataaggaggcaaaaatgttcatatatgaattggaattatttgttttcttattaggcctatcctgaagccaaaggaaatgagatcggaattcctcggggaattccaattccacattttcaagaaataaggaggcaaaaatgttcatatatgaattggaattatttgttttcttattaggcctatcctgaagccaaaggaaatgagatcggaattcctcggggaattccaattccacattttcaagaaataaggaggcaaaaatgttcatatatgaattggaattatttgttttcttattaggcctatcctgaagccaaaggaaatgagatcggaattcctcggggaattccaattccacattttcaagaaataaggagggcaaaatgttcatatatgaattgg

SEQ ID NO: 209276 - DNA, 549 bp, Glycine max
agctaatgccggtgattcacgttgtgtgatatgtaggaagggtcaggcgtatgatttgtctatagatcataaacctgatattgagattgagaaggaaagaatcataaaagctggtgggtttattcatgcccggaagagttaatgggagtttaagccttgcaagagcaataggtgacatggaatttaagcagaataggttcctttctgctgaaaagcaaatggtgacagccaatccagacatcaatactgttgaactttgtgatgaagatgaatttatagtgctggcttgtgatggcatatgggattgcttgtcaagccaacaattggtagattttgtacgtcaacaactgctcttggaaagtaaactttctgcggcttgtgaaagagtactagatcgatgtttggcacctacaataactgttggtgatggatgtgataacatgaccatgattttggtgcagttcaaaaagctggctcaacaagtgcaccagcataagagctattctcttcaaatgaaacagctacatcagaattaagactagagagcag

SEQ ID NO: 209277 - DNA, 383 bp, Glycine max
attaattgcaagaatggcacttcgttgcttggtgatgtccctttctgttctcttcactcttggtcttgcgagagaaagccatgccagagacgaagatttttggcatgctgtttggccaaacactcccattccaagttcattgcgagatcttctaaagcctggccctgcaagtgttgaaatcgatgatcaccctatgcaaattgaagaaacacagtacccgaaaaccttcttctataaagaagaccttcatccaggcaaaacaatgaaagtacaattcagcaagcctccctttcaacaaccatggggtgttggtacatggttaaaggaaattaaagacactactaaagaaggatatagttgtgaagagctatgcatcaagaaag

SEQ ID NO: 209278 - DNA, 351 bp, Glycine max
ctctctcatttttcttatagtcttcaatggttcctactgttattatggggaccccccaggcccctgggaaaaccctagaaacgaacttggttattggccccggaggatcgttcgggggttgcctacgcccacttcagtgttgagatcccagtgattaatgttgccggacccgacaacgtggatggacacaaaatagagatgcccgtgaagaacgaggaggcttgcgataatggggcgttattccaagaagctgatgacggagtggatcaacaactcgtggtctagatgacccgcctggcggagagttctttgctttggcaccgggcgagaagctttcacatgatatgggcg

SEQ ID NO: 209279 - DNA, 537 bp, Glycine max
aaagcatcccccccaagctacaagcacccaaaggggaggaataataataagcctaacttctaaggccaaaaaaaaaaaaaaaatagcaaatatgtcaggaaagatcattatctcggctgtttctctcatcctggtggtgggtgtggcaatcggcgtggtggtcgccgtgaacaagaagggcgaggatcctgcagttgaatcccaccaaaaatacgtaggggtcatatgccaaaacaccgatgagaaaaagctctgccatgacaccctgagctccgtgaagggcatggacagcgctgaccccaaggcctacatcgccaccgctgtgaaagccaccatggacagcgtgaccagggccttcaacatgagcgacaggctcaccacagagtacggtggcagcgataacggaaccaagatggcccttgacgactgcaaggacctcttgcaatcagccatcgagagcctccagctcagcactgacatggttcacaacaacaacgtccaggccgtgcataacccacaggctgatttcaagaactg

SEQ ID NO: 209280 - DNA, 402 bp, Glycine max
aaataaatcatgtaatttttattaaaaatattatccggagacctccaaagataaatgcaaagaataacaaattgtcacacggactatgaccctcaacatgacaaacgctaacactcagttaatagagtgagcattgatggatatacggtttaatttcaagctttcatgaagttaagtgcatgaggaacatggagagccttcaaccagacagttccaccgttggaaccagcctggaggaattgggcaggggtgaactgagcagctatttgctggctaatgagaccggggaaacccttccacttgatccttccgttaacgttggcaccaggtccatcggtggtgaattcagcgtagtacagggtgtcatagaagtgttcaccggcccatgggcaccatccttcc

SEQ ID NO: 209281 - DNA, 585 bp, Glycine max
ctggaatagtaatccaagggggatccattgtgtctgatcctgagttctactctgtgagatttgagaacaaggcttacctagctcgtccatggaagaattactctaggaccatcatcatggacacttacattgatgatttgattaatgttgatgggtatttgccatggcaaggactagagggtccttctggtatgaatacttgcttctatgccgagtaccacgacagtggcccgggttcagacaaatctaaacgtgtgaaatgggctgggatttggaatctcaattcaaaagctgcacgttggttctcagcatctaagttttttcacggaactgactggattgaagttactgggattccttgctttcgtgacattcccgcacaccataggcacaaaaagacaaggcttaattggtaataaaagtgatgagttgtgaaagcaagaaatataaattaattaataaggaatgattgagcttctttattctttaattattttgatttcattaattaattttagagtgagctacatttttgtatctcaaggaattgaaatcaatgtaacgtaattcctctttgatattttt

SEQ ID NO: 209282 - DNA, 449 bp, Glycine max
ggaaggccaaggaagacgcttctttttctaaagcgacaatgacgaaaattattaaagagatgttgcccccggacgtgcgtgtcgccagagatgcacaggatttattgatcgagtgttgtgtcgagtttataaaccttgtctcgtcggagtccaacgaagtctgtaacaaagaagaaagaaggacgattgcaccggagcacgtgctgaaggctttaggggttcttggatttggcgagtacattgaggaagtttatgcagcatatgaacaacacaagttggagacaatgcaagactctttaaaaggtgccaagtggagcaacagagctgagatgactgaggaagaagcattggctgaacagcaaaggatgtttgcagaggcacgtgcaagaatgaatggaggagccattactttcagcagtcagacgctaccaaagtttagagagcttact

SEQ ID NO: 209283 - DNA, 496 bp, Glycine max
caaatatctctccgttaatgctctcaccacaaacttcaatagactagccaaaagctaacaccaactataggccaaatcaccaataaatattatttcccgttcttttggcgtgttggccacccactgaacacatttgcactcacacatagaagcagagagaggccattggttggtttcagagatgggaagcatgcacatagaaaccccagaaacttttgctgatggtagcaaaaacttcgatgatgatggacgagctaaaagaactgggacttggattactgcaagtgctcatatcataacggctgtgattggttctggagtgctatctcttgcatgggcaattgcacagatgggttgggtagctggtcctgcagggctctttgtcttctctttgataacatacttcacctccactcttctcgctgactgttaccgttcacctgaccctgtacatggcaagcgaaactacacatattctgaggtttgtcaaaagcca

SEQ ID NO: 209284 - DNA, 363 bp, Glycine max
gaactgtatttgctccactttatcggttgaagattttgctacaggttcagagtccccacagtattaaatacaatggaacaattcacggtctaaaatatatatggagaactgaaggttttcgtgggctgttcgacgggaatggcactaattgtgctcgaattgttctaaattctgctgtgaagttcttcagctctgatcaggcttacaaaggtatactacatctgtttcagatgcaaactggatacgaggatgctcagttgactcctctttttcgacttggggctggagcatgtgcgggaataatagccatgtctgcgacttatccaatggacatggtttgatgcagaataactgtacagacag

SEQ ID NO: 209285 - DNA, 539 bp, Glycine max
  unsure (1)..(539): unsure at all n locations
acaaaacaaaacagtaagctaagcttcactgccatgcctgcaacgccattctcgtgttcgttcctcactcttcaaccgcgcttcaactcctacgttaaccccatcttccgttcactcaccttccaactctcttcttcgccgctcccattcaatgccaacttctccagcgtcagactccactcttcgctctcgcgagcggcggagaccgattctccgaccggcggaaggtccggcgcgctaactcccggtcccgccgtcgccggtgaagttcaaaagatcgacgtgaatcctcccaaggggacgcgcgacttcccgcccgaggacatgcgcttgcgcaactggctcttcaatcatttcaaagagggttcgcggttgtatggatttgaagagggttgattacccggtgcttgagtcggaggcattgttcactaggaaagcaggagaagaaataanggatcagctttattgggttgaagatcgaggcatcgccgtgttgcattgaggcctgaacttactccttctttggcaaggctggtgat

SEQ ID NO: 209286 - DNA, 471 bp, Glycine max
cggctcgagccagggtgaacccggtgctgtcattcgagggaagaagggtcctggtggtgttactgtgaagaagaccggtgcggccttgatcattggcatttatgatgaaccaatgactccaggtcaatgcaacatggtagttgaaaggcttggtgattatctcattgaacagggtctctaatctttgcttaatgtcttgttatcgtgcatatttcattggcttctgtacaagtttttgcatcgacctggactggaatgctttgattgcagtgtaataatcttgtgagtatgaaaagtcacgggatctgcgtgttgcgaagaaagtgtttgatgcttgagaaatgatgactataatctctatctttgtacttttttagtggggtacctgtatacattacactggttttaaatttttaatgctatggtataatggttggcatatttatcaaaagtttgcagattcttcttgtc

SEQ ID NO: 209287 - DNA, 455 bp, Glycine max
ctcgctccctcgtgcaatttcaaaattacattacactctcttcgacctcgcatcgcaccttcaacttaacctattccacttgtaatcgtaaacgctttgctagaagaagagacaaagtgtgtctgcgtgtgtgagagagagagcaatggctggctcgtgggcacgccgttctctgattgttctagccatcatttccttcggatgtctatttgcgatttccattgctaaggaggaagccaccaagttagggacggtcatcggcattgatcttggaacaacctattcatgtgtcggtgtttacaagaatggccatgttgaaatcatagccaacgaccaaggtgaccgtatcaccccatcgtgggttgctttcaccgacagtgagagactcattggggaggctgccaagaatcaggcagctgtcaacccagaaaggaccatctttgatgtcagagact

SEQ ID NO: 209288 - DNA, 533 bp, Glycine max
gttcttcatcatagtcttaaacattaaaccttagcaaaactcaacaatgctagacatcaaaggctacctcgtactcttcttcctatggttcatatcaaccattctgatacgttccatcttcaagaaaccacagcgtctaagactcccaccgggtcctccaatttcaatacccttgctgggacacgcgccatatctccgttcactgctccaccaagcattgtacaagctatcactgcgctatggacccttgatccacgtcatgatcggttcgaagcacgtggtggtggcgtcgtcggcggagacggccaagcagatcctcaaaacctcggaggaggcattctgcaaccgtcccttaatgatagcgagcgagagcctaacctacggcgcggcggactacttcttcatcccctacggcacatactggcgggttcctgaagaagctctgcatgacggagcttctgagcgggaagaccctggagcatttcgtgagaatccgcgagagcgaggtggaagcgtttctcaagagatgatgg

SEQ ID NO: 209289 - DNA, 411 bp, Glycine max
  unsure (1)..(411): unsure at all n locations
aatagataataaataaaaaaagagaaaagagtaagaaaagaaaatataaaaataataaaaataaatataaaagaatgagaaaaatataaaattatanttaatttaaatgaaaaaaacagggggataggcttgtatgcnagancngaanatngaaattaaaaanaggaagaaaaagaaaaaanaaaaaatngaagaaaaaaaaaaaaaaaaaaaaaaaaatttttttataaaaaagaagatataattaaaaagggggaaaggagaaaaaaaaaatattaaaaaaatatataaaaaatntaataaagaaatttataaaaaaaagagatgaaaaaaaataaaaaaaaaaaagtaggaagaaataatataaaaaaaaaaaaagaaaaaaaagtgaaaaaaatatatagtgggagg

SEQ ID NO: 209290 - DNA, 564 bp, Glycine max
  unsure (1)..(564): unsure at all n locations
gacatgccaaaaggactgggaatttgcagagtgctgtagctcatatcattactgctgttattggttctggtgttctttctcttgcatggagcacttcccaattaggatggattggagggccattttccttgctttgttgtgcaattgtcacctatatttcttcattcctcctgtctgattgctacagaactcctgatcctgtcactgggaaaagaaactactcttacatggatgctgttagagtttatcttggttataaaaggacatgtgtagctggcttccttcaatttttgactttgtatgggactagtattgcttatgtactaaccacagcaaccagtctgagtgcaattctgagatcaaattgctatcacaagaaagggcatgaggctccttgcaaatatgggggcaatctgtatatggcactgtttggacttgctcagattgtaatgtcattcataccggatctccataacatggcatgggtttcagttgttgccgcacttatgtactttacatactcattcattggactangacttggcataagcacagtcataaaaa

SEQ ID NO: 209291 - DNA, 442 bp, Glycine max
  unsure (1)..(442): unsure at all n locations
ggcttcgacccttttaacaaagatgcgtgcgggtcaccgctcgatacacccttcttcgagcctcactcaccagccacagattctctcttctctattcagacaacggatgttgtgtatacgagctggcccggtctcagcctctacatcccaaaacatcacaacaactggttgggctcctgggatggctccttcctcagccgggggaagagctacatgttcaacacaatctgtatcgacaagtgagccagctgggtctgtcgattggctgtatgataacctgcaggagccagatgtcaaggaactagacgcttggtggtacaggccggaggagcagaggtatacactttatgaatatcaggctgatgacattcctggtgcccttctcttntgatgtagatggaagagcagatcgggctacagaattaccacgcatgctgtcatc

SEQ ID NO: 209292 - DNA, 534 bp, Glycine max
gttttgctttgttcaagtagccagccagtcatggtgctcttcaatgtttcacgcgtagagaccactcccttcgatggccagaagcctggaacctctggtctccgcaagaaggtgaaagtgttcgtgcaacctcattacctccataactttgttcagtcaacattcaatgcattaactgtggaaaaagttagaggtgcaacgctagttgtatctggtgatggtcgttatttttcaaaggaagctattcagattataactaaaatgtcagcagcaaatggagtatgacgtgtttggattggtcaaaaaggattgctttcaactcctgcagtatctgctggtatacgtgatagagttggagctgatggatccagagcaacaggtgcatttatactgacagcaagtcacaatcctggtggccctcatgaggattttggaattaaatataatatgagaaacggtggacctgcaccagagggaatcactgacaagatatatgataacacaacagacaattatgagtacttgattgcatca

SEQ ID NO: 209293 - DNA, 494 bp, Glycine max
aaaggaatatggggcgatatattggagtctgcatgggcaaataaatgctcagtaaaattatgatacatgtacattcctcagcacactaaaacagatcagtggccaaaaaagaaaaaaccaaaaaccaatcagaaacagattggagaagataatatacattgataactgtgaatgatgagtggcatacgcaaagtaatcttgcaacatgtatgggactgagaactccctcattgtagtgtaagtcacaaaaaagccgcacaaacagggtggaactagaacgagatctcacaaggtgcatgaaatgttcttcctcgacatattggttccaggttttcaccagcatacgaacagagtggtgacacttcaacacctgttgcatataagggcactgaatgagctaagaagccacctgcagcaactacccaacgagtatggagtcgaagaacaagtagtttcgcactgtctggagtgtcaacattggaaccatttgcatt

SEQ ID NO: 209294 - DNA, 502 bp, Glycine max
aaatcgaaatacaatacgttttttcaaaccggccagccaagaatacatatgaaaaaagaaagatttgttctcttgctcaatatatatgatcagagagtgacactgcggagcacaacagtctcaacggtgagtccagggccgaaaccaaatagcacaccccagtcaagaccttcaccggttgtgccaagtccattttctattgatttcttcctcatttgatccaagatgaatagcacgcatgcacttgacatgttaccatactcgctgagcacatgtctagtagcttccattttttcaggcttcaggcctaacttagcctcaacttggtccaaaattgcgggtccaccagggtgtgcaatccagaagatagaattgtaatcggagattcccaagggttggaaggcttcaaccaaggccttctcaatattcttggagatgagtccaggaacatccttgaggagatggaaagtgagaccaacttcgcgaaggtgtccatcaatag

SEQ ID NO: 209295 - DNA, 487 bp, Glycine max
ttcaattggtgccaggacaagaatgtggtgactgtttttagtgcacccaattactgttaccgatgtgggaacatggctgccatactagaaattggagagaatatggatcagaattttctgcagtttgatccagctccccgacaaattgagcccgacaccacacgaaagacaccagattattttttgtaacttcatataaccctttgtttgtaagctactgctttatgctgttactgtagatgtgtctttaaggagagaagagtttcactgtttaagtgggacggttatcatcaacataattctttcttttggagtttgtctgctgttgctgctgctgccgtcttatttggacaagaaacaaatagaaattgacacaattggtgtttgtatatttttgataggaggaagcggcaataacatgatatatcatgtgctggaattttttcttaaattaaatctcaagttagagagcagatttttgagttct

SEQ ID NO: 209296 - DNA, 414 bp, Glycine max
aataaaaaaaaaggcaacgaaaaaccattcattaaactgattcacataataatcacaataacaatttataaatttccaacccaaattaaaaaaaaggcataaaaatttaaaaattattcattaaaaatcagaaaaagaaaaaggatcacccaaaaattcatctttccggttacaaattccccgggtttccacccacgcgcctagacccgttttgaagaaaagaccccacgcgagtgattaataattaattaatcaatcacctaaccgcgatcgagtggaaacgtcgtccttttgtgttatcccctttttgccccttctttttctaaaattggtctccgatttaggggtgtcaaactttgacaatctttggggcctttaagacggggttctttttcgcgatgggcttttttcccg

SEQ ID NO: 209297 - DNA, 552 bp, Glycine max
ggaagataattataatttatgattcagaaaatagtcaaaaatacagtgaatcatacttatacagatgaaaatacagtttgatatttgcctctcatcaataagcaaccgaatcagataaatagcttgactcaatcaaaagtacttactcctcaaatatatatatgaaaaaaagaactagaataaggcagggataggcacaacacaacacaacacactcttgaagctaactctaacaaacaccattcatcttgtcattgttcttcttcctctccaacacaaacttcttccaaatggcagtgatttccctctgagtctacatagcactcttcttagcaaccactaccttgccattttcttcagcagtgactgtcacactagtgctgcttatgaccctagcaggaagtgaatcaagctcatgcagaaccttctcaacatcggccacgaggcgctctgcgagagtcctcgagaagtccttcctgatgacaacacgaagcactgtgacatgttgagcatctggtggcatggtgtatgctggcactatccacccaaagc

SEQ ID NO: 209298 - DNA, 430 bp, Glycine max
aaagaacgaaaatgatcaaaccaaatccttagcacaaccacattatattacagagagttggcatgcacaattgcaccataagtgcaagaggctgtctaaatgccatacatacagagagaggcaatgtgtccgtgcttgtgcctccccaaagttttaatttattattattattagattgggccagaggatcctcgtgaagtatgtcttagcaggagaatacataagcttaaggtttctcccaatcatgagatatatacattatgatatgatacaagattaagctggaacagcttcctgcactttgccgttgcttgagagtactaagctatcatagtaatcaaccagcacctttcatccaccagggcacataaatccatcaggaggactttctttgttccttgccagtgtgcgcatctttgtgcctgatatg

SEQ ID NO: 209299 - DNA, 498 bp, Glycine max
ataaagtattattgcttgattacttgattgataggacaagtctaaataacaactgtaaaactcatcgtagttcctctgtacatgaaaatagacggatcataacaatcatgcccaaatcactctcaaaattcatccattcaggattacacgagaaggacacaggcttatccatgtcattggatacaaacttagtagccacgaattgtattgatgatggtgttgtgccacgggtcagagaggtgctgcaataggttctcaaatggtcctttgcctgtcacgttgtgttgaactatgaatcccaagaatgccaacatagccaatctcccattggcaagttccttctccttggcctccaaagtaggtgcaaagttcaaggggttaaacacactaccagggtatccacactcatgttggggcaagctgtattgcttgaaaatggggtctaggttgacagagccagggttcttgatgtcctgccatctaccgatctcgacgtag

SEQ ID NO: 209300 - DNA, 516 bp, Glycine max
aaaatgaaataaagctggtcgataagaatcaagttgaagcaccataaaataaatttgggattgctcacaaattagtcgactatgcgttaagtttaaggtttaggattgcccagaaattcatttacatcctttctgttccatacttccaggtggtaatgtcactttcaaacaaaactggacacctataagaccttaaccttcctatgaaccaatgacttaattagatgctcaagcgaagtactcttctgggacataaaattttaaaccaatggcctctgcaaatttaatatcagcgacactgtgatctgattctctcccggctgcatcaccaacaaaaaaggatttatccatatcaatggcaatgccagagttgaagtgttgctccataagatgccacatccctggtttgggtttgcgaaaggatcatcttcctttttggttactttacctgatttactacctaccccacaagctataaaaacctgaactggaaccttcactttcacaataaaatta

SEQ ID NO: 209301 - DNA, 484 bp, Glycine max
ctgcaacttatccacttgatcccccttcgtaagcctcttcacatcttcacttcttcacttcttcttccgcactaatacgaaaccagagggaattcacaaaagaggttaccatgtcggtcgatgagagtgaggagaaggagttggatctcacttctccggaagttgtcaccaagtacaagagcgccgcggagattgtttacagggctttgcagttagttatttcagaatgtcaaccgtaagcaaagattgttgacctttgcgagaaaggggattcgtatattagagagcaaactggcagcatgttcaagaatgtgaagaggaagatcgagagaggtgttgccttccctacacgtgtgtctgtgaacaacactgtctgtcacttctctccgtttgccagtgatgaaacaagtgttggctgatggtgagatagtgataattgacatggcttgccatatagatggactcattagtgctgtggcacaca

SEQ ID NO: 209302 - DNA, 471 bp, Glycine max
agcataaatcttgagagaacatttttttttggttcatcatataaaatatatatgttctgaaagaacattttcaagtacacaaaaaaaagggggaaattcataaaaaaatacagaaaaaaaaaaacagaattgagtaagagggaaggaaacatagagaaaattttagcaatcagataataagaagccagtagtagtgcaaaagtcccttgccaagagtgttggaaccccttttagttaagcaggtacctttttccccttgagtggcttaaccactttccatgtgaagtcagggtcatctctgccaaagtgtccatatgcagcagtctttaagaacctgccattttcaccccttttgagatcaaggttgatggagatcatgccaggcctgaagtcaaaactcttctttacaatgctgaggatttccttgtcagggatctttccagtgccataagggtcaacaaacacagacaa

SEQ ID NO: 209303 - DNA, 440 bp, Glycine max
tttttttttttttttttttttttttttttttttttttttttttttttttttttttgtttttttttttttttttttttaggtattcccaaattcgggccccaaaactgggtatgaaaacccattggaagcccctaatcggggcccaagtcggataaaaactaaatttgccccaaagggtggggcttgggcctccggcttaatcaaaaaaacttctggtttttaaaaagattggtgggctttttggggaacaaaggcactacccttttccgcatgatttactaaaacagggggcccaatatggggtattttagcaaaaccgcccaaaaaagcccttgggaaccaatgggctttaaaaaaaccttttttcaaaatacccttattcacgggtggggcaaaaggcccctgatttgggaaaaccccaaattggccccttttaggag

SEQ ID NO: 209304 - DNA, 509 bp, Glycine max
atccaaaaactagaatgattcgattctcgtttaccacgaacgcactactaactcaacacaataccacgacgctgaatatgtaaaaacaagtataggcatattacaaggcatgcccaaatagctacctatctattttttctttttggtttttctaaaatccaattaacacggttcaaaacaccgaaaactaaaaacataaccttattataatatataagaagcaactaaaacccttaatagtccaaattgaagcgccacagagaaacaaatctgagaattattattcatttcattcagagcgattggcgaacctctcaaccttgtcatcggtcaaattgataccaaccatggcttcacccaatccgcagctaacctccgccaaaatctcagggtcgctgtagtgagtcacggcctgaacaatcgccctggcgcgcttcgcgggatcgccgctcttgaaaacgccggagccgacgaagacgccgtcgcagccgagctgcatcatgagcgcg

SEQ ID NO: 209305 - DNA, 625 bp, Glycine max
ttcattgtgatggatggaaatggcaccctttttgggactttaagtggaaacactcgtgaggtacttcacaaatttactgttgatctaccaaagaagcatggtagaggaggtcaatcagctttgcgttttgctcgtcttaggatggaaaagcggcacaactatgttaggaaaacagcagaatatgctactcagtatttcatcaatactgccaccagtcaacctaatgtttctggacttatacttgctggttctgctgacttcaagactgagctaagtcagtcagatatgtttgaccctcgattgcaagcaaaaatattaaatgtggtagatgtttcttatggtggggaaaatggattcaatcaagctattgagctatctgctgagattttatcaaatgtgaagttcattcaagagaaacgcttgatagggaaatattttgaagagatcagccaggacactgggaaatatgtctttggggttgaagacacttttgaggcactggagatgggtgctgtggaaacactcattgtatgggaaaatttggatattaataggtatgtgctgaaaaatggtactactagtgagaatatcataaaacactttgacaaggaactagatgctgatc

SEQ ID NO: 209306 - DNA, 585 bp, Glycine max
  unsure (1)..(585): unsure at all n locations
gtacgtcacctctcatcaagtggtgttgatgtatatactgctattgctggggctgttggagctctatatggacctcttcatggtggagccaatgaggctgtcctcaaaatgttgagtgaaattggaactgttgagaacattccagcattcattgagggtgttaaagccaggaaacggaagctcagtggttttggacatcgtgtgtacaaaaattatgatccaagagcaaaggtcttgaggaaactgacagaggaagtgttttccattgttggccgggatcctcttatagagattgctgttgccttggagaagattgcactgtctgatgagtatttcatcaagaggaagctatatccaaatgttgacttctactctggactgatttatagggccatggggtttcaacctgagtttttcactgttttatttgccatccctcgaatggccgggtacttggcacattggcgagagtccttggatgatcctgatacaaagattatgagacctcacaggtttatngttgggagtggttgatgcattatgcnaccattaatcaaaggactgcatcaagtaacactgacaaac

SEQ ID NO: 209307 - DNA, 690 bp, Glycine max
  unsure (1)..(690): unsure at all n locations
tgcttagtatcgtacgagtcattacgaccttatttcctttggcttcaggataggcctaataagaaaacaaataattccaattcatatatgaacatttttgcctccttatttcttgaaaatgtggaattggaattcctttcctttggcttcaggataggcctaataagaaaacaaataattccaattcatatatgaacatttttgcctccttatttcttgaaaatgtggaattggaattccccgaggaattccgatctcatttcctttggcttcaggataggcctaataagaaaacaaataattccaattcatatatgaacatttttgcctccttatttcttgaaaatgtggaattggaattccccgaggaattccgatctcatttcctttggcttcaggataggcctaataagaaaacaaataattccaattcatatatgaacatttttgcctccttatttcttgaaaatgtggaattggaattccccgaggaattccgatctcatttcctttggcttcaggataggcctaataagaaaacaaataattccaattcatatatgaacatttttgcctccttatttcttgaaaatgtggaattggaattccccgaggaattccgatctcatttcctttggcttcaggataggcctattaagaaacanataattccattcatatatgaacatt

SEQ ID NO: 209308 - DNA, 491 bp, Glycine max
ccttcaattctcctttattttttatttatccaaaataaaatctccacaacaaacaagcccatgtgaaattgatctcatatgattgtcacattgtttgccatgtggcctacatgcaagcctttacaccaacagcagaaagtagtactagaaagcagtatgaaagcatgaactccattcttaaaacctaaatggcctcatcttgatcaaatttcgaagccatcgagagagtattcaattcaattgcatacgatcccacacaatccaaggtccaagggcaaaagcaaaaccttctcaaacttaattgagtgggtcccattaggcttttaataatagaaacctaccgctatatatcaccataaattattaataacaacaacagggttaaatatgtaaattacaagatctatctaatctagcacttgttgggcgagactcccaccaaagagtttgctagatcgaagctgacacgtgtcccctgctgctgcacgttc

SEQ ID NO: 209309 - DNA, 405 bp, Glycine max
gcgaacttgtatgttttatataaaaattctcgatacatgtagctattgacattcacattaatgttccaaaggccaaaaaagtgttaactctgcaaaagggttctaaatgaataataacgcgaacccactcctttgctacatacaaacctacttactaagacagaagaatcccaagatgaaaaatgcttctcaacaattttgtgcccaccacattcatagggatggcacacaatatatgactcatcaagctttgcgtatataccctccaatcctataccacctcttatccatgacaacatagtttgtacgacatgacgcagacaccaaaaaagccatggcaaaaacataactcaccattaaagcatttattttggacttagaagcacttcctgtggacaatggatg

SEQ ID NO: 209310 - DNA, 593 bp, Glycine max
gctccgaatccccaacttcatcgctgtcaacgtccgtcaccgtctccgtaacttccctaatcctattcctttccttctctccgtttccgtcgctgcatctctccctccgttacggaaccgaagcccgtcacagatggcggctcgcgaatcgatgatggcggattacgcgaaatcggggaagtcgtcgtgcagggcgtgttcccaaaagatcgaagcgaaggcattgaggctggcttcggtctccaaaggaaatggtccgtacgacatcgtcaagtggcaccacctccgttgcttccctctttcctctcactctcactcctctcctgagagcatcagaggcttttcctccttgaagagtagtgaccaggaagctctgaagaagttatttgctgaaaataacaagtctgaagagaaggttaatgaagcagatggaagatgtacgaaatgagctgcaagagactggagagcgtggttcaaagagattaaggagtagtgaccaggaagctttgagaagtattttgctggaaatacaagtctgaagaagagttgtgccacctgatgtaaagctgggtgaacattaaatttaggttctg

SEQ ID NO: 209311 - DNA, 502 bp, Glycine max
attcgaaacgtttattaaaagcaaatttaatataaggtctgaattcagaactcgacaaagccagcacatgacacatggcacgtttccaaattatttacacgcgtgcatgcatctaatctgcatgatgcatgtatgcacattaacacaacaacactagaggcaaaatataatcactaatagtatgaaatatatcatatgattagtgactttcaatctataaaaatatgatcacagatcatgatatcaactccaagaaaggcctttcttctctccacaagattaacttagaaataaaaatcaacaaatcgattttaatatttagtatacctgaatcgcctagtatacccaaaatctggtcacctcttcaatgtaaaaatattggtatcccattttataacatagtatggttcagtgcttataacaagccagcttccaagagatttctccgactgaaagtctcatcaacaagcttgaaagtcttcttcacaaccttctgatcaag

SEQ ID NO: 209312 - DNA, 597 bp, Glycine max
ggaatagtctgtttccaaacagcataggatagcaatgacattcttaactcatgggcagcaaacttggagaaattacttgatcttgtggagaaaagttgtcatcagatacacaaggaaaccatggtccacaaagctgctttgaaggtttaagaaggttcgaatcagcagttactgtcacaggggcatctcaatgatgtgattttgtactgaagttgccttttcaggaaaatgttcttttgaactgtcaccgactgagttggtgaggaatttcgttaaacgattatgcctttttcacttttatattctgtcactcatgctttcagggtagagctggatatatgcatcatagtactgaaagtagcattgttgtatactaccggtacataccttaccactgacttatgacaggatcgtaaaagatcttgattgaagcagtggctggaaattgagtgtttgctcatttatattcttttgcctggttgatttttttcccctcttgtacctcttctttcttctctatattacattttcttgtgaaatttggacgtttcgtgctatattccctgatgacaagcaaaacacctatttatttgagtg

SEQ ID NO: 209313 - DNA, 607 bp, Glycine max
  unsure (1)..(607): unsure at all n locations
gactctctctgactcactcctaagaaagaacatacaaacaccgtctttctcttttctcgcgtgtcgtacggatcgtgcaattttcgtgaacgcgatcggcgaatgaaaatgaaaaagaaacgaaaggaaagtgaggccagtggatggtcgtcgaacttgccggagatttcgaagtcgcatcactcgctggagcggcgttcgcggctgaacaagcggtgcagggaagatcgcggcgtggcgacggtgccgccttcacgcggcgcgtcgttactcttgacgccgtcgcggggcttgaagcggaagatagggtgcatcgacaaggccacgcagatgggaaggagcatgaggatcgaggacgattacgtgaccgggggcagcgcgatcgggcaggggaagttcgggtcggtgacggtgtgccgcgcacgtgcgaacggcgcggagcacgcgtgcaagacgctgaggaaggtggaggagacggtgcacagggaggtggagataatgcagcacgtgtcggggcaccctgtggtggtgacgctggaggctgtgtatgaggatgatgagcgttggcaccttgtgatggagtngtgttcttggaggaaggtggttg

SEQ ID NO: 209314 - DNA, 511 bp, Glycine max
ataataaatttagggacatattacactttatttcaaatataaatggctgcaatgataagcatatgaagctcattaaagttatgtgaaatttctcttacatgcccttttcaagggaatgggcggatctgtgaaagccccagaagagattaaatcaaagacaaccttgctagctgcttcagtgtagtgggttccatcccataccactctaacagatggtctttcgcatgaacccacaacaatatttgtgccattgacctgtatggttcctccacattcaacactctggctgaagttgtacgtccctacatagccacaacaagcaacatgcgggagttcaaagccatatttctttgggtttttgaatagcaagtacttagcagagtagatatctacatatgtaattgcagccaaaggaagctccgtacgaagttgaactaaagcttccttcacattgtggttaaaagactgagccacctcattatatgcctttgcgcaatcatagctatcccct

SEQ ID NO: 209315 - DNA, 427 bp, Glycine max
atgaggagggagatatgaccatggctgtttaatgattaatgcctgaatacattgtggacgaaggggcgaggattgcagccaaagtgtccgcggttctagcttcggggaactctgataggttccggctaacaggaagaccctacacagtaagagacgtggtgtctctccgaggcaacctcagacaaacctatgccttgaacgagatggctaacaagctgtggtgcgttctgaagaaccaccaagcctgcggcacagcctcaaggactttcggtgctcttgatcctgcccaggtcactcgaatgggcaagcacttggacacaatgtatgccttagggcggcagagctcaggcactcacaccacgagcaacgagccgggccctgatggtgaggaatacccttatgatactgtccaagacaaggttgatca

SEQ ID NO: 209316 - DNA, 508 bp, Glycine max
ggatgataccatgatcccaattgaatgttttgaggaaccatgggttatctttcgagggaaagatgggaagcctggatgtgtgcagaacacctgtgctcattgagcctgccctctgcaccttggttcagtaaatgagggtcgtatccaatgtccctaccatggctgggaatatactactgatggaaaatgtgagaaaatgccatctactcgacagctaaatgtgaaaataaagtcagttccatgctttgaaaaggagggaatgatctggatttggcctggcaatgaccccccagcagccacacttccatctatactacctccttctggatttgaaatccatgctgagattgtgatggaacttccaattgaacacggtttacttttggacaatcttttggatcttgcacatgccccttttactcacacctcaacatttgctataggatggagtgttcccagcttggtgatatttttgacacctgcatctggcctgcaggatactgggatc

SEQ ID NO: 209317 - DNA, 504 bp, Glycine max
gatatcaaacagtagtaacattaatgggacaatagagttcaacacaaaccaaacttattttcaaaggtcattacagacccattacacatcacatttcttcttaaaatgtttgggaaaatccaacatcgaacatcacacagaaatcagctccagcttaaaaccccccacgaagacgcaacaccaagtgcagagttgactccttctggatgttgtagtcagcgagggtccttccatcctctagctgtttgccagcaaaaataagcctctgctggtccggtgggattccttccttgtcctggatcttcgccttcacattgtcaatggtgtcggagctctccacctcgagggtaatagtcttacccgtaagggtcttgacgaagatctgcataccaccacgaagacgcaacaccaagtggagagttgactccttctggatgttgtagtcagcaagggtacgtccgtcctcgagctgcttgccggcgaagaacaacctttgctggtctg

SEQ ID NO: 209318 - DNA, 451 bp, Glycine max
aatgaagaatatatagaagacccatttattatccactaaacaaaaagttatcaagagaggaattgtgttacattgatttcaattccttgagataaaaaaatgtagctaactctaaagttaagtcatgaaatagaaatacttaaagactaaagaagcacaatcattactttttaattaatttatattgcttgctttcgcaactcattacttttattgccaattaagtattgtctttttgtgcctatggtgtttcggcacgccaggaaagtaaggaattccagtaacctcaatccaatcagttccatgaaaaaacttagatggtgagaaccaacgtgctgcttttgaattgaggttccaaatcccagcccatttcacacgcttggatttgtctgaaccagggccaatgttgcggtactcggcataaaagcacgtatccataccagaaggaccc

SEQ ID NO: 209319 - DNA, 507 bp, Glycine max
  unsure (1)..(507): unsure at all n locations
ggaaggggggctattgggttttttttactgngccgggagaagaaatttgggagtattgatgctatgaaaaagctgaagaaatctgaaatgcttaggagaggccaggtggaacatgttagagctgagaggaatttgctggtcgaagttgccagtcattgcattgtgaaactttactactcatttcaggatgctgagtacttgaatttaattatggagtatctgcctgggggtgacgttatgactctgctgatgagggaagacaccttaagtgaaaaaggtggtaaatccacatacggccaaaggtgttctggccctagaatctattcacaaactcaattacattctcagagataataaacctgataaccctcttttggataaaaatggtcacatgaagctctctgattttggtctctgtaagcctctggattgtattgcctcgcctacactgcatgaaaatcagaccatagatgatgaaactttggctagacccaatggatgttgatg

SEQ ID NO: 209320 - DNA, 332 bp, Glycine max
gaatgaaatgaggatggttttttcatataaaaagcacacaacacttgcaagtgggatacttctacgtcttaaatggataaatacattcgtggtttcaaaaagtaaccagagctacaattataacagcttatttacaacacgcttaacaaatttacaaagaaaatcctccagaaagcgtaattagactgcttcggcaaagccaacttggagatttccatagtcaaagacggtgtgatatgccctcatgaaaacatcgccaagaatccacaatggaccctttggaggaggaacatcaaaagcaataaacccactaaggcagacttctgtaatgc

SEQ ID NO: 209321 - DNA, 539 bp, Glycine max
gatgttaccccttcgacaataataaaaacgcaagtgatacactgttcactttctcacaatcatttcatcaaacactacttatctttaagccacacactacagttatggaacatcaacagtattatcatcatatcatcattttcatcaattctgaatctagcttccacacaaagtcattactgctgggcgcactgtaccctctgtgcaccaccaggcatgtcatcatcctcatcatatgcctcctgagcttgttgctgcttcctcctagtctcctcctccatgttgacatcatggagtgtagtttcctcacattcatccagctccatgtctgtcaattgtgaagaaggctttggtggcagaacagcctccaaggccttaacttgatcacggtctatagactctggaaactccacagtgaagtgaatgtaaagtttccccttcatgaatggcctctgatacatgggcattccctcatcatttatagcccttgatgaatcaagctttacaacttccccgggattgatgtaataagaagctga

SEQ ID NO: 209322 - DNA, 455 bp, Glycine max
cctcggggaattccaattccacattttcaagttataaggaggcaaaaatgttcatatatgaattggaattatttgttttcttattaagcctatcctgaagccaaaggaaatgagatcggaattcctcggggaattccaattccacattttctagaaattaggaggcaaaaatgttcatatatgaattggaattatttgttttcttattaggcctatcctgaagccataggaaatgagatcggtattcctcggggaattccaattccacattttcaagaaataaagaggcaaaaatgttcatatatgaattggaattatttgttttcttattaggcctatcctgaagccaaaggaaatgagatcggtattcctcggggaattccaattccacattttcaagatataaggaggcaaaaatgttcatatatgaattggaattatttgtcttcttatta

SEQ ID NO: 209323 - DNA, 507 bp, Glycine max
attcaaaaacaagaatgattcgattctcgtttaccacgaacgcactactaactcaacacaataccacgacgctgaatatgtaaaaacaagtataggcatattacaaggcatgcccaaatagctacctatctattttttctttttggtttttctaaaatccaattaacacggttcaaaacaccgaaaactaaaaacataaccttattataatatataagaagcaactaaaacccttaatagtccaaattgaagcgccacagagaaacaaatctgagaattattattcatttcattcagagcgattggcgaacctctcaaccttgtcatcggtcaaattgataccaaccatggcttcacccaatccgcagctaacctccgccaaaatctcagggtcgctgtagtgagtcacggcctgaacaatcgccctggcgcgcttcgcgggatcgccgctcttgaaaacgccggagccgacgaagacgccgtcgcagccgagctgcatcatgagcg

SEQ ID NO: 209324 - DNA, 580 bp, Glycine max
ttttctttcttttttttgataaagttatctgatcaaattccactcaagtgcccatagcaaaggctgcaaacaaccaacactagtgttcggccatccgtaagaaactgaacaaagaagaaatgactgggagaaacttcaggatctaaccaccttccacctgtctgtgttcatgtaatgactgtcggagcggatcgaccagtgaattcttccatcttcgaaagtttcaatgcaacttccacaagaggagcatgggcttcatttgaaagtctcccaatctttgatggatccttctgatattgctcaatgtatagccgaattggtgcaccttctgatccagctccagataggcggaaaatcaatcgcgatccatcctcaaacaaatatccgattccctgatgtgatgagatggaaccattcacaggatcattgtactcaaatgcatcaccgcgaacaacattcgaaacatctgaccttatccccttaataatgtgattgacttctgcaagtgatgactgcagcttgaccaaatgtgccatcagttcctttggtgcaactgcatacacattttcatagtcatatc

SEQ ID NO: 209325 - DNA, 462 bp, Glycine max
aattcaaattttcattcaatcgtcaatctcaaaatttgaaagaaagcgttattttggtaaaacctgaaaacagtgcataggagaaaaaaaaacaaaaaatcccaaagaaaatcaagaggcattccctcctaaattgatagcaagcaaatccaacggaaaattgaaacattagaggaagaaaacgaaatcatgctagcatttttgtcaaaagattctatgcgcctttgatcagtttcagtgcatcctcctctttgggaagggcgggaattgctcccttttgggtagttgtaattgctccacatgcatttgcatacttgagtacttctcttaaccttggttcatcttcaagaatggactgatcatcgacaatcttggacaatagagcaccaacaaaggaatcaccggcaccagttgtatcaactgtattaacatgaaaagcatctactgatcctttgaaattct

SEQ ID NO: 209326 - DNA, 431 bp, Glycine max
caagacaagcacaacaagcattctgaaattctcttatttgttagtatcaggactagtaacaattaaccttgaaaataaagcttcatctagttttatcttccataggtagaaaagtgatcaagagaatacacaagtcaccaggtgggaatgtaccatcatcaccaacaccaaggaaaaaacattcattcttcttccagaatgccaatcccctctgagaggcacatgttccttcaaacaggaaatggatctggtgattctggacttgtgctttcaactgatgctaagcctagattaaaatggacaccagatcttcatgccaggtttatagaagcagtcaaccagttaggggggagctgacaaggcaactccaaaaacagtaatgaaactcatgggatattcagggcttaccttatatcatctaaagagccatc

SEQ ID NO: 209327 - DNA, 521 bp, Glycine max
gcacaattctggtaaaattccagatcaataaggattgcggcgaagccgcaaagatacaacattcattagggaaaacaggagtggggaaaaataaggggggaggggttgaggaagaatcaattgctcacagagcatgctaagacacctaaatattccacacacagttattgaaacaacccaatatagagaaaatttttctttggtgtattataatataaagcagaaccaaatgacttggaagattctactttcttataccattcacttggcaagttcgttgcggatgagttttgctgcggcaaccatgtttgtgagggctggcttcacctcagtgtacttacgggtcttgagcccacagtcagggttcacccacaagatgttcttctcgagcactgccagcatcttgttgattctgtcagcaatttcttcagttggtggtattcttggggagtggatgtcatagacaccagggccaattccagcaccatactttacaccttcgcggaagactgacagaagct

SEQ ID NO: 209328 - DNA, 360 bp, Glycine max
tttctagcgatttaccatattttgactttttatgccacagcactggaggagaattggggaaaaccccttggctatctgaatgcggatggacagaatcttttggtatatgggaaacaacaaggcaatgtctttatgggggagaagactacatttggctatgaaggggatcccatgaagctgcttttttacaaatatgccagccctcatcatggattagcagcatattattcccttgttgagaaaatcttcaaagctgatgctgggcttcattttcccacacatgggtgccttgaattcatgcccggaaaacaggtggcgatgatagatgacagcaaccctccctgtctgattgggaataag

SEQ ID NO: 209329 - DNA, 553 bp, Glycine max
cttccacttgcacatatatttgatattgtcattgaggagacattcatatggcatggtgcttcaataggtttctggcgtggggatgtcaaattgttaattgaagatgttggcgaactaaaaccaactattttctgtgctgttccccgtgtgcttgatagagtgtactcaggtttgacgcacaagatttcttctgggggcttcttgaagaagacattattcaactttgcttattcatataagcttaataacatgaagaaagggcttagacatggagaagcatctccacttcttgataaaattgtgtttgacaaggtaaagcaaggtttagggggtagagtacgtcttattttgtctggagcagcacctttatctgcacatgtggaaggttacttacgggtggtgacttgtgctcatgtcctacagggatatggtctgactgaaacctgtgcgggaacctttgtctcattaccaaatgaaatagaaatgctttgaacagtgggcccttctgtacaaaatgtggatgtttgcttgaatctgttcctgaaatgggata

SEQ ID NO: 209330 - DNA, 423 bp, Glycine max
gaaaccatggccttattgattccatgattttatttatctatttgatatcataattttatacataaacaaacaaacttattttatgtaccaaaaaaaaaattatgttttttctctggagtgcggaccttattgagcacttggcagactcactagataagccccagatccagcaagacgcctatttgaggcgtctgatacaacccatttacccagtttgtcagggttacttgacgcagacctttgaataaatggtgcataatggctaaaccactccccaacataaacctgttgaggtctcataatctttgtatcaggaacattcaaggactctcgccaatgtgccaagcacccggccattcaagggatggcaaatacaacagcgaaaaacccacgttgaaaccccatggccctataaatgagccc

SEQ ID NO: 209331 - DNA, 365 bp, Glycine max
tggttgttagtagctgatgtacgtcgggaaatcggtccggattggtgcccgggtcgactagcttactggtcggtggacgtcctttttgggtggtcaatatttttaattttacacagacgtatcattaatgggataatagagtacatcacaaaccttacatattttaaacggtgatttcaaacctattacacatcacattttttactaaaatgtaagtgataatccaacattgaacattacaccttaataatatcctgcttaaaacatcctaagacgacgcaccacctattgcagagttaactacttctgcatagagtagtcatgaaggggtctttgattcttgagcagtttgccaccaaaaataa

SEQ ID NO: 209332 - DNA, 525 bp, Glycine max
attaaaataccaaatcatgattatgcattctcacatgggccgccagcaccattcacaagtttcaacaaaaaaacatataattataataaatgaatggaggggcacggaaaggatgaatcaagccaagtctgcgtgtttttccttttctacccctaagcgaacaccataatacccgacgtaccactgcacgaactttctgagaccagcggcgagatccgtggtgggcttgtaccccaagtccctccacgccaagctcacgttagcatgcgtgaacggaacgtcgccgtttcgaggcattttgatcacgtgcttcttcgcctttaccccgagcaacgtcttcaacacggaaacaagtttacccaccggcaccggcgatgtgttaccgagattgtaaactctcagctgcgcggggccgcgctttttccctacgacgccgtcggtgctcttctccgccgtgtcgagggcaccgaggcagcccttgacgacgtcgtcgatgtaagtgaagtcacgcgcgacttctctctc

SEQ ID NO: 209333 - DNA, 465 bp, Glycine max
tcggttgagaatgcttaccctgtagttagagcgagatacaaatgggatgctgcagtgccatccttacccacatgagtatgtagacacatccaagccatgtgcacattctgcatttttcatgggcttgcaaaggaaaaagggagtaagaggtcaagaggggcagcaatttgatatacgtggaacagttgatgaattcagacaagaaataaatatgtacatgtactggaagccagggatggatatttttgtttctcatgttcgtcgaaagcaactccctgcatttgtttttcctgatggttacaaacgcactcgaatgccaaggcatataagccatcaagctgaaataaccaagtgatgatgccacaaactgctactctgggcctggattgtctgaaagatgcatcaagaggaaaaaattactctgaaatggtggataagaagccagacaaaccaaataagccggca

SEQ ID NO: 209334 - DNA, 496 bp, Glycine max
actaactgcgtgcgaaggattttactttgaacaattcaaaccaaactctaacgcgaaacctaaaatatggactgagggttataccggatggtttgttgcatttggcgatgctgtgccttacagaccagatgataatcctgaattagctgtggcacgcttttaccagcgaggtggaactctacaaaattactatatgtaccatggagggactaattttggccgggcttctgggggaccttttgttgctagtagttatgattatgatgcaccaattgatgaggatggatttattaaacagcctaagtggggccaccttaaagacgtgcataaggccatataactttgcgaagaatcactgatagctactgactccaacaattacatctcttggaccaaatatagaggctgcagtttacaagacaggagctgcctgagctgccttccttgatcacattggcacatctgatgcaacaaggacccttaatggaaaatcata

SEQ ID NO: 209335 - DNA, 405 bp, Glycine max
gcaccaaaaacatcgcatatcattatcaaatgtttgaacatgaacacgaacactatacactaacataaaaatctagcctacaaaactgtaacaagacgatggcttgattctagctgttaagataaacaatgtatcaagcgcgatcagaatttcaccggattaaaaaaaaagttgctcagatgacacggtcagatttccccattggactcttaagataaaagctcctgacattgttgccagttctttttcaacgaagagacgaggggattaacactcagttgaacattttggaagatttgcttttcctccatactaacattcgagacagctattgtcatgcagagcaccttcttaagttgaaatttaatcatggccgtggactgggtcacctttgactcaagagtt

SEQ ID NO: 209336 - DNA, 526 bp, Glycine max
gtagtaatgtgacaaatatttgaattctggtatgcttatctgaggaaaacaaaatgacagtaactataagaggacttgcagtgatttgaaacacaatattatataaaattaatcgcgtttgattggagtagcttgaactcgaagaggctgaaccttctttaatgatatcgcatattgctcctccatgttcatgtgttctggaattaacccatcagctagcttccattcaaagttgtgtacaagggatgctactattaaatgcattgtcctgtgagctaatggcaatcctgggcatatccttttaccagcttcaaagggtatgagcttaaaatcgtgacctttaaaatcaatctcacatttcaaaaatctttcgggcataaaaattgttggattctcccaaatggttggatctcgatccatgggccacacattgaccaagatttgtgcatttttaggcacattgaagccagatatgtttaccatttcatcacacttatggagtactaaaagtggacctggtggatgc

SEQ ID NO: 209337 - DNA, 304 bp, Glycine max
atcacaaatttattcagtttccgcttatagataaagttgctgctcttgctataaatggagcggcagaaataacaactggacatgttcctttaaatgcactgcaagctattgagggttaaccttatcatggatacactcaggtgcgcttgctctggctgctgaaccacctacacaacgactgatgcgcagattacgcttactggcctagagaacctatgataacgcacattatgtggagaaactagatcatacctgctgtctatgagaaagcaattctactcgctcttaacttatgacgtgaaag

SEQ ID NO: 209338 - DNA, 470 bp, Glycine max
agttaagcaaaaattactcatgctctcgtagaggtatttccagatcatgacagagacaacgcaatccggaagcaagacttaatagaagtactactaagtaaaaaataaaataaaagcccttcatagttaacatatcctttaactttgtgttttcttgaatctaaagcacaataaaaacattaaacacccatagtggatactcaaaagtatagtgaactctttactttgccaatgatccaagctcatggctcgaagttctcatgttcatcttcaaactcctgctggttctggttcccgttgtagttgccacctctgttgttgtaccagttgttagtgttcacttcccttgatgagtcaccatagtttgttggattgtacttctcggcggcaacgtcatgaaagtattttccacccttcaaaaaccttgtgtcactcattccttgcctctcaccattgtacccgttaacggc

SEQ ID NO: 209339 - DNA, 429 bp, Glycine max
aaaactccaacaattttattaatgaaaatactttacaatttcagcacatatacactgccatgaatataattttgcacgctataattatctttcgccacaaacaatggagtagtgctcaacaaagcacaaaccaacaattataacagttttagttgcattaatttacacaagaaagtaaattaacgtaataggcaacacatgtgtgtcacgttcatgaggatcattttataatgatatgcaacattgaattaaatattctcatgcaatggagcattctggaggaaggccttgagggaaacgtttgatatcagtgcaataattgtaaatcatgtaatttttttgcacccaacggatctttgcctgccccgtggcgtccagtgattggccagtggaggaagaagtttgggaattgaagtttctgtatgaggc

SEQ ID NO: 209340 - DNA, 584 bp, Glycine max
cacaaccactcttaatttctctcttccttgctcatttacacacctctccaacctttcactttcagctttatttgaatccctctctctcctttccaaatggccagcgttgaggttgcacatcaaacaccaacaacagttccagaaaatgaaacaaccgaggtaatcaagacccaggaaacaaccccggaaccagtaccagccactgaggctcctgcaacagaacaagcagcagctgaggttcctgctcaagaagaacaacaagcaactgaggttcctgccccagaatcaaccaccgaagcaccaaaggaagaaaccaccgaagcaccaacaacagaaacagtagaaacaacaactacagaagaagccaagccagaggagcctaaagaagttgcagttgagaccgaggaggtggtgacaaaggagacagaggaagagaagccagcagcagaagagaaatcagaggagaaaactgaagaagtgaaagaagaagcagaagagcctaaagaaactactgaaacagaaacagaatcagcaccagcagcaaccacagaggaagagaacaaaccagctgagacagtggaagc

SEQ ID NO: 209341 - DNA, 588 bp, Glycine max
tgttcaggagtggaatccaaccactgacaaatatatagctgtcaaatatgatgtttcaacagtattggaagcaaaggctcttctgaaagaagccctccaagcagaagttggattgccagtcgacagaaatattcctctcattggtttcattggtaggcttgaagagcaaaaaggttctgatattcttgcagaagccattccccaatttatcaagcagaatgttcagttggtagccctaggaacaggaaaaaaacaaatggaaaagcagcttgaggaacttgaaatatcataccctgataaggccagaggagtggcaaaattcaatgttcccctagcccacatgataatagctggagctgattttatattggttcctagcagatttgagccttgtggtctcattcagttacaagctatgcgctatggatctgtaccaattgttgcctcaacaggtggattagttgacactgtcaaagaaggcttcactggatttcagatgggtgccttcaatgttgaatgtgatgctgtggatccggctgatgtggatgctatatcaaagactgtcaaaagggcccttgcagtctatgg

SEQ ID NO: 209342 - DNA, 580 bp, Glycine max
agcaataaatttcatttcatttcatcagaataatgggtacattacaaagctttcttatatcacaaccaatatacgcgcactaaaatacaaagaaagagggccacaagaggtttattttaactcaaacaacctatgccccgtctgattcaaacacaggcttcgtccaacgtacgagctcggacccatggaataattcgttatatgcacaatgtgtacataacacaacaaaaacaaattaacagtgtaagaaacaaaataacaaacatgtactacgtattagtgaggcatgcatgaatgttgtgaaccactgaaaatttaattaaattaaatgccagcaaggcactctggtggggtcactgggaaccttgacttatccttacaatagtcatagataacatggttcagacgaacccacctgtaccttcttgcttcaatggagttaagggcttggtatgctgccccttccaccagttacttgggttggaggcacagtttgcaggtcctggcactgcacatccttcaatgttgaagtccttgtagtaagcgtagaatggtgctttgctccatctatttctccaat

SEQ ID NO: 209343 - DNA, 514 bp, Glycine max
tttcgagcgaacaatttatttccggtatggaatatgccgccaacaactttgccagaggccacttcaccgttggcaaagagatcgtatatctgtgcttggatcgcgtccgaaagctcgcaaacaactgcactggtccttcagggctttcctcgtcttcaacgctgtcggcggtggcaccggttccggtctcggatctctcttgtcagagcgcctctccgtcgattacggcaaaaagtgcaaatgagggttcaccatttacccttcccctcaggtttcaaccgcgggcgtggagccctacaacagcgtcctctccacccactcccttctggaacacaccgacgcggctgttctctaggacaacgaagccatctacgacatctgtaggagatctctcgacatcgagaggcccacctacaccaacctcaacaggctcatttcccagatcatttcgtcgctcaccacttccttgaggtttgatggcgctatcaatgtggatatcactgagtttcagacc

SEQ ID NO: 209344 - DNA, 321 bp, Glycine max
gctcgagctagttcctaatgcttactttttatttttcagcaaagacagaaaattggcgccatttccttgccaatctgaatgcaaatggagagaaacttttggtatgtgggaaacactaccgtacagtcttcattgcgtgtttatgccggacattagactccgaagcgcggaccaatgttgcatgttttttttcaaatctggcgcacttcgacatggatttggagtgtacccgtgctgtgcggaaaagatttgtattgctgatgctgaacttcgttacgggacacatggtgcgtttgattttactcctggaaaacagggggg

SEQ ID NO: 209345 - DNA, 405 bp, Glycine max
tttcgagctccggtttgttcagtcttttttggttttttgttacgcgcacacatgtatagctccgtgccgggaaagacaaccatcccacgactagctggtgatagggaagaccactgatatcatggggccaacaatggtggcagaagctcgaactagtgagtctcagagccaccggcccacggggacatgcctgagtgacacctgctgtggctctgattgccgaaccgaacctcttactggacgacactggggtggcttacgaagaagatgcttctgctctcaaacattgataaattgtacaaaagtgaataaccggtgctttgattcaagaggaaagaatctatgcatctgtctacacagggaagccaataaccgctttgtgtgtggcactaatggctacccatt

SEQ ID NO: 209346 - DNA, 516 bp, Glycine max
  unsure (1)..(516): unsure at all n locations
agtgtcggtttattgcagcggaatcatcacatgtaatctcgcaacccacaaccacaaacaatcccattcctccttttttttttgtatccataaccgacaacataaattggaaaagcaaaagcaatctagagtttttcttttaataaagctgtagtaacatatagatatatatgctcctctcactattcttctccagtaatgtatttcactacaccggtaaaaaaaagaatactaatactgtaataatcctgaaccctaacagaaacgtgcgtagtcacgagtgttattacccattggaggaatctcgaaatgccagagccttccaacacctttgaccaagtgcttcctacacagaaactccttcgcgtaaaccttctccaccttccgatccacatcgtgcaagaacacgtgcgtcacaccggatcccttcctgtccctagccatcaccgtcgncgagaatattgccgtcatgcgccccggcgccttcgaaagtaccccttcggcgcgtcgatcatg

SEQ ID NO: 209347 - DNA, 565 bp, Glycine max
aactaattctttctactgaaatgattataattaatgaataaatcaatgaaccataggatacaaaatacgtgtaagatgattagtggtaacttacatataaccttaacatttaaaattgctcaaacctcagaatcaacagttacaactcaaaaacatagatgacttactcacagcacactggctggtgttctttctgtaatttctcccaaaggcatagcaccatcctcggactttgataatgggcaattacataatttgattcacatccagcgttgtaaaacctctcatcattttcataatgtacttctttaccatcattcttgaactgttcaatccatatgcccatggcaacatcttctaatttaaagagcttgagttttctttcttggtgggcatggacaataaattttgctatgtctcgtgagataacatagccaggaccatgtgcccatggtgggtatgtatcatggggccattcctcctcactgatgtaccacttgctgccttcgtccctctgaggagatgatttagaagatatgagaccgtacaagaggcctttcgatgg

SEQ ID NO: 209348 - DNA, 434 bp, Glycine max
gtgaagcagcagagggaggatcggcattaaaaatgcagatcttcgtgaaaaccctaacggggaagaccataaccctcgaggtcgaaagcagcgacaccattgacaatgtgaaggctaagattcaagacaaggaaggcatccctccggatcagcagcgtttgattttcgccggaaagcaacttgaagatggaaggaccttggccgattacaacatccagaaggaatcaacccttcaccttgtcctcaggcttggtgggggcatcatagagccttccctcatggctttggctcgcaaatacaaccaggacaagatgatttgccgcaaatgctatggctcgtctgcaccctagggctgtgaactgccgtaagaagaagtgcggtcatagtaaccagttgaggcctaagaagaagatcaagtaaactctgggtgggat

SEQ ID NO: 209349 - DNA, 532 bp, Glycine max
  unsure (1)..(532): unsure at all n locations
aactcaaatgtaaacaagcattgtaattccacttatagaacgtagatttgaccaaaaataatccgaatctcagataattcacccattaccaatttttccagcaaagaatcccagcatcaactctcacccacgacgatttttccaggtacaattcaaattgttatacaaaacgtagagaccagacaaaatcaacaaaaattaagcagagcctgtgttctctggtttgtcagtctccattggttcagcagatgctggtggtggggctggattagcattgtcccctgccttttcattagtactggcattaggattctcctcaggtggttgttgatgctgctgctgtggctgctcaccaccctgaggaggtggggttgctggtgcttctggtgtagctggcttgggtggtggtggctttggtttcatcataattggcttacagaacctgtcaacagcttcagctttctttcttatgtcagctgacaaaagtaccggngtgacatatttcggaagagagtcctgttgctgctttttc

SEQ ID NO: 209350 - DNA, 493 bp, Glycine max
aacacaatgcatttgtattatagaaaacacagtatggtacaaagtcactaaaacaaatgattaaccgaccatgctggcaatcatacccatatatttttcaaaagtgcctaactaatgtctatctcaattcaacatgagttcattccccacattaggccgaaggcaaacacaaacttcatgctcttctgctcctggaagaagttttggcaccattatctcaagcacagatcctggcccatcgtagtacgcttctatattggcatcttcaggaattcgagttgaaagtgggatttcacgaacaaactcaccaggagggcagtgctctgacgatggctctgaaagcttgaatgtcctatcgtttcttttaataaatggcttgcaagatatgctcacacaagaaacctttatgataccatgagtaacaatgttcctccatgaaactttcacactaggaagaaccacgaatggcagactgataatgatcaagaaacct

SEQ ID NO: 209351 - DNA, 440 bp, Glycine max
gcaatcagaatcaacaaagagccgagtccatcagcaagtatataataatccaaaaactccatcccctacacagaagagacaacaaaaaaaagcttaatgctcctaacagggtaacaacaccggttcccgaaaccgatttattcatacttctcatttctgcccgagcaagaagacactaaatcgcagctagacaccagcacataatgtctagacaagctacttttttttcagtacaaccttaaaaagacttcttggcaacgaatacaagcaggtcaatgacacgtgagctggatccccactcggtggcataccaagagacaagcttcacaaagttgttattcaatgcaattccagcctttgcatcaaaaatacttgatctgctatcgcccacaaagtcggcggagaccacatcatcttcagtgtaaccaagaatttccttt

SEQ ID NO: 209352 - DNA, 449 bp, Glycine max
aagtgtaacgtagtgttttattaatagtgaacacagaaaaaactagcctcatcaaccactcaaaggaattcacaattctacataatctgcgtacgcaataactacatgttatttggaaaaggtgatccaaaacagtgccatctagtcatgcatgatacagctcttataaaccataaatgccaatgaagggcatcaacactgatgcaatccaaagcttcccatttttcttttccacttcactgatgaacttcaagggcttcccatcacaatcttccaagacttgtaatatctgttctttatcactgagctttacagcagcatcatgaggcttccaccctgcaaatgatgtgtgcagctgcttgaaattaaatccaattttagggaatgcctttcccacccaaggattggaagaaacccactttgtgaaagggcttctctttggatgcaga

SEQ ID NO: 209353 - DNA, 409 bp, Glycine max
ggaaggggggcttttggggaggttagactgtgccgggagaagaaatctggaaatatttatgctatgaaaaagctgaagaaatctgaaatgcttaggagaggccaggtggaacatgttagagctgagaggaaatttgctggccgaagttgccagtcattgcattgtgaaactttactactcatttcaggatgctgagtacttgtatttaattatggagtatctgcctgggggtgacgttatgactctgctgatgagggaagacaccttaagtgaaaatgttgctagattttacattgcacaaagtgttctggccatagaatctattcacaaacacaattacattcacagagatattaaacctgataaccttcttctggataaaaatggtcacatgaagctctctgatttt

SEQ ID NO: 209354 - DNA, 520 bp, Glycine max
aaacaaaggctttttattgatgataatagattatacgagtatttacatactccaaacacacgagatattaataccaaattacgcaaattattggtgctgataatatggtaaactttgtaatgcaccccgtatcaacaaacaagttaacataaaatcacaatgtccaattactttttgttgtaatgatggggcaccacacttttcttgaacatttacttccagtcaagcatgtccaacagccacaagacttcttccttagaatttgctacatcacagaaatccatttggatcccaaatacatccatgagatcttcatttctatcttccatgaatagcaaagagatccatgcacggatgccagacaaaaatgggtagccaggggatatgtctaggtaatcaaaagccaaggctctatatgatgaacgatcgatgtaatcaaacatggacttgtttattacacgagcaaccttatttgaatccttccttccaaccatcacagagacactaacattctggtttt

SEQ ID NO: 209355 - DNA, 406 bp, Glycine max
tttttaaatattattttccctcttttttgaacaccaaaacacattgggttaaactaggattaagaccatttataaatcgactggtttattcatgcctgtcggcaaataaatatataatgtaaaaaaaaaaaaccacaaataaagatctaaaaaattgacactattatatacatctcaatatcaatcattacatatcaccctgatcggcatgatccaccggagttgttgtacggcccctccgtcgagattgccggtggcgactgccgccaaatttcaaccttccggactccttaaacctttgattctcggagggtacaatgacccactcgggttgctggcacagggtaccttaaaggatcattcctatattaataggccatgtaacgctgacggaaccgtcgcatgg

SEQ ID NO: 209356 - DNA, 380 bp, Glycine max
ctctgctcgtgcctctagggttatcatatctccatttccatttcctctctctcagtttctaagaatcttaagctatgggaaagtcttacccaaccgtgagcgctgattaccagaaggccgttgagaaggcgaagaagaagctcagaggcttcatcgctgagaagagatgcgctcctctaatgctccgtttggcatggcactctgctggaacttacgacgtgagctcgaagaccggtggtcccttcggaaccataaagcacccctccgaactcgctcacggcgctaacaacggtcttgacatcgctgttaggcttttggagccactcaaagcggagtttcctattttgagctacgccgatttctaccagttggctggcgtt

SEQ ID NO: 209357 - DNA, 553 bp, Glycine max
aatagacatattactagttattacggtaaatggtcacatactacaaagggtaataatatcgcaatcgctgaacaatgttatttaacaaaaggatcgaccacaaataaaaacaacccaactccaatcatcatcaccacgtccagcaaaatacattcaaaagctatctaaaaatttgaggaacccacagtggcgcattagaaaccatgaccatagaatttatgagagaaatattatgggcaccgtgcctctccaacaatccccaaaacgttgcttaggcttcagcaaacccaagctcagaaagcttttggtgagcctcagcgtaatcagcgaagaaagcatcttcgtccgatgcatatttctcaacaagagggcggaacacagggtcagacaaaagtgccttgtcagaaggtagctgaaggaggccttctttctcaccactcaacaactccttgaagtatgagttgtcgaaaataagaggattagaggtccagggaccctcgaatccagaacgctccttgtgcgcagcttccatagtgtgacccccagacagagc

SEQ ID NO: 209358 - DNA, 564 bp, Glycine max
ggggagataaatataattcatgattcagagaaaatagtcaaaatacagtgaatcatacttgtacaaacgaaaacacaatttaatatttgcctctcatcaataaacaactgaaacagataaatagcttgactcaatcaaaagtacttactgcccaaattatatatataataaagaagtacaataaggcagaggcataggcacaacacccccttgaagctaacactaacaaacaccattcatcttgtcattgttcttcttcctcttcaacacaaacttcttccaaatggcagtgatttccctctgagtctccataggattcttcttagcaaccactaccttgccattttcttctgcactgagtgtcacagtggtgctgctgatgacccttgcaggaagtgaatcaagctcatgcagcaccttcttcacatcggacacgagacgcttcgcgagggtccttgagaagtcctccctgatgacaacacgaagcactgtgacatgttgagcatcctggggcatggtgtatgctggcactattcacccaaagcgccttaaaaagtctgagat

SEQ ID NO: 209359 - DNA, 592 bp, Glycine max
ggtacaaactttacacctttgctgattatttcatagcaaatgttacacagaatagagtatgtgattcaatgtatggctcggtgagccaagaaggaggcaataaataggccaatgttagtatcagcaaaaatgcacaaaatataacattcgggtcagcagatccttcgaaagtgggagtaaataatttataaaccacaagaaatgaaaaggaattcctcagaaaattacatcaagtgcatcctcttctcatttctatggcaccattgttgaacatctaagccttcccaaatttctattaaccttatgcacgttttccttgagccaagcttacacgcatagcccgtccttctagttccacatcattcaaggctgcaacagcagcttccatctctgcttgtgttgaatagcaaacgaaaccatagccacgtgatcttccagtttctccatcatacaagacccttgctccaaccactgttccatattcttgaaaggcttgtgtcaatatctcattagttactgaccatgacaggtttccaacaaaaagcttggttcagtttcagggtacaagggttcttttggtcttggtttgcta

SEQ ID NO: 209360 - DNA, 482 bp, Glycine max
cggtcgcgcgtcattgatccatcgtcagctacgtcagggaagcattacggaatttatcgacggtcactactagctcactcgtcgttggccgcccttttttttttatttttaaaaaatttttacgacagtatctattaccgggaaaatgcttatacatcgaaggaaaatgcctatgaacagcatggcatataactccccgaaggctcattatcagtggagaaacagtgatggaacacctataaccatatacagattcgaaaatacgctggtaccagcttgcccgactccagcctagacttgaccgctacgtgtgtaatcaaaagccagccagccttatattgggccacacggaatggaccactgaaatctgtcaaatgggattccactgcgcttgccaaacctttgtccgaatacccgtgtttcccatgaccagcattcaggtccaagcagcggtggaagattctcacctggatccaaagact

SEQ ID NO: 209361 - DNA, 467 bp, Glycine max
cgagtaccaaaatttgactttttattccacagcactggaggagaattggggaaaaccccctggcaatctgaatgcagatggagagaatcttttggtatatgggaaacagtatggtaatgtctttatagggtggtcagcctacatttggctatgaaggggatccaatgaggctgcttttctccaaatctgccagccctcatcatggatttgcagcatattattcctttgttgagaaaatcttcaaagctgatgctgtacttcattttgggacacatggttcccttgaattcatgcctggaaaacaggtggggatgagtgatgtctgttaccctgacagtctgattgggaatattccaaatgtatattactatgctgcaaacaacccttctgaggccaccatcgccaagcgcaggagttatgcaaacaccattagctatctgactcctccagcagaaaatgctgggcta

SEQ ID NO: 209362 - DNA, 506 bp, Glycine max
aaattatgatttagtacttctaattgccaggcattcaaagaaacatcggcgaacgaaagtaatatctacactgaaattcatttaagggagaaatgaacaaaagagaccatttggggtttgtctagcaaagttgggtttggagtttaaggatttatgcccatgctaaagagctcctggcataataactttgctccatacgggacatgagccaccacaatgtcatccgcagattcacaggggcggcaataaggtcctcgtattttccggccaccagagacaggccgcaagatcacatttgcaacatttttgcatttgctgcacatatgaatctgagaggagtcactgagtggaaacaggcgttcatacaggttggctgatgcaccatgagctattaagcaatcacgctccatctcaccgaacttgatacctccaaatcgttttctgtcagctacaggctgtcgggtcaaacggtgaactggaccaagtgttcggaatttcacttttgt

SEQ ID NO: 209363 - DNA, 504 bp, Glycine max
  unsure (1)..(504): unsure at all n locations
attgcttcttctttttgtttcctgtaatccaggaaatgaaattgctagcttaatattgatctgtagagaagacaagggaacttgcttgctatggcaactctgagcaattcaactaatatcttttggcaagattgtcaagtaggaaggcttgaaaggcagaagctacttaaccaaaagggatgtgttgtatggattactggactcagcggatcaggaaaaagcacattggcatgttccctaagcagagaactgcactcaaagggaaagttatcttatgtccttgatggagataaccttcggcatggactaaacaaggatcttggtttcaaagccgaagatcgcgctgaaaatattcgcagaactggagaagtggcaaaactgtttgctgatgctggcttaatatgtgttgctagtctgatatctccttacagaagagaccgagacacttgccgtgccatgttacctgatgcanattttattgaggttttcatgaacatgcctcta

SEQ ID NO: 209364 - DNA, 216 bp, Glycine max
cttccacttgcacatatatttgatagggtcattgaggagacattcatatggcatggtgcttcaataggtttctggcgtggggatgtcaaattgttaattgaagatgttggcgaactaaaaccaactattttctgtgctgttccccgtgtgcttgatagagtgtactcaggtttgacgcagaagatttcttctgggggcttcttgaagaacacatta

SEQ ID NO: 209365 - DNA, 552 bp, Glycine max
aaaaatagttttatatttcatgtctgcagttgaacatcagccatttctgaataattatatatgtaaaaatgattcatggatactgtaatacacctagagatagaaaaagagaagaaagacaacttacttagataagtccggtagaatagataatatgacgtgaaaaaaaaaatcaaaataaatgacgtatccatatataactactcagcgtatatacagtcaccaaaaggaaacaattgaacggagacaaacaccatcacatacagaaaataaattatctcccaaatcaggtctcaggcactgggtttacttccactcttatacatgttgtcaatggcattctgatagtatttaagcaactgtggcctcttcttcttgtatgttggagtgataaggtcacgttccatgtcaaatggaattgagtcaaagtgaactgcttttataaactcaaaacctttcaacttcttttccttcgcaaactttgagagctcttcaattatgtaactctttgctcgagcatcttcacagagagaattggagtccatggatata

SEQ ID NO: 209366 - DNA, 509 bp, Glycine max
atagagtattcagacacacttgagcattaattatgtaaatcatactttgcgccatgtcttgcgaggtaaaacaaagtacaaattcgagaatagaggcaagtacaacttagcaaagcctattgataaaaagaactacgactgtataagcaaaactgttataggaacccaaattcaagagggaaagtcaatcacacaatttggtagctatccgttatcagctgtgttctctgagcaaatttgggaggattaccaccctttaatggtatgatgttggtaaccttcaggtcactaaacgtgtcagttgccataaagcagactgaaatgggaaagaatgttgatgaatctgctagtggaacaacaaactccattgacccactgcggttggaattatcaatcagaaggacagaccactccaaaatggaattcctagagtcatacctccattccccatcaatctgcctaacagatggtgcttcttgaagagctggaagaggtacagagatcacaac

SEQ ID NO: 209367 - DNA, 507 bp, Glycine max
gagcttcaaggacttcttcaagatgaattatataaatctgatctttctaaagttaaaaagcactgtggcttagcactgtcaggaaagaggattagtagaagatacatgttttctttcaccgtagaaattacatgatggcaactttagctattctcattatgtatatttacatcattggtctgactctaagtcactattttcgaagtctttcactataacaatctccgtattttcgttttgtcgtctcactttggcatccacgtgatcttttggaagcacattacagtcgatggtatgccatactggtctctcctcttgaaataatgggtgcttgcatagctgcggacattgcactgtaagtgcatacttgcaagtggaaatctctgcgattgaactaatcattgctctcggttcagagcatacaaaccttaccttggtctctcgtggcttatttgtaagatcacataccgtgccattagtatattgatgagcatgatacccttgaga

SEQ ID NO: 209368 - DNA, 457 bp, Glycine max
aaaaactaatgacctcaattaagagaaacaggccacgggaaccaaaccctatgtaatgtaactagattatcgcgctttacacaaagacactgtttacagggggaaaagataatgtttactgtgaactgaattatataaaacacctacctagtaactaacatataggtcacaccgaacaaagcataagatgatggggcaaactggtacaaaacattgaagacccaccaaatcgcttcttctggtgaccatattcttagaccggacaattccacaggacgctgattataccgctccctgactctttgtggaacccccaaatattctgtcctttaggggttacacacctacacgggggtacaagtaggcccagaatagcatgcacttataatgtctcaatggcccaaacacccttaggaccaggggtggaagacatcaaacgggcggagcgtacagggaa

SEQ ID NO: 209369 - DNA, 486 bp, Glycine max
attaacgcgtgcaatggattttactgcgatcaattcaaaccaaactctaacacaaaaccaaaaatatggactgagggttataccggatggtttcttgcatttggtgatgctgtgcctcacagaccagtggaaagatcttgcatttgctgtggcacgcttttaccagcgaggtggaacttttcaaaattactatatgtaccatggagggactaattttggccgggcttctgggggaccttttgttgctagtagttatgattatgatgcaccaattgatgagtatggatttattagacagcctaagtggggccaccttaaagacgtgcataaggccataaaactttgtgaagaagcactgatagctactgatccaacaattacatctcttggaccaaatatagaggctgcagtttacaagacaggagttgtatgtgctgccttccttgctaacattgccacatctgatgcaacagtgaccttcatgga

SEQ ID NO: 209370 - DNA, 527 bp, Glycine max
aatctcaaaccatttgagtatatattattttatgtacttaacacttaacacagtacacatgcatatatagagcaacacatttcaaggaaacattctccaaaccatactgatctcccaaaataaactggaagatgattaacttaaagacacacatatatatataagccaaaagcatatatatatataagacaagtagaaggaatatgctcataattggttgcttatgcttcagccaaagagatggtggtgcttctttccatgagcttcctcatcttgctcctttgcttcctttttctcatgatgttcatggaaggcaaacccaccagatcccactgcagctgctgctgcaacctcctcttctatcttgtgcctgtgagcatgctctgggtctttctctgccttgcgcttctcatgcaaggcgtaagcagcagcagatgcagcacctaactcaccaaggtgctcaagatgcttgtggtgcttctcttccttttatagcaacctcatcattatcccaccaccacttgttt

SEQ ID NO: 209371 - DNA, 571 bp, Glycine max
atcttttccaatggcctccaacggcgacgccgttcatccccacccttccaaaaagatcaaactcttcagcaattccattaactcaactaattcctcgtttatcacccatgccgagatcgaatcggaattcttccaccaccaccccacggtggcgcgcctcaacaacggcgccttcgggtgctgcccggcttccgtgatcgccgtgcagcgcgagtggcagatgaagaacctccggcaaccggaccacttctacttcaacgacctcaagaagggactccttcactcccgcaccatcatcaagaacctcgtcaacgccgaacacgtggacgagatctccctcgtcgacaacgcctccaccggcaccggcatcgtcctccagcaagccgcctgggccttccaggaagcaaaattccagaaaggcgacgtggtcctcgtgctccactacgcctacggcgccgtcaagaaagccatcgaggcctacgtggtgcgcgccggaggcaccgttatcgaagtccccctcccctttcccgtcaccttcaacgacgacgtagtcaacgaattcccgaaagcc

SEQ ID NO: 209372 - DNA, 575 bp, Glycine max
ttcagaaatttatccagttccagcttacagttaatgttgctgctcttgtaataaatgttgtggcagcaataacttctggtgatgttcctttaaatgcagtgcagcttttgtgggttaaccttatcatggatacacttggggcgcttgcactggctactgaaccaccaacagaccgcctaatgcacagatcaccagttggccgaagagaacctcttataacaaatatcatgtggagaaacttgatcgtacaggctgcctatcaaatcgcagttctcctcgtccttaacttttgtggtgaaagtattctaccaaaacaaaataccagagctgatgcctttcaagtgaagaatactttaatattcaacgcgttcgtcctgtgccaaatattcaatgaattcaatgctcggaaacccgatgaaatgaatgttttccgtggagtgaccaagaacaaacttttcgtgggaattgttggagtgacctttatacttcagataatcatcatcgagttccttggaaagttcaccttaacggtgaggctagactggaagctatggcttgcttctcttggtattgga

SEQ ID NO: 209373 - DNA, 504 bp, Glycine max
gagtcagcaagagtaaataccatacaataatgttgaaaaaggttcactttacaagttgggaaaacatctcccatgattatcctatgatgtcatgattaaaagaaatcagagttcaatttcaacatttcctatatatcaagacaatttcctcgtggagacacccaatctcatccctacagaaaccaaggtctccagtgatctggcgctatttgctaaaaggtcttcatcaattgcaattgaattctcttcaaaaacgcaaattacagtgcttccaccgaatgagaaatatccaaactcatctcccttcttaacatagtcgccctttttctttgtaaaagtaatgctaccaaccattgtagctccaattgcaacaaatgccacctttccaaaatctacagttgaaactattgaaacaactctcttgttctccgtgaagacattgcagtacttgctatttacagcaatgggattgacagtatacaagcatccagggatatctacaga

SEQ ID NO: 209374 - DNA, 552 bp, Glycine max
  unsure (1)..(552): unsure at all n locations
ataagaaaatatatcaaattctacattgataaaccaggagacagtattttctataagtaccacccctaaagaaaatccagaattaaagccaacttaacaaaaccagcatccaccatatataattcagaaacaaatgcaaagctaacaaatagaacctaagcctcggtggtaggatactcaaacacaatatctttgcccgaaagtttcctgtatactgcagcaaaagtctccaatttgtactcggtgttgtttcgctccttggggtccaaaaagaccttcataatcttggaaccatcaattttatacctaacacgctttccaacaatctcagcaggcaatacaatatcttccagcattgcctcgtgtacagcagtgagtgttcgggtgcggggacgctgaacagcagaacctttctttggtggcctcaatatcctccgggtggcaatcaggattacatcctttccactaaactttttctcaagttctctcacaagcctgacatgaatcttccggaatcctttncttaatctgtangggacatggataaccaca

SEQ ID NO: 209375 - DNA, 464 bp, Glycine max
tcggttgagaatgcttaccctgaagatagagcgagatacaaatgggatgctgcagtgccatccttacccacatgagtatgtagacacatccaagccatgtgcacattctgcatttttcatgggcttggcaagggaaagagggagtaagaggtcaagaggggcagcaatttgatatacgtggaacagttgatgaattcagacaagaaataaatatgtacatgtactggaagccagggatggatatttttgtttctcatgttcgtcgaaagcaactccctgcatttgtttttcctgatggttacaaacgcactcgaatgccaaggcatataagccatcaagctgaaataacaggtgatgatgccacaaactgctactctgggcctggattgtctgaaagatgcatcaagaggaaaaattactctgaaatggtggataagaagccagacaaaccagataagcgggca

SEQ ID NO: 209376 - DNA, 511 bp, Glycine max
  unsure (1)..(511): unsure at all n locations
cgcaacttgcctctgtgacagttggacgttctcatccttgattaccatatattcctgcactgggaatgtttcggaagctgaaagaatgttgaatgaaatgattgagtctggctctcagcctactatttttgttctgacatcacttgtccagtgctatgggaaggttgggcgtactgatgatgttgtgaaaacatttaatcaactcttggatttgggcatcagtccagacgaccgtttctgtggttgtcttctgaatgttatgacccaaacaccaaaagaagagcttggtaagctaaacgattgtgtgaagaaggctaatccaaagcttgggtccgtggtaagatatttggtgagagggcttggggagggtggttgngagatttaaaaaaagaagcatctgaactctttaattcaattgctgatgaagtaaagaagcccttttgcaattctctgattgatctttgtgtcaacctgaatttgttggacaaagcatgtgagcttctagacctgg

SEQ ID NO: 209377 - DNA, 593 bp, Glycine max
atccaaaaaaataattatatatatgatctattacaaaaaaatcctcaaaagacaaaggaaaatgcataaaaactgcatggcatatcattccctgaaattacattatcaatggagaaaagctgttggaatacctaaaaccataaagagataagaaattatgctgttaccaattcccgagactccagccatgacttggctgctacctgtgtagtcaaaaaccagccagccttatccggagcctcatggaatggagcattgagttcgttcaaatgtgattcaactacacttgccaaacctttgtccgaatacctgtgtttcccatgaccagtattaattccaagcagcggtggaagatcctctcctgattccaaagtcttggacaagtcatttatccaagcatgtaatgcagtcagcgaagctccaagcgagagactctttagatgtagagaccactgagtttgagacttggactgtacatccgtatatatttcaagggtcaaccccaggtctagaagctcacatgctttgtccaacaaattcaggttgacacaaagatcaatcagagaattgcaaagggcttctttacttcatca

SEQ ID NO: 209378 - DNA, 466 bp, Glycine max
acgttctattatatatatatctatctatattctatatatagatatattggttagggtatcaagttttaatctgaaataaataagaattgctgcttctaatacttataataattactacaaattctaataattactacaaaagggatatatgttagataaaatagattaattaatctatttcacaaaaaaataatggatccatagcacagtttcgtcttataatacctcgggggctaatgaactattttagtgaaatttaactgtctcaattcccgggcgattgcccaaaagattcgagttccttttggaattccttcttgatcaatgacaactgcagcattatcatcatactgaattattataccgttgctacgtttgagttctttacaagtacgtacaattacagctctgatcacttctgaactttctaaagtcgtatttgggactgcttgtttgattaccgcaa

SEQ ID NO: 209379 - DNA, 459 bp, Glycine max
aaaccagaatttttgtaaacaaaatttattggtccaattataaatcgagtatgataaaactacatagaactagaatccacaaagaatatcaacagtcagcaatacactgcatggatttcttattttataaccgaaacatatgctttaggcagcaggatttgattggttggattcttgctgttgtttccactggtctggggtaacagctttcttaatagagagagcatggatttgtttcatttcctcctctaaggcagcattcaccattcgatgcctctcaagtagccttttgccttcaaattgttctgatacaatctccaccacaaaacttgcaccgcaccctccagatgtatcaaccacttcaagatgagaagggttcagtttggccttcaaggatgattcaacttctgtcttcgtcacgcccatctctcttctctcagtcttctttttcgcccttta

SEQ ID NO: 209380 - DNA, 574 bp, Glycine max
attggctgatgtcagcagatagcatggaatcttgatgataaattatgctactgggtgcatatttgagtatgacaaagctcatccagagggttctggcattggctttaaggaggaagacaaacccaacttcattggttctttctattccaaaactaaggctatggtcgaagagctcttgaaagaatatgacaatgtgtgcaccctcagggttcgcatgccaatttcatctgacttgagcaatccgcgcaatttcatcaccaagatttctcgttataacaaagtagtcaacattccaaacagcatgaccattttggatgaacttctgccgatttcaattgagatggcaaagcgaaacttgaggggcatctggaacttcacaaatcctggggccgtgagccacaatgagattctcgagatgtacagggattacattgatccaagcttcaagtggactaacttcaatcttgaagagcaagccaaggtgataattgctccacggagcaacaatgagatggatgcatccaaactgaagaacgagttccctgagcttctttccatcaaggaatcactgatc

SEQ ID NO: 209381 - DNA, 501 bp, Glycine max
  unsure (1)..(501): unsure at all n locations
cgaacaactcatctccggcatggaagatgccgccaacaactttgccagaggccactacaccgttggcaaagagatcgtagatctgtgcttggatcgcgtccgaaagctcgcagacaactgcactggtctgcagggcttcctcgtcttcaacgctgtcggcggtggcaccggttccggtctcggatctctcttgttagagcgtctctccgtcgattacggcaaaaagtccaaattagggttcaccatttacccttcccctcaggtttcaaccgcagtcgtggagccctacaacagcgtcctctccacccactcccttctggaacacaccgacgtggctgttctcttggacaacgaagccatctacgacatctgagngagatctctcgacatcgagaggcccacctacaccaacctcaacaggctcatttcgcagatcatttcgtcgctaaccacttctttgaggtttgatggcgctatcaatgtggatatcactgagtttca

SEQ ID NO: 209382 - DNA, 471 bp, Glycine max
  unsure (1)..(471): unsure at all n locations
attcaaaacgaaaatctggtaaaaattgcgagcatataaacataagaaatcaacttttgacatggacaattctgaaaacatgacagaggtcgcaaacaacaggtcctaaaccaccaaaatagaagcataatgatgatatcacttcacagtttgaataatggagaactatatcacacaggagtaaaaacaaaaaggaacgaacaatactggttcagggtaatgtaacgaagcatataccctttttactcgaaacaattacattgataataaaaccttcatttatgaatagtcctctccttcctcatcatcttccgctccttcagccccaacctcctcatagtccttctcaagagcagcaagatcctcacgagcttcagagaactctccttcttccataccctnaccaacataccagtgaacaaaggccctcttggcatacatcagatcaaatttgtggtcaatgcgagagaa

SEQ ID NO: 209383 - DNA, 583 bp, Glycine max
  unsure (1)..(583): unsure at all n locations
ctccggcttgttcagtctttcttggttctttgttactctcacacatgtctcgctccgtgcctttggtttcaaccatttttgtcttgcttctgcttctggtggccactgagatgatggggccaacaatggtggcagaagcaagaacttgtgagtctcagagccaccgtttcaaggggccatgtttgagtgacaccaactgtggctctgtttgccgaaccgaacgtttcactggaggacactgccgtggcttccgtcgcagatgcttctgcaccaaacattgttaattttaaaaaattaattaagagtgctttgatagaagatgatagatctatcatctttctactcgtgttgttaattaaccactttgtgtttgagaataagggttacccattctactatgggtttctttgtttgcctcttattttatctagttagagatccttttatgaaacgagtgatcagtgtgaaggattatgtatctgtgttggtaattaatattattctagtaaattttattccgtcgngactttttatattctgttttggttgggtcgcagataaaaggatntattatgtacatnct

SEQ ID NO: 209384 - DNA, 596 bp, Glycine max
aggatgtagcataataaaatccttttatctgccgaacaaacaaaaacagaatataaaaagtcacgacggaataaaatttactagaataatattaaattaacaacacagataacataattccttcacactgatcactcgtttcataaaaggatctctaactagataaaataagaggcaaacaaagaaacccatagtagaatgggtaacccttattctcaaacacaaagtggttaattaacaacacgagtagaaagatgatagatctatcatcttctatcaaagcactcttaattaattttttaaaattaacaatgtttggtgcagaagcatctgcgacggaagccacggcagtgtcctccagtgaaacgttcggttcggcaaacagagccacagttggtgtcactcaaacatggccccttgaaacggtggctctgagactcacaagttcttgcttctgccaccattgttggccccatcatctcagtggccaccagaagcagaagcacgacaaaaatggttgaaaccaaaggcactgagcgagacatgtgtgagagtacacagtttcaagaaagactgaacaagccggagctcgagct

SEQ ID NO: 209385 - DNA, 526 bp, Glycine max
ataaattatgtttatttaattatagtaaaattagtattattgggaacataattttaaaatgcattggttaagcatatatataagtatagcgacacaaaagagcatatataattatgatattatcaaataaaaaactttagaaaaatatataaatttaaataaatcacaaatgaattcagtaaaaataaattaggcccatagaggaatataaacacatacaactttgattgacattaattctctgagcaacaatgtcaaatagtcaatattaaagctagtagtagatgcaaattatgcaatgtaaattatcattgtttagaaacatattatcattagtgagatctgatttcattacctatgaatacattgtatactcataattaatatcgagaaacttaaagagtgccaatatttttcttcacaaattatgaaatacatgttacatacaaagttgtagaataatcaagttaattattaaattcatgatcataaattgaaaaatggtagaaacttgaacttacatgat

SEQ ID NO: 209386 - DNA, 496 bp, Glycine max
gttgctttccattttggctataatttcacaaaatgtgccattcattgcaagtgtaatattactagcatttccatatatcagtccatggcctccttaatgctcaatggagctcatcaaaatccaaacctcattagtggcatagctccaaatggccttaactttcacaacaagtgtttattccaaaagggtgtgctgtctcatggtaacaagttaagggtggtcagaaaaaacttcactcccaaaggcagcatgtcagcatcatcatcatcatcatctaggcctggttctcagccaaggttcatccagcacaagaagggaggcatttggttctacaggtttctctctattgtgtatgaccacatcataaacccggggcactggaccgaagacatgagagacgaggcactggagcctgctgatctctacaaccgcaacctgagagtggtggatgttggaggtggaactggcttcaccactcttggtatagtgaagcatg

SEQ ID NO: 209387 - DNA, 508 bp, Glycine max
gcagaaagcaagctcatcctagagttttaaaaatggcagcagcctcctccatggctctctcttccccatccttggctggcaaggccgtgaagctgggcccatcagcccccgaagtcgggagggtcagcatgaggaagaccgtcaccaagcaggcctcctccggaagcccatggtacggcccagaccgcgtcaagtacttgggcccattctctggcgagcccccgtcctacctcactggcgagttcccaggtgactacggctgggacactgctgggctttcggccgacccagaaaccttcgccagaaaccgtgagctcgaagtgatccactccaggtgggccatgctcggggccttgggctgcgtcttccccgaactgttgtcccgcaacggggtcaagtttggagaagctgtgtggttcaaggccgggtcccagatcttcacgagggtgggctggactacttgggcaacccaagccttgtccacgcccaaagcatcctcgccatctgg

SEQ ID NO: 209388 - DNA, 556 bp, Glycine max
gtaaaaagcaagtatcattaagttggattgggatacacaagataattcacattatctgaagtacattgcaataacatatacttcaccaaacacaaatctaaaaactctcaaaagtccacaagtcatccttttctttcatgctcacttgccggggacgaagttggtggcgtaggcccaggcattgttgttgactgggtccgcaaggtgatcagcaaggttctccaatggacccttaccggtgacaatggcctgaacaaagaacccaaacatagagaacatggccaatctcccgttcttgagttccttcaccttaagctcagcaaaagcctctgggtcatcagcaaggcccaatgggtcaaagctgccaccagggtagattgggtcagtgacctcaccgaggggcccaccagcaatacgataacccttaacagcacccattaggataacttgggtggcccagatggcgaggatgctctgggcgtggacaaggcttgggttgcccaagtagtccagcccaccctcgctgaagatctgggacccggccttgaaccacaca

SEQ ID NO: 209389 - DNA, 449 bp, Glycine max
aacaccaaaacacatttattaaacaaaaataaagaccatatataaatcgattggtttatttatgcctgtcggcaaataaatatataatgtaaaaaaaaaaaaccacaaataaagatctaaaaaattgacactattatatacatctcaatatcaatcatcacatatcaccctgatcggtatgatccaccggagttgttgtacggcccctccgtcgagattgccggtggtgactgccgccaaatttcaaccttccggtctccttaaacctttgtttctcggagggtacaatgacacactcgggttgtggcacagggtaccttaaagtatcatagcaatatgaatagtacatgtaacgctgacggaaccgccgcatggtgaggcggcgcatgggggtcacgccggcatagtcttgagcctcgagatcggcgtgttggtcggagcaagacttg

SEQ ID NO: 209390 - DNA, 445 bp, Glycine max
aaagagaacttcatgatcatcaaccatccaaggatttaagacgaaaggaacaagtacaaccctcgaaagtgaattaggaagaaaacacaaggaaggaaaaccatacacagaagaagattccagagaaattcaataatacacaatccttttttttttattttcatttccccccctctagtagtcagtggcgggaagctgctcgtgggtgtggctgataaagacagcctcgtaaacaaggccagcgaatccaccaccgatgagaggcccggcccagtagatccagtggttggtccagggccagctcacgacagcaggcccaaatgtcacatcggggttcaaggccgatccagagaatgccccacccaacaaaatgttaacgccgacaatgaaaccaatggcgatgggagcaataattcccaaattacccttcttggggtcaatggca

SEQ ID NO: 209391 - DNA, 521 bp, Glycine max
gttataacatttatagaaagaaaaaatagaagaagaaagagttctgaccatggctgcatcattatttatgccttcatccatagtggacgaagaagcgaggtttgaagccgaagtggcggaggtgcaagcatggtggaactctgagaggttcaggctaacaaaaagaccatacacagcaagagatgtggtgtccctccgaggcaacctcagacaaacctatgcctcgaacgagatggcgaaaaagctctggtgccttctgaagaaccaccaagccaacggcacagcctcaaggacttttggtgcacttgatcctgttcaggtcactcaaatggccaagcacttggacacaatctatgtctcagggtggcagtgctcagccacacacaccacgagcaacgagccgggccctgaccttgctgattacccttatgatactgtcccaacaaggttgagcacctcttctttgctcagcagtaccatgacaggaagcaaagagaggagaggatgagaatgagcaggga

SEQ ID NO: 209392 - DNA, 459 bp, Glycine max
gcatgtccaaatatacactataagtaaaatatgtttaacagtaggggtaaaacaaattacaaaacacagaaaaacaaggtttccttggtctccttgcccacatggccaagagtctgaacaagtaagaaatataagaaattatgaaggcaaaaattgcagaatgattcaatggcccgtttaatacttcaattattgaggacatttattccaaattccaatccaacacagaaattggggaattttccccaagttccactctcggcagtatagttctgcaaaagtagcactttcacattctggccttagcaaccacaatactgcctctatcaatttctacagctcctggcctagtccatgattctttaaactgctcttcagttactccttttcccattgcagcagttgaagccacacctccctggacagtcttgagatacctatcatagtagttagcaccag

SEQ ID NO: 209393 - DNA, 420 bp, Glycine max
ggaaaagtaaccacccccttaaatttttttgagaatctcaagggatttagcatttgatccacgtcggagaccaaatttttgacagtatcttggttagaacccagtttttttattttggttggaagttgaaatttccccataaccattcaccagtcaaagttttacccttttcaaattttctaccgcaagaaatagccatccagagaatttgccatcaacctagctacccagggtgggtatgcacactccaccttcagggttttgctggtctttccatatccttcctgttactcggagcttcaactttttcctgtctccacccgagaagaaaagcgccatgttgcggtaaatgatgagaccctcatgggtggctcttaccttcttatgggtacctctaatgctttttggacccccctaaaa

SEQ ID NO: 209394 - DNA, 470 bp, Glycine max
atattattatataaagatagtctataatcactagaatttctatatatttatacttagtatataataattctagtgattatagctaagccaatatatatcataatataatatacccttttcttattcaaagaatttatggctatgccttatcatttttagtcaaagaaaagaaattatggaattgaaataactcactcagaacgccctttaaaagattacgcggtacgattgaatcaaataagcccttatggaataaatattcagctgcttgtgaaccttcaggtactgccttattcaatgtttgttcaattactcttttaccagcaaatgcaatataagcatttggttcggcaataatgatatcccccaacatgccaaaactagcagttacccccccagtagtgggagatgtaagtatggatacatagaataactttttatatttttgataatcatataaagcagaagag

SEQ ID NO: 209395 - DNA, 499 bp, Glycine max
acgtaaaattaaaaccagtatatgtcaatgtagtagcttatcgtgctaggtgagtacaacaccatggacagaaggctaaaagttagacctctttttgtagaaaacaagagaataagaggtattattgtttctacttgattcatttatttgtactaatttctagctgactattttttagtttcgacgtgcagatttcatgctccatgcttttaggtattccacggtgatatgctcagtaccgttattgaacacaaacaaatgagcttttttctttattgctagggtaggataaaccctagacaagatgtttgttcttcctccggctccaaaactctccactactgagtgatcaatcaaactcttgagagagagctttttatttttggctaaatccacattcacaaagcctgcaaatgatggcttgtacaattctctctttaaagaggaacttcttgcatcggagcacatgaaaatcacgtgctcgtttggagctttaaaa

SEQ ID NO: 209396 - DNA, 527 bp, Glycine max
ggtcgtaaaactaagcaaaaaaacaaagtaaaagtaatttcacaagtatcttatcatcggcaccaaaaaagcaagcgcagagcgcaggggaattcttaatttcccatatatgataaaaatttagactaatctagagctcatcgtgagaatcatcctcgtcttcgccttcgccacctgcaccacctggggctcctcctgatctctgatacacagcactgatgattgggttgcaaacggcttcaacctccttcagcttctcttcataatcttctttctccacactctggttgtcatccagccattccaatgcttctttcactgcagtctcaattttctccttttcatctgactccaacttgtccgcgagcttgtccttgtcactgacctgattcttcatgttgtatacgtaggtttcaagactgttgcgagcatcgatcctctccttcaccttcttgtcttcctcggcaaactcttctgcttcacgaaccattctatctatttcttcctggctaagacgtcccttttcg

SEQ ID NO: 209397 - DNA, 296 bp, Glycine max
tttccatcttttaactcacatctccctcctgccacagatagattacatctggatgttgggcacaattggcataatcacttctgccacccatttgttcccacattacagcaggcaagaaatcctcctattgaaggtgggtgcaacccaatcctgtctcgtcctattcctatgagattggactggcccccagtttttcgtggtggcatgaccccatcaccaaactataactatgactatggttgtatatctaggaagcaatgtacctttttaaaaggattggttgttcacaacatgca

SEQ ID NO: 209398 - DNA, 315 bp, Glycine max
agtgaatgaaccatgccctcatcagaattgcacttttggcgggatatggaacggtggaggggggagtggacaaaaagtcctttatgttactacatctttctattatctggttatacaggctggtatagccgatgcaagtaaaaccagttccaaagtttatcctgcggaattcaaggccgcagctaagcgagcgtgtcaagtcaaatttgaggatgctcaatccacttatccacttatgatggaagatgcactttcatacatttgcatgatattacgtatcagtatacgttgctcgtcgatggatttggcctggat

SEQ ID NO: 209399 - DNA, 540 bp, Glycine max
atcattttaatcacgcgcacatcagcacaacacaacaattcactaagctaaaatcacttcatcatggcttcctcgtgtgcttcctctgccattgcagctgttgccatctccacaccaagttcccagaagaatggatcactcttgggaagcacaaaagcttcttttcttagtgggaggaaactgaaggtgaacaactttacagcaccagttggagcacgatccagcactacagtttgcgcagttgctgagcctgataggcctctgtggttcccaggcagcacccctcctccatggctagatggcagtttgccaggagattttggctttgatcctctaggtcttgcatctgatcctgagagcctgagatggaatgtccaagcagagcttgtgcactgcagatgggccatgttgggagctgctggcattttcatcccagaattcctcacaaagattggtatcctgaacaccccttcatggtacactgctggagagttggagtactttacagacaccaccacactcttcatagttgagctcttt

SEQ ID NO: 209400 - DNA, 405 bp, Glycine max
aaaaaagggccctttaaaatccccggggcttgttcccaaaaaaaattggggcgggtttatcatccatggaaaaacggggattacttcctgaatttacattaaaggcctttaaaccttaaaaagggttttggccattgaatcttcaatttttgcctgacaataaaaggagcccttttacaaggttttaccaacataaaccctcccacctaaaaccttttaagggttacaacttagttaaaaagggttgccaatggttttccaagggttggaaacatagagggggtccaacacttttcacttgggggggaaagccccaaaaatagttccatgggccggatctgcaaggggaccaaaaagggtgcgaataggacccgggcccgggtaaatgggctggaaccatgcccc

SEQ ID NO: 209401 - DNA, 478 bp, Glycine max
ctgccatccgtgctgatccttctctcaagaaatctgagaagcagcccccgaaggaacacaagaggtacaatctgaagaaactcacttatgaggagaggaaggctaagttgattgctcgtgtggcggctatcaactctgctgctgataatgatgaagatgatgagtgaaagttcattgcagattccatgtcatcgttgcacaactaaaactctcttattttgcgttcagtcaatcattttatttacatgtgctgtttattttctaggtccaaaattttggatactttttgaagttgagtaagccgtatttttggtcaatttcgtgtcaacatgaattgatgtcttaccttattttatgatatacgctttgtttctagcacgaagttgtttagtttaacgaactgtgcttgttttttttttcgacaatgaaagaatgtaccactttaatttgttaggttaaatttaatccagatttactt

SEQ ID NO: 209402 - DNA, 478 bp, Glycine max
caaagaaggcgtcttcataaacgcctttcttctccgtttccgtttcctcgttcgaattcgctttttgatctgcgaaaatgagagagtgcatctcgatccacattggtcaggctggtatccaggtcggaaatgcttgctgggagcgctactgcctcgagcacggcatcgggcccgatgggcaaatgccaagtgacaagacagttggcggtggtgatgatgctttcaatactttcttcagcgagactggtgctggaaagcacgtgccacgtgcagtgtttgtagatcttgagcccactgttattgatgaggtgagaaccggaacttaccgccagcttttccacccagagcagctcatcagcggcaaagaagatgccgccaacaactttgcccgtggccattataccattgggaaagagaatgttgatctgtgcttggaccgcatcagaaagcttgctgacaattgcactggactccaagg

SEQ ID NO: 209403 - DNA, 532 bp, Glycine max
gaagcataaaagcaatgcatccaaattaaaaccacatcggtactggtacacatctgaacatcaaacacaacagaaaacagaccacaagaacaagaatctgaagtagattctagtagtcttcatcctcttcctggccctcaccagactcagcacccacttcttcataatccttctcaagggctgcaaggtcctcacgggcttcagaaaattcaccttcttccataccctcacccacgtaccagtggacaaaagcacgcttggcatacatgagatcaaacttgtgatcaatgcggccaaacacttcagccacactggtggagtttgaaatcatgcaaactgccctctgcaccttggcaaggtcgcctccaggaacaacggtaggtggctggtagttaataccacacttgaaaccagtagggcaccaatccacaaactgaatggtcctcttggtcttgatggtggcaacagcagcgtttacatctttgggcacaacattaccacggtacatcaggcaacacgccatgtactttcc

SEQ ID NO: 209404 - DNA, 547 bp, Glycine max
  unsure (1)..(547): unsure at all n locations
cttataactaggtatttattttctcatatgctcttcttaaacttctctttggtagtgtgttcacatacatatctacttattgttattattattgtcaccacatacaataatgggttccattagtaacaccgaggttcataatcatcacaatgatgatgacgacgatgatcatcgtcatcgggtgaatttctcgatccagagaggatttgggacaaaattgaaggaggcattgaaggaaacattgtttccggatgatcccttcaggcagttcaagaacgaggagaagccaatggggagggtgatgaaaggggtgcaatacttcatcccaatctttgagtggctccccacttacaattttcgcctcttttgctctgacttgatcgctggactaaccatctcaagccttgccatccctcaaggcattagctatgccaaacttgctgaccttnctcccctcattggcctttattccagctttgtcccacctttgatctatgctgcttttgggagttcaaggcacatggccaatgggacgatagcagcagca

SEQ ID NO: 209405 - DNA, 544 bp, Glycine max
gggaaaagttttttttttattagcgaatattttctcaattccacagatatatagttgtataataatactattctataatacaacattgatgtgggcaaccgaaaggctaattaattaactacttaggcatgaatttcttcttgaacaagcttttgagcactatttgcaacctctgatgaacgaagtgtatattgacttgccatcactgcatcatccaatattagataaaacgactccttcccaattttctgaacaaacttgggtattataagctactgcatgaccttcagccatgggtttacgaacaaaaccttaactccatactttcccaatattgtaattaactcgggcaatgcttgaatagcagacgtggcaaggtctgacactcctgacaaattaagtatgatgtgctcaactacatctacagtagagctttgctcacttcgaatataccttataatcctatctttgacggataatagaatttgcagagtaaacgggagaaccaagttgtacaacaagaaactctgggtatgacgataca

SEQ ID NO: 209406 - DNA, 407 bp, Glycine max
gggacctacgcgtgcgacgtgtgcggcgtatcgtgcacgggtgaaggcgaggccatcatacgtggcacgctggcgcgtgaggtggcagcggtgatggaatacaaaggcttgaagcttcaagaagccgtggattttgtgatcaagcaccgtctcgatgaagggatggctggtctcattgctgtgtccaacgctggggaagtggcttatggtttcaattgcaatggcatgtttaggggctgtgccactgaaaatggcttcatggaggtcggaatctgggaatagcttcattattttccttcatggttgtttcgatgcaacttttggatttctgtaccatgttccactgtagtgtagggtctttctgctggtgcccgatttagataaaaaatggtaaccttgtttctaag

SEQ ID NO: 209407 - DNA, 379 bp, Glycine max
  unsure (1)..(379): unsure at all n locations
gaaccatcctatcattatatttataagccacatgatgggatttaatattatttacattcgcacatattaccaattattatgaatcttaaccacggctaaaccactacagcaaactgtaacgcatacaaaaattggtgagttcaaaatgttcgacaaatgaaaacagccccttcacttgcagatactttacggaggcatgcaaaattaactgtattgaattcataaggtgtaaacaggagtatttgattgtgctccccattcagatcaagatgcatcataaactggctcattagactttctaagacgatgaagacccattgcaagaatgcangcagttacgcctgctccacatgaagtcacagctgggctttccagagag

SEQ ID NO: 209408 - DNA, 575 bp, Glycine max
ccaatatcacaattgttggtcttcttctgcaggccaatggattatcacttgcctggtctgcgccagccaataggcaatgcatcacatccatggaatttcacatccccaatgggcaattctatttctaccttttggacaaaacaaattcagagttcaagcaattccttctacatgcctagttcgaactagagcctgcagcacaagaagcttttgtgttattgtctctcaaaagaccgtccccttcattgcctggtgttaaagtttgaccattatattcctgaactgaaccatcctctatattactgggggcagaattgctattgcttctattattgtcgctggtctccaggcgttccatcatgcgtgacacagttgcaatccctgcattaacttctcgcctaacttcagatccaaggtcagacatagtgttgttccgagagaaccatctctccttccaccctcttgtgctcttggaaattgactccttgtatcttgttgatacagcattcagtttagatttcagagattctgaaaatgaatgtaatctgatggccctgctctgtcttgactacttg

SEQ ID NO: 209409 - DNA, 573 bp, Glycine max
ggacgacgttgttgcggaacctgaaattcacgcgctgatttcagacgaagagcacgagcacgatcacgatcacgagcatgagcatgagcatgaccatgacctcgagcacgatcacgagcatgagcatgaccaccacgaggaccgcgatgatcacgccgccgtggcagctgtctccttggaagatctcaaactcaagatcattaagcaggtggagtattatttcagcgatgaaaatctgcccactgacaagtatctgttgggttttgtcaagaggaacaaggaagggtttgttcctgtatcagtaattgcttcttttagaaaaataaagaagctcacgcgagaccatgcatttattgttgctgcatgaaggagtcttcactgcttgttgttaggggtgacgggaaaagggtcaagcgggttaacccactttgttttaatggatctagagatcataagagaatttgccagaggatcattcaagggagaacattcaacaaatattgcatgaagctgggaatataaagaggataaccattcatgatccacattctacttcagagtctacaagacaca

SEQ ID NO: 209410 - DNA, 555 bp, Glycine max
atatataatgggcattcatggttgatgatattaaattgatgtttcaatattgatagcacacaaatggatctggaccataaaacctatatatagcactaacatttattttaggaccacaaggcaagagatacttacatattaaaattgattacatgccctaattatatctcgcataccttttcaattatgtccctctcgagctacaataagttcttctaagttatcagcatcaccagtgtctatagggagcatgatctcatcctcaattgtgaaattgtaattaatcccaatggcttttagaaactggtatacttcaaacatggtaggcctctcctttggcattgctgtaacacagttgcttgcaaccttcagaaattggaaaagctcctggtctacacccttcccaactagtgattcatcaatgacttcatggagttttgcattgctagattgctgttgaatccactctaccaaattttctttaaaagtttctggagctttagccacatgggtaggtctttcacctgtcaccaattcaagaagcacggtcccgaa

SEQ ID NO: 209411 - DNA, 372 bp, Glycine max
caaaatttgattgatccctcattaatacaaatctgcagctcaaattttctaattaatggccagatctcttaattgagaacaggatataacgttgcttgatttgctatactaacactatgtcattaacccattgttgcaattgcccttgggacaaaacctgtcatttgtacgtagtagaaaccactgccttacaatggaaaacgtacgctacttgcacactcctgtttacaacttagtcttgcaggtgatcgctaagaaacctcgtttaacttctgaaaccttccactattcgactatggaagcatttttgctctaaaactcctgtttctagccggcgaaggctctcattataaccatacagacctaaaatta

SEQ ID NO: 209412 - DNA, 566 bp, Glycine max
catgatataatatatttccaatcttcagaaaatcccatcacacttcaaactaaaaagtcaagagtctccatagtatctcaacatacatgttcagatagaattataatgcacgatgttttatatataactgcatgtttatctaaggagaagaataggtgccagatttttgctgcatgaatcgctttctccaatgagtttaactaatgaacataaaactacaaattgaagaggggtagaataatttggaacctaatttgcatatctacatcctcaaccgaatccaataaaatacaatgtactaccttatgatcttaaccattgcttctacaaattaagtcgacagattatgctgatgctattcttactcagaatgcatagtttccagctttcgaatagagtgtgcacacctactcaagaagcttattgcaggtgcctacaccaacagcagcagcaagatgccatgcagcatgaaggtaaggagttttaggaaataaatcatcagctacaaaaagcataccaccaagtaacgacgatgtcttatgcactgtgtgagccattctcaagtc

SEQ ID NO: 209413 - DNA, 534 bp, Glycine max
caaaaaaaaaaaaaaaaaaaaatccgcgattcgctcttctcttggaaaagtgaaaaccagaagtacgaacgaaagagaagagcgatttagaagtgagagaagatggggttgtcgttcacgaagctgttcagcaggttgtttgcgaagaaggaaatgaggattctgatggtaggtctcgatgctgctggtaagacaaccatcttgtacaagctcaagcttggagaaatcgtcaccactatccccaccatcggatttaatgttgagactgtggagtacaagaacatcagcttcactgtgtgggatgttggtggtcaggacaagatccgtccactgtggaggcattattttcagaacactcagggtctcatttttgtggttgatagcaatgatagagatcgagtggttgaggcaagggatgagctgcacagaatgttgaatgaggatgaacttagagatgctggtttgcttgtttttgccaacaagcaagatcttcctaatgcaatgaatgctgcagaataactgacaagcttggac

SEQ ID NO: 209414 - DNA, 456 bp, Glycine max
actcatggaaatatattcaatcaaaaatcaaacaaacaagatgtaagcaacacagcacgcacgcacaagagggtgcaagagttccaattatagctaaaagtattagctaatttaagcaatcatacaaacccaagttacacaaaagagaatacttctagcaagcattctgctattacaacattcgctagaaaagataagcatctttctccaagaaccgccagactcgcatgaaatcaccagacaagaccaaaatttttcaaatgtctcatgctttgctggcaatgttgttagaaagccagtccaaaccctcatagagaccctctccagaagttgcacaagtgctctggatataccagtggcgttgacggagtgaatgaagtccaagcttgtcagttatttctgcagcattcattgcattaggaagatcttgcttgttgcaaaaacaagcaaaacagc

SEQ ID NO: 209415 - DNA, 511 bp, Glycine max
  unsure (1)..(511): unsure at all n locations
gccgcaggaggagaaggccgaggaagacagatccaaggtcgatgatctccgaggctctcccatgagcgtcggaaacctcgaagagctcatcgacgagaatcacgctattgtctcctcctccgttgggcctgagtactatgtcggaatcctgtctttcgttgataaggatcagttggagcctggttgtgctattttgatgcataataagggtcttttctgtggttgggcttcttcaagatgaagttgatccaatggtctctgtcatgaaggttgagaaggctcctctggaatcttatgctgacattggtggtttagatgcccaaatacaggaaattaaagaagcagttgagctacccctgacgcatcctgaactatatgaagacattggtatcaagcctcctaagggggtcattttatatggagaacctggaactgggtagacattgcttgcgaaggctgtggcanactcaacatcagcaacattcttgcgtgttggtggtagtgaactgat

SEQ ID NO: 209416 - DNA, 503 bp, Glycine max
caaggatattgaaagaaaactatattgaattaaaatcgttgttgagattcaaagcccctaaaatacaactgacatttgttcgcagaatacaaatgaattggcatttgttcgcataactagaacgttaaaagaaagacaagagggccagagataatagaggatagtttttcacatatacagcccttcaggcaccccttctttcttcttaaacatcactttatccttggccttcttaaagtcggcatgagtcaccttcattcgacgttctcgtagagcaagtaaaccagcttcagtacatattgcctttatatcagctccggagaattcgtctttagtcataacaaattcttccaagttgacatcatcagctaatgtcatccttgacgtgtgtatctggaagatgcgtctccttgttttgatatcaggaagaggaaattctatcttcctgtcaattcgaccaggtcgtagcaaagcttgataaagactttcaattctgttggttg

SEQ ID NO: 209417 - DNA, 514 bp, Glycine max
gaacagtgtcgtgagaacctaccctcaaatacccggtggagatccacggtgttatcctagcaccggttccgcagttttgcttcctcttcgagaacctaatgtggaggctgaggttctgatttgtggtggagccccgagaggggcttttcggaatactctctcgggtaagtttgttggagcgttgagaacttgcgctcggattaaaataaccgacccgaaagcgaattgggtgatggaaaccatgccgggtgcgagagttatgagtgacatggttttactccccaacggcgacgttttgattgttaatggagcagctgtggggactgcgggctgggaattgagccgtaacccggtgttaaacccgtttctttataaacccaacaagcgggtcgggatgagatttgaggtccagaacccgtctcatattccgaggatgtaccactccggtgccgttttgcttcgcgatgggcgagttcttctcgctgggagcaacccttacacgtattacaatttc

SEQ ID NO: 209418 - DNA, 553 bp, Glycine max
acacttctgaccaaacacaatgttaagaattgcaaagaaatatccatgaactataattacaaacttcctagggtattatttacacgccccataggccataaatggctttatttgaattttatcttcccatatcttacagtttaaatactcactcaagaatctgttcactcccagacattcacaacattaaataactggaataaaaagaccttttccacaccaattttggcaaccaggcaaagccgagaattcccatttttcccacctatctggacccaaataccgtggcttggaaacttcttgatggaccacaaacagcatatagaaccccggtgcgccagatcaaggggaagccggcccggtaacttcaacctcgtgcgttgattctccaaccccactcaaatggtgcggcttcagcaccaacagcctctgattcatggagaacgagtgcgtgttaaatggcggcgccagcatggtaacagacaccgaatccccaaccaaagtcgcgctcaccttaaaccgaagcctcaacgtctgaccgtacttgagtttt

SEQ ID NO: 209419 - DNA, 553 bp, Glycine max
aaaacaagcgccgcaaccccgccgccgacgagtcctcctcctccctcatcaccgctgacgacaccgtcttccgctacctctgccccgtccgcaagatcggcagcgtcattggccgcggcggcgacatcgtcaagcagctccgcgccgacaccaaggccaagattcgcatcggtgacgcgctacccggctgcgacgagcgcgttgtcaccatccacagttcctccgaggagaccaaccatttcgacgagaccgatgatctcgtctcgcccgcgcaggacgcgctttttagggttcaccagcgcgtgattgcggaggacgcacgtgaggatgaggacgaggagaggaatcatgtgactgcgaagcttctcgtgccgtccgatcagatcggatgcgtcattggaaaaggcggccccatcgtgcagaatatacggagcgaaaccggcgcgcagattcggatccttaaggatgatcgcttgcctcctgcgcgttaagcaccgatgaacttggtcagatatctggtgaggctgcgggtgtgaagaaagctctgtttcaa

SEQ ID NO: 209420 - DNA, 391 bp, Glycine max
aaggaaaaagggcccaaaatttataaaaccccccaaagaaaaaccccccaagggaaacccctaaaaaaaattggggccccccaaaggaaaccacaaaaagggaaactggggccccaatttaaaccccttttaaacccaaaaaaaaaaaaggagccacccaaaatgtggaaaggggaaggaacccccgaaaggaaccccggggattaagaacctaaaagggcccgttttcccccttggggcccccaaagaaaaccccccatggggccccaaagacccccaaaagggggtaaccccgcctaaaaaaagttccccccccggggggtttggaaaaaacccgctttgggggggaaagaacttggggaaccccgaaaaataaattctcccctggggg

SEQ ID NO: 209421 - DNA, 285 bp, Glycine max
accgcggtgggctccagctttgtccctttagcgagggtttattgcgcgctagaaaaaacatgacataccggaaaaaacaaggaggtggttgcatagctttggaatttcccaatgaaacgctcaagtatggtcgtccttgtcatggggctttctggagaggatcatgtgccttggcgagaaaatgccagagtgaccccctttgggcaaataatccgggggcttgaagagcatttcatgaacatccacggtccccttgggcgcgattcccaaagcggggagaacagt

SEQ ID NO: 209422 - DNA, 569 bp, Glycine max
cacatccctagctctgtcgttccgtcgttgacgatggcgtttcgggtgcgaagccctgacctccgctctctctttcttctctctctcttgtccatcgcttccgccaatgtcttcttcgaagagcgtttcgatgacgggtgggaaaatcgatgggttaaatcagattggaaaaaagatgagaacgtggctggggagtggaaccacacctctggtcaatggaatggagacgctaatgacaaaggtattcaaaccagtgaggattacagattctatgctatttcagctgagtaccctgaattcagcaacaagggtaagacactagtctttcaattttctgttaagcacgaacagaagcttgactgtggtggtggctacatgaagatgctcagtggggatgttgatcagaagaaatttggcggggatactccttacagtattatgtttggcccagatatctgcggttacagtaccaagaaagttcacgctatttttacctacaataacacaaaccacttgataaagaaagatgtccttgtgagactgaccacttactcatgttacacatttat

SEQ ID NO: 209423 - DNA, 235 bp, Glycine max
gctcgctagaaaaaaaaatgagagtacctgaaagaaacaaggaggtggttgctatagctttggaatttcccaatgaaacgctcaagtatggtcgtccttgtcatggggctttctggagaggatcatgtgcctttgtgagaaaatgccacagtgaccccttttgggtaaataatcaggggtcttgaagagcatttaatgaacatccacggtccccttgggcgcgatttccaaagcg

SEQ ID NO: 209424 - DNA, 609 bp, Glycine max
  unsure (1)..(609): unsure at all n locations
cctggagctctgttaatgggtgatgctttcaacatgcgtcatcctttgactggtggaggaatgacagtggcactgtctgatattgttgtgctgcggaatcttctaaagccaatttgtgacctgaatgatgcaacctcattatgcagacatcttgaatccttttacatcttacgcaagcctatggcatccaccataaatactttggcaggtgccctatataaggtcttttcgacttcacccaatgaagctagaaaggaactgcgccaagcatgttttgactacttgagccttggacattttttttcaagtggacccatcgctctactctctggtctaaaccctagcccgctgaatttaattctccatttttttgctgttgcattatatggggttggcccgttgctcttaccatttccttcattgaacgtacttggattggagctaaatagtnttgtgtgcatttggcataatatttcccatcatcaagggtgaaggagtaaggcaaatgtttttccccacatccataccggcattntatagagctcctcctgatagtggtgcatcgaggagtaagggaaccatngtctgcctgcatgcattttcaattaa

SEQ ID NO: 209425 - DNA, 598 bp, Glycine max
  unsure (1)..(598): unsure at all n locations
gcagtggaagaaaaaataacgatgtgacgcttttggggctaacagcgctagatcttgtgatgatggctttgttgttctcagccaatggtgcagcctgtgcagtgggagtgatagcacagaagggcaactcgcacgtgcaatggatgaaagtgtgcaacgtctttgacgcctattgtcgccacgtcactgctgcattggtcctctccctcttcggctccaccgtctttctcttgctcgtgctcctttctgttctcaaactccattacagaacaagaagctagatctcaatatgatacacactataatatatatattggtagtgttaattaattaattaagggtgtgaatcgtatttttggcttagacctagcttgcacttattgttgtgtttgatgaagaacgccaaagcacttaaagatatagatatgccccaagtagtgattaaattgaatgtgggtcgtttgtagtaaatatactttagcagatggtaggtcgatttatttnagagagcagtaacaggtaaattaatatagctagctagctagctactgtaatggtttttctgaatgatgcgtgataagtgatatttcactttgac

SEQ ID NO: 209426 - DNA, 489 bp, Glycine max
gtagaggagaagatcgagaaggggttgcagtagccgggggcttcttctggtcctacacagacgaaccccatgccacacgacgtcgtcagatcctctccaaataccctcaaatcaaacaactctttggccccgaccactctgctttcttcaagattagtggagttgttctgcttcagcttggtacgggtgctttacttcatgatgctggctggctgaagatatttttagtagcatacttttttggttcttttctcaaccacaatctctttttggctatccacgagttgagtcacaacctggccttctcaaccccagtctacaaccgttggttggggatttttgctaacctccctataggtgtgcccatgtctgttaccttgcaaaagtatcacttggagcaccaccgcttacaaggtgtagatggcattgatatggatgtccctagcctcactgaagtccgtcttgtgaaaaatattattgcagaaacca

SEQ ID NO: 209427 - DNA, 446 bp, Glycine max
aaccaccaagccaccacttatttccataaataatatacccctgccaccaagtttacagaagcaacgcttctttccaaaacaaatactagtgccacaaagtaagcaaaaataagggaaaaatatagagtggggaaagcacacacaactagagaaaccattccattcacagtcttcaggcagcgaacggggtgaaacgcggaacaggcttgcacttgagggggttggccaaaaacacagtcaccctcccttcctcagacatgtgaacatgatgggttttaccatcattaacgatccagtcgaagcactggatcaaactcgctagcgttgcttgcatgacaagcaacgctagcgagggtccggggcagcttcttttcccgctcccaaagggcaggagctgatagtactgccccctcacgtcaatcttgcttttgcccgggtcgtcggaa

SEQ ID NO: 209428 - DNA, 528 bp, Glycine max
  unsure (1)..(528): unsure at all n locations
ctcataacacaaagcacaaagcaaagctcatccttgagttaaaaaatggcagcagcttcttccatggctctctcatccccatccttggctggcaaggccgtgaagctgggcccatcagccccagaagtgggaagggtgagcatgaggaagaccgtcaccaagcaggtctcctcaggaagcccatggtacggcccagaccgagtcaagtacttgggcccattctctggcgagcccccgtcctacctaaccggtgagttcccaggcgactacggctgggacactgctgggctttccgcagacccagaaaccttcgccaagaaccgtgaactcgaagtgatccactccaggtgggccatgctcggagccttgggctgcgtcttcccggagttgctgtcccgcaacgggcgaagttcggagaagccgtgtggttcaaggcccggtcccagatcttcagcgagggtgggctcgactacctgggcaacccaagcctgatccacgcccagagcatnctcgccatctgggccacac

SEQ ID NO: 209429 - DNA, 376 bp, Glycine max
gtaaaaagttcgttacattaagttggattcggatacacaagataattcacattatctgaagtacttcaccaaacacaaatctaaaaactctcaaaagtcattgcgatctttgacgctcactttccggggacgaagttggcggcctaggcccagtcgttgaagttgacagggtcagcaaggtgatcggcgaggttctgcaatggaccctttccggagacaatggcctgaacaaagaagccgaacatagagaacatggccaatcgtgcgcacttgagctccttcaccttaagctcagcaaaagcctgtgggtcatcagcaaggcccaatgggtctaagctgccacctgggaaattgggtcagtgacctcaccgagggg

SEQ ID NO: 209430 - DNA, 524 bp, Glycine max
gtatcacattaaaatcatatgaatggttaacagcttaagtataaaactggtcaatgaaggggaaactcaccccataattaggttagatggacttacaacatcaatttccgctaaaattgacgaaacaaaaaaaatcttatagaaaagaaataagtaaaaaagaaatgtttttccccacccatcataacatggctccattctatagatctcagaatctgaagtcaggatccacatccattgcccaacagaatttcgccagcagagacttgttgaaaatcttttcaataggaacttcatgccgcttgcaccaggcaactgtaatcctagggtcaaggtagtttatcttggatgtgcccaatgccacagttttcagatcttcttttgtcttcatatcacgttgcattttctcaatttttgcattggtttgagatatctttttctctagcatttcgggacccaagttcttttttctctttccatctgaactcttcgagggggctttcctttccttgccctgtctaagt

SEQ ID NO: 209431 - DNA, 523 bp, Glycine max
  unsure (1)..(523): unsure at all n locations
acaacatattattttaacaaaaatttatttattttaatactaatcatttaacaaagggagaaaaagattaaccaatcgccaaagttcaaggcagatctggcttaacaaaacttagcatactaacgaattatttagcatttttacattcacttgctcaaaaaaaccaaacacgctagtaatattatgtttgagtcagcaacggagcaataaattcccgacacataatagtaatagtagctgcaaacgtggcagatgcttaacgaaaaacgacaatatttacatgcaacccacggtcatcttagctaaagacttcagcttcagcggtgcctgcttctggtctccccactgtacagccagtcatagacagtgggagtgttgggaagtggtttgtcaaacatctgagcaccgatggtctttgtggcggagttgctcccaggatggaagacgctcctcaaacgttgtcagctttacgggccgatcccggtgtcgttggaagtcgcggagtcatcggngttgttggtgt

SEQ ID NO: 209432 - DNA, 453 bp, Glycine max
cgaaagagagagggcatgctcacagctcagcagcagacccaggaccggaatataatatcaccgaggtacgacagaagcatcacatagatcgagcggcacgcccattttttattttatattatttaatttttgttatttatttatttttattatattttttatattattggtttatttattttattatattatattaatttattttataatattactttaaataatatatccaagaaacagtataaaaaaaaaggaacacaagcaaaaacaaaaagaaaaaaaaaaaaaaaacaaaaaaaaaaaaaaaaaaaaaaaaaaaaaaaaaaaaaaaaaaaaaaaaaaaaaaaaaaaaaaaaaaaaaaaaaaaaaaaaaaacaaaaaaagaaaggaaaaaaagaaacgcaagaacaaaaaaaagaaaaaaaaacacaaggaaaaaaggaacaacagaaa

SEQ ID NO: 209433 - DNA, 563 bp, Glycine max
  unsure (1)..(563): unsure at all n locations
tgaatgtctttggcattgagaacagggatacattaacacacaaggccacagggtattcagcaaagcttttgaagaaacctgatcagtgccgagcagtttatgcatgctctcatctcttttgggttgatgatcaagatggtattaaagatggagaaagggtattgctttgccttaagcgtgctttaaggattgcaaatgctgctcaacaaatggccaatgcagcaaggggtagcagtggtccagtgacgctctttgttgaaatactgaacaagtacatttactattttgagaaaggaaaccctcagatcactagttctactatccaagggcttatagaattgatcacgaccgagatgcagagtgactctgcttcagctcttccagcttcggatgccttttttaccagcacattgaggtacatccaattccaaaaacagaagggtggtatactgggtgaaaaatatgatcccatcaatgtctcaatccctgcctaacatatccaggacgcccaaatgggaagttgtatgaaaagccanacatgttgttgtgagtgttcatcttca

SEQ ID NO: 209434 - DNA, 327 bp, Glycine max
atgatttgtatgattcacaaacttggctatggtaattgggatgagttgaaggcagcttttcgaatgtcgcccttgtttcgatttgattggtttgtcaagtctcgcacaacacaggaaattacaaggaggtgtgacaccctcattcggctggtagagaaggaaaatcaagaatatgatgagagggagaggcaagctcgtaaagagaagaaacttgctgctaagagcatgaccccgtcgaagcgttccatgcctagacagactgagagtccatctctgaagaagcggaagcagttaaccatggatgactatttgagctcggggaagaag

SEQ ID NO: 209435 - DNA, 533 bp, Glycine max
gagagaaatatatggaagcgataaattataaagaaatattgcaagtaatgataatgtgccatgttacagccgaaccataaaatcaaaacttgagtatatattagcggagaatacatcaggcaagttgatctcaaaactgctgtatctaaccaacccaacattatgcaccaccaactttctgagccttatttcggcgatctctagacccattatctctagagcgtgcatgtttgccccctctcccatgccatcctccccttccttgcttattcttgaattctcggtgtttgccttgattaccacgaagcaggctccagtattctttttcggcctcaccagtcactggatctagaatagcaatataattctttacaaccaagccatccttttctgaaataactgcagcagcacgagctttctgagcagcttcagtttcttcaaagcggatgtatcctgactctgctccaatcttgaaatcaatgtacttcacggtaccaaatttctcaaagacactctttaaatccttacgtgag

SEQ ID NO: 209436 - DNA, 565 bp, Glycine max
ctttcttcttcttcttctcttcttcttcaagattgcgacgacgatccaagtgatagacactcgttgcgatggaacttgtagctgaatccgagcgaactctgtacccatacgtgactggatcctctgtagtcgctatcaaatacaaagatgggattctaatggccgctgacatgggaggttcgtatggatctaccctgcggtataagagtgttgagcgtatcaagcctattggaaagcattctcttcttggtgctagcggggagataagtgactttcaggaaattttgcgctaccttgacgagcttatcctttatgacaacatgtgggaggatgggaattctctagggccgaaggaggtgcataattatttaacccgtgtaatgtataatagacgtaacaagttcaatccattgtggaatgcacttgtacttggtggggtgaaaaatgggcagaagtaccttggcatggttaacatgattggcattaattttgaggacaaccatgtagcaaccgggcttggaaatcatcttgctaggccaattctccgtgacgagtggcatgaaaa

SEQ ID NO: 209437 - DNA, 492 bp, Glycine max
caagagagggaagcagctgctctacttgagtggagagtgagtcttgacaaccaaagccaagcttctttgtcatcatggtccagtggtgtaagtccttgcacgtggaaaggaatcgtttgtgatgaatccaactctgtgaccgctataaatgtggcaaatcttgggctaaaaggtactcttcacagtctcaaattttcatcttttcccaagctgctaactctggatattagtaacaacagttttaatggaatcattcctcagcaaatttctaacttgtctagagtttctcagttgaaaatggatgctaatctttttagtggttcaatccccatttccatgatgaagttggctagcttgtctttgctagacttaacaggcaataaactttctggtaccattccatcaattagaaacttgacaaatttagaacatcttaagctcgcaaacaatagtctctctggtcccatcccaccctacataggagagtttgtg

SEQ ID NO: 209438 - DNA, 383 bp, Glycine max
tttccttttttttttttattattttttttttgaggcacgagataaccactttggaccgtatatatatagagagagagaataccaagcacactgattacaggatgatgctctctttaagatgggaagccgatcttatcagatcacataggtaggtggaaataatatctctagcaatctaactagagaaggtcgttcttgcacaacacacagcacatgagaaattaatggatacacaatctcattctcatggtgctcaagatgcatggactaattaagcaacaatgttggtccgataggaagtgcccacagataaattgggtgcccataaaaaggccttgcttccaaggaaatggcaaacagggttagttccatgaacaactccc

SEQ ID NO: 209439 - DNA, 478 bp, Glycine max
gcaattttctattttcttctctcatggcttcagattccaaaaaggatttccctgctgatgacaaagctggaacagcagagaataaagcattcaaagatgaaacgtcatctaaagattctccagcagcacgaagagctactacagctacttctggacctgcaactggttttccaggcaaccctttagatttctctgcaatgtctggcctgctcaatgatccaagtatcaaggaattggctgaacagatagcacaagatccatcattcaaccagatggctgagcagcttcagaaaacttttcaaggagctccacaggatgctatgcctagctttgataatcaacaatatttttcaaccatgcaacaggttatgcagaatcctaattttatgaccatggctgagcgcctgggtaatgcattgatgcaagagccatctatgtctgccatgcttgaaagtttttttaatccatcagataaaga

SEQ ID NO: 209440 - DNA, 435 bp, Glycine max
gccacgaagcaatgtagtccaagtaaaattgaagcctgaataaaatcatgacggccctaatcttcaaaatcatgccgggggacaataaatgcattacaagaaccttgataacaaattctatggggactcacattcaacaacgttaatcaatttagtttaacccacaacggttggaagaaacccaaagataaattacaaagtcgggcctttttcccctcagtttcccctttgcttgttggggaccgcatggcatcatgcattgcaattaccgaaaagcatttttctcaagtagcttcaggacttcattttgattggttagcttcgcaacatctattggagttttaccatccatattctggagagtaactgcagcaccattttcaaggggaagggccacacattcctttctgccataaccagctgcataatggagag

SEQ ID NO: 209441 - DNA, 497 bp, Glycine max
aactctgcaccaacaatataaattggttaaagagaggactatatctggagattcatactatggctctcacgtgatgcagtatggtgatgtagggcttagcagagatgttctcttccattatttgggtacagatcctgctaatgataatttcacttttgtggatgaaaactccttatggtcaccttcaaaaccagtcaaccaacgtgatgctgatctcatccatttttgggataagttccgcaaagctcctgagggttctctcaggaaaaatacagctcagaaacaagttttggaagcaatgtctcacagaatgcatgtagacaacagtgtaaaactgattgggaagcttttatttggcattgaaaagggtccagaagtactcaacgctgttagaccggctggatcggcacttgttgatgactggcactgcctgaaaaccatggtgaggacttttgagaacacatgtggatccttgtctcatacgggatgaacacatg

SEQ ID NO: 209442 - DNA, 555 bp, Glycine max
aaacacacatcatattactatgtgttgtcatacatgcattgtaatgagtggatattccaaagcaattggtccctttatccctccttaatccttatgccgtaaatggcaccatcccttgtaaattgtaattgcttcttcagaaatagaattatacaaaggtagttgcaatatctatttgccaaactataaatgtaaagacccttcttcccaatcctagtagtgtcccaattgtatttacaaaggtgggacaagatatgtatatacaagtacaaccatgtaacataatgtaacaataatcatactttggtctttactagtgcacattacagggagttattatgcactgaaacccctttgcagagaactccagggattggaaggaatactgacacaagcttgtgctgaagcctcagccatttgttcattctttatccctacattgcagatgtttgcaagggacctcatgtgtttcatcccgtattgagacaaggatccacaatgtgtctcaaaagtcctcaccatggttttcaggcaatgcccgtcatcaacaagtgc

SEQ ID NO: 209443 - DNA, 515 bp, Glycine max
ggcccttaaactttcgctctctctgcttcactttctcgctttggcattttcttgggaaaaaaaaaaatcctcagaacaaaaataggtcttcttcttctctgatctaccaaagcttcaaattctccttagtttggtttgtctgtgagtttggagtgtaatgtcgccgccgacgctggtaacggaggaggaggggcggagcaccgtggcgtccgattcttcgcaatccttggactgtttctctcagaatggtgctggattgaaagaacggaattacttagggttgtctgattgctcatcagtggatagctgtgcctctactgtgccaagcttgtgtgatgagaaaaaggagaacatgaatttgaaggctacagagttgaggcttggtcttcccggattccaatcgcctgaaagggaaccggatcttttctctttaagctcaccaaagcttgatgagaagccactcttccctttgcttcctactaaagacggggattgctcgtccgggcagaaagctg

SEQ ID NO: 209444 - DNA, 540 bp, Glycine max
cacaaatatagtgttagaaccgtatggtggcggctgtaacagatgttcaattcttccaaaacaaacggattcctataatgattacagactccacaaatactaatatttcattgtagctttcatatgatattacagtggtaacaaattaacacaggaccatgacaaactcttgagggacttgaaaacaaataagtggaagggcgttaaaccaccaatgccaggatttcagtcatcatcctttgcttttcccattccggaggatccaacaataaacacttgattagacaaaagaggaaatccaggataccctaaatcctgcttttagactttaccatggccctgggagctaaaccaatggcatcagaaccttataatttcagcctttgcaaacttcatggaacctttttcccaggggcaatacccttaaaggtttcaaatctccatctttatcttcataagtgagaacatactcagaaccatgcagaagatccctcagcttgctctcactcaacatttctcttcctggagctccatgggaac

SEQ ID NO: 209445 - DNA, 448 bp, Glycine max
agagctcaaaaggaccaaagggctttaagtttactgatatagtcaataccattgatgtgctttctaattctgagactgaaatacaggctactttcactgctggtaattaacctgaaaatctggaggatcataacagtcaaggagggctctattgtagaggttttcaaagacggagaaggattcacagcagcatggtacacagacagcatatcaaatctgaaggacggtatagcttatgcatgctatgtagtgcttcttgatgatgaaggtgcacgacctttgaaggaatggatttcccttgtaggtggagaagtcacatttacgagaatacgtactaatgatcatcttcctggcttgcataatgacggaacaaggaacagaccgagggcagatatggtcgactatactggaactggagatgatacggacgacgctttcaacgtagaaa

SEQ ID NO: 209446 - DNA, 492 bp, Glycine max
agccaaaaaaaacattttaattgcaaaataccaccagtaaagcagtcagaattgagttatatcccaattccagtggaattacaaagttctatttagaatatatagaaacaagataccaataaaccatcaaaagaaaatgagaaacaaaactgtatcataatgacattgtcgacaaagttaacacttgctctagaaagagttcaaacaggcaaaataataaaagacaattaacatgacaactctaataaaatttgtgattaactataaccactcaaacctaaaagtcctccaaaaagatgtctcattgggttgttcaaattcaagcctttgaggcttgcttttcctttgccttctggatcttcaagaccttcttcacaatcttttgctcttcaactaagaaagctcggataatcctctccctgacagcacttccagacaaaactccgccatatgcacgggtgacagttctacggtttctgggtaaccttgatc

SEQ ID NO: 209447 - DNA, 357 bp, Glycine max
ctcttcccccggggcaaaacatcccggccccccaacacactctcccccccccccccaactgggggccccccccacgggccccccagcgccccccccgggaccccccccccaccccaccccccccaaaacccttagcccggccccccgccaacgccacacccccatctggccccccccccccccccaatccggcgaaaaacgcccggaccacccccatgctaccgagcgccccctgcatcaccccccttaaagcccgaaccccccccccctacttccacccccccgggcacaaaacccgaaaaccccgtgccccctcctacccccccccccccagccgggggcgcccccccacccccc

SEQ ID NO: 209448 - DNA, 552 bp, Glycine max
ctctcttccaaaacctaattttcattttttctcttcaaacaaattttcaaaatgcgtgagatccttcacatccagggtggccaatgcggcaaccagatcggcgccaagttctgggaggtggtttgcgcggagcacgggatcgaccccactggaaggtacggtggggactcagagcttcagctcgagaggatcaatgtctactacaacgaagccagctgcggccggttcgtgccgcgcgcggttctcatggacctcgaaccgggcaccatggacagcgtccggtccgggccgtacgggcagatcttcaggcccgacaactttgtgttcgggcagtccggggcaggaaacaactgggccaaggggcactacactgagggtgctgaactcattgattctgttctcgatgtggtgcgcaaggaggctgagaactgcgattgcttgcaaggttttcaagtgtgccattctctgggaggaggaactggatcaggaatgggtaccttgttgatttctaagatcagggaagagtacccagataggatgatgcttactttc

SEQ ID NO: 209449 - DNA, 381 bp, Glycine max
aaaggctaaaattatagcagttgtaaaatgggttccctaccaaccgggttttcctaaaaacggaaacaaacccgaaccgactttattgaacagttatgcaaactagacctacccggaacaaaacccttccctgaaaagagacaataatgaaccggcaaccggaaattgcagcttggtatccatattgttgtctaaaggccccggaatgaaccacacccaaggggaaattcacatattatggtggggaaacccctcctcgttcttttcctcttaaaactcaacctcatcagcagggggattccgggactggggaaactccgacaccagatcggtcatgggggtctcaacccttgggaactccattttgtccatggcttcccc

SEQ ID NO: 209450 - DNA, 380 bp, Glycine max
gagaaagaaggcctccttcagctaccttctgacaaggcacttttgtctgaccctgtgttccgccctcttgttgagaaatatgcatcggacgaagatgccttcttcgctgattacgctgaggctcaccaaaagctttctgagcttgggtttgctgaagcctaagcaacgttttggggattgttggagaggcacggtgcccataatatttctctcataaattctatggtcatggtttctaatgcgccactgtgggttcctcaaatttttagatagcttttgaatgtattttgctggacgtggtgatgatgattggagttgggttgtttttatttgtggtcgatccttttgttaaataacattgttcagcgattgcgatattt

SEQ ID NO: 209451 - DNA, 538 bp, Glycine max
  unsure (1)..(538): unsure at all n locations
gtggcagtccaattgtaatttgcaacaagggcatctaaacccagaacccaatcatcttttattgcaaacttttgtgcattggaatttggaggccataaaaaagatgcgatgctacacgcaaacaagtagtacaagtccaataagaaaagcaagatagaaagattggctagttcacacacctcaattaatacaacaacaccctgttgctgatagttattatagagagagttcgatcaattcaagcttgcaagcttaaccatggaacggtatgagataattaaagatattgggtcaggaaactttggtgtggcaaagctggtcaaggaaaaatggagtggtgaattatatgctatcaagttcattgagagaggcttcaagattgatgaacacgtgcaaagagagattataaatcataggtccttgaagcatcccaatatcattagatttaaagaagtgttgcttactccaactcattttgcaatagtcatggaatatgctttcggnggagaactgtttgaaagatatgcagtgctgggag

SEQ ID NO: 209452 - DNA, 475 bp, Glycine max
gtaaaaatcaagtaacattaagttggattgggatacacaagataattcacattatctgaagtacattgcaataacatatacttcaccaaacacaaatctaaaaactctcaaaagtccacaagtcatccttttctttcatgctcacttgccggggacgaagttggtggcgtaggcccaggcattgttgttgactgggtccgcaaggtgatcagcaaggttctccaatggacccttaccggtgacaatggcctgaacaaagaacccaaacatagagaacatggccaatctcccgttcttgagttccttcaccttaagctcagcaaaagcctctgggtcatcagcaaggcccaatgggtcaaagctgccaccagggtagattgggtcagtgacctcaccgaggggcccaccagcaatacgataaccctcaacagcacccattaggataacttgggtggcccacatggcgaggatgctc

SEQ ID NO: 209453 - DNA, 512 bp, Glycine max
gtgcagcatttgttcagctaattgaagttcgcccatctttcttggagccacatttacggaatgttattgaatacatgttacaagtcaacaaggatacagatgatgaagtagcccttgaagcttgtgaattttggtctgcttattgcgatgctcaactgccacctgaaaacttaagagaattcttgccccgtcttattccagtattgctgtcaaacatggcttatgcagatgatgatgaatcagttattgaagctgaggaagatggttctcagcctgatcgagatcaggatcttaaacctcgatttcacgtatcaaggtttcatggatcagatgaagtagaagacgatgatgatgatgttgtcaacacatggaatttacggaaatgcagtgcagctgctcttgatattctttcaaatgtgtttggagatgagatccttccaactcttatgcctattgctgaggctaagttatctgctggtggggatgatgctcggaaagatagggaagctgct

SEQ ID NO: 209454 - DNA, 300 bp, Glycine max
gattaacaatcatcattcaaaaaccacacatgataaaactttgtccaaaagaaaacgaaaaagtgcacatcatcaaacacgatataggagatatttgacacactctaatcatcaaacacgatataggagatatttgacacactctaataatcatcatctccttcaccatcatcatctccatcaccagactcggcaccaacctcctcataatccttctcaagagcagcaaggtcctcacgagcctccgagaactcaccctcttccataccttcacccacataccagtgcacgaatgccctt

SEQ ID NO: 209455 - DNA, 611 bp, Glycine max
tcttgtgtcccaccctgcatctcagcagagccactctgggtcactacaatgccattgttaacttcctctttgtttcacatggttcctctcttctctcttcttttactctcactcatgattcgttatggtacttctcagggtccaccttcacctggctactaccctagttccaaaactaatcctgttagctttgatgagggatttagaaacctttggggacctcaccatcagaaactagaccaagactcgttaacaatctggcttgactcctactcagggagtggattcaagtcacttcactcttatcggtctggatactttggtgctgcgattaagcttcaacctggctacactgcaggagtcataacatctttatacctttcaaacaaccaagactacccaggacaccatgatgaaatagacattgagttccttggtaccacgccagataagccatatgtcttgcagacaaatgtatacatcagaggaagtggagatgggaacattatagggagagagatgaggtttcacctttggttcgacccaacacaagattttcacaactatgctattctgtgggaacccagtgagatcatatttttagtggatga

SEQ ID NO: 209456 - DNA, 496 bp, Glycine max
aaacaatcaccaaatagctagcgaaaaagaagtgtaaaattaaggtaaagagttatagcattcctggcatgacatgagatgacaatatagcatataaacgaatggaagaagcatgggggaatgatgatagagttgctcacaaatcatagggttgcttgccagtgaacttgacctcaataggactaacattcttaccaatagacctgaagttctgaccaaccccttggcgtccggcgttgaccttctcagggtacacaccatccttggggtgcaaatactgaacctccccattggggaagaccctgtaaaactggtacttgatcttgtactttgacctgagcctagtcccaagagccaagcactgctccttcctcgccaacttgagaaggttgggaccctccctcatgatggcagcgccgccagtgggcatttaaagatctgttctttcggggagtcccatgtgatgacataaaactcctccacttgggccttgcgc

SEQ ID NO: 209457 - DNA, 285 bp, Glycine max; identical to SEQ ID NO: 209421

SEQ ID NO: 209458 - DNA, 479 bp, Glycine max
cgcgctatcactgattagaacctaattgaacaccaatattgtaggagttgtgtactaaagaccggttaaagaatatgtagttcaagacaatcaagtcactacatttttctcggatgaaagttcataaacactaggtataaggttcaaacccgaaaggttccttataccgaaatacaatatcacatgttctttctcttattttttatacaaattatctttcggaaaatatattttaaaattttaaattatgtgggggaatgttggtaaatatttgtgttttaatttaaaattgataaatatatattaattccatcttataaaataaaatatttatttgtagattcatcttaagatttggttttaatgagtgaaaataagttgttagatctgtatagacaactattagttagtttccaacggtcatattatgtttgttgcttaaggtgatctgtgcctatctatgatcagacattagtcct

SEQ ID NO: 209459 - DNA, 527 bp, Glycine max
aggaaataaacagtattggcagatgatcatacatgtttcacacagaaggatcagtgtttagttttaaatttttgtacaaaagtagttaaatcatgctgttcatcgagttaacaggttcacagtgtcatcccataaaaatttagtaaacaaaaccatttctaaattgcagcaagttcagaatcttcataactcctgactgtccatcatcggcatcgatgtcactcaactctggccatcaaggctccgctgggcaccggccccgccggtgccataggaagcgtcctcggcagcggactgccagacggactgccatgcctgggagggcggctggacataaaccccggtggcgggatcgacggcggggcggccaatcatcatcccggcaggctgtccaatgggcgggtagtagtaaggcaccccactggcggtggcccccacaagagcagcgtcgtccttgatctcgtcgcgggggacaatatcaacgaggaagtcgaaaatgtcggtgcgggtgatggcggcggcgatgt

SEQ ID NO: 209460 - DNA, 565 bp, Glycine max
gaaaacttagctccatggaatagagtttcttataacactacaagctctaaaaaccattagacaatgaagttattaatagtcattcctccctgtagaagtaggggcatcacaactactgattaatcttcattacaaaatgaagagaaggaaataaagttgtgtcaataaggaacaggtatacgaacagtggagggacctgatttcatgtcctcaacaattagatttaagagagcctgcgttatagggccttctttgccatcaccaataacctgctcatcccattgcactacagggcaaacaagaactccgctgccaagaagcatcatttcatctgcttgcttaccttcctcgacagtcacagttttcacccttatccctttaagcttaccctcccttaacaagctctcagcaagggttaaaactctcttagctgtgcagccacttagaattttgtcaaagtgtggcattataagttccttatctttagtgacaaaggccacattcatattaggcccttcagcaacaaaaccttcaccatcaagccaaatgcctacaaaagcaccag

SEQ ID NO: 209461 - DNA, 528 bp, Glycine max
gttaagttgtacacctcagccatatcataactaatcagctgaacttattaagaataatgcccccggtcaggtttcttagagatgacaaatgaaatccttactttaataacaaaaatgttcaatgcaagctcttccaatataaccaattcgcgtagttcacccctccatggaactggactttgatcagcagaaccagcaactcatagaactctggtggcagcgaaaatatactgcaaaaaattatatatagtctgatctgatccttaaaggggttcaagagaagtgtgtctgagtggaactgcggaattacattgtgcttcattcataggggtaacttgattttctcagaccacttgaagatatcagaatacactttatcacctcctagatcttctcctttggctccagcagccactcttataacatcctcaatcaatgcaaagtttcccatgatgtcaacatgagcaccactttgtgtgccccttcccttagaggttggctggaggagaatgatcatattctctaacg

SEQ ID NO: 209462 - DNA, 414 bp, Glycine max
aaaaccaggaagggcccaaaccggaaaaaaaaaacctaaggcccccgaaattacaccatccccaaaaccccaatatcgggaaccggaaaagcgcgtccgaacgcccaaaccgcccgcagggaaaaaggcccccccgggcccagagtccttcccaagggccccgaaaacccctaaaggggggcccccccgaggggcaaaagacccctttcagggcccggcaaacacggtaattttccccgccctttaattgggccccccccttttaccggccggggggttcccccccccaaaaaaatggcccaaaccgggcacccctggaaaaccggttggcgcccatgagaacctgggagcggggcccccctccggaaaaaccccgggggttctaaggggggcccccctttgaaaaaaccccgg

SEQ ID NO: 209463 - DNA, 538 bp, Glycine max
agcagcagcaagttgtcccttcataagatacggaaagaagaatgagtcaaatttttcactaacaactagcaagtctcaaaaaaaaagttcatgagaccacaaaaacatttgaaaactaagctccatggaatagagtttcttataacactacaagctctaaaaaccattagacaatgaagttattaatagtcattcctccctgtagaagtaggggcatcacaactactgattaatcttcattacaaaatgaagagaaggaaataaagttgtgtcaataaggaacaggtatacgaacagtggagggacctgatttcatgtcctcaacaattagatttaagagagcctgcgttatagggccttctttgccatcaccaataacctgctcatcccattgcactacagggcaaacaagaactccgctgccaagaagcatcatttcatctgcttgcttaccttcctcgacagtcacagttttcacccttatccctttaagcttaccctcccttaacaagctctcagcaagggttaaaactctctt

SEQ ID NO: 209464 - DNA, 315 bp, Glycine max
ataaattaactacataatttcaaggcttcgagtaattgagatcgaagccgaaaacaaatacattgatatagagtagcattcctgttataacatttccaaaaacaggttcgtttcctcattttttagggatgtccaaatatatacacaaaatgggattaatttatattacagaagttatttatccttcgtatcctcaggcaaagcagatactttgcagataggacataatttcttcatagatagccactttttaatgcagctcacatggtagtcatgtccacaagtttgaagtgttccaacactcgtccatatttc

SEQ ID NO: 209465 - DNA, 309 bp, Glycine max
tttaattcttttctctcccgttatatatatagtatgggcttatatatatatatcctactcatgaggaactgtgattgcagttcctaatgcatattttaacgcggcgccaaggagcatttttgtgcttctggttgtctgtgctttttgtggtagtagacttttgctatggtgaccatagtacagtcgaggtagtagggttgggagaatgcgcagattgcaaggagaaaaacattcaaactagccaggctttctcaggtttacgtgtgacagtacactgcagggcaccaagtgaaaactttaaaaggagag

SEQ ID NO: 209466 - DNA, 411 bp, Glycine max
gttaattaacttgttctcgttcattactactaaaaaatggtttccaagatacaaatattaccaatcttaggcgtgtgggccatgttacttctgatctcctcggaggtgttagccactggattacatggtgttggtgttggtattggtggtggattacctggtgttggtgttagcgctggattacctggtgttggtgctggattacatggtgttggtggcgctggattacctggtgttggtgctggattacatggtgttggtggcgctggattacctggtgttggcgctggattatctgccaacgctggattatctggtgctggtggcgctggattacctggtgttggcgctggtgctggtggcggccgtcgtggtcgtgctggcttccctttttatcatgccagtttccct

SEQ ID NO: 209467 - DNA, 525 bp, Glycine max
  unsure (1)..(525): unsure at all n locations
ggattaaaagtgaatctttatgtataatatatagactagtgtttcatctaatgacattcacttacaaaagtcataataaaagatggtacttaattaattatacaagtcaagatcgagggatgatgatagtggaagcaagatgaatgtcaaacataacttcatttttagaagtggaaaaacggattattccacccaacgcaagtgactccaatgtaggttgcatattattgtgagttgaaccaaaaaaaaaaaagattaaatttgaacctctaaaatgaagttcaaatcctataaaaacctaactttttagggcttttaattaatgggtttttgcaagacaagtctgttcattttgtgacctctaattacttctactgactatatatcttgaagaaatgggtaatctgtgtatccaagcacagggtcatgggtggaaaaggtggtggcatcgggttcgtttaactgagcatcgagctggaatcttgtggngagatctggatttgccagaaaaaggcgcccataagc

SEQ ID NO: 209468 - DNA, 527 bp, Glycine max
  unsure (1)..(527): unsure at all n locations
ctagcttggacgagtgaattagattcatcatcaagatgtcgtctctgatagcagaagatgtgaagagcagatcagaggtgtaccacggggacgaaatgtgccaagtgaagtccaaggagcttctcaaggaaatcgccctccccaacggccttcttcccctcaaggacatggaggagtgcggctacgacagacaaaccggcttcgtctggctcaaacaaaagaagagttacacccacaagttcgacaagatcggaaagcttgtctcctacgcgcccgaggtaactgctcatgtccaacaaggtaaaattaccaaactcaccggggttaagaccaaggagctcttgctctggatcacgctcagtgatatctatgttgatgaccctcccactggcaaaatcaccttcaagacccctgccggcctatttaggtcttttcctgtctccgctttcgagattcaggaggagcctgaggctaaggacactactnagcgcgtgccggataccgctgagcctgtgcaagtcaggaac

SEQ ID NO: 209469 - DNA, 537 bp, Glycine max
gaacatgaaatttttctgaaagccaaaatcaactaatttcagaattcaatctatcaaatgcaatatcaaactataactcgtccacaccatctcaaacatagctatgctcccagattctaatcaaagttcttaccattgaaaacaactttgccagtacatataggaaaactaacgataaagaaaaaagaaaagtaatagttaccaacttggttttgcaaacaaaataaagaacatcacaaaacaggtcctgctatgattgatactactagggggctagcattatcctccattacaaccgatgaatctcaaaattgaaatccctgacatccttgataaaaattaaactagtagaagaagcccaataccttaccaccaacatttttcctcctagcctcttcatgatccatgatgccagcagaggtagtcaatacaatatacccaaactgtcttgaggggagaagcctagcagtccaaccttcaatctctttgacgcccacatcaaaacggggactaataaccccacacttgttcagtcta

SEQ ID NO: 209470 - DNA, 480 bp, Glycine max
ccgcaaactcattctgggcggcgatagttttatcgttctctatctccaagatggtcggagaacacggtacgatgtcacttgcctccgatgatcagaaaacaccacttcttcccgtgcacgagccaatggaaggaacacgcaccagcgtctccttcagcatcaaaacaattctaacactggaaaacttgtacgtgattctgggacctatgctgtctcttttcatatgcctcttcgtgaagctcgacgcgccacccacaagccagaaaatgcttggtgtgattgcgtgggtcttcgcttggtgggtcacgcaggccgtgccacttcccgtgacttccatgtgtcctctgtttttgttcccaattttcgggatagcttcagctgatagtgtggcgcactcttacatggatgacgtcatcaccctcgttttgggaagcttcattctcgccctcgccgtcgaacgctacaacgttcaccggagat

SEQ ID NO: 209471 - DNA, 285 bp, Glycine max; identical to SEQ ID NO: 209421

SEQ ID NO: 209472 - DNA, 561 bp, Glycine max
  unsure (1)..(561): unsure at all n locations
agaaacgtgaaattaagatcgtaaaatccttaatccttctcagcctctaatggtaagtactagcgtgactcatttaaataggacaccaagtaacgttcctcagtggcagaacacaggcgggtacaaactgtaaaatgacaatacaacttacacactagcatccaatcatgaaaacccaaactaacaagataactgcagttctgagaaatctgaaaaagattcgaagtgaaagccataattgcttttaagttctaattgctagaacgcaactccggacgaacaaagtctgcatctggtggcacagaaatgtctactgtgggtctcagttcagcgcanactttaatggctccgtgcactgggtctgacaggaagttgctgattaagtccctgttacaggagttccattgtccacagccaccatggcctgctgggttaggatgtagtcaaatcgtggagcccatttcctcgaacccaacctagctgtggttgaacagttatcaaccatgaaagaaacaccacgagcatgcatgaaaggattcaaagagtcaactgcctcgatga

SEQ ID NO: 209473 - DNA, 459 bp, Glycine max
ctctgagaagacgtgtcggtagctgaagcattttataagcctccactttcctgaactagttttaacatacaatctttcaagtacacctccccagcttccatttaagaatggagatcactagaataggccaatggttaagtcttctgatatgtgtactactattactgcagacagaaggggttcctgtgggaatcacttttgttgaaaatgcagtggcaaaaggggctgtttgtttggatgggagtcctccagcttaccacttccacaggggatctggagcagggattaacaactggatagttcactttgagggaggagggatggtgcaacaacgttactacttgccttttccgtagggacactcgattaggttcatctaagaaaatggatacatcactttccttttctgggtttttcagtaacagtaaaaagttcaatccagatttctatgattggaac

SEQ ID NO: 209474 - DNA, 466 bp, Glycine max
attagaattacagatataccctttattgataataaaaatgttatgtttacatggtagacaattatcatcctttatcaggttgcctacccttacactttggaaccttttaaatcatcaatcacagcttgttttttgttgatgcaacaatcgaacccatactttgatggtttgagatctcaaaccacaaagccatgagtgcaagtgacacatctcgttcaataaaaactagataactaataaagtatagtttgtagtaataaataaatgagcatactcttttaaatgaatctatacgtctggacgctcattctgatcaaaaatacgattatggcaagtagggttgcaagggtaggcacaatctatctcacggaagggccttcgatcataaaaccaatcacccactgcctttgcaattgatgtcttggccaccactggggagtcatttctcagccatgtctcttgtatt

SEQ ID NO: 209475 - DNA, 524 bp, Glycine max
aaaccaaaattaaatttcaaataataaaaagtacaggatcatcacaacgttcttccaccgaaatttcccacaataataatccaaatgtcccccaaaaaatacaagcggcaataataacaaatccgtgtcttttaaaaaacaaaaagcggttcgatctatttcggatcgatttttatcaacgaaccgcgcatccgtgacgcgtgaacccgatccgcgaccggtccaaatcgaactcaaacaagtacccctgctgcatcagattcccaatcaccgaaaaccccgaatccggtcgaaccggctgaaccgcaagacacttaactccctccgccggttcaataaaataattacccaccggcggcgacagaaccgctttcccggcgagccggaatctcagccgcggcagcttcggcctcgccacgccggaaacattaacacaaaggtcgaaccccagcgcggcagcgctctccaccgccggaagcctcacgcgccgtcggaacgccgcgaggatcttcccgtaagccggc

SEQ ID NO: 209476 - DNA, 560 bp, Glycine max
gaacatgaaatttttctgaaagccaaaatcaactaatttcagaattcaatctatcaaatgcaatatcaaactataactcgtccacaccatctcaaacatagctatgctcccagattctaatcaaagttcttaccattgaaaacaactttgccagtacatataggaaaactaacgataaagaaaaaagaaaagtaatagttaccaacttggttttgcaaacaaaataaagaacatcacaaaacaggtcctgctatgattgatactactagggggctagcattatcctccattacaaccgatgaatctcaaaattgaaatccctgacatccttgataaaaattaaactagtagaagaagcccaataccttaccaccaacatttttcctcctagcctcttcatgatccatgatgccagcagaggtagtcaatacaatatacccaaactgtcttgaggggagaagcctagcagtccaaccttcaatctctttgacgcccacatcaacacggggactaataaccccacacttgttcagtctaccgttcaattcaaccacgatttt

SEQ ID NO: 209477 - DNA, 486 bp, Glycine max
aatactatattgtaaaataaatatattactgaaaacttgtcaccgttagcattgagatgcttattaaatcatcaaatgaattattcgagaggaactaataattattcagtgaatagtatgattcttaattgaaccatacaactctgcacagtgcacaaaatgcagaatttttacaaactgcaaacatcaaggttcaagtggcttatcgttttcttgcttgtagaaggtttcataagtctgcactcttggctttgattctggtaactccaactcttgcctaaagccatcagtcatcttgacgaaatcattcatgtgaacttgtttccattcctcaaaattccactctgcatataagttaggatcattggggtggctccaaacataagcgcaaacttgtaacttttcagacttgtccttcaaggaaacctcaacatcagttctagtatattcaacatcctcaaattcatctaaaatatctagttctac

SEQ ID NO: 209478 - DNA, 395 bp, Glycine max
agaactcaatacatgttttattattattaactattttaacatgcttttgattgaatgggcctattaactcaatgttcacgcaagaattcccaagagaagaggagtagaggcttttcatagaaaacctgaccaacatttaatagactctcatgaggaacattgaagatcacacttttttccctgcatatcttcccgagaaatgcctatatataatcaacagctattttcttgtggaatcttgaatcccttcttgccctgacaactgggttttctaaaatgggaaccaccccagcattcctgcagttgtttaagaacttaacttcattgacctcggtgggggtgctaacatgacccgaggattgaatagtttcattaatgtgcaatggagatgagac

SEQ ID NO: 209479 - DNA, 482 bp, Glycine max
caaatgaaaatcctggtatacatataatcttaacacaatctaactacaagtagtatatcaactccaaattacgggatttcgttaaaaacagttttatcctaagcccgttacttaagccagggaagacctcagtttacccacaaggggtaagtttcttatttccagcaccacgtggattatcatccttccagtcatcccaagcccttgctttctcctgtgcagcatcatcatcttcatcatcatcggcttctcctagctttgacttcctatcattgtgccaagatgaattgacttcttccatgagtttgacatttctctcttgccatttgttcattatttccatttcttttagcccggcctcctcaatgctcatagctggcatcctatgactaggttggaagacctgagctgccattctttctctctcagttgctatgtttccatttacaaggctagctggtccaaatattaggggttgatgc

SEQ ID NO: 209480 - DNA, 593 bp, Glycine max
  unsure (1)..(593): unsure at all n locations
atcgagataactagaaacagtgtgatgaaaatgaaggtccttgttttcttcgttgctacaattttggtagcatggcaatgccatgcgtacgatatgttccctctccgaatgaacactggctatggtgcccgtactccggaggtgaaatgcgcaagttggaggcttgctgtggaagcacacaacatctttggctttgagaccattcctgaagagtgcgttgaagcaacaaaggaatacatccatggcgaacaatatagatcagactccaaaacagttaaccaacaagcttacttttatgccagagacctcgaagtccatcccaaggacacatttgtgttcagtatagatggcaccgtactctctaatattccatactacaaaaaacatggatatggggtggagaaatttaactcgaccttgtatgatgaatgggttaacaagggcaatgcaccggcactgcccgagactcttaagaattacaacaagcttggtgtctcttggcttcaagattatattcttgtcaggaagaacactggacanacaggccgtacagaagcaaacttaaagaaggcttgctaccacacatgggaaaa

SEQ ID NO: 209481 - DNA, 408 bp, Glycine max
gggaaaacaggggccaaaattttttaaaccccccaagaaaaaaccccccaaggggaacccctaaaaaacactgggcaccccccgcgaaaaaaccaaaaagggaaaccgggccccccttttaaaccccttttttaaccaaaaaaaagaaggggcccaccccaaatggggaaaggggaaagcccccccgaagggcaccccggggaattggaaacccaaagggccccttttcccccctggggccccccaggaaaacccccccttgggccccaaaaacccccaaaatgggggaccccccccctaaaaaaaacccttcccggggggattatgaaaaaaacccctttaggggggaaagaccctgggggcccccgagaaaaaaaatcccccccgggggggccccccccctcttta

SEQ ID NO: 209482 - DNA, 202 bp, Glycine max
cgcaacacaacaaaaaaagacaacccagagagcgcgtcttaataaacgctcttctctgaaaacccccatttcttttcttctttcttcttctctttcgcttcttcgatcttcgatcttcgtcgctgaaaatgagagagtgcatttcaatccacatcggccaggccgggattcaggttggaaacgcctgctgggagctttactg

SEQ ID NO: 209483 - DNA, 573 bp, Glycine max
aaaactctaaatttcaccaagcaatttcaaataaatgttttcaccacacttcacataaagctccaaaagtaccggaacaaggcaagttccacggaaagtacaacgatacacagagcacgagaagaaaaacaacacagaaagtaacataatagtgcaaacttctaatcataatcctctccttcatcaccatcttcagttgcctctgcaccaacttcctcataatccttctccagggcagcaagatcttcacgggcctcagagaactccccctcttccataccctcaccaacataccaatgaacgaacgccctcttggcatacatgaggtcaaatttgtggtcgatgcgagagaagacctcaacaacactggtggaattggagatcatgcacacggccctctgaaccttggcaagatcaccacctggaacaacagtcggaggctggtaattgattccacacttgaacccggtggggcaccagtcaacaaattgaatagtgcgcttggtcttgataattccaacagctgcattaacatctttaggcactacgtcacctctgtacatgagacagcac

SEQ ID NO: 209484 - DNA, 423 bp, Glycine max
caggaagaccactgtatcaacaggctgtaactgctaccaacttaaagcttgctggatactacaaatgggaaaagttaattaccaaggatacagataaatacaatggtaagacagcagttacatacaaatcaactgagaggcagaagctggaggaaaatggatacaacatcattggaaacattggagaccaatggagcgatatattaggaaccaacacaggccttaggacctttaagttgcctgatcccatgtactacattagttgaggtctctaggctcttatgaatgaaatgagatatgtagtaattaataatggagagacttaacctaggggcactcgttattgctatgtttcatatgtatgtgactttgtgtgagacagtagttacgtgagactgcacaagcacaacttaacgttgtttt

SEQ ID NO: 209485 - DNA, 464 bp, Glycine max
aaaacagaagcggaagttttggtttttggataatcacatatgcctacacaggggagtttgtacacatacaaaacaagttcttgagtctcaaaggactatttaaaaaaaatcaaggggaaattaataccaattgtaaagacagaattcataaccccaaaaaattcaaattttgatttactttaaatcatccagtttaacctcatactgttcagcagtagagagaattttgacaccaaccacacccctttgccatttaaaattccccactaacacaagccggtcagcatttaatcgggctgcacgtttaaaaacccatttaagggggttggtttccaaaaccaactcaacaatttgccctttttttttgaaaatgttagcgaccatagcagcacattcttgaagatctttgtccaaggcacacacaatgtcatttatttgcaagttaagctccggtaacagaccct

SEQ ID NO: 209486 - DNA, 512 bp, Glycine max
  unsure (1)..(512): unsure at all n locations
ctcacaattcatgagtgatgacaaattgaagaagcacttccgtgagtcttaattaaagagattaaagagacacaccattcattcgctcactcatttcatttcaaacaatgtcaatcgctgcttcagcttcttcacatgcttgtatttcctcaatccccacatgcatcccctcttcctcttccaaattctcttcttcgctgacactttcttcactccaaagaggctcaaataagagatcgggatgcagagccatggttcaacaagccgttcagggtgcccctgctgcgtatgccaaagaaatggaacgcctttctgccaaagaatcgcttcttcttgcttttaaagatgcagggggttttgaggccttggtctccgggaagactacggaatggcaaaagattgatgtgaatgaaaggataactggtcttgagaggctcaatccaacacctcgccccacaacgtcacccttcttggaggggcaatggaactntgagtggtttggttctggaagt

SEQ ID NO: 209487 - DNA, 543 bp, Glycine max
acataacaaagcagaatttcatttgattgaatgcacaatttcttcacattacaaaactctctaatttgtacaaaaagtcaatgaatcctgatttctgacaaatttagaacattgcagcttttaatcttcttcccaactcctttctcatcaattgcctatcaaaacctgatgcagccaaaagccctctattttcttcagcccttctcagaaggtaaggcataaccatatctaccggcccaaatggcatatacttgctaacttgaaaccctgcattgctcaaaccaaaggaaagtgcctctgacattccatacagttgtgcaaattctagcttgtggtttacctttccaacccccaattcatatgcttttgctgcagccaatttccctgattcaatattgtgagttgcaagaacaactgaaattgaaccgggtccattagcaatcttttcaagaagaaatgatgagcagccattgaagcaattgtgtgtttcttgaatggtattgtgaattggggatgcatacccaaatgactcagcccatttac

SEQ ID NO: 209488 - DNA, 642 bp, Glycine max
  unsure (1)..(642): unsure at all n locations
caacggtccggctgtttgatggcacctcggtanaccnagcaataccgatctcatttcctttggcttcaggataggcctaataagaaaacaaataattccaattcatatatgaacatttttgcctccttatttcttgaaaatgtggaattggaattccccgaggaattccgatctcatttcctttggcttcaggataggcctaataagaaaacaaataattccaattcatatatgaacatttttgcctccttatttcttgaaaatgtggaattggaattccccgaggaattccgatctcatttcctttggcttcaggataggcctaataagaaaacaaataattccaattcatatatgaacatttttgcctccttatttcttgaaaatgtggaattggaattccccgaggaattccgatctcatttcctttggcttcaggataggcctaataagaaaacaaataattccaattcatatatgaacatttttgcctccttatttcttgaaaatgtggaattggaattccccgaggaattccgatctcatttcctttggcttcaggataggcctaataagaaaacaaataattccaattcatatatgaacatttttgccttcttatttcttgaaatgtggaattga

SEQ ID NO: 209489 - DNA, 443 bp, Glycine max
gggccaatcagaaatacatatcacacagagaaagaataaagatttaaaagtacatggggatgcgatatgacagtccagggaatcaacaaatggaaataacagcctgttctgaaattgccattgaaccatgacatgttagaagcagaaccctattgggatctcctaaaagaggattgctttaagctgatctcttaaagagcttatattcttccacccaggcataaatactaagacagcacccgggcgttccttccgacatatatggcataaaacagcctcaatgagattaaacccaatgcagtcaggggcccaaaatgctagtgattcacgtgccttggagctatatttctcaaagcttgatttagaaagagcattcttaacgagagcagcgatctgggttttcctcttccgaggtgctaggtgcttttgtgtcttccacaatt

SEQ ID NO: 209490 - DNA, 452 bp, Glycine max
ggaaaaggaaggagactttcatatatatatttatgtgatattgatatagaaaatgaataggaaagggttgtacatcagtgaccacgcaagaaacatgagaaatgaactagagctaattaattaacccctcgtctcaatctcatgatggaacaattttggagctacgacgtggtggcactgatgatgatcgcagaagaaaaatctcttaactggagtaagggggtggcttaggcatatccttgacgattccgcagacaagctgggtctctgggaggttgtactcatccctaagggacctgttgggagacaagacactcacgtacaattgctgtcccaggtaacgattctttgccatctccgacctcaagttccacattccagcgttgtcaaaagtcaacatgattgcggcccaagactttgggaacacctggatggtgtgcctgctgacagca

SEQ ID NO: 209491 - DNA, 561 bp, Glycine max
catagtaaatggctaaacaattcttttataccccaagcatatgaacacaacatccattcctaaataacctctaactactaaccctaatgtacatcccaaatgtaaaagcgctactagcatgtttggataatacataagaatcaattctaccccacaaaatcatggtgataccgataccatgaaaaagtagaagcaactatttgttgctttaccttcaccatgaaaaattaattgattattttttaccataaaactaatccaaacgcacttttatactagtaaatcactactgaagagacccctttatagtttatagtgattcaaggaaaccagtttttgagagtacatcattccttactttgctaagatccctacctttgagggttctcccagcaccttctaaaacagaaaatgaggaaatccgactccttgcaagccttctggcataaactcatgtggaggaagctgggaatcactctcatcattttcctctccatcctcatcactatccccaccataggtagcagcaccatcaccatcatattcatcatcaaaccttga

SEQ ID NO: 209492 - DNA, 526 bp, Glycine max
gaggcacgagataaccactttttaccatatatatatagagagagagaatacgaagcacactgatcacaggatgatgctctctttaagtagggaagcagatcttatcagtacacataggtaggttgaaattctagctctagcaatctagctagagaaggtagtacttgcacaacacacagcacatgataatttattttatacacaatctcattctcatggtgctcaagatgcatggactaattaagcaacaatgttggtctgataggcagtgtccacagataaattgggtacccataaaatggccttgcttccaaggaaatggcaaacagggttagttccaggatcaactcccataagttgatgaagcatttgatgattcattccagaagtatttgagtggcaaatagcaagtgcctgagttttggttccatcaccagccaccaatggaaccatgaaagctgttgtttcacggacttcatggcaggaaaatactgcagttctgaaatttagcctatgacacatcact

SEQ ID NO: 209493 - DNA, 308 bp, Glycine max
ctcaagcgcagctccatatctttctttgagattgagaaacatgaaactgctgtttctcgttggtccagagctagaactagagctgctaaggttggaaaaggtttattaaaagacgataaagctcaaaaacttgctttacagcactggcttgaagcgattgacccacgccatcgctatggacataatctacacttctattacgataggtggcttcagtgtcagagcagagaacccttcttctactggctagatataggagaaggaaaggaagtaaatcttgagaaatgccctggttccaaacttcaaca

SEQ ID NO: 209494 - DNA, 603 bp, Glycine max
  unsure (1)..(603): unsure at all n locations
cattattgcaatgactagcctagaggtaattgaggaatgcaatgcattctacatagcaggacaagaaaccacatcggttttactagtttggacaatggtgttattgagtagatatcctcattggcaagaacgtgcaagggaggaagtattgcatgtttttggtaaccaaaagccagactataatgggctaagtcaccttaaaattgtgaccatgattttatacgaggttcttaggttatacccacctttaatttattttgctcgagcgatcaagaatgatgtgaaacttggaaacctttccctacctgcgggagtgcaagtttccttaccaatactattgattcaccagaatcgtgatatttggggtgatgatgctacagagttcaacccagaaagatttgctgaaggagtagcaaaggcaacaaaaggccaagttgtgtttttcccatttggatgggggtctagagtgtgcttaggccaaaattttgctttattagaagcgaagttggttttgtcattactcttacaacgcttctcattngagctttctcctacctatgcacatgctccagtcactgtgctcactcttaatccaaaaattgg

SEQ ID NO: 209495 - DNA, 571 bp, Glycine max
ggccgaggagctctatgagaagaccgtcgaactccccgaccccaactccaccgacaacgccgagtttcagatcgtgcttaccatcatcagagatgggttgaagaccgatcccaccaggtaccgcaagatgaaggagcgtctcgttggggtttctgaggaaaccaccactggagttaagaggctctatcagatgcaggcgaatgggactcttctcttccctgctattaatgtcaatgactctgtcaccaagagcaagtttgacaacttgtatgggtgccgtcactctctccctgatggtctcatgagggctaccgatgttatgattgctggaaaggtggctgttgtggctggatatggtgatgttggcaagggttgtgctgctgcaatgaagcaggctggtgctcgtgtcatcgtgaccgagattgatcccatctgtgcccttcaggctctcatggaaggccttcaggttctgaccttggaggatgttgtttttgaggctgatatctttgtcaccaccaccggtaacaaggacatcatcatggttgaccacatgaggaaaatgaagaacaat

SEQ ID NO: 209496 - DNA, 550 bp, Glycine max
  unsure (1)..(550): unsure at all n locations
gcgttcttcaatttattttctttctgcttctcatggatctctcctcactctcttcataccgcactgtcggagtaacaccttctgatcctcgaaaatcacttcctcaatggggtcttcatttcctctcctacactcacaggctcaaccagattaagaaaaggtcaagtggggtatatgcatcactatccgagagagagagaggagagtattattcccagagaccgccaactccgctactagacaccgtcaactatcctattcatatgaaaaatctctctaccaatatgaactgcgttctgatgttattttcagtgtttctagaactgggggccatttgggctcaagtcttggtgtggtggaactcacccgtgcactcactatgtctttaatgcccctcaggacaagatactctgngacgttggtcaccagtcttacccgcataagatactcaccggtaggagggacaagatgcataccatgaggcagacaaatggcttgtctggcttcacaaacgttcgagagtgaaattgattgttttggactggtcaca

SEQ ID NO: 209497 - DNA, 390 bp, Glycine max
acttcaaaatttcgggggattacattactttttcatattatattacacgtggggaatcatgttatgcattgtacatcgggtaaagggaaaaattgaaccccttaatatttttaaaacatgacctctagtgcctctcttgtttggcctaatatgttgaacactgttgctgctatgtgagatggtgtaagaccggctaaaaacaattggtcagcaggggatccatgggcgatataacgatccggaagaactattggcctccacttcaatttgccatctataaggccatcaagggccatgaactgagcaacatgagaaccaaatcctccaattgatcctttttcaactggaatcaaaacctcatgtgattttgccaggctgcgaataaaggaa

SEQ ID NO: 209498 - DNA, 563 bp, Glycine max
aaagaaacagtgtttcatcatttgggtttcgcagaagagagagaaacccatttctagagagagaaactcgcagtcgcagacatgtcttccttcgatgccttcgccgacgacttgaacgtcaactcttcttccactcgccagcacgacgatgacgaggacaacttctctggctacggcggctactcctccttcaccggaggattctccgccgacggagatgtcgccgtcgatcactccgccgccgcgtcgccggagatctacggcttcactgattcgaatcccgcttactctcagtctcccttcgaatcggccaccgtagagaacgaaaacggaaacggatacggcgacggcgacggtgtttttgtctccgacggtccggtgcttcctccgccgacggagatggagccggaggaaggttacgctcttcgcgagtggcgccgtcaaaatgccattcagctagaggagaaggagaaaagggaaaaagaaatgagattgaagattattgaagaagctgaggagtataaggtggctttctatgagaagaggggagctatgttgagact

SEQ ID NO: 209499 - DNA, 580 bp, Glycine max
  unsure (1)..(580): unsure at all n locations
gcctccagtggcatgaacaacgccgtcaaactttagggtatggtgctgaattggctgtgatacttatccaatctgcaatatatgtgggagtaatagcaatgacgcgtttggcaaggccaagcttctcaaagctatgttataggcgctctgataagagcatcacccttgttcataacagcctcaaattagtagctttgtggtgcatccttgctgcttacgtaacaccattctttatcattcctcacacggttcaccctcttctgggttggatcctgtatttgcttgctacttttgcactttgctcaattgcaatcaatatctttatgctaccaatgttaccagttttggtaccatggcttggaattgttggggtccttatggtcatggcatttccttggtatcctgatggngtagtgagagcactgtttgtctttgcttatgccttctgctctgcaccatttttgtgggcctctatggtgaggatagttcaaggtcttcagttatctctagaaagggaaagctttctgccagcangaattggagagtctttcgcaaatcatggtttacaagtatatgagct

SEQ ID NO: 209500 - DNA, 447 bp, Glycine max
aagaactttgtgaagcttgtttcttggtacgacaacgagtggggatacagctcacgtgtcattgatcttcttgtattcgttgccaagaagtctctttaaggtgttacttcaaagtagcttgtcttcacattattaccgtatgtttatgtttagctgcgatttagtgtcttgctcgagcaaaaaatgagaggtctgaataaatcggtttctgaaaccagtggtgttacttgttggaggagcattagctcttttttggacttttgatgttttctcttgtggagggggatcgagtttttggatttttatatactcgctgatgtacttggcttgaatacttgctaatgtacttgttattgattgttatagtagatatttgtccgtcctttttttcatttgtggttctcgtatatttgatcctgtttgctttgaatcttggattcgtggttt

SEQ ID NO: 209501 - DNA, 398 bp, Glycine max
caaaataatggacaagaagcttggcatcacgtctcatgatcctgaagtgagaaaggggccatggacaatggaagaagacttaatcttgatcacctatattgccaatcacggggaaggggtttggaactctttggccaaggctgctggacttaaacgtaccggaaagagttgccggctccggtggctaaactacctccgtcctgatgttagaagagggaatattacacccgaggaacagcttttgatcatggaacttcatgcaaagtggggaaacaggtggtccaaaattgccaagcatctacccggaaggactgataatgagattaagaactactggaggacaaggatccagaagcacctcaagcaagctttcagcagctttcagcaacagagtagta

SEQ ID NO: 209502 - DNA, 538 bp, Glycine max
ctctcttcaacgattccaaggaattcgttagcaactcccttgccattctgtctcaggttgcatcggctctttcaacaatccaaacactagcacgcggcagccgttcgttgctgtctgagaacagcaactccccagttgcttctctagacaaagctgatggccttccttcttggatgaaccatgaggaccgaagggtattgaaggctatggataacaaacctgcacctaatgtcaccgtggctaaagatggcagcggagacttcaaaaccatctctgaatgtttaaatgctgtccctcaaaattttgaaggacgttatgtgatttttgttaaagaaggagtatacgatgagactgtgaccataacaaagaaaatgcaaaatataaccatgtatggggattggatcccaaaagagcatcatcactggcaacaaaaactttagggacgggtgtcaggactttcctaactgcaagttttgtggtagagggagatggattcataggcctagcaatgggattcagaaacactgcaggccctgat

SEQ ID NO: 209503 - DNA, 547 bp, Glycine max
ctttgagagtgtcctaaagctacaagccaaggaccaagccaggatgcagtacctttctagcttggtggctaggaggtccattgtcccaattgcctcagggaggcaaatcacacaaagccctacttacatagtgaaggccaagattggtaccccagctcagaccctcctcttggccatggacactagcaatgatgcttcctgggtcccttgcactgcttgtgttggctgctcaacaaccactccctttgctccagctaagtccaccactttcaagaaagttggatgtggtgcttctcagtgcaaacaggtacggaaccccacttgcgacggaagcgcgtgtgcattcaacttcacttatggcacttcctcagtggcagctagcctggtccaagacacagtgaccctagccactgatcctgtcccagcctacgcctttgggtgcattcaaaaggtcacagggagctcagtgccaccacaagggctattgggcctgggccgaggcccattatcactcttgggcccaaacccaaagctctaccaatctaca

SEQ ID NO: 209504 - DNA, 482 bp, Glycine max
caagcaagtcgcgcttccgccatactgactctgcctgctactgagttgtgacttgggcgaagacatgctgagaactctagttgtgaagcgcagccttggtcaccactggcactcgcattctcagcacctccgactccagcggcaattctcatcatccccggagcccaactcctccgtggatgcagaaacccgcaagtacgcgggctatgctgccctcctcctcttctgcggcggcgccacctactacacattccccctcccggacgacgccaagcacaagaaggcgcagatcttccggtacgctccgctgccggaggacctgcacacggtctccaactggagcgggacccacgaggtgcagacgcgcaacttcctccagccggagaacgcggagcagctggagcgagagctgagggaggcgcggagtcgtatccggccggtggggtccgggctttcgccgacggggatcggcctttccagga

SEQ ID NO: 209505 - DNA, 509 bp, Glycine max
gcaagcaataatctgaaagaatgcatttatgcataataatccggattgtgcaccagatattttgcaaacccaagttccaaagtcaacaacttagggttgaatatacagtaaacataaaaaatatggacaatatagacaaataaccaacacagaatttatatggtgtctgattgtgggaagagcttttccaacatgttattcgaaaggatcctattggggtccaattcctttcttgctttattgtatgcatccacaggaaaccgctttcttagcctttcttggagagctgcaagctccttcttgtcctttggaacctcaatcttagcccagtgttcatatgcggagtaacaatcccataattttgcctgagtcaaatgcctataatgaaagaattcttctgttatatctttcctctgccgagcatccatggtaggaaggtacatgattatacctacccaagaaaatatatcattctcagacggacttgaagcaggactcaaggaacttct

SEQ ID NO: 209506 - DNA, 533 bp, Glycine max
  unsure (1)..(533): unsure at all n locations
agaatctgattttgaagaacaaccaattgattggaccaattccttcaactttgtctcagattcctgatttgaagattctagacctggctcaaaataatcttagcggagaaataccaaggcttatatattggaacgaagttttgcaatatctaggcttgagagggaacaatttggttggttcactatcaccagacatgtgccagttaactgggctgtggtattttgatgtgagaaacaatagcctgacaggaagtattccagagaacataggcaattgtactgccttccaggtcttggatttatcctacaaccaactaactggagagataccattcaatattggattcttgcaagtagcaactttgtccttgcaaggcaataaactctctggacatattcaccggtgatcggtctcatgcaagcacttgctgtcctagacttgagctgcaacttgttaagtggatcgatccctcctatcttgggaaatttgacttacacagaaaaatngtacttgcatggaaacaagctgactg

SEQ ID NO: 209507 - DNA, 519 bp, Glycine max
acaagaattggatttacttcacctttcaaattgtgatgatgatgatacataatatctttctttttgttcaaatcaaccaacactaaaaaaaaaaactagtactaaaactttttataaacattttcattaactattacccctcatccattttttcgcttctcttttttggtttttaaataatatacatgattcttggacttgattttcatttcaaaatccccgctcactctttcactcactgttttgagagattacttctccaaacttgaggaagagttgagcatctgaggtgctcattgaggggcagttcaccaagtgtggagtcttgaggtttgcatactcatccacgtagcatggcactttggcagatggatttaagcaggtggtagtgcagctagttgctttggtggggtgtttgacagcacaaggcttccgatacacgtgtcacttcgtgcattgtcggcctatcagctggctgcctctttgtgcataatagagcaagctgataaacctttttta

SEQ ID NO: 209508 - DNA, 533 bp, Glycine max
  unsure (1)..(533): unsure at all n locations
cataaattaagaaatcaaagagactgaaagttgagagagaagtgttcacgtctttgagaaatgggtgcttcggcatcggtcacagaaaaatccatccatgaattcatggtcaaggatgctaagggcagagacgtgaacctcagcacctacaaagggaaggttcttcttgtagttaacgtcgcttcaaaatgtggatttacaaattccaattacacccagttaactgagctttacagcaaatataaagacagaggtatggtttttttaggtttacagagcagttggtgcacttgcatgttattggattccaaatttgtgccttttcagtgaccaaatacttttagttaaactgaaggattaaaagaaattattaaatctgatctcacttgagaatgttttgttggtctgatctcaggtcttgagatactggcatttccatgcaaccagtttctgaaacaagagcccgggagtagccaggaggcagaggaaattgcctgtacanggtaccaggctgagtatcccatttttgaaag

SEQ ID NO: 209509 - DNA, 502 bp, Glycine max
  unsure (1)..(502): unsure at all n locations
caggtactgaatttgaatttgaatgtcaatggatgtcaaacaagatttttctgctgaacaaactactcagctacagtgtaatacttgtgtttcaggctcaggacaccagttgaaaattcattgagggatgcgaaactctcgtttaaggatcttgacgaagtcatccttgttggtggatcaacacgtatcccagctgttcaggagcttgtaaagaagttgactggcaaggacccaaatgtcactgtcaatccagatgaagtggntgccctttgagctgcagttcaggtgggatttagcttttatcaatgaggagaaggggataattataaagggggcgaatatctttttcttctctggatagtatattatttttgttgattaatgcttcttattgtaatttatgtttttaggctggtgtcttggctggagatgtcagtgatattgtgctgttggatgtcacttcattattcttgggtctggaaactctaggtggtgtgatgac

SEQ ID NO: 209510 - DNA, 333 bp, Glycine max
tcttaactcaacttctgctacccactctcttcttccaagtccaaccacgcttttctctacagtcatgggcaaggtcaagatcggaatcaacggatttggaagaattggccgtttggttgccagagtcgctctgcaaagagacgatgtggagctcgttgccgttaacgaccctttcattaccaccgattacatgacatacatgtttaaatacgacagtgttcacggacactggaagcatcacgatgtcaccgttaaggacgagaagacccttctcttcggtgacaagccagtcactgtttttggacacaggaaccctgaagagatcccatgggg

SEQ ID NO: 209511 - DNA, 524 bp, Glycine max
tttttctccaaagtttcggtgctgactgatagaacactacctattcagccgccatgcacactctcctccgatccactctcaggaccaagactgcttcatctttagcatatgctgtggtttccagaagtgctcacgaaaatctccttcaggctcccttattgtctagatcaaatagcactgaggcttcattggcaaaggataattcctctaatgatgtaaaaaatggtcaagggtacaaaggtcatagtatgcttgctcctttcacggctgggtggcagtcttctgatttgcaccctctgatcatagaaaagtcagagggaagctatgtatatgacattaatgggaagaaatatcttgatgcacttgctggtctatgggccacttctttaggggggaagtgagccacgccttgttgatgctgccgttgcacaactaaagaagttgccattttaccattccttttggaatcgaaccacattaccttctttggatctagcaaaggaactcctagaaatgttcacagc

SEQ ID NO: 209512 - DNA, 472 bp, Glycine max
  unsure (1)..(472): unsure at all n locations
ccctttgtgactccaaacaaagcccacacaccaacttcatttccattcacaatgtcaatttcctccacttccaactccctcattccccccaaatctttaatcccccaatcccaccccctcattcccaacatcaggcccgggctccggcccaagcctggcccatccccttccatcctcgccgtccacgccgccgagcccgccaaaaaccccgtcgtcaccgacaagcccaagccccaagcccaacaatctgcatccccggccgcggcccgtgcaaccaaatgggccgtggacagctggaagtccaagaaggccctgcagctgcccgaataccccaaccaggaggatctcgaggccgtcctccgcaccctcgacgccttccctcncatcgtcttcgccggcgaggcccggacactcgaggagcacctcgccgaggccgccatgggaaatgccttcctcctccagggcggagact

SEQ ID NO: 209513 - DNA, 517 bp, Glycine max
  unsure (1)..(517): unsure at all n locations
attatccatagaaggactcttgtccttgccagtccaaacgcattactaggtagtatacacatacaaacacaacacaaaatcaaagtgacaaccatcgattaataataaatatgtaggacaaaaaaaaaaaaagaacaaaaatatctttctcttgttggttttgaaggcacttttacactcctaaaggggcaagaggttgctgcgatctgatcctgctctttctcaaacgctcggggatgatgaaagcaagctcaagagattgggaagcattgagccttgggtcacagggtgtgtggtaacgtgagctcaagtcatcaaatgtgaccgtccttgacccaccaatgcactcggtcacattctgacccgtcatctttagatgaacccctcctgggtgggttacttcttgctcgtgcacatcaaagaatgctctcacttcagccctgatgaaatcgaaggggcgagttntaagaccacatggagccttaatggtgtttccatgcataggatcactgaccca

SEQ ID NO: 209514 - DNA, 408 bp, Glycine max
ggcggggtcggagacgccgtggcgcgtgtgagggagaacatctcctacttccagatgaactacgcgatcgtcgagctcatcgcgctgttcctgagtcttctatggcattcaatctcgctgatcgagttcgacgagctcatggcggcgtggctcttcctctacttactgcgagacgaaccgatataatcttcggaagactaattatcgaccgcgtcgcgcttatgagtatggcggtgctgaccgtcgtgctgatgcttctcaccggcgccatcggcaacatcctgtgggcgctgctcatcggagcggcgttgatagtggcgcacgcggcgttgaggaaagccgatgatttgttcttggacgaagaataggccactggattctgtccttccggggctcctctctctcgat

SEQ ID NO: 209515 - DNA, 602 bp, Glycine max
cgaaagggtcatagggtactgttgtttttagttattcgaattttgattatcgaatcgcaaaattctgaatcaatcaatcagtaattagagccattaacgactgcaatggtctgcgagaagtgtgagaagaaattatcgaaggtgatagtaccagacaaatggaaagaaggggccagcaatactaccgagggtggtggccgcaagatcaacgagaacaagcttctctccaagaaaaacagatggaccccttacggaaacactaagtgcaccatttgcaagcagcaagtgcaccagaatgctaagtactgccacacctgtgcttactctaaaggagtttgtgcaatgtgtggaaagcaagttcttgataccaagttttacaaacaaagcaatgtgtagtggatacttgtgttgtattgcgtgctgtatcttcttttagatgcataatagcattacctttctttctatttgtctagatgatcctattgctaacaatgtaactgaagctgtataaagaagaaatacagtgagggattttctgttatctgtcttttgcaatgtactcttgcattgttattctagatcaaaacatatgccatggcgtg

SEQ ID NO: 209516 - DNA, 504 bp, Glycine max
gacgtggaaagttttggatattagacatattataagggcaacgctgaaaaaacttccagcatagagcagtggaatgaattacttaggccttctcccacttgaggggtttgaccacttcccatgtgaagtcagggtcttctcttccaaagtgtccataggcagcagtcttcaaaaacctgttatttccacccctcttgagatcaaggttgatggagatcataccaggcctgaaatcaaagttttccttcacaatgttgagaatctccttatcatggatcttcccagtgccataggtgtcaacaaacacagacaaaggctcaggcacaccaatggcataagacacttgcacaatgcaccttctggcaagtccacttgccacaatgctcttagcagcctgtctcacaatgtaagcaccactcctatcaaccttggtagggtccttcccggagaaagcaccaccaccatgagcaccccatcctccataagtatcgataatgatcttgc

SEQ ID NO: 209517 - DNA, 583 bp, Glycine max
  unsure (1)..(583): unsure at all n locations
aaccaactaaggaataccctttcaaaatggcttcttctgtgtcatccatggtttctaccaccctcctcctaattaccatctgcacactgtcctcacttctgtcagttgcatctgcagcaacagaggagggacgaacaaggccattcaaaagggtctatgcctttggagactctttcacagacactggcaacacccaaaatgcagaaggtccaagtggctttggccatgtttcaaactctccctatggaaccactttctttaaccactccaccaataggtactcagatggtaggcttgtgattgattttgtggctgaagcactttcactgccttacttgcccccctaccgtcatagcaaaggcaatgacacttttggtgttaactttgctggtgctggttccacagccataaaccatttgttctttgtcaagcacaacctctcccttgacatcactcctcagtccatccaaacccagatgatatggttcaacaggtacctggagagccaggactgccaagagtcaaagtgcaatgattntgatgacactctatttggtttggggagattgagtcaatgactatg

SEQ ID NO: 209518 - DNA, 574 bp, Glycine max
cagacacagagagagagaaagagaaagagtaactgagttgtattcaatattcacaatttctacctccaaagattaaaaagagagaaagaaaaaaaaagaagcctacacacctttctccctattccttctacttctggcgccatttgcaccttcaaaactccatcttttttctttctctccttccatttctggaaacaccctcatggaaccaacaacaacattgaacaacatcatcaacaacaacaacactgttcctgcagggtcaccaccaccaccaccaccaccctcagtgcctcagccaatgaacatgaatgtcaacatgaacatgaacgtgggaaacacagaaggaacaacaccagcagttccaacaccaacacccgcgccaacaccagcaccaacaacaatggttcctgcagtgccagctccaaccacaacaacaccgtggagtttggatttgtttgggaagaagaagagagggaggcccagaaagtatgatgcagatgggaacctgagagtgagtgcaacaccaccaccaccacctggtttcactttgtccacaccttcctctgagttc

SEQ ID NO: 209519 - DNA, 552 bp, Glycine max
  unsure (1)..(552): unsure at all n locations
gtctatagcactactagatggggggtttgatgccttatccgtgaaaccatttatggagaatggggatcgttgttgaacatggatgggtgcgggaggatgcacttgaggtttgcactatgatatctgcggatgctctgtctgcggacattcctgcacttattaagagagatgaggacattcttgcatttgtctatagcctagtatatgaagaagaatcttatgagttcttggactggacagtgggaacatagaacatgaatgggtttcggttctgctctttgttcttcatatnggggtcgtgtagccagatgatatatataatggatctgacgcgctttttcaaagtgcagaagatacagcactagatatattggatgcatcaaatgagcttgctcttttcttagcacgagctgtgattgatgatgtattggctcctctgaatccagaggaaattagcggcccgttgcctgcaagatgcactggttgtgaaactggacggatggctagatcacttgttgctgctcgtcatgctggtgagagactatagagatg

SEQ ID NO: 209520 - DNA, 550 bp, Glycine max
  unsure (1)..(550): unsure at all n locations
cgagtggttccctccctcacgcgccctcggcgccctctccgccttccgccagacgcgccgcgccttcgccgccaacaagcattccgcgcccgacgacgcttacgctgcggagtccatcggcgacgatcccctggcggcgtccagcggccaggtcatcgtcggtgtcgagagccgctaccgcgtcgtgtaccgcctcgtgaacggcatttacgtgctcggcatcaccgtcgccgaccacgacaactcggtgaacgtgttcgagtgcatccacatcgtcaaccaggccgtgagcgtcgtggtgacggcgtgccgcggcgtcgacgtcacgccggagaagctcagccgcaagtacgccgagatctacatggccctcgacatcgtcctccgcggcgtcagcaacatccggctcgccgccatgctcgccaccatgcacggcgagaacatcgccaagatggtccactccgccatcgacaccgagaacaagatccgcggcgccgaaacctgggcctncgggaggtgcactccctcgagcaccaggccggaatcgacg

SEQ ID NO: 209521 - DNA, 467 bp, Glycine max
cttccattaagatgggggagttcaccgggagtggtgagtatgtgactcacggtgaattaccttcctccaggccaaatcattcaaggaaagttacagttcttcctcttgtgtttctcatcttctatgaggattcaggggggcctctcggggtggaggatactgtgcacgcagcacgttctctgttagccctcattggattcttgcttttcccattgatatggagtggtcctgaagctttgatcactgctgagatgggtaccatgttccctgaaaacagtggatatgggcgttgggtttcgtccgctttgggtccctattgggggtttcaacaaggcttgatgaaatggctgacgggggtgattgacaatgcattatacccagggctattccttgactatcagaaggcacgaatccctgctatatgtggcggattgcccagagttattgcaacatgggggcttactatg

SEQ ID NO: 209522 - DNA, 602 bp, Glycine max
  unsure (1)..(602): unsure at all n locations
gcgggactgtgagttcttggaagctgagaaaattatggattacagtcttttggttggcattcattttcgtgatgataatacgtgtgacaaaatgggattgtcaccttttcttttacgcactggcaatcgggatacttatcagaatgaaaagttgatgcgtggttatcgctttcttgaagcagagctacaggatagagatcgagttaaatctggaaggaaatcattaatcaggctaggagccaatatgcctgcaagagcagagcgagtggcccggaggagtgattttgatcaatacactactgctggaatcagccatttgaccccttatcgcagtggggagacttacgatgtcattctatactttgggattattgacattttgcaagattatgatatcagcaaaaagcttgagcatgcttacaagtccttgcaagttgactctacttcaatttctgctgttgatccaaagctatactcgaagaggtttcgtgattntgtagggagaatattcatttgagagaggtagcagatgggttaacaatgaggctggaatatttctctttctgaaggtgaagatgcctgattgctcataacatcccagg

SEQ ID NO: 209523 - DNA, 630 bp, Glycine max
tttttttttttttttttttttttttttttttttttattttttttttttttttttttttttgtttttttttttttttttttttttttttttttataaaaaaacttaaaataaaaaaaaaattaaaaaaaaaaaaattacacataaaaaacaagcacatcttgatcacacagggagcgaaaaaaacaaaaaaaaaaaaaaaaaaaaacaaaaaaaaaaaaaaaaaaaaaaaaaaaaagaaaaaaaaaaaaaaaaaaagggccggagccttaattaaccaaacaacaaaaaaaaaaggatggaaaaaaaaaaaacggggggggaaaaaaaaaaaaggggggggaaagaagaaaaaaaccctcaaaaaaaaagaaagagaaaaagaacaaaaaaaaaaaaaaccattaatatttttttatgaaaaaaaaaggggggctctcctcaccaaaaaaaaaaaggtaaaaaaaaaaacccacaaaaaaaaaaaaaaaaaacccccccctacctcctttattgcgagaaaaaaaataaaaggcgagttccctcaaaaagaaaaataaaaaatatttgcccccccccctacttccccccgacaagataagaaaaaaaaccccccccccctctcgtgtttat

SEQ ID NO: 209524 - DNA, 557 bp, Glycine max
atatgactctggtgttatttttgattttgcaaattaaattacacaatcacagccgtacatcacacatgagttgggcctcttccaacttaaaagcagaggataacattggcccatgacgcgacacatgcaccacctaataatcataattttacatctttacatacaaaatacaaagactttaaattttaaaaagaagaaaagagataaacagatcatcttaatgaaatgaaaccaaaacccacaaacattggcttgatttttgttgttgttgttgttcccaacttgattaagcatgaaccgtttgattgaatcacttggacttgaagggaatggccctgattacgacctggtggtagagtgctgcaagagctgcaccgatgaatggtcccacccagaagatccagtgttcatcccaaccaaggtccttgttgaagatgatagcagcaccaagactacgagcagggttgataccagttccggtgatggggatggttgccaagtgaaccaagaacacagcgaacccaattggcagggtgccaaaatgggacgtgggagtc

SEQ ID NO: 209525 - DNA, 481 bp, Glycine max
  unsure (1)..(481): unsure at all n locations
gggtgaagggaaaaatcaaatcaacatgctgagagtgggcgcaaagagggttttggaaacgacgttgtttggggttagggttccggcgaggctgtaccacgagagggttgtggatcactacgacaacccccggaacgttggatcgtttgacaagaacgacccgagcgtggggacgggtttggtgggggccccggcgtgcggcgatgtgatgaagctccagattaaggtcgacgacaaaaccggaaaaatcgtcgatgctcgattcaaaacttttcgctgtggctccgccattgctttttccttcgtcnctactganntgggtgaagggaangcacatggaggaaagttctgactataaaaaatactgaaattgcaaagcatctttcacttccaccagttaagctccactgcagcatgcttgctgaagatgctatcaaagcggccgttaaagactatgaagctaagcgtgcttaggcaactg

SEQ ID NO: 209526 - DNA, 421 bp, Glycine max
gaaaatgggtacttctttgtggactttgtgtttaattttggcttgactagcctcttttgcatgatgggcctttccacagacgccagtaggatgttccattccgcagaaactacgtacccacttgggcttttgatcacatctaatccttcagtggaggatctgaaattcaactttatctagacaagttcactggctctgacttccagactaaagggtcatactgatatggccacttaagaatgaacataaagatggtctctggcgaatcagctggcacagcacactgctatttatctatctacctacaatgcgagagcacgacgagatagaacttgagctgtagcggaacacaacacgacgaccttacattttgcaaacaaatgtgcataccgcatgcgcgggtgacagtgagcatagaatc

SEQ ID NO: 209527 - DNA, 585 bp, Glycine max
ggaatctttgcaaaaagatggcccctcctcttgtgacattactctctgcagaacctgagatacaatatgtagcattgcggaatatcaatcttatagttcaaagaagaccaacaatacttgctcatgaaattaaagtgttcttctgcaagtacaacgatcccatctatgtaaaaatggaaaagttagaaattatgataaaactagcttcagaccgaaatatagaccaggttctattggaatttaaggagtatgctactgaagttgatgtggatttcgtaagaaaggctgttcgagcaattggtcgttgtgccatcaaattggagagagcagctgaacgatgcattagtgttttgcttgagttgataaagataaaagtaaattacgtggttcaagaggcaatcattgttatcaaagatatatttagaagataccccaacacatatgagtccataattgcaacactttgcgagagcttagataccttggatgagccagaagctcaggcatcaatgatctggataattggcgaatatgcggaaagaattgacaatgctgatgaacttcttgaaagtttcttggaaaatt

SEQ ID NO: 209528 - DNA, 282 bp, Glycine max
cttgggattcggctcgagctcgtacaacgtgctagcgattacgtatgatgatcttgttcggagatcagggctccggacaatggagcgatgacttattcttgctcacctatattgccaatcacggtgaaagggcttggcacgtttgggccaatggtagggtacgctatcgggccgtagagaggtgaccagctgctggtctattctaccttggtcctgatggtagatgagggaataatactcccgatgaacaggttttgttcatcggactccatgcatggtggg

SEQ ID NO: 209529 - DNA, 257 bp, Glycine max
gcctggctctgtctctgtctttgtgtttgatgctgacgattccgaaccagcgaccttgttcgtttgtcgcaaagttcaagtgatcatgggtaaggacaagactcacatcaacattgccgtcattggacatgtcgactgtgggacgtcaactaccactgcacatttgacctactcgctgggaggtatcgccgcgcgagggactgagaggttcgaaattgcggctgctgagaagaacaagaggacattcaagaatgcct

SEQ ID NO: 209530 - DNA, 586 bp, Glycine max
  unsure (1)..(586): unsure at all n locations
gtactgtggaaatcattacatctgtttaactcattaggaagggagacaaggttggatcttctgaagctgcattgcttgccaagctaggcataaggcccttctcatatgggcttgtggttctctctgtttatgataatggttcagtgttcagccctgaggttcttgatcttactgaggatgacctcattgggaagtttgctgctggtgtctcaatggttacttcactttcattggctatttcatatccaacacttgctgcagcaccacacatgtttgtcaatgcctacaagaatgttcttgctgttgcggttgagacagattattctttcccggaggcagacaaggtcaaggagtatctgaaggacccaagtaaatttgccgttgccgccgttgctgctcctgctgctgcatctggagctccagcggctgcagccaaggaggaggaaaagaaggaagaaccagctgaagagtctgacgatgacatgggtttcagtctgttngactaaattgaatcaatacttttgttgagtttgctttgttagaaatgatgaagttgtctggcttttcatttaggtgctattttagt

SEQ ID NO: 209531 - DNA, 529 bp, Glycine max
aatgccattattttatcatatcatcacttttcccatcttcacagagaagacaataggtatcttgatttaaaaccataagagacaaaaatgttaaagctttaattaactatgggatttaaaaactagttgcaatgtaacatgaattgaaaagacagcaaactaaaatagcacctaaaatgaaagacaaacaacttcattaattctaacaaagcaaactcaacaaaagtattacttaatttagtcaaacagactgaaacccatgtcatcgtcagactcttcagctggttcttccttcttttcctcctccttggctgcagccgctggagcaccagatgcagcagtatgagcagcaacggcggcaacggcaaatttacttgggtccttcaaatactccttgaccttgtctgccttcgggaaagaataatctgtctcaaccgcaacagcaagaacatttttgtaggcattgacaaacatgtgtggtgctgcagcaagtgttggatatgaaatatcccatgaagtgaagtaacca

SEQ ID NO: 209532 - DNA, 599 bp, Glycine max
  unsure (1)..(599): unsure at all n locations
gttgccgccatgagattgctagaatgatcattatgcatgattacccccttcacatggttgagcatccgggttttgttgcatttgtccaaaatctgcagccccagttcaatatggtgacatttaacacaattcaaggagactgtgttgcaacttacctgatggaaaagcaatgtgttatgaagtattttgatggattacctggacgtgtgtgtctcacactggacgtttggacctcaagccaatctgtggggtatgtgtttattactggacattttgtcgatagtgattggaagttgcagaggagaattctgaatgttgtgatggaaccataccctaattctgactctgctctcagccacgctgtagctgtttgcatttctgattggaatttggagggcaagctgttttctatcacttgtggtcagtcactgagtgaagttgtccttgggaatctcagaccgttactctttgtgaagaatccacttatcctcaatggtcagttgctgattggaaatngcattgcccgaactttaagtaatggtgcaaatgatttgttgagctcggtgcatctcacagttaaaaaaatccgggatagccgt

SEQ ID NO: 209533 - DNA, 292 bp, Glycine max
gtccttgaaggatttgaagctcatggaagtgaagaatggaaggttggctatgttggcaatcttgggttactttgttcaagctcttgtcacaggtgttggcccataccaaaacctcctagatcatttggctgaccccgtgcacaacaacatcttgaccagtctcaagttccactgaatgtattatatgttattttacatattctttacgttgccaaaactcaactacctttctacctttctatatcatgtggacattttgttccttggtgtggcgctgtaagaaatgacatgt

SEQ ID NO: 209534 - DNA, 387 bp, Glycine max
tttgtccccaatttaactattggcgctccagttattgaaagtttgagaaagcacacaaagggatatttggattgtcaccttatggttacaaatcctcttgattatgttgagcccttggcaaaagctggtgcttctggttttacatttcatgtagagacatcaaaagataactgggaagaacttatccaaagaatcaagtcacatggcatgactcctggtgtagcattaaagcctgggacccccattgaagaggtttatcctctggtggaagccggaaatcctgtggaaatggttcttgtgatgactgtagaaccgggattcggaggacaaaaatttatgccagagatgatggataaagtcacgtatacttaggaagaagtatccatc

SEQ ID NO: 209535 - DNA, 471 bp, Glycine max
  unsure (1)..(471): unsure at all n locations
aacagctaccacacatanattactaacaagattaaagtacgcatatctgcacctacgcttcgcagcaaacgataagataaagttacaaatataatcttattttnnnntttgnnnnnaagggngatcgctggtaaccaagacgaannntgnnggcacacgcacgcgaacgtaaaattcgaattgagctcgaggcgaacttaaatatagacattttatgtttctcaaggatcactactcactctgttataccgcactgtcggagtaacaccttccgatcctcgaaaatcacttcctcaatgggggcttaatttcctctcctacactcacaggctcaaccagattaagaaaagggcaagtggggtatatgcatcactatccgagagagagagaggagagtattattcccagagaccgccaactccgctactagagaccggcaactatcctattcataagaaaaagctctctacc

SEQ ID NO: 209536 - DNA, 609 bp, Glycine max
ctctggaatgttcatttccaagaacaaggatcctattgttgctggtattgaggacaagatttcgtcatggacctttcttccaaaagaaaatggggaagatatacaagtattgagatatgagcatggccagaaatatgacccgcattatgattacttcactgataaagttaacattgctcggggtggacatcgcatcgcgactgttctcatgtatctcactgatgtagccaaaggcggtgaaactgtcttcccttctgcagaggaacctccacgtcgcagaggtgctgaaacaagcagtgatctttctgaatgtgccaagaaaggaatagcagtgaaaccacgtagaggggacgcacttcttttcttcagtcttcacacaaatgctaccccagacactagcagtctccatgctggatgccctgttatcgaaagtgagaaatggtccgcaacaaagtggattcatgtagactcgtttgataagactgtgggagctggaggtgattgttctgataatcatgtaagctgtgagagatgggcttcacttggagaatgcactaaaaatcctgagtatatggatggatccttagacattcccgggtattggtaggg

SEQ ID NO: 209537 - DNA, 471 bp, Glycine max
ctcatctgcttcccctagcaaccttcttcttacttctctccgcttcttatctccagattgctggggcggaagcacaaccgttgactagtctcaagcttaactctcatattcttcaggagtctactgctaaagagattaatgaaaatcccgaggcaggatgggaggctgctataaatcctcgtttctccaattatacagttgaacaatttaagcgccttcttggagtcaaaccaatgcctaagaaggaacttagaagtacacctgctatatctcacccaaagacgttgaaattgccaaagaattttgatgcgaggacagcttggtcgcagtgtagcactattggaagaattctagatcagggtcactgtggttcttgttgggcatttggtgctgttgaatcattgtcagatcgcttttgcattcattttgatgttaatatctctctctctggtaatgaccttcttgcatgct

SEQ ID NO: 209538 - DNA, 420 bp, Glycine max
cacaaacacaacaacatatggaggtgctaagggtgcaaaccatagcttccaaatccaaagatgctgccatcccagccatgtttgttagggcagagacagagcaaccaggcatcacaaccgttcaaggggtgaaccttgaggtgccaattattgattttagtgacccagatgaagggaaagtggtgcatgagattttggaggcaagtagggactggggcatgttccaaattgtgaaccatgacatacctagtgatgttataagaaagttgcaaagtgttgggaaaatgttctttgagttgccacaagaggaaaaagagttgattgctaagcctgctgggtctgattctattgaagggtatggcacaaagcttcagaaagaggtgaatggcaagaaagggtgggtggatcatttgttccaca

SEQ ID NO: 209539 - DNA, 462 bp, Glycine max
aataacagaacagacaaactgtttcttgtcatctttatttacgtcaaaagcataagattaatccaacattagtcacagatcttatttaatctacttcccacaagtcacactttcattccataaattaaataacaaaacagagaaaccaacattagtcacagatcttatttaatctacttcccacaagtcacactttcattccataaattaaataacaaaacagagaaaccatgagctataattatctcgtagtgcccacttcattcattgagggatcttattgagcttacaataagcataatccttgtatttcttggttttgtattttggtggattggcttggttaaccaactttgggtgaggaccaacttcttgttcctttttgggttctatgaacacgggccacgacattcttgtctcatctttgttcactggtgttctgtgaaaaactgccttatattt

SEQ ID NO: 209540 - DNA, 534 bp, Glycine max
ctctcttcaacgattccaaggaattctttagtttctcccttgccattctgtctcaggtggcatcggctctttcaacaatccaaacactagcacgcggcagccgttcgttgctgtctgagaacagcaactccccagttgcttctctagacaaagctgatggccttccttcttggatgaaccatgaggaccgaagggtattgaaggctatggataacaaacctgcacctaatgtcaccgtggctaaagatggcagcggagacttcaaaaccatctctgaatgtttaaatgctgtccctcaaaattttgaaggacgttatgtgatttttgttaaagaaggagtatacgatgagactgtgaccataacaaagaaaatgcaaaatataaccatgtatggtgatggatcccaaaagagcatcatcactggcaacaaaaactttagggacggtgtcaggactttcctaactgcaagttttgtggtagagggagatggattcataggcctagcaatgggattagaaacactgcaggccctga

SEQ ID NO: 209541 - DNA, 618 bp, Glycine max
  unsure (1)..(618): unsure at all n locations
gagagagagagagagagagagagagagaatgggagggtgggctatcgcggtgcatggtggcgctggtgtcgaccctaatctcccactcgagcgccaagaagaagcgaaacaacttctcacgcgctgtctcaatcttggaatctctgctctaaattctaatcttcccgccatagatgtcgtcgaacttgtggtgagggaattggaaacggatccgctgttcaattcgggccgtggatctgccctgacagaaaaaggaacggtggagatggaggctagcatcatggatggtccaaaacgacgatgcggcgccgtttcgggtcttaccaccgttaagaacccgatctcgcttgctcgtttggttatggacaaatccccgcattcctacctcgccttctccggcgccgaagaatttgctaggcaacagggtgtggagggttgtggacaacgagtactttatcacacctgacaacgttggcatgctcaagctggcaaaggaagcaaacacaatcctgtttgattaccgaatccaacatcggngtacgagacgtgcggatccggtgtgagagtcactgcaatgaatgactcccaatagcgtgtacgcgccccgaaacccccccc

SEQ ID NO: 209542 - DNA, 525 bp, Glycine max
gttgagggtctaccacaagtctttatttaagagaaagacaacaaagttaccatattattatttcacatttttttctaattcttagaaacaaggttaccattttttatctaaatcgggcaccagcagaaagaccctacactacagtggaacatggtacagaaatccaaaagttgcatcgaaacaaccatgaaggaaaataatgaagctattcccagattccgacctccatgaagccattttcagtggcacagcccctaaacatgccattgcaattgaaaccataagccacttccccagcgttggacacagcaatgagaccagccatcccttcatcgagacggtgcttgatcacaaaatccacggcttcttgaagcttcaagcctttgtattccatcaccgctgccacctcacgcgccagcgtgccacgtatgatggcctcgccttcacccgtgcacgatacgccgcacacgtcgcacgcgtaggtcccggcgcctatcagcggcgaatcaccgatgcgcccggtca

SEQ ID NO: 209543 - DNA, 433 bp, Glycine max
  unsure (1)..(433): unsure at all n locations
aacaaagtcacaaagagagagagagagagagatagatgctcgtcggtgttcgttccgattctccttgaccttctttttcttcttcttcttcgcttcgttatcgttcccaacattccaaaccctaaatttgttgcctcggtcttccattcccaatctccgaactccgacgcggagtggcagcagagaacaagcatgtcgtcttggctgagatctgcggtccacaaagccgtcgaggtcggcaacaaaaacaacctcactcgaaccgtcaagaactacgccgacaccgtcgttcaacacgccggccaagccgtcgccgagggcgccaaaatccttcaggatcgcattagtgctcggaattacagaagtgttgcgcagaccattaaaaggttnggaagaagctgctgtttcgtataggggacctgagagagtgcag

SEQ ID NO: 209544 - DNA, 555 bp, Glycine max
acagaataaagaaatcatgcttggtaatgttcacaaattcaaaggaatctgatccaaattatagcttcatcaacagccgatctatatggcttacaaatttatatgatacttgcacttaatcataaaaatacaacagcaagcattaattactcagaaataagattcaacctaactacttgctcaattctctttcaagctcatcaaattcccaatcaccaatttcctcagttgaataatcctgactaaccttcccaaactcagattccagtttagctaattcagcttcatgatccaatatctggtctgtcttaactgaaggtgattttggcagctcatccgtttctggctttgaaagctcggcaccttgagttggagcagaaactgaaggagtagcatcagactttttctaaaaggtggtgtttcagcctttgcaggggtctctatttcaagaattggtctctctatagactcaattgagttcgtaacttttcaatggcttaaacagctctttaactctctcttcatctttcctggaaattctcccctgttgagcat

SEQ ID NO: 209545 - DNA, 448 bp, Glycine max
gggttattatagatgatggatagactattatacattagttagatagattctaaatacctccaattttgaaatatagtcgccagtgaagcgaggccacaatgtcattgtcccctacttcagcactggtgggttaaaggggtctttgaaattggccttctcactgagatcttggaattcatccacaagattttgaagccttgcaacaaactctattaaaagggaagcaaatgttgccaaagacagagagcttgcactttcatatactttggaatcttgctcaagtaacatgttatctccataaaatgagagacgtggccatgatattttgttggacaacaagctttgagaaatgtgcaattcaggaactgaaggctctatgtttatgttaagtcttgaatcaactcctgtttcactgagggaagagatcaatgagtgtttgtgttcatga

SEQ ID NO: 209546 - DNA, 557 bp, Glycine max
  unsure (1)..(557): unsure at all n locations
caagatcgcaatgggtgctacaggaatgctaaatggaccgtggagattgtggagaattccaatattataaggttgaagagttgttatgggaaatacttaacagcctcaaatatgccattcatattgagaggtacaggaaaaaaagtgttgcaaacattgcctactaggttaaattcttcggtggaatgggaacctattagagaaggggttcaagtgaggctaaggacacgttatggtcaatatttgcgtggtaatggagggttgccaccttggaggaacaccattacccatgatgtcccacatagaacagcaacagctaattggatttatgggatgtggatattgtaaaattttcgcccaaaaccacaggtcttataaccaagaccagggcctatacctattcccccacccattcattttttgattccaactccaacaaatctttcaccttgctcttctccttcatcatcaccattaatttcaaagatggattccctggtcaagattgatctcaggtctaacacaacatctgagtccgaagattcantagaatgttt

SEQ ID NO: 209547 - DNA, 611 bp, Glycine max
  unsure (1)..(611): unsure at all n locations
cacagtttaaggttttctctattcatggcatccaaacatcgaattgcagggaccaacattcagagctccccaaagagggcaagaaccatggccacgtcatccacagccattgaacccgcattgaaggaggctntttccagatatactcagtgtctcaatgacctcaatgacaaacgtgaaagagtggtcaaagcaagtcgtgatgtaacaatgaatagtaagaaagtcatatttcaagtgcacaggatgagtaaatacaataaagtggaaatacttgagaaagctgaaaaggatttagcagctgtgacagatcagtacatgtcacgactagtcaaagaattgcagggaactgatttttggaagttaagacgagcatactcacctgggatacaggagtatgttgaagctgctacattctatggtttctgtaaaagtggaactcttttgaagcttgatgagataaacaaaacattgctaccacttagtgatccatctcttgatcctctgcagataaatatccttgactatatattaggggtngcagatttgactggagaagttgatgcgtttagcataggtaggatatcagatggtgaacttgagttttgctg

SEQ ID NO: 209548 - DNA, 334 bp, Glycine max
cccccttcattctctctatgtgtatctttatatatacatgtggatgtaggtgtctatgtgtcgcgagcgagcctgacacaagcaaacggaaacaatatcaacaaggtgaagtggattccttactacacatggagatccaggacacattctacatatgtcatggatcaccaactttgctcatagatgaatgcattcatgccaggaagatccttcagtcatggaagagggacgtgtttcctgagagaccctcttcaacttgtgtcatctctggccattggaaaaccgcagctcccacggtcaacgtctgtgactgcattaacgacagcatctacga

SEQ ID NO: 209549 - DNA, 466 bp, Glycine max
cgagataactagaaacagtgtgatgaaaatgaaggtccttgttttcttcgttgctacaattttggtagcatggcaatgccatgcgtacgatatgttccctctccgaatgaacactggctatggtgcccgtactccggaggtgaaatgcgcaagttggaggcttgctgtggaagcacacaacatctttggctttgagaccattcctgaagagtgcgttgaagcaacaaaggaatacatccatggcgaacaatatagatcagactccaaaacagttaaccaacaagcttacttttatgccagagacctcgaagtccatcccaaggacacatttgtgttcagtatagatggcaccgtactctctaatattccatactacaaaaaacatggatatggggtggagaaatttaactcgaccttgtatgatgaaatgggttaacaagggggcatgcaccgcactgcccgagac

SEQ ID NO: 209550 - DNA, 506 bp, Glycine max
  unsure (1)..(506): unsure at all n locations
cgaaagggtcatagggtactgttgtgtttagggattcgaattttgattatcgaatcgcaaaattctgaatcaatcaatcagtaattagagccattaacgactgcaatggtctgcgagaagtgtgagaagaaattatcgaaggtgatagtaccagacaaatggaaagaaggggccagcaatactaccgagggtggtggccgcaagatcaacgagaacaagcttctctccaagaaaaacagatggaccccttacggaaacactaagtgcaccatttgcaagcagcaagtgcaccagaatgctaagtactgccacacctgtgcttactctaaaggagtttgtgcaatgtgtggaaagcaagttcttgataccaagttttacaaacaaagcaatgtgtagtggatacttgtgttgtattgcgtgctgtatcttcttttagatgcataatagcattacctttctttctatttgtctagntgatcctattgctaaacaatgtactgaagctg

SEQ ID NO: 209551 - DNA, 501 bp, Glycine max
  unsure (1)..(501): unsure at all n locations
ataaccttttctctccggttaccagaaccgtaagttgctgaacatgaacccgcaatcgccggttcgggcggaaccggagcctccggttccgacgttctccccacggttcgcgctcacgtccggttcgcagcgganaatcgcgatcgcggtcgatctgagcgacgaaagcgcctacgcggtgcgctgggcggtgcagaactacctgcgaccgggcgacgccgtgatcctcctgcacgtgcgtcccacgagcgttctctacggcgcggactggggctccgtggatctgagcgcggcggaggacgccgatgacggcggaggaggcgacgaggagtcgcggcggaagctggaggacgacttcgacaacttcacgtcgacgaaagcgagcgacctggctcatccgctggtggaggcgcagataccgttcaagatccatattgtgaaggaccacgacatgaagganaggctgtgcttggaggtggagcggctcgggctcagcgccgt

SEQ ID NO: 209552 - DNA, 502 bp, Glycine max
  unsure (1)..(502): unsure at all n locations
cctgcatatccctcacactttcttcccttttccccctctcttcatcttttgcttccttcgtatagggataagagagcagcaagtaatgatggatgcgctgataaaggtgcagttcaacgcaccaaaaccataaaaagcgcttctttcgtcttatggcatgtctgaggaggaagaagcactgcgtcaaaggccaacatcgttgatttctttcccaccccatgacaattcttcgcttcttctgccccttctttatactcttcttcactccaatagcttctgtgcaagcgttcaccggaacctatggtataaattatggtaggattgcaaataatattccttcacccgatgaagttgttactcttctcagagcagcananataagaatgttagaatctacgatgctgatcacagtgttctcaaggcatttagtgggactgggctttgaangtagtgggggcttccaatgccagctgcaagacatgagttcgaatccagaccatgc

SEQ ID NO: 209553 - DNA, 478 bp, Glycine max
agtaaaaactgaaaaattctaatactcttcgaaggaaaatcggttctcaagtgaaataattacacatttgctgaaacatcaacatttctagatattgctttatgaaatatgacaatcaatggtataatttgatctatagtgagacatgaagtggagccaagtcaaactcatttcattgccaggaactggtttgccgagcaggctgatatcataaggatcactaactccagaaaatcagcggtgtcaaagaagataaaaagaataccatcatgtatgactgggacaacccttgagtattgatattcttaagagacaaaagagatgaatgtccagcattaagtccgtgaaagccaatgtcatatgatatactcccatcagccttgaacagtccatagttcttctcagatgaatgcccaagcttctcgttctcgttgaataatgcaaaaatgtatgccttcacaacatttttaggtctatg

SEQ ID NO: 209554 - DNA, 510 bp, Glycine max
  unsure (1)..(510): unsure at all n locations
gtttccttttttccatttcctccctttctcccacaccatctctttccgcattttcccaattaggatgtgtaattgagacagaagaagaagaagaagaagaagaagaagacgaagaagaagaagaaatttgagggggtgtgtgatcgggtcctcaggtgaagatctgaggctgttggtgtctcttttcttttctccgagttccaaagatgagcgcttctaggttcatcaagtgcgtcactgttggggatggtgctgtgggcaaaacctgcttgcttatttcctacaccagcaacactttccccaccgattatgtgccgactgtctttgacaatttcagtgcaaatgtggttgtcaatgggagcattgtgaatctgggtttgtgggatactgctggtaatgctgcgtgattattgtctctgtgatgttggagcttggaagttntctctggatttattggggtatttgtgggacaggacaagaggattancacagatttagacctttgagtta

SEQ ID NO: 209555 - DNA, 319 bp, Glycine max
ctccattcaaacagtggtaccttcatcactatggtgttgagattggtaggaagaagaagacagctgccaagaaggaaactgcagaggagggtgctgctgctgttgctgtggaagaagccaaaaagagtaatcatctgcagagaaaattggagaagcgccagaaagatcgtaagcttgatgctcacattgaggagcagtttggtggtgggcgtttgcttgcttgcatttcctctcggcctggtcaatgtggcagagctgacggctacattttggaaggtaggagttggagttttacatgaaaaactccagaaaaagaagg

SEQ ID NO: 209556 - DNA, 546 bp, Glycine max
agaggattgcattacattcaattaataaaaattgtaactcgtcggtggcaaaaaaacagttcaaaacaaaattaagatgtcaatttgcaaaggactaacaagatagtttgcactaaaagatgtcatgtggcacaaaacatcaccttaaattgtaccaacaacatataaaagcaactaaagccatataaaaatctgggaaacactaaaatcaagcagcaccctttcccttctttttctggagttttttcatgtaaaactccaactccttaccttccaaaatgtagccgtcagctctgccacattgaccaggccgagaggaaatgcaagcaagcaaacgcccaccaccaaactgctcctcaatgtgagcatcaagcttacgatctttctggcgcttctccaattttctctgcagatgattactctttttggcttcttccacagcaacagcagcagcaccctcctctgcagtttccttcttggcagctgtcttcttcttcctaccaatctcaacaccatagtgctgaaggtaccactgtttgaatggag

SEQ ID NO: 209557 - DNA, 492 bp, Glycine max
  unsure (1)..(492): unsure at all n locations
aatgggttcatgaacgcttccagacaagagcgaacccatctgatttgacaaatctggagaatagtttgatgaatcattcattgaatacaacatcttcaaagtattcaaaaactgttgtctatgttggacgtgaaggagaaggcatcattggtgcgattgccatatctgacactgtgcgtgaagatgctgaatctactataacaaggctcaagcagaaggggattaaaacagtcctcttgtcaggagacagggaagaggcagttgcaactgtagcagatacagttggaattgaaaatgattttgtcaaagcatctttgtctccacaacagaaatctggatttatttcctctctgaaagctgctggacatcatgttgcaatggtaggtgatgggataaatgatgcaccctcttggctgtggctgatgctgggattgctctgcagaatgaagctcangagaatgctgcctcggatgcagcatctatcatacttct

SEQ ID NO: 209558 - DNA, 389 bp, Glycine max
atagcctccttttcttctctagcctgatctcgattaaattgaacatttattattgtttatatgataagatttgaaatgatatgaaatccaatccattacccactctattctatagataattgcttgagctgtgcaaaattgattttttgtacagaacgtttacttgaagctgcatcaattgaggagggattcttcatctttggattcgcttttggtgcctcggagtcagagctgcaaggaaagtggagatgctgggatgaaagctgaattttgtgggaaatggctactttagttgaaccccccaacagaattaagcctaaggggaagcattattatacaatatggcaaacattgtttgagattgatccgaagtacgttccaatcaagcc

SEQ ID NO: 209559 - DNA, 490 bp, Glycine max
ccgaaagcgaagaagaggaagaggaagctgaggaacaacaagaggagcggccaccagaaaccctagaagagcaacaggatccagaaaccctggcggctgcaaaccacgccgaagtgaacggcggcaatgaaggaaacaacgaagaagaggaagaggaggatctcactctcgaagaagagcccgtggagaagcttctggaaccgttcacaaaggagcagctccactctctcgtcacgcaggccgtggatatgtttcccgaattcgtcgatagcgtgcgccggcttgctgacgtggaccctgcgcacaggaaaatcttcgtccatggccttggctgggacgccactgccgatactctaaccgccgtgttcgggaaatacggcgagatcgaggattgcaaggccgtcaccgacaaggtctccgggaaatcaaagggttacgcctttatcctcttcaagcacagggacgatgctcgcaaggcgctgaaacaccc

SEQ ID NO: 209560 - DNA, 437 bp, Glycine max
aacttgaggtgttgagtaacggaaagtacaagagtgttctgcatagaagcttggtgaataaggaacgaaatcgcatgtcatgggcagtgtttgttgcgcctccacatcaggcagtgatagggcctcttccttctctcatcaatgatcagaacccacccaagttttcaacaaaaacctatgctgagtatcgttatcgcaaattcaataagctttcccaataagggaccaaaacatcatcacttgtgttgtcacggtgaaataaatttgtaagccatgatggaggataacaaagtaggagctaactctccattttggttaacaagtgtagctaatttctattatgcttttgaagtaaacagggctttgtccccttggcatttggtacatgccatattccttaagaatacaataaggctatattcctgttctacttcatt

SEQ ID NO: 209561 - DNA, 450 bp, Glycine max
aaatctttgttttgtaacaacaaacagatctataatgtaaagggaagggaggttcacattcacattacaagcaacaacttaacgcttaacaacagcactctccctaatccttctgtgtatgcaaaatgagaccatgcaaatgcaaatgcaatgttctctctgctctcattcttcttgtcacattcctttttattgcttcttccgtccactgtgaagacccatatcggtacctcacttggaaggtcacctatggtgacatctatcctcttggtgtcaagcaacaagggatcttaattaatgggcagtttccagggcctcaaatagatgctgttacaaatgacaacttgattatcaatgtctataactacctcagagaaccgttcctcatttcatggaatggcttacagcataggaggaactcatggcaggatggagtgtatggcacaaact

SEQ ID NO: 209562 - DNA, 384 bp, Glycine max
cattcaccaaacttcttcactggtgcaattctctgtttgatgagaactgaggttcatccgcaatgccacttttaaggagaaaacctttttccttggccgagcctcctgaggatttgaagccagatgagcctgtttaccaaattcgatttacaaaagaaatctttcaagattatcatgattatttgaagcgattgaatctataccgccagagggtttggatgtgtaaagtcactggaaaaactggcttgacatatgaagaggctttggtgtctgaacaacttgctaccgagaaagttcaacagtttcctaaagaattaatgactattgctttaaggattattcaatacaggatgctccctttgaaggatcttgctgattctattg

SEQ ID NO: 209563 - DNA, 509 bp, Glycine max
  unsure (1)..(509): unsure at all n locations
cttcagctctccatgcagctgttaattttggacaatacccttatggtggttttatcctaaaccgtccaactcttagcaggagatggattccagaagaaggaactccagaatatgacgagatgacaaagaatcctcaaaaggcttatttgagaacaatcacgccaaagtttcaggctcttgttgatctttcagtgatagagatattgtcaagacatgcttctgatgaggtctaccttggacagagggacaatccaaattggacctctaatccaaaggcaatagaagcctttaaaaagtttggaaaaaagctagcagagattgagacaaaaatctcagaaagaaaccatgatccaaatcttagaaatcgaaccgggccggctcaattgccctacactgtgcttcttcctaccagtggaacagggttgactnttagaggaattcccacagcatctctatctaatgagtgtggctcaatcgtattgtacttttacttttgaatatctcatata

SEQ ID NO: 209564 - DNA, 574 bp, Glycine max
  unsure (1)..(574): unsure at all n locations
gcagagaatgcatcgcttcatcgtcctcaccattctcctctccctcaccctcgcagatggaggttccattggagttaactacggtcgaatagcgaacaaccttccctccgcggttaaggtcgttcacctcctcaaatcgcaaggactgacacgtgtcaaagtctacgacaccgacccagcagtgctccgggcactatccggatccggaatcagagtgacggttgatcttccaaaccagcaactcttcgcagcagccaaagctccctcctttgcatcctcatgggtcgaaaggaacgtcgccgcatactacccacacacccaaatcgaagccattgcggtcggcaacgaggttttcgtggacccacacaacaccaccaagttcctcgtacccgccatgaagaacatccaaaaagccctcaccaaacacaacctcgacaaagacattaagggtttcctcccccattgcactttccgcactagcanactcttacccttccttcgccgggtcgttccgacccgaacttgntgaaacccgtttcaagcccatgctagacttnctncgcgaaaccgggtc

SEQ ID NO: 209565 - DNA, 452 bp, Glycine max
aagaaaaaaagtacctttcttattaaagatgttttaatacagactaaacccaaaaaactggctaataatgatagcaaatccgagggctattgcaataagggaggaaacccaagtgagtttctcagttatcctaggtactctatccttcagtgcctggctacacgaacctataaacacggtataacttcccattgcaattacagttccaattaagaacatgatgagaaacgcagcaccagccaaacgcgaaggcaaagcaagggcaggcaaaaccatcatcaatgcatctggttgcaggccatgaactatccctgttgcaaaagtagcaaaacctatcttctttttgcccactgttggattatcaagcgattcatacacgttgacatcacattcaccactttctaaagcaacaattggggcatgtacttctgatgcttctctaattcccatag

SEQ ID NO: 209566 - DNA, 552 bp, Glycine max
gaaaataaggatgtttgtattactaatgaaagaatgagtcgttgattgaagcaataacggaagacgcgtttgtgtggctatatgtcaatggatagaataaaaatgtttagtgaacaaaaagaaaaagaaagatgagaatttgatatcaagcctgttacaagaattaatcatcccagagctgatcttgtcatctcatatgccaagaagcatgctgcatttgcaggaacactacgggccattgcaggaccaaaacccttatacaagcctttgaatccttctgtagctcgaatctttctgaatgcatcaaatgaaccagaaaatttcgggtttctgtgatcatctacttgaatcacactcttaataacatcagttgggtaaaccaagaaccagaaggaagctccagccaagcctccagcaacaatcagagaacctctacttaggccagaagtatcagtacctcctgcaaacttttgctttaatgcttcatatacaccaaacattatagcatttccaggtatctcacgtcccatagtgggaaccaagcccttgaaa

SEQ ID NO: 209567 - DNA, 344 bp, Glycine max
gagatatatatacgtggtaccctagagtgccattctgtagtttatttctgctcaccaaggcttatcacatcacaatttgtgcattgcctcgtgtcctttttcttctttgcttgccaaaaatcttacacacacaggtatctagcaaatgggttctcaccagcaagaaccatggctattggagaatgggaaaccgagggtgttgaccaaggagaataggcatggccgttctgcacacagcatgtcctccacgtctttgcgcaagaagtctagccgaactcttgtctccaagcttccatgtgccacactcagaaacatccttttaaatttgcaagaggttattcttg

SEQ ID NO: 209568 - DNA, 340 bp, Glycine max
aaaaaggaacaagcattaatagaatttttatttctcacacaataaatacaagagattctgcaaactgaaaaagggatttcttactaaagcaaacttaaacaagaacaacttccactcatttggcatgtaccgtagtaaaacaggatcaaaagccattttttgatagaacacacgtatgtattatattgaacattttgcacagtggttcatttctcacagctattgcaacttaaaatacttgcaaagcttctgcaaattccaaactttcttttactcccttctttatggatcttacaaagtgatcagatcatgaaaccatgatcaatccattgaatttgaa

SEQ ID NO: 209569 - DNA, 386 bp, Glycine max
gtggggattctcgctatcgacatctacttccctcccacctgtattcagcaggaattgctggaggctcatgatggtgccagtaaagggaaatatactattggacttggtcaagattgcatggcgttttgtacagaagtagaagatgtcatctcgatgagtttgacagtagtttcttcccttcttgaaaagtatgcgattgatcctaaacaaattggtcgtctggaagtaggcagtgagactgtgattgacaaaagcaaatccatcaaaactttcatcatgcaaatctttgagaaatatggaaataccgatattgaggggcgttgattcaactaatgcatgctatggaggaactgctgctttgttcaattgtgtcattgggtggagag

SEQ ID NO: 209570 - DNA, 426 bp, Glycine max
ccaggcggcgccgtcagaatcgcttccggcgtcgagtttgggcgaattgcccgagagttgtgtcgctcagatcatgacctacatggatccgccccagatttgcaagctcgcaaccctcaatcgcgcttttcgcggcgcttcctccgccgatttcgtctgggagtccaagctgccgcccaattacgacgtccttctccgccgcatcttcgccgatttcccctcccatttgggcaagagagggatttacgccaggctttgcaggctcaattctctcgacgacggcaccaagaaagtttggctggatcgaggcatgggtaaactgtgtttgttgcgtttcggccaagggactctccataacagggattgatgataggagaaactggaaccatatccccactgacgaatctagatcagcagtgttgcata

SEQ ID NO: 209571 - DNA, 440 bp, Glycine max
  unsure (1)..(440): unsure at all n locations
cgccaaatcagtccatgatttcaccgttaaagatgccaagggaaatgatattaaccttggtgactacaaaggaaaggtccttatcattgtcaatgttgcctcacaatgtggcttgactaattcaaattacactgagctcagtcagttgtatgagaaatacaaacagaaaggtctggaaattctggcgttcccatgcaatcagtttggggcacaggagcctggatctaatgaacagatacaagagtttgtttgtactcgcttcaaggctgagtttcccgtttttgacaaggttgatgtgaatggtgacaaggctgctccactgtacaaatatctaaaatcaagcaaaggtggactccttgnggatggcatcaaatggaacttcgccaaagtccttgttgataaagaggggaactgtgcctgatcgctatgcacccacaact

SEQ ID NO: 209572 - DNA, 407 bp, Glycine max
aaaggaaccttaactttacattcccccaattataaggccccaattttaaggctctgaactcaaggtgaaagctccaaaaaccactggtcagggccaaataagggccccaggaaaatgccacaccattgggagaacattttttattcaaaggttatttatggggaactccaaacattcaaaacttaaggcatccaaaaacttcaacaaggccttttaaatgctcaaaggaaaagttgggggggcatagggataaaaaaaattcccctttttataaacaaggaacttggggaaattccgtttgaagccctccccaagggggccccctttggtggaatttagaaatttgccccggggacacaccttgtgccctttcaaattaaccttggtaaaaacgggaaacccaccct

SEQ ID NO: 209573 - DNA, 398 bp, Glycine max
acagaacagagcaacactgaacaatggcgcaaccttcctcctcctcgaagcctgttgtccctctcctgaaggacgagctggacatcgtgatcccgacaatccgaaacctcgacttcctcgagatgtggcggcccttcttcgaaccttaccacctcatcatcgtgcaggacggagaccccaacaggaccatcaatgtccccgaaggcttcgattatgaactctacaaccgcaacgacatcaatcgcatcctcggacccaaagcctcctgcatctcgtttaaggattcctgcgtgtcgctgctttggttacatggtctccaagaagaagtacatctacaccatcgatgacgactgcttcggtgtaaacgatccttctggaaaggatatcaatgcacttga

SEQ ID NO: 209574 - DNA, 361 bp, Glycine max
gaaaatgggcaaacacgtattgaattcctttcgtcccccagcggttttcttgttattcttcattgtcttttccgttgtttcctgtgatgaagcttccaagaccttcatctttcgcgtggattcccaatccaagcccaccatcttccccacccattatcactggtacacctccgagttcgcccaagaaaccagcatcctccacgtatacgacaccgttttccacggcttctacgcggtgctcacgcaccaacaagtcgcgtccataagccagcacccctacgtcctcgccgtcttcgaagaccgtcggcgccagctccacaccacgcgcttcccgcagttcctcggccttcgcaccagcgcg

SEQ ID NO: 209575 - DNA, 664 bp, Glycine max
  unsure (1)..(664): unsure at all n locations
tgactagataagcctgngtatatcatatgccgagttattacgtgggacgcccagcttactaatctgcggattcggttcgagattttttttcaaatcaaacgtggttaaaatgaaataatgacggctgaacatggatggtacaaattacttctataatcttatcgagcttagatagaccactaacaagtctataaacacacggtgaagctaaattaaacccaagaagaagaaaaacttattaaaaaaagtacatcaacggattacacctccaaacttggtcacttaaacaaaaatctaaaaacgaaaaggcaagactaaatacaaaatatctgtgtctcagttgtcttttatactagccgtggcaacctacaggggtgccacccacttacgtcacgagtcacgagccgcatggatcaaaacgacatgaccgatgcctggctctatataacggatctatttgagtcaccacagtggggctccgaaccacgtgcttcccatccgtacacgtcagcgacccgaacaccgccccggacggacccatcttcagcatccgggtgtgccgcgccagcggcaccacatagctccgcttcttcaccggctccgagaacacgagcctagacggcttcaccgtcacgctgacaccactcgncgggcgccttcacgc

SEQ ID NO: 209576 - DNA, 415 bp, Glycine max
cacaggtggttatttgaagatgaagatgtcggtactgatggcgtggatggttcatatgaacacgctgtgattggattatggagtggcattgcttggttggttggagtgactgtgttcattgctgtgttgtctgaatatgtggtggatacactcgaggatgcatcagattcctggtgtttgtctgcgagcttcctcagcatctgcttgatggcgactgttggcaatgcctgctggcatgcaggggcaattatattcgccttcctgaacaggctggtcatgtcattggtgtgtctgcattctgttcagctactcatactgtcatgtcggtggtcccattatgtgtcatcgctgcttgtataatggctattcatatggacctgagcttcaacctcttatagacaggttccctcgcttt

SEQ ID NO: 209577 - DNA, 456 bp, Glycine max
ataaaattaaaatttataaaacttgtatttgccacgagacctagtacaatatataggaacacaattaatacaacagattccgcaaactgaaaaagggattcttactaaagcaaactcaaacatgaacaacttgcactcattgggcatctaccgtagtaacacaagatcaaaagcagcttctctgatagaacacacgtacgtatgactcaacatggttcacagtagtggatcatttgtaacagctagctattgcaacttaaaataattgcactgcttctgcaaagagctaactttttttcccccccttgtttatggatacgacaatgggatcagaatgaaacaataaccaatccattgaatgtgaatctgattgcgggtttggatcgataccaccattcttgatctcacgaaaggacaagaaatcgggcaatgcctactaattaagcgcttaaaact

SEQ ID NO: 209578 - DNA, 495 bp, Glycine max
cacagggagttatttgaagaagaagatgacggtaaagatggcgaggatggttcagaagaacaagctgtgattggattatggagtggcattgcttggttggttggaatgactgtattcattgctgtgttgtctgaatatgtggtggatacaattgaggatgcatcagattcatggggtttgtctgtgagcttcctaagcataatcttgctgccgatagttggcaatgcagctgaacatgcaggagcaattatatttgccttcaagaacaagctggacatctcattgggtgttgcattaggttcagcaactcagattgccatgtttgtggtcccattatgtgtaatcgttgcttggataatgggtatcaatatggacatgaacttcaacctcttagagacaggttcccttgctttggcaataatagtcacaggcttcactttacaggatggaacttctcactacatgaaaggccttgttctcctgctgtgctacatt

SEQ ID NO: 209579 - DNA, 396 bp, Glycine max
ataaaattaaaatttataaaaagtttatttcccacgaggcctagtacaatatatagtaacacagtatattcaagagattctgctgactgaaaaagggatgcttactaaagcacactcatacaagaacaacttgcactcatttggcatctaccgtagtaacacaagatcaaaagcagcttctctgatagaacacacgtacgtttgattcaacatctttgacagtagctggccatttctaacagctagctatggcaacttaaaactattgcaatgcttctgcaaagtgctaacttcactttccccccttcgttatggatatgacaatgtgagcataatgaaacaatcaccaattcagtgaatgagaatccgaatttgggtttggatcgataccaccat

SEQ ID NO: 209580 - DNA, 550 bp, Glycine max
cgagaaaattttgtaaagcttccatattgaaataatgtatctgtcagttacaacagaacttcagaaggggaaccaaatcttgttcatccagcaccctactgccatgactgcgtagggaaccaacccataccctgaaacaaacttccttatgcccactagaacttctagtttaagcaaatgcaccagcacatgcagtggctggagcagcttccagctgtttctttgcagtactgtatttttttgttataaacctaaagaagtccctccatagcaactcaaacatcaaccaatttgttccagttctggacgagccattaccaccatcattccggttggacgaagcagaaatgactctgccggcagtcttcttcagttcttcatacattgtgccaagggaaaggcatcccattgccaaccacggagaaatcttgcaggagaagttggcaccatatatactctgagttccatccttaaaccccttgtgtggctgagctgcacactcagctgcaaattttttaagcttctgcagtgcctcagtctccccttctac

SEQ ID NO: 209581 - DNA, 567 bp, Glycine max
caacataaaagctaaatttcattaatatattatatacaagcaaaacatttctataattcatgttccaacaaatagaaaaaatactgcaaaattttgaaataccaaaggaaccaaggattctaagttctatatgtcttatgtacactatgaatatcaaaacttcctaagaaataccacttgtccaaggtgtccattgaaaagcttcagatattgcaaattttctttggccagtctctagaggcaaattgatgcttttgaagtccgttgattcatcccaaggatgatcaccattacggtcacatcatcatggtacttcctcctactcccatccggaacattcatcaactcttccatgctgaagcctgcagaatcagctgctcttgcaactagttgctcaataagaaattttgctggatcaccaaaagggtttctcaagatataagactctacaagctgtactgcttcatcattgctgaagaagtcaaataagccatcactcccaactataacaaatggatcagaatctgagattttgtgcacattcaatgatggatcagttgaaacata

SEQ ID NO: 209582 - DNA, 430 bp, Glycine max
tgcaaagtgtgagagaaagacaatgccgaagtctcaatttcgaaccccatttctggtttctcttccccttttgttattcatcttcaacctcaccccttcgcacgcactctatggagcatcctcacccgtgcttcaactcactccctctaacttcaagtccaaggttctgaattcaaatggagttgttcttgttgaattctttgctccatggtgtggacactgtcaggctctgactcctatatgggagaaggcagctactgtgttgaagggtgttgttactgtggcagcaattgatgctgatgctcatccgtctttggctcacgaatatggaattagaggatttccaactataaaagtgtttgcacctggaaagccacctgttgattaccaaggagcaagagatgtcaaaccaattgctgaatttgcactt

SEQ ID NO: 209583 - DNA, 431 bp, Glycine max
attggattctctctatatatttcccctcgttcctgtcgtctttttcacccttctcttctcttctcttctctcacaaattcgtcaatcaatctcccaccgagttcccaacatggctgaatcggtggagcttccgagtcgcttggcgattctcccctttcggaacaaggtcctcttgcccggcgccataatcagaatccgctgcacttcccccaccagtgtgaagttggtggaacaagagctttggcagcgagaagagaaggggttgattggcatcctgccgatgcgtgatgttgctgaaattaagccagtgggtcccactgtatctgaaggagctgattcaacaaatcagaactcaaaagttcaaggcggttcattggattctcgtaagcttgatacaaaaaagcagaatggatgttgttcattggcataac

SEQ ID NO: 209584 - DNA, 339 bp, Glycine max
  unsure (1)..(339): unsure at all n locations
ggcatctccgcagcaccaccacccaccaccctgcttagaccaggtcctctctctctctagagagaaagagaaaaaagaaaaaaaaaaacaactaacattaagcttttaatagtaagacatggctcaacccagttccaacggggatctgaataataaccagcagcagggtcaggttcagcaacaacagcagcagggtcagtgggcggcggcggcgcagccgcatcagtatcagcagcaatggatggctatgcagtacccggccaccgncatggccatgatgcagcaacagatgttgatgtacccgcagcattatatgccctatgctcaccctcattaccc

SEQ ID NO: 209585 - DNA, 451 bp, Glycine max
ggagctgtctgtgcaaatttgcgttgttcttcgcggcacacctcactcactgaacggtaagtatggcggacaaggctgttacaatccgaacccgaaagttcatgaccaacaggcttctttccaggaagcagtttgtcgttgatgtccttcatccagggagggcaaatgtttccaaggctgaacttaaggagaagctggctaggatgtatgaagtgaaagaccctaatactgtatttgtcttcaaattccgaacacattttggaggtggcaaatccactggatttggtttgatttatgatacagtggagaatgccaagaagtatgagcccaaatacaggcttatcaggaacggccttgacaccaaggtagaaaagtcaaggaagcaaatgaaggagagaaagaatagagctaagagcattcgtggaggtaagagaccaaggctttcgatgct

SEQ ID NO: 209586 - DNA, 388 bp, Glycine max
caaagggccccaacccctaaggttttaagcgggggacccaaattaaaaacaggggccaaccctgggcccaaaacattcaattttaaaaatctggcaaaaaaaaaaaaaccttttacaaagccccaaaaccaagggcccctgggaattaaaccgggggggccaaaaacttattttttttccccagcctgggcaaattcggaagcccggggcttttttaccccacaaatttttttagccctattttttcccccctaaattggcctcctggacttttcaccccgggggaaaaggccctccctgaaaaacccgttttggggcccaaaccttgggggattctccccgggttcaaaaatcaacccaaatcccggggatttgccccccccaaaaa

SEQ ID NO: 209587 - DNA, 559 bp, Glycine max
ggagaagatgagggagtcgatgacgcagctgttaaggttgttgacattgttgatacattcagacttcaggagcaacccgcttttgataagaaacagtttgttaccttcatgaagaggtttatcaagaatttgactcccaagctcgatgcagagaaacaagagttgtttaagaagcacattgagggagcaactaaatacctgctctctaagattaaggatttccagttttttgttggggagagcatgaatgatgatgcttgcttggtctttgcatactacaaggatggtgctgctgatccaacattcttatactttgcatatgccttaaaggaggttaagtgctaagtgacctaatgtaccaagttatctactctcattttacctagtttttttttttaaggtctgttctaagttacctaaaacttcgacttggtattttgatttaatggtgagacaatttgtgcttcatcataatttcatcaaattaattatcgatgggtaggatttcattaattatgatttgggttgtgctgaaaggcttccggattctttttttgag

SEQ ID NO: 209588 - DNA, 573 bp, Glycine max
tttttgtttttttttttcttcaaaaaaagaatcctggaagcccttccagctcatccaaaatggtaaattaatgaaattctaacccatcgataattaaatttgatgggaattatgatgtagcacaaaatgtctcaccattaaaatcaaaataacaagtcgaagttttaagtaacttaggacagaacttaaaaaaaaaaactaggtaaaatgagagtagataactcggtacattatgtcacttagcacttaacctcctttaaggcatatgcatagtataagaatgttggatcatcaactccatccttgtagtatgcaaagaccaagcaagcatcatcattcatgctctccccaacaaaagactggaaatccttaatcttacagagcaggtatttagttgctccctcaatgtgctttttaaacaactcttgcttctctgcatcaagcttgggagtcaaattcttgataaacctcttcatgaaagtaacaaactgtgtcttatcaatagcagcatgctcctgaagtctgaatgtatcaacaatgtcaacaaccttaacagctgcgtcatcgactccc

SEQ ID NO: 209589 - DNA, 522 bp, Glycine max
cttgccttatttttggttttgagattgagctaaaggccaactcaaccatcgaattcgttggtgattgaaagagaaggaagaagaagcaggaaacggaagcagtgagagctggtcgagaaggagcaatatgtctaggtcaaggtgatggcgtagccaaggacagcactgagactgaactcaccaaaatccgtctcctcagggcaattgttgaaacccgtgatccctcttccaaggaagaggatgattttatgattagaagattcctgcgtgctcgtgatctagatgtagagaaggcttccgccatgctcctcaagtacttgaaatggagaaattcatttgttccaaatggctctgtatctgtgtcagatgttcctaacgaacttgcacaagataagggtgttcatgcaaggacacgacaagataagtcgacctatacttatggtcttcggtgggagacattttcagaacaggatggtcttgatgaattcagcgatctgtggttatgttctcgataagtatgtg

SEQ ID NO: 209590 - DNA, 618 bp, Glycine max
tgtgtctatctatctagttaagcatagtctatttattacgttgcatgccatgctcactaatctgcggacgccctttttgtttttttttttatgaaaaaaaaatcgtactgatttactactgaatattgatagctgatacaacagtgtaaagtaatcgggtaaaaagaaaacggcattgaaacacataaataagaaataacaatatttatttttaggcccggctctccttattatgtcagcggttacttaattaattagctatcttgaattgggactaatggcaagaagccaccgaatatctctgggacctgactttccttcatctcttctagcagtgttgatttcaccttatttttctgcacaaatactatctttctcttggtttcgttgtcaatgaatgggtaaacaatttggcacactttcataaagatgtatggtgcgttcacaataaacaacttgcccaatctatctgggtagtaatcctgcaaaatggatagagcactatgatatccacgcacgtcactgtttgagtattcccatcccttaagttctgctataccgacaaactattcttcccaggttgcatacttgcacatactttatcaagaacttaaacaa

SEQ ID NO: 209591 - DNA, 547 bp, Glycine max
ctagaagaagctgatcttgttggtattgacaaacccaaaaagcagcttagtgacttgcttttcaatgaagaagcaggtagggctgtgattcccgtttatgggatgggggggttggggaaaaccaccttggctaaacaagtctatgatgatccaaaagtgaagaagcgtttcaggattcatgcttggatcaatgtttctcagtcttttaaactagatgagctcctgaaagacctggttcaacagctccacactgtcataggcaaaccagctccggaagcagttggacaaatgaagagtgaccagctcaaagaggtgatcaagaacctgcttcagcgaagccggtacctggttgtgctggatgatgtgtggcaagtaaaggtatgggattctgtcaaacttgctttgcctaataacaaccgtggcagtagagtgatgcttaccacacgcaagaaagatatagctttgcattcctgtgctgaattgggtaagggattttgacctcgaattcttacccgaggaagaaagctggtatcttttctgcaagaaa

SEQ ID NO: 209592 - DNA, 541 bp, Glycine max
  unsure (1)..(541): unsure at all n locations
ctagaagaagctgatcttgttggtattgacaaacccaaaaagcagcttagtgacttgcttttcaatgaagaagcaggtagggctgtgattcccgtttatgggatgggggggttggggaaaaccaccttggctaaacaagtctatgatgatccaaaagtgaagaagcgtttcaggattcatgcttggatcaatgtttctcagtcttttaaactagatgagctcctgaaagacctggttcaacagctccacactgtcataggcaaaccagctccggaagcagttggacaaatgaagagtgaccagctcaaagaggtgatcaagaacctgcttcagcgaagccggtacctggttgtgctggatgatgtgtggcaagtcaaggtatgggattctgtcaaacttgctttgcctaataacaaccgtggcagtagagtgatgcttaccacacgcaagaaagatatagctttgcattcctgtgcttgattgggtaagggcatttgacctcgaattcttacccgaggaagaagctnggtatcttttctgc

SEQ ID NO: 209593 - DNA, 510 bp, Glycine max
  unsure (1)..(510): unsure at all n locations
gagggatctagatgcaatttatttggattgctgttgaaccacacaaaaatgttcccctactcaataaggggcacatgctaaggcacagtagcatgaccttatttattttaaaatcatgtggaatatctccatctttaacctgcccccatacgcatcaatactttaggataaaagggcatattcatttttttttcagaagataaaaagaacaaattcccaaagctggatctgaaggcaaagaaggggggtcatcaccatgcacaatcttttgtaccacatatttacaggaaatctgtcaaattattagaatgtaaaaaattgacagcaaatagtactttttgttttttatgctagcaatggtgttttccctagcacaatgttactgagttacttacggtaactgactgaaaagtactttcaaggcaaaggttcttgtgaatctcccaaacgagacaaatggagatatgcatcagtgccatatccttccataaagattanttgaagatcacc

SEQ ID NO: 209594 - DNA, 391 bp, Glycine max
atcatttgatgaagacgagttttcaaacaagcccgttatagtcaataagcccactaaagtcaagaagaccgtaacagctcctacaaatgtaaaatcatattctatagctgacctgcagattgctactggatccttcagtgtggagcaacttcttggtgaggggtcttttggacgtgtataccgtgctcaatttgatgagggaaaggttcttgccgtgaagaagatagattcatctgtccttcccaatgatatgtctgatgattttgtagaactggtttcaaacatatcccaattgcatcatcccaatgtgaccgagcttgtaggttattgttcagagcatggacaacacctactagtctatgagtttcataaaaatggatcacttcatgac

SEQ ID NO: 209595 - DNA, 440 bp, Glycine max
gcgtcctttttttttttttttttttttttttttttttttttttagaccccaacgcatgggattttatttagactaatccaaaatattggacccatacaatcacaaattgccatgaaaaaggttgatctgagtcctagttattacaacaagattgcaaccatgaatcataacccaggttcaatttcagaacagggttaatttatcgaaatttatactcccaatatactaaatagggcataaccataccccttgaaattgtgtttagtttaaatagtccaaggggcatttctttaacttaaaacattagctggctgaagggggttctaaacaagttattgaaatgggagaaatttcatggcctttaaggccattttatcaacacaggcctttctggttgccatttacatggcttgcggatcttggacatcaccccctttgtt

SEQ ID NO: 209596 - DNA, 395 bp, Glycine max
cagcatctgacaagggcagattttttgcttttggtcgtgtattctctggcagagtttcaactggtttgaaggtgaggattatgggaccaaattatgtccctggggagaagaaggatttgtatgttaaaagtgttcaaagaactgtcatttggatgggaaaaagacaggaaactgtggaagatgtcccctgtggtaacactgttgctatggttggtttggatcagttcataacaaagaatgctactttgactaatgaaaaggaagttgatgcccatcccattcgagctatgaagttttctgtctcacctggtgttcgtgttgctgttcaatgtaaggttgcatcagatctttccaagcttgtgaaagtcttaagcggttggccaagtcagatctat

SEQ ID NO: 209597 - DNA, 485 bp, Glycine max
attgaaaatactactatcttatctttcaagcaaaattcccaaatagttcgaaccaacaccgatgcaaaatcctatggataaaaaatacaccgatgcaaggaccaaatcacagaagtacaacattcacggacaaaaccacaaacaaaactcgacaaaacttaaatctaaagtaacattggtcatatgagaaataaattcggctaagttcaaaagtaagttaaatagttcaaacaatttaaagcttgtcttcaaactcggagagaggagtcatctgctccttcaagcccttcctcttgcggatgtccgtgacaagctgtgcagcttgagatccagtctccaatgggtcagaagacatcatgtcccagtgatcaaagacacattgcgggaaagcctggcctgatgttgcagacctcaatgtgctcgagataccaaaggactcaatgacgggaggtctgctttgatgttgtaaagcggggtaccaggcc

SEQ ID NO: 209598 - DNA, 373 bp, Glycine max
gtaggcaatagagatcatggcagttgaagagtcttatccattgcaagagacaaggagggccaaaggaagggtcatttacacaatcttctctttatcactttttgtgggcattttgttcatctgggtttacagagtgagtcacatacccagagaaggtgaagatgggaaatgggcttggattggtttgctttgtgctgaactatggtttggtctttattggctcctcagacaccctttcagatggaaccctgtgttcagggaacctttcagacacaaactctctcaaagatacgaggagatattgccaagagtagacatctttgtgtgcacggcagatccaaggattgagccagcagtgatggtggatgaacac

SEQ ID NO: 209599 - DNA, 387 bp, Glycine max
cttcaatgctatggtgaatcagtgtactgcacatcttcaaacttgctgagcaaatgcaacaatgggcagagtccactggacaggttcacatcagtagtagcatggagcatatctaccacacgccccacatcttttggtgttgctccttataatcccactcttggagagacccaccatgtttccaagggcaatctcaacgtcctagttgagcaggtatcagtcaaccctccagtatctgccctccatgcaacagatgagaaggaaaacattgagatgatatggtcccagcaacctgttccaaagtttcggggtacatctattgaagctcaagtgcatggtaaacgtcagctgaagctcctaaatcatggagaaacatatgaaatgaat

SEQ ID NO: 209600 - DNA, 520 bp, Glycine max
gcaaatgccaattatttgacatcactctttataaacattattcatttccaaatgtacatttggccctaccgtgtcgttaaaggctaacatggttgatgctgagtacaattgagtaccaagctatatatgtggcttagatgatacaaggactaacatgttggtacctctcatgctaatatgctccttctttaggtagcaaatatgagaggagaatttcgttccacatatcaggaacaccggctaagcaccaatggctacaatcaggcacagatggcttgtcactccaagtgcccacgtgtccatcacttctatatgcagtcattggtgtaacatgcagaactgttactggagcactcatgtttttgacaactttgttgatcatatttgaaattgggtttctatccttgccgttagttctcttccaaggcctttgagtcactatgcaagaattgtggttctgtccactccaatgagatgattcataggtgcggaagaatattcttgtcctgtttggattaat

SEQ ID NO: 209601 - DNA, 395 bp, Glycine max
ggcgcttaccggattttctgcaatcggtgaaccttaagtacgtgaaattgggttaccattatctcataaaccatggcatatacttgttcaccatacccgttcttctcgtggtgtttagtgctgaggttgggagcctcagcaaagaggacctatggaagaagctttgggaagacgcgcgttacgaccttgctacggttcttgcttcctttggggtcttcgttttcaccttgtccgtctacttcatgtcgaggccacgtcccatttacctcattgattctgcatgttataaacccgatgacgaactcaaggtgtcaagggagcagttaatggatgtggcaaggaaatcaggcaagttcgacgaagcaagtctagagttccagaagaggatgctaatg

SEQ ID NO: 209602 - DNA, 553 bp, Glycine max
gactataggtaatagccatccatcaactttgatatcaatcatcctatgaagagactgagaaattaaacaaggaggcaaccatatgcctaatgaggaattaaaagtatagaatttcaagccaggaataataaaatgagaaagaaacagaaagcagctgtaacattttaaagaccaacttagaactacccttattgatcctaaccatagctttcacatgacctcactgatagattcataatactagtgccttagaattttgcttcagttgccgagaggtgcatgatatctgttgatgcaatcaagccaagggttcctagaaggcttggcaactcggcgcatggcgcgccaaaccacgctgttgcacttgatgcctgtgccaaatgcgagttgccaaacgcggtctcctcttctgacactctcttttgcttccatgttagccaactcataccaaatgctgctgctagaggtgttgccaaagcggtgcactgtcatcctagatgcttcgatgttcttgtcactcagttctaagttcctttgaagctcatcaagaatg

SEQ ID NO: 209603 - DNA, 557 bp, Glycine max
  unsure (1)..(557): unsure at all n locations
tccgaacagtgaaccctcacctaacaatcagaacccaggatttggtgaaacgatgaacagtgataggaaaattggggttgccttggacttttccaaaggaagcaaaatcgctctgaaatgggctattgacaatcttatcagcaacggtgacactctctacatcgtccacaccaagccttccggaggaagtgaatcaggaaatcttctctggtccaccactggttcacctctgattccattgtcggagtttcgtgaaaaggaggtgatgcgtcactatgaggtggatactgatgctgaggtgttggacttgcttgacaccgcttctaggcagaaacaggtgaatgtggtggcaaagctatactggggggatgcaagagagaaaattgtggaagccgttggggatttgaagcttgactctttggtcatgggtagcagaggcttgggtgccatacaaagggtattactgnggagtgtgactaattatgtcaccgcaaatgcgagttgccctataacgattgtgaaagactctgcccttctactatctgataagctactga

SEQ ID NO: 209604 - DNA, 542 bp, Glycine max
cataaaatatccagaaagcatcagattgataattatgtgacgcatcatgtttaagtatcaaacatttcacaccaccacatcatgtgttctagtaagtttgaaccagattcagcacaaagcttatttataagcacaattttgtggctataaccatgcgcttaaaagagactctgaaaatatacattatgcttgccaaatccttaatcattcaagtgtgttcataatcccaattaaacatgtgtaagaagtaagaacggagggaaacacactctggtcactgatgaagataaaaacaaccgattgcaaaggccaaccaaattcagtagcttatcagatagtagaaggggcagagtctttcacaatcgttatagggcaactcgcatttgcggtgacataattagtcacactccccagtaataccctttgtatggcacccaagcctctgctacccatgaccaaagagtcaagcttcaaatccccaacggcttccacaattttctctcttgcatctccccagtatagctttgcaccacattcacctg

SEQ ID NO: 209605 - DNA, 580 bp, Glycine max
tttttaaaatggaggtggttcaagagcagcagctacaaaatacagatggaagaaaattgcacaactcagacagaaactcaaatgtcacacagcaacttcaacatccaagattcagaaaatacaaatggtggctacgtgtgtccctctacataatctttcttcttgtaggccaatctgcagccactcttttgggaagattatactatgacaatggtggtaatagcaaatggatggcaacatttgttcaatcagctggattccctgtacttcttccactccttttttacttcccaagacaaacacatgccaagtttaataacaatcccagcaataatgattattcctacaaaacaaaaccaaaattctgcacccttgttttcctctatctagcttttggcctaattctcacaggggacaacttgatgtattcctatggacttttatatctgcctctttccacctattctctactatgtgccacccaattagtcttcacgcggtgttctctttcttcctcaattcccagagaatcacagcattcataatcaattctgtagtcctccttaccatatcagcttct

SEQ ID NO: 209606 - DNA, 440 bp, Glycine max
gattttgcaatggatataagaactggtatctaattcgaataagtatcattcttttagggaatcttccaattgattgaccaatccaaataatatatggatatatatatatagatagatctatctatatatatatctaactaatataggaatcttagaaagataattagtctattcataagaggagatgagatcatatgaaaaatataaccgattctttcctttgtttgggctactggccatccgccggaagtttcgggtttaataccgatattttagcaacaaatctaataaatcttagtgtagtgttaagtgtatctggtttttttttggaaagggagtgttcaagtgatttattagataatcgaaaacagaaaatcttgagaactattcgaaactcagaagaattacgggaaggggccattgaacagctggaaaaagcc

SEQ ID NO: 209607 - DNA, 483 bp, Glycine max
cgctgactagtcgtcgggcgcccttttttttttttttttttttctattctcattcgaattcattgtatttatatgggaatattatattcaaatgaaataaagagatattaaaagatactaattataagaatttgaaagtgaaattataaagtgattaaatgatcaatcaatttgatgtctacctgtacctgtagtaaaaagagttgcatctgctcttgaatagcttccttcaaaaggacttctgtttccccagtgaatgtcttgctagaagatatgacttctttgacttgaggttcattcgagtgtaagtaagcacgtgactcaacacgaaatttgcttacctgtccaattcgtaatgaatcaagattaccattcgtaccagtataaataggtacaagctgttcatccacggaaagaggagctgattgggactgtataaacaactcgcgcaatcgatgacctgttgctaattgattttgagta

SEQ ID NO: 209608 - DNA, 360 bp, Glycine max
cacccttcttatctacacccaattaaggaagagtgtgttagtgtgagaaaaccctttagtggtgatagagtgaagagagatgaatggagtgaaggggcagtgtcaaccctccttgaggcttatgaggccaaatgggtgctaagaaacagagccaaactcaagggccatgattgggaggatgtggcacggcacgtgtcggcacgtgccaactgcaccaaatcaccaaagacttcaacgcagtgtccgaacaaggttgagtccctgaagaagagatacagatcagaatcagcagcaacagcagatcatgcatcatcatcatggcctcgttatccacggcttgatcttattcctatgggaact

SEQ ID NO: 209609 - DNA, 402 bp, Glycine max
gtacactaaactaaaatcatcacaagacgacacttataaacatgattacatacaaaattggcttaaagcaaaaccatcaatcgtgatgcgtcatatatcactggatgactcaacccttatgccacgtatctcaaggttgtctagcttcctgggtctcctgtaatatttcaacaacagagaacagcaaacaacgctgacagaggaggcagccatagcagccccagcaatccagggtggcaatctgaaccttgtagaagggaaaagagctccagcagcaattgggatgccaagcaagttataacccaaagcccaaaagtaattcaggcgtatacgggaaaatgttcttctggaaaggtcaatggcagttatgacatcctccaagttgcttctcatgaggacatt

SEQ ID NO: 209610 - DNA, 360 bp, Glycine max
cattgactagaaatcccatattttccccccacattaactcacccaacccctctttctaaaaggcctcaaggatacactccggacttaattacgttattttgttagggtcaccgtttcgagatattctaaacttgtactgaaaaatatggagggaaaagaagaggacgtaagagttggagccaacaggtacggagagaggcagccaatagggaccgctgctcaggctaaagactacagagagccaccgtcggcgcctctcttcgaaccgggagagttgtcatcgcggtctttctataaggctggcatagcagagttttgtggccactttcttgttcctctacatcacagtgctgactgtga

SEQ ID NO: 209611 - DNA, 492 bp, Glycine max
gcaaatgccaattatttgacatcactctttataaacattattgatttacaaatgtacatttggccctaccgtgtcgttaaaggctaacatggttgatgctgagtacaattgagtaccaagctatatatgtggcttagatgatacaaggactaacatgttggtacctctcatgctaatatgctccttctttaggtagcaaatatgagaggagaatttcgttccacatatcaggaacaccggctaagcaccaatggctacaatcaggcacagatggcttgtcactccaagtgcccacgtgtgcatcacttctatatgcagtcattggtgtaacatgcagaactgttactggagcactcatgtttttgacaactttgctgatcatatttgaaattgggtttctatccttgccgttagttctcttccaaggccttcgagtcactttgcaagaattgcggttactgccactccaatgagatgattcaaaggtgcgga

SEQ ID NO: 209612 - DNA, 490 bp, Glycine max
gcaaatgccaattatttgacatcactctttataaacattattgatttccaaatgtacatttggccctaccgtgtcgttaaaggctaacatggttgatgctgagtacaattgagtaccaagctatatatgtggcttagatgatacaaggactaacatgttggtacctctcatgctaatatgctccttctttaggtagcaaatatgagaggagaatttcgttccacatatcaggaacaccggctaagcaccaatggctacaatcaggcacagatggcttgtcactccaagtgcccacgtgtccatcacttctatatgcagtcattggtgtaacatgcagaactgttactggagcactcatgtttttgacaactttgttgatcatatttgaaattgggtttctatccttgccgttagttctcttccaggcctttgagtcactttgcaagaattgcggttctgtccactccaatgagatgattcaaaggtgcgg

SEQ ID NO: 209613 - DNA, 367 bp, Glycine max
gctgaaagagcactcggtgggtctaaactgtgggcgttgggattacattgtcaggtctgttaagaccttacaggctcacccagatcgcctcctaccagacagggttcaggttggcatgactcaacacttcatgaaaagctactctgatctcctcatcaggacgtgccacaggcgcggtgtgcatgctatgggaggaatggcagcacagattccaatcaatgatgacccagtggcaaatgatgcagcactggaactggtcatgaaggacaagcttagagaagtgaaggcatggcacgatggaacttgggctgcacaccctggtctcattccagcctgcatggagattttcaacaacaacatgggcaat

SEQ ID NO: 209614 - DNA, 617 bp, Glycine max
gtagtgattcttgtgtagtcgatgcagggtaagcatagtcgagctatgacgttgcatgcacagctcactaatctgcggacgccctttgagtttttttttttgacgaaaactaaattttgaatattttataagaacgaaaaatataggtttcttctttttattgaataacgataagtcgataatcactaagtcatagacacaatgacaccatcgtgcatttgtgattttctcacatcagcaactagaagtacacaagacagagtccaagtgatccaactattaggcaataaagaaccccttagttcaaagctttgacgggtccttccttggcgtgatgcacaactatgtaattataggcatccaaagtgagaaaatcatcaagagttggggacgtgcattggcgagtgaagatcttgcaagccgccttgtacattcccttgtagaacttctctgttcccacttccttttcaatcctagccatctgttgttcaaccactctatcaaaaaggtctttgttcactttctctccaagcccatcttcatctagctccactccatacttgagccactgccagttctgcaccctgctaatctcagcagtggcagcatcctccatg

SEQ ID NO: 209615 - DNA, 509 bp, Glycine max
tcgccgcgttcctgcctagtcccctagtagagcagctctgacgttacattcatcgcgtccgtacgctctcacttctcctcgagcgacctcacacacactcagggtactttcctatagagagagagagagcgagagagagagagagaatgccacgctgggctatcgcggtgcatggtggcgctggtgtcgaccctaaccttgcactcaagcgccatgaagaagctaaacagcttttcacgcgctgtctcaatcttggaatctctgcatctgcacttctaatactatccgccatagatgtcgtcgcacttgtgtaccacggaattggaaacggatccgttggtcaattcgggccgtgcatctgccctgacacaaaaaggaacggcggtgatgcttgctctcatcatggatggtccataacgactattcggcgcaggtcctgatcttaccaccgataagaacccgatctctcttgctcgtttggctatggacaactccacgcgttcctacct

SEQ ID NO: 209616 - DNA, 426 bp, Glycine max
taatctgcggacgccctttgagattttttttttgacgaaatttatttaagagatagacaacaaagttaccatagtatggtttcacatttttatctaatacctagaaacaaggtttccatatgttatctaaacagggccccagtagaaagaccctgcactactggggtacatggctcaaaaatcccaaagctgcgttgaaacaaccatgatggaaaataatgaagctattcccagattccaacctccatgaagccattttcagcggcacagacattaaacatgccattggaattgaaaccataagccacttcccgaacgttggacacagcattgagaccagccattcctgtatcgagacggggcttgatcacaaaatccacggtttgttgaagcttcaagcctttgcattccattaccggtgtcacc

SEQ ID NO: 209617 - DNA, 582 bp, Glycine max
  unsure (1)..(582): unsure at all n locations
tttttaaaatggaggtggttcaagagcagcagctacaaaatacagatggaagaaaattgcacaactcagacagaaactcaaatgtcacacagcaacttcaacatccaagattcagaaaatacaaatggtggctacgtgtgtccctctacataatctttcttcttgtaggccaatctgcagccactcttttgggaagattatactatgacaatggtggtaatagcaaatggatggcaacatttgttcaatcagctggattccctgtacttcttccactccttttttacttcccaagacaaacacatgccaagtttaataacaatcccagcaataatgattattcctacaaaacaaaaccaaaattctccacccttgttttcctctatctagctattggcctaattctcacaggggacaacttgatgtattcctatggacttttatatctccctctttgcacctattctctactatgtgccacccaattagtcttcacgcggtgttctctttcttcctcaattcccagaaattcacagcattcataatcaattctgtagtcctncttaccatatcagcttctct

SEQ ID NO: 209618 - DNA, 589 bp, Glycine max
  unsure (1)..(589): unsure at all n locations
caacatccgaacgaaacaatcatggcagcgaacccacccgcgccttcagaatccgacccgaaccaaaacccgggttcggagtcctttccgtacttcgaagacatgaacgaactcgagacagtcttcaaccgcttcgacgccaacggcgacggcaagatctccgccgacgaactcgacagcgtgctccggtcgctcggatccggcgtctctcccgaggacctccgccgcttcatggaagacctcgacaccgaccgtgacggcttcatcagcctcacagagttcgccgccttctgccgctccgacgccttcgccgacggcggatccggcgagttccgcgacgccttcgatctctacgaccgcgacaaaaacggcctcatctccgccgcggagctccacctcgcgctcaaccgcctcggcntcaagtgctccgtcgacgaatgccgcgacatgatcaagtccgtcgacgccgacggcgatggctgcgtcaacttgaggagttcagacgatgatgacgacctccagaatcgtggcgcgccaccatggctcgtncatagctttcgcgcgatcgattctgacgcgttcgtgactg

SEQ ID NO: 209619 - DNA, 312 bp, Glycine max
gagcgagcgagcgagcagtttcaaagagaggatttgggattgggaaggcgagggattgcgctgcgtctcttcctcttctctttcgattcatccctcattcataatcttccaatccaacaacctcagcctcacactcacacatacacacatctgaacgcgtatcgtccctcccatggcttcaaagcgcatcctcaaggagctcaaggacttgcagaaagacccaccaacttcttgcagcgctggtccagtagctgaggacatgttccattggcaagcaacgattatgggtcctgctgatagtccttatgctgg

SEQ ID NO: 209620 - DNA, 457 bp, Glycine max
gacacaaataacatcttgttcatgcgttcgcatcatgataaaaacatcacagtggttgttgaacatagttatttttatcaaattaagacaccgcccttccctatcccctcataacaaacataatcttaccccagaaaaacaggaagagaaaagcaaacccacaaaagttttcatagatgccatccatttcaatatacattatctaaacacaaatcagcccatggcatacttctgggtccagctgcgtgcagtggcctcatacttggcccggtcagttttgtacatgtgagcgatttccggaacaagtggatcatcaggatttggatcagtcagcaatgagcagatagaaagcagtaccttagagatggtgagtgcagggctccactgctccttaaggatatcaagacaaatgctaccattgctgttgatgttcggatgaaacaccttagtcctaaag

SEQ ID NO: 209621 - DNA, 548 bp, Glycine max
  unsure (1)..(548): unsure at all n locations
gattgtaagatttagtacaatttcttgtttgaattggcaatatctacaaaggaacatcagaagggtagtctttgggatgcttctcgatggtttttctaattagtctctcttgctcctgaaggtttgatggtatttggtcatagacatcattaaataagtcctgaagtggaggtttttgtgctttctctgccacctgaatcgcatgcattaactgcttcctgacactgcttctaagctccaattcatccttgtcactccaccaaccattcctttctacccatcttttgaacctattcactggattccttgccatcttccaatattcaatctcatcagttccccggtacttagttgaatcatcagatgtagagtgatgtccaactctataagtgagagcctcaattaaaactggccttttttcttttatagcgatttctctagcagtgtgaactgcactataaacagcaagagcatcatttccatctactctgatgctccagatgccatangctntacccttaactacaataccatcacttcgaaattgg

SEQ ID NO: 209622 - DNA, 421 bp, Glycine max
cttcaccccttccttttttgcgttcattctgttttcataggcttcttttttctcttgttgcagtgacgaacttctgaagaaatggcaaatcatcctttgacacactctcactctttccgcgagaggtttgatgaaactctcactggtcacaggaacgaaattttggcccttctgtcaaggcttgaagccaagggcaagggaatcctgcaacatcaccaagtggttgcagagtttgaagaaatccctgaggagagcagaaagaaactccaagatggtgtctttggagaagttttgagatccacacaggaagccatagtgctgccaccatttgtagctcttgctggtcgacaaggcctggtgtatgggaaatctgcgtgtgaatgtgcacatgcttgctgctgatgagcttcgtcctgctgag

SEQ ID NO: 209623 - DNA, 429 bp, Glycine max
gttagaatacacagaattatgagctgtgaactcttattattcatttaatgttcatatgatcatctgggtctttcttgattatggagtctactaccttctgtcgataatgggaacgaatctcagcactcccaaaactgagaagtcttctgatgatggtgaaaatgagcatcttagatatggtttatcatctatgcaaggctggcgtgcaacaatggaagatgcatatgctgcacatcttgatctggatgcatccacttccttttttggtgtttatgatggtcatggaggtaaaagtggttgcaaagttttgtgccaagtatcttcaccagcaggtgctcaagaatgaagcatacatagctggagatataggaacctctcttaagaatcatttttcagaatggacgacatgatgcgtggtccaaggggatg

SEQ ID NO: 209624 - DNA, 572 bp, Glycine max
  unsure (1)..(572): unsure at all n locations
gttgtgttgtgttgaagtagcaagctagcaaagatgtttggcatcttaggaggcaataaggggcacaagatcaagggtactgtggtgttgatgagcaagaatgtgttggacttcaacgaaatagtgtccactactcagggtggtttggttggtgctgccaccggcatcttcggtgctgccaccggtattgttggtggagttgtcgatggtgctactgccatcttcagtcgcaacattgccatccagttgatcagtgccaccaagactgatggacttggaaatgggaaagttggaaagcaaacctatttggagaaacatcttccttcgttaccaaccttgggagacaggcaagatgcattcagcgtttattttgaatgggataatgattttggaattccaggagcattttacatcaaaaattttatgcaatctgaatttttcctcgtgagtgtcactcttgaagacattccaaatcatggaaccattcactttgtttgcaactcatgggtttacaatgcanaaagttacaaagggatcgcattttctttgctaataagacatatctttcaaat

SEQ ID NO: 209625 - DNA, 513 bp, Glycine max
tttgtgattttttttttttttttttttttttttttttttttttttttttttttttattttttggtttttgacataaaaaaacttgatttgaccttcatagatcaaaatttcaaacttacatacgggggaacattacccgggggaacctgattggggcccaatcctttacctaaaaactggccccacccccttttagatttgaaaaacttggttccatccaattccaaaacttaagcattcctaagaaaattttgcccccctaaatttgcccgtttatttggcaatgaaaggtcccttggaaggaaaaaaaaccccaccccacacaccacacactttcattagaaagaaatgctggtgggaattcccctgaaagtaaggccttccccactggtgggaaaaaacccagggttaggcattttccccggtccattacgggtcctaagggttgaaatcttgctcctccctgaaattttgaccccaatttccttcaacttggttccaaacttcttaaag

SEQ ID NO: 209626 - DNA, 556 bp, Glycine max
cactaatccttctctgcttggaggcttttttttttttttttgatggatccggcaaagggattggaagcttcgggggagaagacccttcaagcagaagtgaaagcttttttcgattctgctcctcctttgcagaaaagtgatgagataactcagaagttgaatcagttcattcaacgcatttcttctccatcagcgaatgggaaagttaggagaattgtttgtgtgacttctggtggcaccaccgcgccattggaacaacgatgtgttcgctatgtggacaatttcagttcaggtcacagaggggccacatccactgagtatttcctgaaggctggatatggtgttatctttctgtaccggaagagaagtttccagccattttgtagatcccttcctgatgatcccttacttgaatgcttcaagcccaccgatgaggcgaacattcaagtttgcgaggcttattctgaagcagtgaagagggctatcgtggatcatcatactgcagtggcaggcggtctcttattgaaacttcctttcacaccatatttgagtatct

SEQ ID NO: 209627 - DNA, 576 bp, Glycine max
  unsure (1)..(576): unsure at all n locations
ctcacacccaaacctcatggaaggctctgtcaacgaacgtcttgattttgggaagatgggatatgggtgcaatcattaccggagaagatgcaggattcgtgctccctgctgcaacgagatctactcatgccgtcactgtcataacgacgctgcgagcttgttgaagaatccctttgatcgccacgagctcgttcgccaagatgttaaacaagttgtttgttcagtttgtgacactgagcaacctgttgctcaagtttgcacaaactgtggcgtcaaaatgggagaatacttctgcaacatctgcaaattcttcgatgatgatgttgagaaagaacaatttcactgtgatgattgtgggatctgcagggttggtggtcgagataattttttccactgcaagaagtgtggatcttgttatgcaattggtctgcgtgataatcatctgtgtgtggagaactccatgcggcatcactgtcccatttgtgacgagtacccttttgattcattgaaagacaccattgntatgaaatgtggtcacacaatgcaccatgaatgttacgtagagatgataaaaat

SEQ ID NO: 209628 - DNA, 495 bp, Glycine max
  unsure (1)..(495): unsure at all n locations
gattgtaagatttagtacaatttcttgtttgaattggcaatatctacaaaggaacatcagaagggtagtctttgggatgcttctcgatggtttttctaattagtctctcttgctcctgaaggtttgatggtatttggtcatagacatcattaaataagtcctgaagtggaggtttttgtgctttctctgccacctgaatcgcatgcattaactgcttcctgacactgcttctaagctccaattcatccttgtcactccaccaaccattcctttctacccatcttttgaacctattcactggattccttgccatcttccaatattcaatctcatcagttccccggtacttagttgaatcatcagatgtagagtgatgtccaactctataagtgagagcctcaattaaaactggccttttttcttttatagcgatttctctagcagtgtgaactgcactatatacagcangagcatcatttccatctactctgatgc

SEQ ID NO: 209629 - DNA, 362 bp, Glycine max
gaggatgcatacaagtcaccattgagtgtcatcattcttgatgacattgagagattattggagtatgtgcccattggtcctcgattttcaaacttgatttctcagacactgctggttctgctcaaacgggcttcctccaaaggggaaaaaactcatggatattggcacagcacgtgaactagatttcttggaatcaattggattttgcgataccttctctgttacttaccatattcctaccttgaacacaacggatgcaaagaaggtcctagaacagttgaatgtgtatactgatgaagatattgattctgctgcagaagcgttgcatgatatgcctatcaggaaactatacatgttgatcg

SEQ ID NO: 209630 - DNA, 586 bp, Glycine max
cagcacaacctaacaaacactgattcaaaaaaatctctgtaactgaaccgtaacaagcaatgtaatgaactgttaaaaaaagatttcaactcaataaggattatatgcactctaacttagaaagcgcttaatacaacaacttataacctaacaacatcctggaggcaatcatagaagtgagcgatactaatcttctctttgccagaaaagatggcttctgcagatccaccatgctccccttgcgctgccatctcgatcaacatgtatagtttcctgataggcatatcattcaacgcctctgcagcagaatcaatatcttcatcagtaaacacattcaactgttctaggaccttctttgcatccgttgtgttcaaggtaggaatatggtaagttacagagaaggtatcacaaaatccaattgattccaagaaatctagctcactcgctgtgccaataaccatgagctgtttcccctttggaggaagccgattgagcagaaccagcagtgtctgagaaatcaagtttgaaaatcgaggaccaatgggcacatactccaataatctctcaatgtcatcaaggatgatga

SEQ ID NO: 209631 - DNA, 356 bp, Glycine max
gttgcgttgtgttgaagtagcaagctagcaaagatgtttggcatcttaggaggcaataaggggcacaagatcaagggtactgtggtgttgatgagcaagaatgtgtcggacttcaacgaaatagtgtccactactcagggtggtttggttggagctgccaccggcatcttcggtgctgacaccggtattgctggtggagttgccgatggtgctactgccatcttcagtcgcaacattgccatccagttgatcagtgccaccaagactgatggacttggaaatgggaaagttggaaagcaaacctatctggagaaacatattccttcgttaccaaccttgcgagacatgcaagatgc

SEQ ID NO: 209632 - DNA, 514 bp, Glycine max
ggagtatgttccagagtccatgtatagagtcttaaagcactatagcaatgctaatcaaagaatgccaatcatctacgtaaaactttatatgtaccagattttcagggggttggcttacatccacactggtcccaaagtttgccacagagatttgaagcctcaaaatatactggtggatcctcttacacaccaagtgaagctatgtgattttggaagtgcaaaagttctagtcgaaggtgaagctaatatatcatacatatgttcacgattctatcgagcaccagaacttatatttggggccacagagtataccagttcgattgatatttggtcagctggctgtgttcttgctgaacttcttttgggccagccattattccctggcgaaaatgcagtagaccagcttgtacatattataaaggtgcttggcacacccacccgagaggaagtacgctgtatgaatcccaaatacaatgactttaggtttccacagataaaagcacacccatggcac

SEQ ID NO: 209633 - DNA, 598 bp, Glycine max
ctcacacccaaacctcatggaaggctctgtcaacgaacgtcttgattttgggaagatgggatatgggtgcaatcattaccggagaagatgcaggattcgtgctccctgctgcaacgagatctactcatgccgtcactgtcataacgacgctgcgagcttgttgaagaatccctttgatcgccacgagctcgttcgccaagatgttaaacaagttgtttgttcagtttgtgacactgagcaacctgttgctcaagtttgcacaaactgtggcgtcaaaatgggagaatacttctgcaacatctgcaaattcttcgatgatgatgttgagaaagaacaatttcactgtgatgattgtgggatctgcagggttggtggtcgagataattatttccactgcaagaagtgtggatcttgttatgcaattggtctgcgtgataatcatttgtgtgtggagaactccatgcggcatcactgtcccatttgttacgagtacctttttgattcattgaaagacaccattgatatgaaatgtggtcacacaatgcaccatgaatgctacgtagagatgataaaaatgccaatattgtgtgcatatgct

SEQ ID NO: 209634 - DNA, 531 bp, Glycine max
  unsure (1)..(531): unsure at all n locations
acttgacaaatcccaagaatcaaaagcccaaaacatctatgcattcaaactcagcatttcaagtagagtctgagaaggttagtccattagcggtggttcgatcaatggtcactgtttgtctattagggcgagtacccttctcaccgattgattcttccaccgtgtcaaggaaattggaaaatgatcagatggtgacaccaacagagaaggcagcacttcaggaacttggaggggattcgggggcaacacttgcagtggagatagctttaagggcaatggcagatgataatggtggtgttgaagtggaggagtttgtgctgagtggcaaggcaagaattatggttttaaatgtagaccggactcggcttctgagagaattgccagaaagtgtgcagtatcagcaacttgaatcaagttctggagatgggaatgcgaatcaaaatcaagttcagcatatcactcatagtggttctaatgtgaatggtagtttgcctgngatgggaaggctagttccgaggccaatgtctgata

SEQ ID NO: 209635 - DNA, 364 bp, Glycine max
gattggaactttagatggggccaatgttgaaataagggaagaggttggtgcagacaactttttcctcttcggtgccacggctcatgaaattgctgggctgaggaacgaaagagcagacggaaagtttgtccctgatccaagattcgaagaagttcaagaatttgccagaagtggtgttttcggatcttacaactatgacgaattgatggggtccttagaaggaaatgaaggttttggtcgagcagattatttccttgcgggccaggactttcccagctacatataatgcccagagaaagctgatgaagcataccggaaccaaactcaatggacgagaatgtcgatattgaacacagcaagctca

SEQ ID NO: 209636 - DNA, 337 bp, Glycine max
ggcatcttgtgttgtgtccctcttttaagctatttccttctcttaacacaattggttgtgccaattgccatagtcaccaaccaattaacaaaggtatatatatcatcatatcatcaccaaatgaaaaatattgggttgttttttcttgtggtggtggctacttttgtggtggcagccacagctggtagcttttaccaagactttgaaataacgtggggtggtgagcgtgccaaaatctatgagaatggaaaccttctcacactctcccttgacagagcctctggctctggctttcgttccaaaaaagagtacttgttcggaaaaattgacatgcagc

SEQ ID NO: 209637 - DNA, 307 bp, Glycine max
ctcagtcttcatctccaacaagcgttactgtgaccatggcatccaccactctatccgctacaaccccttctcagctatgctcaggaaagagtgggattgtcagtccctcacaggcacttcttgtgaagccagtgaagaggcacatgatggggaagagcacgggaatgagaattgcatgccaagccaccagcattcctgctgatagagtccctgacatgggcaaaagacagctcatgaatctgcttcttcttggtgccatctcactcccctgtgctggaatgcttattccctacacctacttttttgt

SEQ ID NO: 209638 - DNA, 432 bp, Glycine max
acacggtaaaaagtgacccgttcaggttcctttccatgttagcttcagttcacaaaatatcaatgtgattacaaaatatatttatgcattaatacaaaacagaatgtctggatttcatgtctaaatatacatgacatcagagggacggctttaaggagtctaagcccaccatggagcatcacctgttctgaaatctgtttcaacccaaggaacaaacaccaccgtcccatcatctatatcacaatgtgctaatgccagagacaagggagcaggtcctctcacaactcttgcttggtcattgaactgagatccatggcaagggcagatgaactcgttctctgcttgattccatgggacgacgcatccaatgtgagtgcacacggtattaattgcgtatgttcgcagggttctggctttcttcacaacatgata

SEQ ID NO: 209639 - DNA, 406 bp, Glycine max
ctccttctcccgccgcaactcacactgtcttccttctctagggcttttagctactccaaatgcttcgcccaacatggttcttcaaaatgatattgatttgctaaatcccccggctgagcttgagaagaggaaacacaagctcaagcgtcttgttcagtcaccaaactctttcttcatggatgttaagtgccagggttgcttcaacataaccactgtctttagccactctcagactgatgctgcatgcggaaattgccagaccgtcttgtgccagccgacaggcggccgggcaaggctaaccgagggatgctcctttaggaagaagggagactgagtggcgtgccatctttatttgtctgtgattggagagtttcagtaatgccttcttttggtctggttatggtat

SEQ ID NO: 209640 - DNA, 352 bp, Glycine max
gttgggggccataagtggggtggggcttgtgaaggctttgcagaagagctactacaacaggtacaaaggttcgtgaacatgctcgctgatggttacagcaaaggaaccggtttgggcgctgagattattggcacctttattcttgtctacaccgtcttctctgctaccgatcccaagagagtagcaagagactcccatgttcccgtgttggcaccacttccaattgggtttgcggtgttcatggttcacttggccaccatccctatcaccggcactggcattaacccagctagaagccttgggcctgctgtcatattcaacaacgagaaagcttgggatgacccagtggatc

SEQ ID NO: 209641 - DNA, 544 bp, Glycine max
aataaaacgacatggtattggcaagaaaacgcgaaaaccacgaccacaggatactaacgcacatgtacgtaacacttaaaaatacatacacaaattaacatgggcatgtctgttgagatggacgtcaccacaaatatagtaaacataaattaaataaacatagtgacgaggatatacagattattccaatccaccatgtataagcaaattaattaagaacacaattaaatgaagcatgtctctcgtagctcaaatagcttggccagaattacaggtttgaggagctcctgaaagaccctagagcctttgctgcttgggccctcaacacggactggtggtagaatgcagcaagagcagcaccgatgaagggtccaacccagaagatccactggtcatcccaagccttctcgttgctgaatatgacagcaggcccaaggcttctagctgggttgatgccagtgccggtgatagggatggtggccaagtgaaccatgaacaccgcatacccaaatggaagtgggtgcaacacgggaacatgggagtc

SEQ ID NO: 209642 - DNA, 361 bp, Glycine max
gggatgagagagccatggaagaagctgctgccatccccatccttggctggcaaggccgtgaagctgggcccatcagccccagaagtgggaagggtgagcatgaggaagaccgtcaccaagcaggtctcctcaggaagcccatggtacggcccagaccgagtcaagtacttgggcccattctctggcgagcccccgtcctacctaaccggtgagttcccaggcgactacggctgggacactgctgggcttttcgcagacccagaaaccttcgtcaagaaccgtgaactcgaagtgatccactccaggtgggccatgctccgagccttgagctgcgtcttcccggagttgctgttccgcacgg

SEQ ID NO: 209643 - DNA, 500 bp, Glycine max
gtaaaaagcaagtaacattaagttggattcggatacacaagataattcacattatctgaagtacttcaccaaacacaaatctaaaaactctcaaaagtcatttcgttctttgacgctcactttccggggacgaagttggtggcataggcccaggcgttgctgttgacagggtcagcacggtgatcggcgaggttctccaatggaccctttccggtgacaatggcctgaacaaagaagccaaacatagagaacatggccaatcgtccgttcttgagttccttcaccttaagctcagcaaaagcctctgggtcatcagcaaggcccaatgggtcgaagctgccacctgggtagattgggtcagtgacctcaccgagggggccaccagcaatacggtaacctttaacggcacccattaggataacttgtgtggcccatatggcgaagatgctctgggcgtggatcacgcttgggttgcccagtagtcgagcccaccctcgctg

SEQ ID NO: 209644 - DNA, 508 bp, Glycine max
  unsure (1)..(508): unsure at all n locations
ggaaattcggcaaaagagggccgcggagagattgagtaaaacctcttcgggaccagatctcacgcaggttcccagcacctccgagattgcgggaatgagcaagtccgagagcgcaaataagctctctgagacagatcttagtgctctattgtctcaattgaaaggactgcaaaagaagaacacggagttggaggaagaaaacacaaagattagtttaaagcttcaaacgatggaaattgataatgagacaatgcacaagcaattaaatgatgtggaacaaaatacagtgccatctctaaggaaagctctgagggatgtcgcaatggagaaagatgctgcagnctgttgcacgggaggacctttcagcacagctttcgtaccctgaagaaacgtctcaagggaagcagaagatgagcaatatcgtgccgaggaagatgcagcagcattgagagcagaattgaactcaattcagcaacagcaatgactaatacagttagcacaatttcat

SEQ ID NO: 209645 - DNA, 489 bp, Glycine max
tttgtgcttattcatgaagaggatcatgatctggacgaaggtgcatggaatattgcaatggcaggtggtacatgccttggtttagatgcccgtactgttggagatgatattgtgccgctggtaatgcccttcattgaggagaatatcacataaccagattggaggcaaagggaggcagcctcttatgcttttggatctatcttggaggggccttcacctgacaaattagctcctcttgttaaccatgccttaccatttatgcttagtgctttagtgaaggacccaaacaaccatgtgaaagacaccactgcttggactgtgggacgaatgttcgaatttcttcacagctcaattggtggtacaccaatcattaatgagggaaattgccaacagattattacagttctacttcaaagcatgaaggatgttcccaatgttgctgagaaggcctgtggtgctctgtattttctttgccagggttatgaagat

SEQ ID NO: 209646 - DNA, 600 bp, Glycine max
  unsure (1)..(600): unsure at all n locations
gctcgatgcatgcttggagcaggaccctgacagcaaggttgcctgtgaaacctgcaccaagaccaacatggtgatggttttcggagagatcacaaccaaggccaacgtggactatgagaagattgtgcgtgacacatgcaggaacattggttttgtctctgatgatgttggtcttgatgctgacaactgcaaggtcctcgtcaacattgagcaacagagtcctgatattgctcaaggtgtgcacggccacctcacaaagaggcctgaggagattggtgctggtgaccaaggtcatatgttcggctatgccactgacgagactcccgagctcatgcccttgagccatgtccttgccacgaagctcggtgccaagctcaccgaggttcggaagaacgggacatgcccttggctgagacctgatggcaagacccaagtcactgttgagtactacaatgacaagggtgccatggttccaaaacgcgtccacactgtgctcatcttcacacagcatgatgagactgtcacanatgatgagattgcagctgatcttaaagacacgtgattaagcctgtgattcctgagaagtaccttgatgagaag

SEQ ID NO: 209647 - DNA, 435 bp, Glycine max
ctcaaacaagaagaggatcaggatctggacgaaggtgcatggaatattgcaatggcaggtggtacatgccttggttcagttgcccgtactgttggtgatgatatcgtgccgctggtgatgcccttcattgaggagtatatcacaaaagcagactggcggctacgggaagcagactggtatgcttttagaaaaataccgaaaaaaaaaaacacaattgagtaagagggccggtgcccatgcctagattgcatgggctgattcggctcatgcccttacttgcggcaatggccctgttcaaaagtggtggcaccccttttaacgaaacgggtgccttcttccccttgtggggcttgaccacttcccatgtgagagtaggggcatttcttccaaagtgtccatttgcaccattcttcaagaacctggcatttccacccc

SEQ ID NO: 209648 - DNA, 468 bp, Glycine max
aagaagcgaaccaaacttagttgtctctgtatatatatttaacttcagaaaagtgaccctaaagtcactagtgatttacaaaatctgaaccacatatatattgcaggattccatttatgtttgacactcaatcaattctaggggcttcaaaaacccaccaaagtgtgccaaagtggttcattttattcaacaaaggaagacaataatggccagaaaacacaacaacatggaaccacatagcagtacactgcacactatatagtaactctgccacaagtacacacacacaaacacaaaggagtatgtcaagcatcatcatgtcctaaaagcgccacaagcattttctcatagtcaccggtggtgtccttaacaatagcacgttcaagagggacactgctcctcctttgatactcatctgctatggttttcaaatcaacctcagtccttgtggccaccactcttgtaagg

SEQ ID NO: 209649 - DNA, 458 bp, Glycine max
gtgactgtagttatggtcaataatttgaaattagttttcctcagttttaaaacaatctgattctcagttaaactggcttacttgaacactgatgtcagttcgaactgtgaaattcaaaggcttttcttttctgaaaatgctaagaaagaatcttggctgacactatggagaattaatggcttcaagctgccttctaagatcttccagggcgtcattgtcaactacggcagcgttaatagttgccttatgaaactcgtcagcatgcgtaagtgcatgtgtgtgaccttccggcagaacatcttatcttatgggatccggaccaaccaggtgaacatgatcgacagcactgatattccattcattatcttcgagaagcggcacttcctcagttgatggcgcttcagctctcattgtcgctttggctgcagaatcccttgctggttttgaaacaggaactg

SEQ ID NO: 209650 - DNA, 512 bp, Glycine max
caccaccatgaagttttcgtaatattttattataaggagttagctcttctaacttaaagatgttttataaagtaagaaagtaagtttgcaagatactttaattcaaatcatcaaatgaaatataataacaaagtttgaagaaagccaaccttcaagtcagacaagaataagaattttcatcctttgaaactggctcgcaccaccaagttcatatcttccagtgtggtcctatccttccatccaccagcctcattcaacgccaaaattctccatactccatccaccagcctcattcagcgccaaaattctccatactcccgcagttcctcgtgtatttacaagagtacaaaagaaattggcttaatcttttgttttcataaaagagctagcttccactattgcacaaaaatccatgttttttttcaaaaaattaaggaaaatggaactattggatctcgattttttaaattgtccaagtgaaaatatttgtcatgcatattacttgtgaaatc

SEQ ID NO: 209651 - DNA, 365 bp, Glycine max
tgggaagccccacaccgttccgtgcaaggttaccgggaagtgtgggtccgttaccgttaggatggttcccgcgcctaggggttccgggattgtggcggctagggttcccaagaaggtgctgcagtttgctggtattgatgatgttttcacctcctccaggggatccaccaagacccttggcaacttcgttaaggctacttttgattgcttgatgaaaacctatggattcctgacaccagaattctggaaggagactcgcttcttcaaatctccattccaagagtacacagatctattggcaaaaccaacagggaagactctaatcttggaggaggaaagggtggatgcttgatttgctagttttg

SEQ ID NO: 209652 - DNA, 503 bp, Glycine max
attcaaaactacagtcaattaaattaaaacttgaaacaatcaaaatccatacagagacataccaccgtctatcaaaaccaaaagtgaagcacagaaccaacaaaggtaaataacaatgtctctaaaacatccataaaaccaaaactagcaaatcaagcatccaccctttcctcctccaagattagagtcttccctgttggctttgccaatagatctgcgtactcttggaatggagatttggagaagcgagtctccttccagaattctggtgtcaggaatccataggttttcatcaagcaatcaaaagtagccttaacgaagttgccaagggtcttggaggatcccctggaggaggtgaaaacatcatcaataccagcaaactgcagcaccttcttgggaaccctagccgtcacaatcccggaacccctaggcgcgggaaccatgctaacggtaacggacccacactatccggtaccttgcacggaacggtgtggggctttcca

SEQ ID NO: 209653 - DNA, 410 bp, Glycine max
acactgtaataattgaccacgtcaagtgatgcttaaatacagggtactttcacacaatttcattaactgtacagaaactaccaatgctttgatccaaaacatactgactgggtttgaaggctaggtatccatgacactcccagggactgttttaaggagtctaaaccctccatggcgcctggaacgacctgaaaatcgtttgaccacacagaacgaagacggccttatcattatttataccacagagtgctaatgccaaccacatcggggcagggcctctcacgaccctgccttggtcattgaaccgagatccacaggatgggcaccttgactcgaagaacgctcggttttatggccccatgcatccctgctgagtgcacgcagtccttgtcgggtaggtcgcaagggat

SEQ ID NO: 209654 - DNA, 394 bp, Glycine max
aacatgtttaccatgtggcagggagcaaaactaaagcaaaggaattggagcttttgttagcaatattgccagacaataatgggtctctctatggtgatctcaagcgaatttgtgaaactgaccttggcttaatttcacaatgctgtctgacaaagcatgtcttcaaaatcactaaacagtacctggctaatgtgtctctgaagatcaatgtgaagatgggaggtagaaacactgtacttcttgatgctgtaagctgcagaataccattggttagtgacataccaaccataatttttggagcagatgtaacccacccagaaaatggagaagactcgagcccttcaatagcagctgtagtagcatcccaagactggcccgaagtgacaaaatatgc

SEQ ID NO: 209655 - DNA, 583 bp, Glycine max
ctgtaaaggccttatggcaaaattttctacaaagattgacatagaatattttttacaatgctaaatttgacatctatatagaatctaatagtacttgtaggaattcattctaagctatgcctcaagaactgtaatcatggatttatcacaggaaacctacacgactaatgtacaaagtaatgtgagctgaacattgcattccatgattgttttcacttacctaccatgttgatgcttgccctatatatctatcattccaccaaggccaagtcactagcagtctaacagtaaaacatgaccctcttcacattttctttcaagtctggcaatggcttgacactataatcaccagctgctcgtattgctttggcaccataaccattgccatcacctgcagagccattgtcttgcatatctggctccatatagaaacgtgctcgaaacgctgctaaatgtgcataatatgctggaggaacaactgatactgagcgcgtacacctggcatatgtataacaaagattgtttgtcagagactgaattccatctgctgtgaaagttgtttcatccacaggacatgataatg

SEQ ID NO: 209656 - DNA, 370 bp, Glycine max
cttaaagcaaagaggggccttccatggacccccaacaacctcctctaaaacattggatgctgctgggagactgagttcagtggagtctactgaagacaaaagtgagctgtttgttgtgagtactgaagatccagaaaatggtaatgataggaatgatggctctgatcctgctgagggaatgcctggatttcagaatgtcttgaaagatatgattcctggggtaaaggtgaaggtattcaaggtgataactccagagaaagtagacaaggatctatctaatgtgattgagaagataattgaggaccaagaccgagacgaagacgaagatgaagagatggaaaatgatgcataaagtctagaactggaagag

SEQ ID NO: 209657 - DNA, 497 bp, Glycine max
aaagtaaaatgccttaagtcttatatagtgagatgtattgtacatttaagagtggagaagagcataaagatgattgatttacagagttggagccctctcagcggagccagcaatcacagtgagcaagttgttaccaaaagggtcactgagatgttttgctaagttctcaactggaccttctccagtgacatatgcttggaagtagaaaccaagcattgcaaacatagctagtctaccattcttaatttccttcacctttagaagtgcagcttggtctggatcctttgctagtcccaatgggtcgaatggaccacccggatgaagcttgtcttccaagtccaggccattaataattctgtagtactcagcaccacccacaagaactatctcagcatcaacagcaagaataagattgatggggataggtttcccgaagtagttcaatgtacccccattaagagcaaagctccagtctgcattgattccatgaagagctc

SEQ ID NO: 209658 - DNA, 532 bp, Glycine max
tttttgtttttttttaaagtaaaatgccttaagtcttatatagtgagatgtattgtacatttaagagtggagaagagcataaagatgattgatttacagagttggagccctctcagcggagccagcaatcacagtgagcaagttgttaccaaaagggtcactgagatgttttgctaagttctcaactggaccttctccagtgacatatgcttggaagtagaaaccaagcattgcaaacatagctagtctaccattcttaatttccttcacctttagaagtgcagcttggtctggatcctttgctagtcccaatgggtcgaatggaccacccggatgaagctcgtcttccaagtccaggccattaataattctgtagtactcagcaccacccacaagaactatctcagcaacaactgctagaataagattgatggggataggtttcccgaagtagttcaatgtacccccatcaagaagcaaagctccagtctgcattgattccatgaagagctcaatggtaacaatacaattc

SEQ ID NO: 209659 - DNA, 596 bp, Glycine max
  unsure (1)..(596): unsure at all n locations
gctatgcccacataacaacaccaaaaaaaatggcacttgtgagccacgtttgtgtgagatgtgtagccacacccacttccccagagtccccaaattcggcacccttgccagacccaaggcaaaccaaggttctccttccgaagaagaagcctcagaaatggtccaccggggtggctcccggggagtacggtggccctcccaccaccaccaaactccgcaaatactggggcggcgatgacgaagaccctttggcctctgatgactatatgtggaacatggagtttatgggtcgcttccaaaagttgattgaggaacccaatgctcaaccccctcctgcaaaggaagagccttcagggtttctaagcttaaatagagtcatgagcctggacagttgngaagttgatttgagcaaagaactcgcagctcctgtaaatcataatgcacacctgcaaattgatgcagaactaatgtgacaggaagcatagggtaagatataaatcagcaccacacgtcgtgagcaagaaaatgggatagagctaccaaggccgcaactggaggcagtgatgtgatgttccgggaaaataggcagtctcgtg

SEQ ID NO: 209660 - DNA, 520 bp, Glycine max
gctatgcccacataacaacacccatgaaaatggcacttgtgagccacgtctgagtgagatgtgtaaccacacgcacttccccagagtccccaaattcggcacccttgccagacccaatgcaaactcaagatctccttccgaagaagaagcctcataaatggtccaccagagtggctcccggagagtacggcggccctgccaccaccaccaaactccgcacatactggtgcggcgacgacgaagacccttagggctctgatgactatatgtgcaacatggagtgtatgggtcgcttgcaaaagtagattgaagaacccaatgctcaacccactactgccaaggaagatccttcaagggctctaagcttaaatagactcatgagcctggacagatcggaagctgaattgagcccagaacttgcagcttcctgtaatcatactgcacacctgccaactgatgcaatactaatgtgacaagaagcatagggtaagatctaaatcagcaccaacacgtcgtgagc

SEQ ID NO: 209661 - DNA, 381 bp, Glycine max
aagaccaaatatctggatattataatcaataatccaagtgtggaaaatcataaatacaattatatgttcaatatgtgggagagaaaaacccaaatataatgacatggcatcctgccactccacccctaatattcttcaagcctttcttgtcgctacagcaattgcctcctctatagcttgagcaaaagttgcaatcttgtatgtgaaaaaacctactagcattggtatcaattctaagcgcattgatccaaattgtggaaccataatcgtatcccagcggatatagaccatgacccaaacatgtggatccaggaatcttggctgcccaatagctcccttgacaaatgcctttgcaccatcaggccttagccagttcacgct

SEQ ID NO: 209662 - DNA, 534 bp, Glycine max
cgaaacattgcttgcaaaaacaattcacgatcacagactttgagcgaccttgttcatggcaagttctctgctagaaaagaaaaagactagttagttaggctttcatgcaaagaacagagttctcccaaacacttcaatcaaacatggctttaccagccaatgaaacctccatggcagaaaggtctcagtgggtgctcaatgctcctgctcccccatccacgtggcacaacctcatggcttctgtgaggaacacaatttcatcgtaccaaaaaatgtgtacttatataagaggccaacctggacccaaagttgtgctttccttcttgcggagcatttttcctattcttcattggggtcgtaattattcaccaaccaaattcagaaacgacttacttgcaagtcttaccattgcaagtctctgcattcctcagagcattgggtatgccactttagcaaagcttgatcctgaatatggactctatacgagtgtggtgccacctcttatctatgctctaatgggaacttcatgagaaa

SEQ ID NO: 209663 - DNA, 540 bp, Glycine max
cacacaaaccatatagttcttttattacatcataggcgcaaaccaatagagtaaataacacaaattccactttgtgagtggctaaacaggaatgcgaagacttattgctctgtcccagaactatattgcacatgaagtactccggggcaggaaatctaaacacacaaaagaagcatcatacatgagtaaaattttacaacattccaattcaaaccagccatgaaaagctaagattttatttccacacacgagttctattaacaaagacagaggtacaacactcggttcaatccgtagcaattcagaaatccagcttgcagtcaatagcttctccaatagtcaagaagacccttcctccaattcttgtgacaaagttggtcgcctttagcttataaatcacttgccaacgaggattggcaattgctagatgcttcccacttgagaccaaactcttgtgcagttcctcaagagaagcaattcctgaggtgtcaatgctcaccaaattagaggtgtcaaggattacgagctgaattatgcttc

SEQ ID NO: 209664 - DNA, 468 bp, Glycine max
aacggttcaaagtccaactcaagcacaaagttgccgtttaatgcatccttccctcgcccaactctgaacaagtccattggaaatggcgtcgagttcctcaaccgccacctttcggccaagctcttccatgacaaggagagcatgcagccactgcttgagttcctcaggcttcacagttataagggaaagaccatgatgttgaatgacaaagttcaaagcctggattctctccaacatgttttgagaaaagcagaagagtatctgatttcagttgctcctgaaacaccctactcggaattcgagaacagattccgggagattggtctggagagggggctggggtgacactgccgagcgtgtcctcgagatgatccagcttctgctggaccttcttgaggcacctgacccttgcaccctcgagacattccttggaagagtccctatggtcttcaatgctgttatcctttc

SEQ ID NO: 209665 - DNA, 392 bp, Glycine max
gaatggaaaaaggcatatctttaaattgaattgatggggtggaaaacccgaatttaaagatttccaatcattcccaattttgcaacaaccaaaagaattttaaaaaaaaaagactttctttttttactttttttacccaaaaccttagcaaaatattaaaaccaacgacacttttttttaaactctttaaatccaaaagctgatcacaatcaaaatcaatggccttatttatgaaagccccataagacttcaaacgaccaaaagccggtttctccattgatggtctcttcaaacctgaatttacccttcaatagcaaggggcccagactcaaccaatttgcggtacttgagagcatagaacatctccaggtaacgtttgctctcacggcgtt

SEQ ID NO: 209666 - DNA, 478 bp, Glycine max
  unsure (1)..(478): unsure at all n locations
ctcaaacaagaagaggatcaggatctggacgaaggtgcatggaatattgcaatggcaggtggtacatgccttggtttagttgcccgtactgttggagatgatattgtgccgctggtaatgcccttcattgaggagaatatcacaaaaccagattggaggcaaagggaggcagcctcttatgcttttggatctatcttggaggggccttcacctgacaaattagctcctcttgttaaccatgccttaccatttatgcttagtgctttagtgaaggacccaaacaaccatgtgaaagacaccactgcttggactttgggacgaatgttcgaatttcttcacagttcaattggttggtacaccaatcattaatgagggaaattgccaacagattattacagttctccttcaaagcatgaaggatgtntccaatgttgctgagaaggcctgtggtgctctgtattttcttgccagggttatg

SEQ ID NO: 209667 - DNA, 463 bp, Glycine max
  unsure (1)..(463): unsure at all n locations
ctcaaacaagaagaggatcaggatctggacgaaggtgcatggaatattgcaatggcaggtggtacatgccttggtttagttgcccgtactgttggagatgatattgtgccgctggtaatgcccttcattgaggagaatatcacaaaaccagattggaggcaaagggaggcagcctcttatgcttttggatctatcttggaggggccttcacctgacaaattagctcctcttgttaaccatgccttaccatttatgcttagtgctttagtgaaggacccaaacaaccatgtgaaagacaccactgcttggactttgggacgaatgttcgaatttcttcacagttcaattgttggtacaccaatcattaatgagggaaattgccaacagattattacagttctccttcaaagcatgaangatgttcccaatgttgctgagaaagcctgtggtgctctgtattttc

SEQ ID NO: 209668 - DNA, 564 bp, Glycine max
gcaattgattgtggaaaaccactagatgaagcactggcagacctggatgatgttattggttgttttaactactatgccgagcttgcagaaggattggacgcaaagcaaaatgctcctgtatcccttcctatggaaaccttcaagagttatgttctcaaggagcccatcggagttgttgcattaattactccatggaactatcctctattgatggctacatggaaagttgctcctgctctagctgctggttgtacagcaatattgaagccatctgaattggcatctgtgacctgtttggagctggctgaaatatgcagagaagttggccttcctcaggggtattaaacattgttactggattaggcaatgaagctggtgctcctttgtcatctcatcctgacgtagacaagatttcctttactggaagctctgcaactggaagcaggattatgacagctgcagcacagctaacgaagcctgtttctctagagcttggtggaaaaagcccaatcattgcttctgaggattgtgaccttgataagactgctgaatggaccatctttg

SEQ ID NO: 209669 - DNA, 573 bp, Glycine max
  unsure (1)..(573): unsure at all n locations
nacaaccaatgccgcgaatccgaatnnngannncnagtncnaggattnngggttaaaancaaanaccgaaaatngagaaaaagggtaaatgaaaaaaaaaaagaaaaaaagtttttttttttttaataanaatgatatatttaatcgggggggggggtttttttatatttatattttttataaccctcccatcctctttttatgaacaaatttttttggaagcctcatttcccatgatatgataaaattccaacaaaaattctgataaacataactgggcaaaaatgaaggaatgccctttgaccaaaaaccataaccttatgtcggtttttcaggggaggacattccacctgataagtccaaattgccaccccaagatgtattccaaccctttgggactatagctcttctatctccaattcaaatttttaactcttctgaccagggtggaatgggcttttaaatgcaaaattcttttcccaaacttttagtgaggctgccccaggggcctcggtagcattgttgaacaaaaacaacctaccacctccatagattgcctttgttggaaaaacc

SEQ ID NO: 209670 - DNA, 340 bp, Glycine max
gggtcaaccgtgacgcctcaatcgctcttgcgcgtttcaatctccttcgacttctttgcaacgggatcaggtgctcgtccttcacgatggcgggaactgaagcataaaaaactgaatccaaaaaacctgccgctaagcaatccggtgggaagaagaaggaggtgaagaaggagactggcttaggtctcacgcatcggaaggcggagaacttcggagagtggtattccgaggttgttgttaatgccgaaatgattgaatactatgatatttccggttgctatattctgaggccttggtcaatggcaatatgggaagaacatgcaagagtttttcgatcccg

SEQ ID NO: 209671 - DNA, 468 bp, Glycine max
gcaagaataagaaagtctggacaaaagcgtgccaggcttgagaccattgttggccctgctattgataagggtgtggctcatgagtctgttggagtaaaaccagccaccttggttccaaaggaaatccctgtgataaaaaagaaccatgtcttaaagataaacattgttcccaaagcaacagtgaaagaacataaagatgatgacacaacacatgagttacatgagccagaaaaagatgttccggatcctaacaaatttttgactccagatgaattggagagaggaaagttgcctcctgaggaaatcttatcccttccaatgtttaagaactatacagctggaaatcctgctcctgtgttgtatattaagaatttggcaaagatgtgattgctgatgatttctattttatatttggctcctttgttggaagaattgatgctgctaagtctggtctttaagtcaaactga

SEQ ID NO: 209672 - DNA, 489 bp, Glycine max
aaaaatgaaaacccaaagtgcttctctcctctgtctttttctctctcttgctatccttttggctagtggcactgctgcaagtgcaactccaagaagcgcagtgccaagccaccatgtttcaacattcaacagaagcctttttccttccacttttctctttggaattggttcttctgcttaccaggcagaaggagcagcaagtgtagatgggagaggaccaagcatatgggacacctacactagacagcatactgaaaagatttgggatcatagcaccggtgacatgggagctgatttttatcatcgatacaagggtgacataaaaatagcgaaagaaattgggctggactctttcagattctctatctcatggtcaagaatattcccaaagggcaagggagcagttaacccccttggggttaaattctacaacaatgtcatcgatgagatcctagcaaatggtttaaaacttttgtcactcttttcatt

SEQ ID NO: 209673 - DNA, 385 bp, Glycine max
ggtaaataactatgaagcctacctttctattatccctttccttcctgcctttttttgcttttctggctctttgggaagatgctgtactagtcgtggtcatgcgtggcaacctcattttccctggtgggacatattacattatgccgttaacatggggcgctgtgggtggcggactgaaactacgccggacaggaaactcatactgtgcagctactgtttttcaagattactgaaaaatctttcgtggcacaccacccaaagacagcatacctgtgataagccctggaatcatctttacaggtactggacttgaaatcctgttcgcagaggaagcttattgtgctgaatccttcaaatgggtggcgtttgtggacattgaaattca

SEQ ID NO: 209674 - DNA, 477 bp, Glycine max
  unsure (1)..(477): unsure at all n locations
ctcaaacaagaagaggatcaggatctggacgaaggtgcatggaatattgcaatggcaggtggtacatgccttggtttagttgcccgtactgttggagatgatattgtgccgctggtaatgcccttcattgaggagaatatcacaaaaccagattggaggcaaagggaggcagcctcttatgcttttggatctatcttggaggggccttcacctgacaaattagctcctcttgttaaccatgccttaccatttatgcttagtgctttagtgaaggacccaaacaaccatgtgaaagacaccactgcttggactttgggacgaatgttcgaatttcttcacagttcaattgttggtacaccaatcattaatgagggaaattgccaacagattattacagttctccttcaaagcatgaaggatgtntccaatgttgctgagaaggcctgtggtgctctgtattttcttgcccaggttatg

SEQ ID NO: 209675 - DNA, 561 bp, Glycine max
  unsure (1)..(561): unsure at all n locations
ttcggctcgagctcaaacaagaagaggatcaggatctggacgaaggtgcatggaatattgcaatggcaggtggtacatgccttggtttagttgcccgtactgttggagatgatattgtgccgctggtaatgcccttcattgaggagaatatcacaaaaccagattggaggcaaagggaggcagcctcttatgcttttggatctatcttggaggggccttcacctgacaaattagctcctcttgttaaccatgccttaccatttatgcttagtgctttagtgaaggacccaaacaaccatgtgaaagacaccactgcttggactttgggacgaatgttcgaatttcttcacagttcaattgttggtacaccaatcattaatgagggaaactgccatcagattattacagttcttcttcaagcatgaaggatgttnccaaatgtgctgagaagcctgtggtgctctgtattttcttgccagggtactgagattgtggacaacatcnntcgtactccntgtttcaggaaatgttcaatccttctactgtaccacagagagatgc

SEQ ID NO: 209676 - DNA, 453 bp, Glycine max
  unsure (1)..(453): unsure at all n locations
aggaaaaatgggggggattgagtccgatncgaanncnnnntnnnngtnnnnnnccnnnnncnnnnnnnnnnnnnngngggnnnnnnnnnnngnnnnnnnngnttttggnattcntttgctttctggctttgtttgctactctggctctttcccaggatgtagcacaagccgagcacattagtggctaccccatactcccaggtggtacaaatcacattatgccatccactcgcggcgctgccagtggtggattgaaactacctcggtcaggagactggaactgctcatctactgggttggacgaatactcagatgtgttacctggcacaccaaacaaaatgagcatacctgggataaagcctggactcatctttacaggtactgcacttgaaagcgcccaccaacagaaacctgatggggctgaatcctccaaccgtgtgtggatggtggaca

SEQ ID NO: 209677 - DNA, 262 bp, Glycine max
attacccgaatggctcttcacagatggacggtgactctctatcatctcaaccgttatggtcatagctgagagtgctatgccagagacgattgttttaggcgtgcatgatggccaaacactttcagccgaagatcagtgactgaacgtgtatattatggacgatctaaccttggaagctgttataaccctgagcgaactgtagacacacagtacatgtaaacctgcttctattaataaggccttgatgcgtacggatgattga

SEQ ID NO: 209678 - DNA, 454 bp, Glycine max
ctcacactttcaaccccatccaatcctcacatgcatgctgtctctgccaaagtgccgagtcacataacatttccattgttaccattctttctttccatcacaaccacttattaagcctctgatcctcactttctctcacacaaaaacacactcaccatggatcatcgcaaaccattgctacccacttcctctgatgctgctccaaatccacacactcgcaaggaccttcttctagttatttgcggcttgctattactctcttcccttgttgcctttggaggggacagggcctccaacgcgccgcatgccgacgtggcatcggcaacatcgaacgatgagcaacgtagtccgacatcggtgccttctccgaaattggacccggtttcgcgaggtgtttcttccggggtgtcagagaagtcatcaagcatgttgtttgcggttaaagatggagctt

SEQ ID NO: 209679 - DNA, 510 bp, Glycine max
  unsure (1)..(510): unsure at all n locations
gcaccaaatgatcaatcattctgtangcattncaagatannagttaaaaccaaaaccgaaaaaaaatatttgtgaaaaanaaacaaacacacaaaaattttttttttaaagaaacaaaacccaaccaagggggaagggttttatttctataaccccacacctcccaactcacaataaataacaaactttccctgttatctccaagggaaccttattgatcactcttaaaacactaaccaccgaatcaacataattaatccctccatgggaacactgtgaaaaacaacggtctcaacggataaacccggcccaaatccaaatatcaccccccactctaacccttctccaatggaactctacccttcctccttagacttcttcctcatttcatccataatgaacaaaacacactcgcttgacatgtttccgtactcactcatcacatgccgggtggactgtaatttctccggcttgagccgaagcttctcctcaacttgatcgaggatcgcg

SEQ ID NO: 209680 - DNA, 575 bp, Glycine max
  unsure (1)..(575): unsure at all n locations
gaaatatccaagacttgttgatatgggcttaacacatctcaaagactcaagttacttagaaaattccatcgattgggtaccaggcatcaaagaaattcgattaaaggacttgcctagcttcatgagaaccacaaacccacaagatctcatgatgatggatttcatatatagccagtgtgagagagctcaaaaagcttcagcaatcattgtgaacacgtttgatgcattagagcatgacgttttggatgcattctcatccatattgttgcctcctatctattccattggccccttaaacctactcttgaacaatgatgtcaccaacaacgaggagttgaaaacaatntgggtccaacctttggaaggaagagccaaagtgtctagaatggcttaactcaaaagaaccaatttcagtggtttatgtgaactttgggagcattatggtcatgactagtgaccaattgccagagttagcttggggacctgcanatagtaacaaaaactntttgtgggtcattaggcccgatcttgtggcagggggaattaatttggcgttacccaatgaattgtgaaag

SEQ ID NO: 209681 - DNA, 582 bp, Glycine max
  unsure (1)..(582): unsure at all n locations
ggccaaatacctgtccgagcatgcgacttcccgatagcgnagancnnngnntnnnntttnnannnnccnnntnnnnnnnnnnnnnnnnnnnngnggnnnnnnnnnnnnnnnnnnnnnnnnnnnnnttttttnnttttttnnntnntnttnttttttttttgggggtggggtgttttttttttttnttctttnnttttcccctttttnntttttttgaattttcttttttaccttttaaaaaaaaagttcttacgggaagatcctcctccccaataagataaaatcaactccccccgttttttacaaggccctggaaccatttcagtgttttccctttgcccctttttttctcgaattaagatcctcctccccaattaatgtcccccccaactttttcttgcccgatttttaaaccgcatttcttttccccgctttgaaggcgactgatcccccccccccggttcatcagatttgtccttgggcacttgcttcccacttaaatagttctcgagtccccattctccttgttcaccaccaaaacccctacgtttaacccctccccattgagaatgaatgaagctt

SEQ ID NO: 209682 - DNA, 417 bp, Glycine max
cgaacactatgtaccccgtctaaacctcacatgctggcggctagctgcaatgtatccatacttctatttctgcattgtttccatgctttctttccatcacaaccacattattaatgcctgttgatcctcacttatctgtcacacaaaaacacactcaccatggatcatggcataccattgctacccacttcctctgatgctgatccaaatccacactctcgcaaggaccttcttctaattatttgcggcttgctattactctcttcccttgttgcctttggagggtacagggcctccaacgcgccgtatgccgacgtggcattcggcaacatcgaacgatgagcaacgtattccgacatcggtgccttctacgaaatggtatcccgcgttatcgcgaggttgttttcttccgggggt

SEQ ID NO: 209683 - DNA, 450 bp, Glycine max
cacccttcttctctccacccaattaaggaagagtgtgttagtgtgagaaaaccctttagtggtgatagagtgaagagagatgaatggagtgaaggggcagtgtcaaccctccttgaggcttatgaggccaaatgggtgctaagaaacagagccaaactcaagggccatgattgggaggatgtggcacggcacgtgtcggcacgtgccaactgcaccaaatcaccaaagacttcaacgcagtgtaagaacaaggttgagtccatgaagaagagatacagatcagaatcagcagcaacagcagatcatgcatcatcatcatggcctctttattcacggcttgatcttcttcttaggggaactggacccgtgtttgtcgtcgccgccgccgtcgccaccggcgatgatgccggcggcattgccggttctgtttccggtggagccgtcgcaacc

SEQ ID NO: 209684 - DNA, 415 bp, Glycine max
  unsure (1)..(415): unsure at all n locations
aaaaactaaattgatattattcctttatttcaatagatttagaatagttttaaaatcattacactactacatgaacgaattcatgccattgagcattgtaataatccaaacacttctttgnagcaattgtggtcataagaacttgacgaaccacgttgtccatgttctcatacgaagacccatgtggactcgaagcagcctcgagtgccaatttcttgcactccaaagctcttgccttcatctccttacccttttccccttccatcaactccctcacaagtgcttcaactttctccctcttaacatcctctatctgcaacccaatcccccactccttgcaacaaaatcgacaataggttagtttgctccgaaagagaagagccaacacaacattggaaccccttcacacacactc

SEQ ID NO: 209685 - DNA, 634 bp, Glycine max
  unsure (1)..(634): unsure at all n locations
gccaaagagcggggattgagttgatggcagncnnnntnnnnttnnnncnnnnnnnnnnnnnnnnnnnnnnnnnnnnnnnnnnnnnnnnnnttttnnnnnnnnnnnnnnnnnnnnnnnnnnncgggggngggtncatcgattgggtgccaggcatcaaagaaattcgattaaaggacttgcctagcttcatgagaaccacaaacccacaagatctcatgatgatggatttcatatatagccagtgtgagagagctcaaaaagcttcagcaatcattgtgaacacgtttgatgcattagagcatgacgttttggatgcattctcatccatattgttgcctcctatctattccattggccccttaaacctactcttgaacaatgatgtcaccaacaacgaggagttgaaaacaattgggtccaacctttggaaggaagagccaaagtgtctagaatggcttaactcaaaagaaccaaattcagtggtttatgtgaactttgggagcattatggtcatgactagtgaccaattgacagagttagcttggggactngcaaatagtaacaaaaactttttgtgggtcattaggcccgatctcgtggcagggggaattaattgtgcgttacccaatgaatt

SEQ ID NO: 209686 - DNA, 412 bp, Glycine max
aaaatctaatttgatattatacctttatttcaatagatttagaataggtttaaaatcattacactactacatgaacgaattcatgccattgagcattgtaataatctaaacacttctttggagcaattgtggtcataagaacttgacgaaccacgttgtccatgttcacaaacgaagacccatgtggactcgaagcagcctcgtgtgccaatttgttgcactccaaagctcttgccttcatctccttacccttttccccttccatcaactccctcacaagtgcttcaactttctccctcttaacatcctatatctgcaacccaatcccccactccttgcaacaaaatcgacaataggtttgttgctccgcaaatgaagagccaacacaacataggaaccccttcacacacac

SEQ ID NO: 209687 - DNA, 501 bp, Glycine max
caactcctgtttgcacaagccactcatgctcgacaagactgtgctggtaaccggcggagccggttacatcggcacccacaccgttcttcagctcttgctcggaggttgcagaaccgtcgtcgtcgacaatctcgacaattcctccgaggtttctatccaccgagtcagggagcttgccggcgaatttgggaacaacctctcctttcacaaggtggacctacgggacagggatgcactagagcaaatttttgtttccacacaatttgatgctgtcatacactttgctggactgaaagcagtaggagaaagtgtgcaaaaacctttactatactataacaacaacttgactgggacaatcactctattggaagtcatggctgcccatggatgcaagatgctcgtgttctcttcttcagcaactgtatatggttggccataggaagttccatgcacagaagaggttccctctgtcagcaatgaacccatatggacgaactaagc

SEQ ID NO: 209688 - DNA, 573 bp, Glycine max
  unsure (1)..(573): unsure at all n locations
gaacaaggatggggtgaataaagtctgattgcaggncaagattnnagttaaaaaccaannccgaaaanagaaaaaaggggaaaattaaaanaaaaaaaaaaattttaattaaaaataaagttttttatttttgggtgaggggtaattttttttgtggtacatgatagtattcgaatctaataatcaataacctgtaagaaggaacctatagaacctttaaattaaattacagtgcagtaaaccactacttatttaccatgtaactatgaatcataataatacaagtacttgtcaccttgacctacggactaaagaaaagcttttgagaaaactaaattcacaagacctacggactacggtgtgggggagttcggaaaagaacccaaagagaacactatatatatatatagttaaacggtggaatcctcctgatctccatagccataagggtttttgctagcccaattccattgatcgcggcacatttcatcaatgccatattttgccttccatttaagctctctttccgctttctttgttgatgcataaacaatttcagcatcaccaggtcta

SEQ ID NO: 209689 - DNA, 603 bp, Glycine max
  unsure (1)..(603): unsure at all n locations
agcccccaatcatgagaagcagggctaagcnntccccatnntgnagngncnncagnnnnnaggattnccgnnganaaannnncnnngnngggnggngngngnnnnnnnaataggggannaaataaaannaaaaaaaannataaaaaattttaaanaaangaacaaagaaaaaaaaaagagggggggaaaatttttaatttttatgcccattaaaaacaaaatatccgataaatcctatgttagctatataaatgacaaacataggcagagtaactaaaagactaaaaccaacagaaagagacgtgacaaaaattacttgagcacggtaactgaagatgcccacataaataaagagccgccatccaccaaatctctgatcacacactcacttcttggatttcttcaatgcttgagctggctgggatgctgttgcaggtgtacaagtttgtgctgctgatggcctctctcctggaccttgggccaagcgctcctccctccgagcatttttcctctccctgctagccttgttcttggcacgcttcgcctcaaactggtcaaacaatgtcttttctcttgccttttcaggcgtggacttgtgtatgc

SEQ ID NO: 209690 - DNA, 484 bp, Glycine max
acagaacagagcaacactgaacaatggcgcaacctacctcctcctggaagcctgttgtccctctcctgaaggacgagctggacatcgtgatcccgacaatccgaatcctcgacttcctcgagatgtggcaggcccttcttcgaaccttaccaccttatcatcgtgcaggacggagaccccaacaggaccatcaatgtccccgaaggcttcgattatgaactctacaaccgcaacgacatcaatcgcattctcggacccaaagcctcctgcatctcgtttaaggattctgcgtgtcgctgctttggttacatggtctccaagaagaagtacatctacaccatcgatgacgactgcttcgttgctaaggatccttctggaaaggaatatcaatgcacttgagcagcacataaagattctgctttgtgcatccactccattttttttcaacaccctttatgacccttacagagaaggtgctgttttc

SEQ ID NO: 209691 - DNA, 604 bp, Glycine max
cgccatgtctcactacaagtttgttcttgcaattgagaacacttttactgagagctacgtgacagagaagttattctatgccttagactctggtgcagttcctatctattttggtgcaccaaatgtcatggattttgtccctccacattcaataatagatggtagaaaattcaactcattggaagagttggcttcgcacgtgaaggctgtagctaatgatccagtagcctatgcagaataccatgcatggagaaggtgtggtgtacttggtaactatggaaaaactcgagctgtgagccttgacacgttgccatgccgattatgtgaggctgttagcagaaaaggtggaagaaatgcgggaagctaggttgagttttttgcttaatttgtagttctgcatgatagagattgacgcattgaatttaggtttgcaaccctgatagagaatgcttgtttctctgagctaatgtacatttgaccaagaaaggcttagctcatgtgatattttattttttattgccccccttttctggtagatagtggctgatgctatctccacatagggtacactataagtgagtggttttgctgatgatgattttga

SEQ ID NO: 209692 - DNA, 556 bp, Glycine max
  unsure (1)..(556): unsure at all n locations
ggaaaaagaagggggcgatcggagcccgatngcaanncnnnntnnntttcncnnncnnnncctnnnnnnnnnnntngnggntngncnnngnnnngnngnnngngcggnttttgctttnnctgatcaatcccaagaccttggtttaccttgccacacaaaaaaatatataaaaaggcaaaataataataaaaaaaagagaaggcttggagccaagaaaataaacacaaagcacaagtcatggaaagaataatggttggaagtgcaacaaaggttgctttcaacctcttggtcactttcgccattgtcattccatgccttgaggctggcattgctgagtttgatgactttctcaaagcccaagctgatgaagcacaaaaaattgctcttgaggcctatgtcccagtgccagaagatgtcaccgacgaactcaatttccatgttcatttgtcattagaaaactccacaaggagggaactaaggcaaaggaagggtagatcacgaaaaaaatgtgttgccagcaaccctattgacactagctggagatgcaacaaaaact

SEQ ID NO: 209693 - DNA, 380 bp, Glycine max
  unsure (1)..(380): unsure at all n locations
agagccagccctttttttttttttttttttttttttttttttttttgtttttttttttttttttttttggttttgtttcttttttgggtgtaccaaaaaagggggaactttatctctctttaagtgatcccaagggaagaagatgctttttttcctgtttttttaagggccacagaggttctttggaaaaaaaaacaaatttcgcccacgagaccaaaaattttcggggagatatggccgggggcaggcccttgcccatttctaaaagagggggggggaaaaaaagaaccccgaggcgctccccaaaaagggaccctatggggggtaagggggcctccacttttgggggtttggggaccgggattncgagggaagccacc

SEQ ID NO: 209694 - DNA, 571 bp, Glycine max
  unsure (1)..(571): unsure at all n locations
caactcctctttgcacaagccactcatgcgcgacaagactgtgctggtaaccggcggagccggttacatcggcacccacaccgttcttcagctcttgctcggaggttgcagaaccgtcgtcgtcgacaatctcgacaattcctccgaggtttctatccaccgagtcagggagcttgccggcgaatttgggaacaacctctcctttcacaaggtggacctacgggacagggatgcactagagcaaatttttgtttccacacaatttgatgctgtcatacactttgctggactgaaagcagtaggagataagtgtgcaaaaacctttactatactataacaacaacttgactgggacaatcactctattggaagtcatggctgcccatggatgcaagatgctcgtgttctcttcttcagcaactgtatatggttggccaagggaagttccatgcacagaagagttccctctgtcagcaatgaacccatatggacgaactaagcttatcattgaagaaattngtcgtgatgtccaccgtgcagagccagattgggaaataatatnggtaagata

SEQ ID NO: 209695 - DNA, 575 bp, Glycine max
  unsure (1)..(575): unsure at all n locations
agaaaaaatatgcgttaggaatttcagngtnngcnagnncnagntnnnnttnangggcaannncnnnnnngnnnnnnnnncnnnnnnnnnnnnnnnnnnnnnnnntttttntttttacnaacatgngattaatatttagggaaggggatgcttctcatgtggaacatgagagtattcgaatctaataatcaataacctgtaagaaggaacctatagaacctttaaattaaattacagtgcagtaaaccactacttatttaccatgtaactatgaatcataataatacaagtacttgtcaccttgacctacggactaaagaaaagcttttgagaaaactaaattcacaagacctacggactacggtgtgggggagttcggaaaagaacccaaagagaacactatatatatatatagttaaacgggggaatcctcctgatctccatagccataagggtttttgctagcccaattccattgatcgcggcacatctcatcaatgccatattttgccttccatttaagctctctttccgctttctttgttgatgcataaacaatttcagcatcaccaggt

SEQ ID NO: 209696 - DNA, 618 bp, Glycine max
  unsure (1)..(618): unsure at all n locations
cgcacaanagagaggggcggatcccgtngtcggatnnngnaggncncggnntnnnnttnntnggnaatnnncnnnnnnnnnnntnnnnnnnnnnnnncnnnnnnnnnnnnnnnnnnntttnnttttttnnnnttntttttntttttatgggttgggggatatttttttttgtattgcatatcataaaaaaaatatccgataaattctatgccatctatttaaatgacaaacataggcagagtatctaaaagactaaaaccaacagaaagagacgtgacaaaaattacttgagcacggtaactgaatatgcccacataaataaagagccgccatccaccaaatatctgatcacacactcactttttggatttcttcaatgcttgagctggctgggatgctgttgcaggagaaatattttgtgctgctgatggcctctttactggaccttgggccaagcgctcctccctccgagcatttttcctcttcctgctaaccttgttcttggcacgcttcacctaaaaccgnngganacgatttcttttctcttgccttctcagccttggacttgcctatgctctccataaaactctcttggcttgaaaacattaccttttacct

SEQ ID NO: 209697 - DNA, 477 bp, Glycine max
agaagatggtgtccttgaagctttagaagcgcctcgccgctagcgttctaaaatgcggcaagggcatggtctggcttgatccaaatgaagtcaatgagatctccatggccaattctcgacaaaacataaagaagttggtctaggatgggtttattatcaggaagccgactaagattcactctcgctcccgtgctcgtcgaatgaaggaggccaagagaaaggggcgtccctctggttatggtaagcgtaacggtacaagggaggcaaggcttcccaccaaaatcctttggatgaggaggatgcgtgtcctcatgcgcttgcttcgcacgtacagggaatcaaagatgattgacatgcacatgtaccatgacatgtacatgaaggtgaaaggtaatgttgtccagaacaagagagtctcgatagagagcattcacaagttcaaagcttggaaagccagaagaaagacattgtcttgcc

SEQ ID NO: 209698 - DNA, 508 bp, Glycine max
agaagatggtgtccttgaagctccattagcgcctcgccactagcgtcctaaagtgcggcatgggcaaggtctggcttgatccaaatgaagtcaatgaaatctccatggccaattctcgacaaaacataaggaagtcggtcaaggatgggtttattatcaggaagccgactaagattcactctcgctcccgtgctcgtcgaatgaaggaggccacgagaaaggggcgtcactctggttatggtaagcgtaagggtacaagggtggcaaggcttcccaccaaaatcctttggatgaggaggatgcgtgtcctcaggcgcttgcttcgcaagtacagggaatcaaagaagattgacaagcacatgtaccatgacatgtacatgaaggtgaaaggtaatgttttcaagaacaagagagtcttgatggagagcatacacaagtccaatgcttagaaggcaagagaaaagacattgcctgaccaggttgaagcgaagcgtgccaagaacaaagc

SEQ ID NO: 209699 - DNA, 549 bp, Glycine max
taactcaactggatatggtgatgagcttttatgggcagctagttggctctatcatgctacgggtgatgattcttaccttcagtttgtgactggccaagatggagaagactatgctcaatggggaagcccaacctggttcagttgggataacaagcttgctggaactcaggttttgttatctagattaagcttttttaaggcaaaggacatttcgaattcatatagctctgggctccatagttacaggaaaactgctgaggctgtaatgtgtggtcttcttgcggattctccaacagccacaaaaagcagaacagatgatggtcttatatgggtgagccaatggaactctttgcatcatcctgttgcatccgcattcttagctgctgtttacagtgactatatgctaacatcgcagacaccaaactaagatgtggatcagattcctttacccaatcagatcttcgagactttgccaaatctcatgctgattacctattgagcaagactcctatgcatatgagtcttctggtgggctatagagataaatac

SEQ ID NO: 209700 - DNA, 464 bp, Glycine max
  unsure (1)..(464): unsure at all n locations
ggaaaagaggggggatcgagtccgtnngcaanncnnnnntnnnngtnnncnnccnnnnnctnnnnntnnnnntngngcnnnnnnctnnntnnnnnncnnnnntntgntacatctggtgctgggtaaaacgggtggggagcgatccttcttgagtgagggaaacaggagccaagcccttctggcctctgctattgggggcaaaatggctgctggtggctctgaaactcccacaagactcatggcggtgactgctgcggcaccaaacaagacatggctccctgttgttagaggtggaggcaactctcgactacccacaatggcttgatggatcgctaccacatgactatgggattgatccactaggccttgggaaggacccatcattcctcatatggatcagataagctgagctcattcatggtaggtggtcaatggctgcaccctaggaatctttgtcgggcacg

SEQ ID NO: 209701 - DNA, 592 bp, Glycine max
attttagtttcaaaaaaatcaattaactcaagcatggtcaaagctggtaaccggcggagccggttacatcggcacccacaccgttcttcagctcttgctcggaggttgcagaaccgtcgtcgtcgacaatctcgacaattcctccgaggtttctatccaccgagtcagggagcttgccggcgaatttgggaacaacctctcctttcacaaggcggacctacgggacagggatgcactagagcaaatttttgtttccacacaatttgatgctgtcatacactttgctggactgaaagcagtaggagaaagcgtgcaaaaacctttactatactataacaacaacttgactgggacaatcactctattggaagtcatggctgcccatggatgcaagaagctcgtgttctcttcttcagcaactgtatatggttggccaaaggaagttccatgcacagaagagttccctctgtcagcaatgaacccatatggacgaactaagcttatcattgaagaaatttgtcgtgatgtccaccgtgcagagccagattggaaataatattgcaaagatactcaacccagtcggtgacaccct

SEQ ID NO: 209702 - DNA, 546 bp, Glycine max
catgcgacatccgcatcgatagcaggcaagataaagtttaaggcagatcctaatagaaagccgcccgtatcgatctttactcctctctcttttttttttttacttctttggaaactaaaattggggaacggaagcctgctcaaagggcacatgaaatcatcccaatctaataattaataacctgaaagaaggaacctatcgaacctttaaattaaattacagtgcagtaaaccactacttatttaccatgtaactatgaatcataataatacaagtccttgtcaccttgacctacggactaaagaaaagcttttgagaaaactaaattcacaagacctacggactacggtgtgggggagttcggaaaagaacccaaagagaacactttatatatatatagttaaacgggggaaaccttctgaactccatagccataagggttttttgctagcccaaatccattgatcgtggtacatctaataaatgccatattttgccttccatttaagcttttttttcgctttctttgttgtgcctaaacaaatt

SEQ ID NO: 209703 - DNA, 561 bp, Glycine max
tgcccaattctttcccctccacccaccctgcatatttagatattcctatttaatagcaccccatagattaccttgtgtgaccaactactttgactcctttaccataccattacaataattatcaaacctaaccagaaaaaatggatgaccggggaggaaatccgcaacgctcatcgttcccatggacccgccaccatcttggccttcggcaccgtcacgccgtccaactgcgtataccaagccgattaccctgactactacttccgcattaccaacatcgaacacatgacctgatctcaaagaaaagttcaagcgcatgtgtgaaaagtccatgaaaaagaagcgatacatgcacctgacggaggagtttctgaaagagaacccgaacatgtgcgtatacatggcgccttcgcttgacgttgagacaaagacgtaatggtgatggagagtgccgaagctgggaaaacaagcctgaacgaaagcgaataaagagtggggtcaacccaagccaatgatcacacacctggagtttctgcaccacttttagggttggacatgccc

SEQ ID NO: 209704 - DNA, 368 bp, Glycine max
cgaagatggtgcccttgcaacttcccaagctccttgcctatagctatctaaaatgcggcatgggccaggctttgcttgacaccaaatgaagtcaactaaatctccatggccaattctcgtcaaaacctaacgaagatactcctggctgggtctattatcacgaagccgactaagattcactgtagctcccatgctcttggacttaaggacggccagagaatggggcgtcactttagttatggtaagcgctaagtgccaatggaggcaaggctccccaccaaaatccttgatatgaggaagatgcacgagctcatgcgcttgctttgcatgatcaaggaatcaaagatgatcggccaagacatgttcca

SEQ ID NO: 209705 - DNA, 482 bp, Glycine max
tccacacacttttcttcttttttgtctaacaaatcttatttttccattgatgggaccggggaaaattccatccaccatgcatatcataaaaaaaatatccggaaaattccatgttcgctatataaacgacaaacataggcagagtaactaaaagactaaaaccaaccgaaagagacgtgacaaaaattacttgagcacggaaactgaagatgcccacatagataaagagccgccatccaccaaatctctgatcacacactcacttcttggatttcttcaatgcttgaactggctgggatgctgccgcaggtgtactcctttgtgctgctgatggcctctctcctggaccttgggccaagcgctcctccctacgagcatttttcctctccctgctagccttgttcttggcacgcttcacctcaaactggtcagacaatgtcttttctcttgccttctcagccatggacttgtgtatgctctcc

SEQ ID NO: 209706 - DNA, 379 bp, Glycine max
cgaagatggtgtcctttaagcttcttatgcgcctcgccactaacttccttaagtgctgcatgggccaggtcttgcttgatccaaatgaagtcaccgaaatctgcatggccactactggactaaacataaagaagatggctatggatgggtttattatcaagatgccgtctatgattcactctcgctcccgtgctcttctaatgaaggatgccaagagaacggggcgtctctctggttatggtatgcgcaaggggactagggaggcaaggctccccaccaaaatactttggatgatgcggatgcttgtcctcaagcgcttgcctcgcatgtacagggaatcatagacgattgcctagcacatgtgccatgacatgtacat

SEQ ID NO: 209707 - DNA, 547 bp, Glycine max
atcgaccatatcactttcgtcaccttcacagatacattcgttgcaatcatccatctcacttccacaaattcctccaaattctaaccaaacccttcactactccaaattccaaaacttcttcacactccttcttttccctcttctgttgcccgatcttctgcctccaagattttggtatttgggattgatcacctggagttggaaatggttaaaagttatggagtgttctgatttgcaaaagatatcatgttgcggtgcttagagggacttaagcctttatttgcttccatattacgatgttgtgacctggatatatataaccagccaagaggccttgaagatcctgaacttcttgctagagagactgggttcagtgtaagcgaaatagaagcactttacgagctcttaaaaagattagcagtgctgtaatcgacgatgggttgattaacaagaagagtttcagttggcattgttcaagacaaataaaaagaaagtctgttgctgatcgggtatttgatttatttgacacaaagcacaatgggatact

SEQ ID NO: 209708 - DNA, 357 bp, Glycine max
cttatagaaaactaggatctaggagctgattttaggcctaatcggtcaatacggagtgggattctactctgcttttcttgttgctgagagggttgttgggggtacaaagagcccaacttctgatatgctttatgagtgggacgctgaaactgactggggcccttatgtgatttaagaagatactgaccctgtataggttctgcgtcggggggctcagattacactccttttaagagaggaagccaagaatcaattccctacgccaagcaagccccttggattgttgtggcaaaagccacagagaggaggctttggggtgtgcccatgggaacaaatgaaaggtgcttttgaggggaa

SEQ ID NO: 209709 - DNA, 633 bp, Glycine max
  unsure (1)..(633): unsure at all n locations
atgccgtctgactcactcccgtancnaanncnnnnnttnnnnntnnnnnnnccnnnnnnnnnnnnnnnnnnnnnnnnccnnnnnnnnnnnnnnnnccanngttggnggntgcngnggcggcnagcgggcgagggcggcgcgaaccgccgaggaggaagaagagcagcagaaccagctgtcgctggtggcgcttctgttggcggccatcagaaaatcgatggtgtcgtgcagggtggacccacccgacgatgtaatctccaccgtccatcacatggagatcggatggccaaccaacgtccagcacatcactcatgtcaccttcgaccgcttcaacggcttcctcggtctcccctatgagttccaagttgagatccctgctagggttcccagtgctagtgtaagcgtgtttggggtctcagcagaatctatgcagtgttcttatgatccaaaaggaaacagtgtccccactattctcttgctaatgcaggaccgtctatactcacagggaggcttaaaggctgaaggtatatttcgtattaaccctgaaaatagtcaagaggagcatgtgagggaccagttgaataggggcattgtgccggatgacatngatgtccactggttggctggactgat

SEQ ID NO: 209710 - DNA, 360 bp, Glycine max
  unsure (1)..(360): unsure at all n locations
ctgaaccattcaaattttgatcatactcaacaagagacatagaaagcatccatgtcatgtcaggctaagctaaatcaatctccccattccggaaggtcatcgatgtcacagcacttacctgaaatttgaagaggaggctacacctttttagcccattcccatttgtcatggttagaattgtctagtacaagaacatacagaaccaggtcaaattcagccctaaactgaacaaaacctgtccacagatacacaagaaggaaacgagncctactccatgtattaatttacacaagcaaacctagtgctgcttgtagagacaaaatctgaaaaacatggnactaaaaaactacaaagaaaacc

SEQ ID NO: 209711 - DNA, 563 bp, Glycine max
  unsure (1)..(563): unsure at all n locations
aggttagagggcataaaatcaattcactcaagcatgctcaaatctttccaaggcttcgtcaattctccttccaaagcttccaaatgcttcgctccaatggctttaggctccttcgatcgctgcccgaaaaactcctccgccacgccaacgaacccatatatgatggagtgtgccaaaggggttataggacattgagttctggtctttgtaatccatccagagttattgggaatttttctccaaatgttggaaatggtgttaatttgaagaacttgttgctttttggagccgcggatacatattgggggacatctagatccgttcatgggtcagcatcattggcaagggactattacgaagtgctcggtgtgagtaagaatgctagttcttctgaaataaagaaagcatactatgggcttgcaaagaagctccatccagacacaaacaaagatgatcctaacgctgnaaagaagtttcaagaagtttcaatggcatatgaggctctgaaagatgacgaaaaacgtcatcagtatgatcagggtggccatgatgtgtatgtaaac

SEQ ID NO: 209712 - DNA, 426 bp, Glycine max
atcatagtttccacaaaaaacattcactcatgcatgcccaaacctattaatcagcagccatcagattactctgtgctctccaactactttgagtccttgaccatcccttatccaataatcatcatacctaaccagcgagacatggtgaccgtggaggacatacgaaacgcatcaacgttcccagggacccggcaacatctagggcttcagcaccggcacgccatccaagctgcgtctgccaagacgatataccgtgactactgcttccgcattaccatctgcgaacacatgactgatcgtagacaaaagcgtaagcacatgtgcaacctgtccatgataaagaagcgatcatgcaccggatggatgagttcctgacagagtacccgaacatgcgcgaatgcatggagccatcgctagacgagagac

SEQ ID NO: 209713 - DNA, 575 bp, Glycine max
  unsure (1)..(575): unsure at all n locations
agaaaaagtgccgggctcgccttcgtagcaagncnngnttnnnttntnnncctnnncnnnnnntnnnnnnnnnnnnnnnnnnnnnnnnnnnnnnnnntttttttttttttntnnttnttnnttttttttggggggggggtttattttnctaacggtttcttgttacatgttattttcaacagaaaattgacctaaacaacacagcgttagcattctgcagatgcacgtattataatattggaatactagcagaagctaaggccaaagactcggtaataacatgatacaacgcataaatgagcatagcttttggtacaatattaagcatcttgctctcattattgggcatcataacaatgatattactagtgcatacaacaacattcatggtaattactatgcacaatacaattcttggctgatttctccagcattctcaggcttgcgcaaatatataaacttcatcatatcctttcccagccttcccacaataagttggactgtaattgtaaatgagattgtctagcaactcttgagcaactggtctgtttaaggatttcctagcttcactgacc

SEQ ID NO: 209714 - DNA, 583 bp, Glycine max
  unsure (1)..(583): unsure at all n locations
gaaaaaaagggccgaatttagcgtncgnagncnagntaagatacngggaaaaaccagcagagtaganagaggactggggnaanaaanannanaaaaaatttatctttcaagaggggaaataaaaaattagggtgggggaacattttgctacgataaacccacaagtcaaactagtaataataacaaactttccctggtatttccgagggttccttattgatcactcttaaatcactagtcaccgcatcagcatgatttatccctccaagggaacactgtgaagaacaacggtctcaacggttagacccggcccgaatccgaatagcaccccccactctaacccttctccagtggtactcttcccttcctccttagacttcttcctcatttcatccagaatgaacaaaacacacgcgcttgacatgtttccggactcactcagcacatgccgggtggactggagtttctccggcttgagccggagcttctcctcgacttgatcgaggatcgcgggaccaccgggatgtgcgatccagacgatagagttccagtcgctgatcccgatgggctcaaaagcttaaac

SEQ ID NO: 209715 - DNA, 353 bp, Glycine max
ggagggaaaaaaaccctggtttttccccccgttttgaattctgaaaatttcagacccccctttgggcctttatcgtttcccccctgcccaaaggggggccctttttttcgcaaaagaggggccgaaccccctgttaaaattcccttgaaataacatggcaccccccgaatttgggcatgcccccccccacatttgaattctggccttcccatttttgtcctgggactctgagcttaagcccctttctttcccccccagaaaaaaatcggggcctttttctttgaataatgagcccctcatgggtttcccttacctttcggggactttaacaaacccttggggggggccccccc

SEQ ID NO: 209716 - DNA, 661 bp, Glycine max
  unsure (1)..(661): unsure at all n locations
atgccagnatgctgcttcctcccganncccantncnnnnnntnnnnnnnnnnnncnnnnnnnnnnnnnnnnnnnnnnnnnnnnnnnnnnnnnnnnnnnnnnnnnnnnnntttnnnnnnnnnnnnnnnnnnnnnnnnnnnggggngnggttgntngntccacgtccatccccatctttcttctcctattctctctgttttcttttcttcttctaaaaagtgagagaagaaaacagggaattgaaggaagaagattgagaaaaaagggggaatgcccagataattaattcggtgaaatttcggattttcgtaagtgggtgtttctcttttcgtgtttttaccttcagtggtggaaggaagggggtttggtttggtgagttgatggacttgatgagcgctgagtgtgtgtcatcctcggacggcatggatgaggatgagatccacgccaaccatcatcactctgagttttcttccacaaagcctcgcaatggaggcactagtaacatcaattctgtgggccccaacggaattgctccggcaaccagcgtccatgagttgctggaatgtcctgtttgtactaattcactgtaccctcccattcatcagtgtcacaatggccacacactgtgttccacatgtaaaactagggtgcacaaccgatgt

SEQ ID NO: 209717 - DNA, 378 bp, Glycine max
gggaggaaaaaaatcttgttttttccccagcttttgtaatctgtatttttctatgccccctttgggcctttttgttttaccacttgccccatggggggccccatttttttcaaaagaggggcattaccccctgttgaatttcctttcaaattacatgggaacccccgtgttttgggttgccccccccatcttctgaattctgggctttccattttgttcctgggactctgagattaagcccctttttttcccccccaaaaaataatggggccttttctttttgaataatggacccctcatgggtttcccttacctttcggggtctttcacaaactcttggggggggacccccccaaatgagtttccttccattggccc

SEQ ID NO: 209718 - DNA, 347 bp, Glycine max
actcactagccttattttaggttttgagattgagctaaaggccaactcaaccatcgaatttgttggagttagaaagagttggaagaagatgctggttatggaagctgagagagctggtcgagaaggagcaataagtctaagtcaaggagaaggcgtagcctaagacagcactgtgactgaactcaccaaaatccgtctcctcatggcaattgttgaaacccgagatccctcttccaaggatgaggatgattttatgattagaagattcctgcgagctcgtgatttagaagtagagaaagcttcggcaatgctcctcaagtacttgaaatggagaaattcatttgttc

SEQ ID NO: 209719 - DNA, 330 bp, Glycine max
  unsure (1)..(330): unsure at all n locations
cttaaagaaaacaaagatctaagagcagataatggtctgattggtcaatttggagtaggattctactcggcttttcttgtagctgagagggttgttgtttctacaaagagcccatgatcagataagcaatatgtgtgggaagcagaagctgacagtagctcttatgtgataaaagaagaaactgatcctgaaaaggttctgcgtcgaggtacacagattacactctatttaagagaggatgacaagtatgaattctcagagccaagcaagattcaaggttaggagaagaattactcacagnttgtttccttccccatctacacatggcaa

SEQ ID NO: 209720 - DNA, 417 bp, Glycine max
aggtagagcctcctcatccaccaaaaccaccgaagaaaccaccaagcccaccaaaagtagagcctccacttccaccaaaaccaccaaagaatcctcctcctcttccaccaaaaccaccaaaggagccaccacttcatccagttccaatctacaagaagccacttccacctcttcctccactccctaagtttccaccacttcatccagttccaatctacaagaagccacttccacctcttcctccactccctaagtttccaccacttcatccagttccaatctacaagaagccacttccacctcttcctccactccctaagttgcctccactcaagccacttccacctcttcccaaacttcctccaaagcactttttccatcaccccaaaaggttcccagtaccaccttcttcctctc

SEQ ID NO: 209721 - DNA, 278 bp, Glycine max
attagaccctagcggatattctatgtaaggaatagaagggggagcaatatccaccatccatgtcactcctgaagatggtttcagttacgcaagtttcgaagctgttggttatgactttgatgagatggctctatgagaacttgaggaaagagttttagcatgctttcgtccagcagagttttctgttgctttgcacattgacatgcatggcgaaaaacttaacaaatttccctaggacatcaatggatactactgaggagagaggagctatgaagagc

SEQ ID NO: 209722 - DNA, 557 bp, Glycine max
acatagaagtaattagatgcattgatatcccattttgagtagcataatcatatcaataatgaatggtaagattgatgatttcaacataatttttagctactaaacaaaacattttgtacagaaaagaaagaaacaagaaaacttggaagaatatttaaaagctgaatttgggccaaccatagaaattccgaaattccattactagtaaacaaaagtgacatttagattgaagtcaaggaaggaagactcctgtcaacaatcatccactcaatcccaaatgtcaaacaaaaacaatcaacaactcaacaccataactcaaccattcctgcctgactaaccacaacacaacaaaaacaagacacacaactgagcttagtaactcaaccttgactcacagatacgatgcttgtgaatcatgactatacattgtttattattattattattattattattattattatcaattattaatcaataagtctccattttagttgcattctaatatttatcctacaatacttcaatataactcctgaagtgtttttagtattata

SEQ ID NO: 209723 - DNA, 324 bp, Glycine max
caaacactcacactctctctttctttcttcctagctagctacaatatggagcctctctcttccaccaaacacaacaacaatctctccaagccttcctccctccacacggagagctccgccgccggagagccagtcccctccggaagatcatggaggaggcctccatcgccgccggggtgcaattcgggagggccctacagctctctctacttaccccttacgtccaactgctggggattccccacacttgggccgccttcatcaggctctgcagcccaatctccggcatgctcagccagcccatcgagggataccacagcgacc

SEQ ID NO: 209724 - DNA, 568 bp, Glycine max
gccaccgcacccaccacgaacgctggtaagttaccacctccaaatagagcatcccatggtccacttatcacagacaccaccatctgtggtatgacaattgcaagattgagcactcccagagacaaaccttggcctgcccctgaggtgctggagaatattgatgctagagcaaagggtatgctgtaagtaatcgcgagtgggattccgaggagagagaagagagccaacgcgccggctttgacggcggcgggaggaggcaggggttcctggtgggcgttggggagtagggtgtattgtcgagaatgttggaccatcttagtaaccaaaaccgtcatggccaaacaaaccgcgagcaagaagttaacaattccccacagcctcttgacgcccccaaccccacgcgccagcactttcactcccaacgacgtcgcaccaagcacaacagagttcaaaattagccccacgcacccgacggacacccttatccgacgccttcccttccctactgtccctccgtcacctgacgcccatccagtcggtgtcgaataagcaaaagggaaccggcgat

SEQ ID NO: 209725 - DNA, 330 bp, Glycine max
ggctgggacactgcgagaattgatcaggctcatccagttggagtcacttcggtgtcatgggcaccatcgatggcacccggagcccttgtcggagcagggctgcttgatcctgtacagaagctgtgctctggaggttgagataatactgagaaggtatggaagctaaacaatggactctggaagatggactgcttccctgctcttcagatgcacacggattgggttcgagaagttgcttgggcacccaatttaaggctccctaaatctaccattgctagcgcatcacaggacggtaaagagattatatggaccgaggcgaaagatggggat

SEQ ID NO: 209726 - DNA, 579 bp, Glycine max
aaaacaactcaaactaatcaacttcattcttccaagcacaaaatactcaatggatcacaaacctcaaggaacttagtgcattatgaagcacaattaatcaactgtataatatgcaaagaaacaagatgtcaactatatttcaaaacgaaaattctaaccattttcaaaaggaaaaatatcacattctaaggctccactgttgtcacctgttgccattccccatcaactgcttccttccacaatgtcacattgttgttcccatcagccacagccaatatgtttcctgtcaatgaccatgagaccctccaaacaggggtgttgaaatcattcaaaaccttgccttcccactgatccccctctttcgccacggtccatataatcactttaccgtcctgtgatgcgctagcaatggtagatttagggagccctaaattgggtgcccaagcaacatctcgaacccaatccgtgtgcatctgaagagcagggaagcagtccatcttccagagtccattgtttagcttccataccttcacagtattatcacaaccaccagagcacagcttctgtacaggatcaagc

SEQ ID NO: 209727 - DNA, 376 bp, Glycine max
ccatagttacccacttcctctgacgatgctccaaatccacgcactcggaaggaccttgttctaatgattagcggtttagtttttgctctcttcccttgttgcctttggagggtacagggcctccaacgcgccacatgctgacgtgtcatcgccagcatcgaacgatgaacaacctagtcccacatcggagccttctccgaaaaggtacccggtttcacggagtgtttcttctggggtgtcagataagtcatcaagcatgttgtttgcggttaaagatggagcttcggaagcatttccttgggacaatagcatgctgtcgaggcagagaactgcttttcatttccaaccagagaaaaactggatgaacgatcctaac

SEQ ID NO: 209728 - DNA, 476 bp, Glycine max
gaaaaacagattctcttgtaagaatcattaaacatgatatgataaaattatgataaacattctcataaacataaatgagcaaaaaatgaaggaatgggctttgagcaagaacccataactttattgggggtttatgggaaggtaaacaatcgatgagttcaaattgccaccccaagatgttttccgatcctttgtgactacaagtcttttatatccaatttaattatttattttaattcttctgatcagggtggaatgggcgtataaatgcagaattcatttgccaaacattgagtgaggctgtcacagtggcctcagtagcattgttgaacaagaacaacctagcagctccatagattgcctttgttggataaacccgagatgtcacaaccggccttccaccttgagcaaagctttcaacaatagaatggtccaccagtatccgcaaggaaaacttttcattataagtactggaa

SEQ ID NO: 209729 - DNA, 429 bp, Glycine max
  unsure (1)..(429): unsure at all n locations
agatttagagggttgtctttgagttgttcaatttctctgagactaagagcacaaggagtagttggagttaacgggaactttcacaatccgtttctttagggggctaatagattttactatgttgatccttgcaatgagcgccatttcaagccaagggggccaaggcattggtttcagaattctagacatatttttgttgctgagatggttggtagggttttaatcactgagttttttgggaacttggaaacagttccttacaccaagcgaacccatttgattctgttgtcaaaagccatggagatgaagctaggggagtgccagntagaacaaatcaaagctgattttgaagggaaaatattgcctcctatacatcccgaaagtgtgagggtgacaatgatagctaatgaaataattgatgcattgctg

SEQ ID NO: 209730 - DNA, 546 bp, Glycine max
ttttttttttttttttttttttttttttttttttttttttttttttttttttatttgggttttttgggtttatttctaacagggactcccattttatctctggatgttatatacatctaaaaaaccaacacaaacgcacacaacaaaacaccaacccacgcccaacaaaaaaaaaaaaccaaattttaaaaaaaaaccaccccccccacaaacatcctttcaccaaaaaaaaaggggaaagggggttccccaaaaaaaaaaaaaacaccccccggggggaaggggcccccccccaaaaaaaaaaataccccccccccccggcgcaaaaaaaaaaaaaaaaaaaaaaagcgccctaacccaaaaaaaaaccccccccaaaaaaaatcccttctgggggccaaaaagagggacaaaaaaaaaccccccgccagggaaaaccacgcaaaaagttccccccccacaacaaccaaatggggccccacccgagaaaaaaacaccggggaaaaaaaaacaccccccaacaaaacccccttccccccccccccc

SEQ ID NO: 209731 - DNA, 407 bp, Glycine max
  unsure (1)..(407): unsure at all n locations
cagcaaccagtctgagtgcaattctgagatcaaatagctatcacaagaaagggcatgaagctccttgcaaatatgggggcaatctgtatatggcactgtttggacttgttcagattagaatgtcattcataccggatctccataacatggcatgggtttcagttgttgccgcacttatgtcctttacatactcattcattggactaggacttggcatagcaacagtcataaaaaatggaagaattatggggagcttgacaggaataccaactgataaaattgctgacaaatttaggntggtcttccaagcactaggagacattgcctttgcctatccatactccattctccttcttgagatccaggacactctagagnctcctccaccagaaaatcaaacaatgaaa

SEQ ID NO: 209732 - DNA, 533 bp, Glycine max
cttcatcaaacaaaacttgtattattccaatggcactggcagtaccactttattcactttctgaaatcccccacaattgcttgtactctatcttactctcaataacactagcattcagctttaaacttttttatatgaaacattatataaccatcaatctacaaactcaaatagagtaagcattactaaggggagtggcataaacaacctttcaggctttcagctattttaatttggcacttactattccttcaagtgagccaaccaagcccattacagtgaccagaaagcaagcaaagctgaatgttctaagaacaatccatttgctactccaagctgcaattttctgctgtacaaagtacatctctactgggaaatatatagccaatggccagaagtttatggctcctaacactcctaagatttggttgaagtaagggaaaaagattgcaagaccaatggttgagatcacataggttgttcaaagcagaacctgaaaagatttagctgaaaaccaggaagcaaggaagttt

SEQ ID NO: 209733 - DNA, 334 bp, Glycine max
agataaacttaagaattcaattattagaaattgaataagtaaacaatttaattggattggtcgaatggtatcaaatatatggagtactaactcccatttcttatttattattgaattaaccgatcaacttgctttggtatcgaacatttctttttgatttcaaaaattttccggaaaaaatttgaatctatttttatatgcgaatcaatcctactacttctggtcctgaggtttctgcgctcgaaaaaaaaaatctgggacgtatcgcccaaataataggtccggtacttgatgtatcttttcccccatgtaagatgcctaatatttacaacgc

SEQ ID NO: 209734 - DNA, 554 bp, Glycine max
atcaagaagttccagtctatatcaggccaatggcttggattattgtataatgggaatgaaaatattggctatgtacaaatgaccaataaaaataagtgaggagcaactgtattttgtacaaaagtgatgaagaaaaaaatgaacagcaagaggggtacaaagaaatcagtctccctcgtctggcctaacattgcaattgatgggatcattaggatggtgatgaatttgactgtgccactgatgctttgcaaatagggcaccagttctttagctgtagccactgctgtatgcaagccacatgatacatgtgctcgcattgcaaactccccacttcttctgcagccacatattcctcctggcaaatgctgcattttgtatcatccttaggttcattgcaactctcagcttcattgtcagagggtgaggactggtagacacttttctttaagcattctgaaagtgttttctctgttagagctgtgctcacagtacccatcctctttttcaaagccagcaattgctcatatgacatgttatcaatgtccaatcgcatg

SEQ ID NO: 209735 - DNA, 185 bp, Glycine max
caaattagttcattctctttgcagcagttccctacctctcctttcaagaagcagatcttcgtcaagaccctcaccggaaagaccatcacccttgagagaggaaagctctagacaccatcgacaacgtcaaggccaagatccaggacaaggaaggaattcccccggatcagcaacgtctcatcttc

SEQ ID NO: 209736 - DNA, 517 bp, Glycine max
caacacaaaccaaactttatttgcaaaggtcattacagacccattacacatcacatttttttttaaaatgtttgggaaaatccaacatcgaacatcacacagaaaatagtttcagcttaaaaccccccacgaagacgcaacaccaagtgcagagttgactccttctggatgttgtagtcagcgagggtccttccatcctctagctgtttgccagcaaaaataaccctctgctggtccggtgggattccttccttgtcctggatcttcgccttcacattgtcaatggtgtcggagctctccacctcgagggtaatagtcttacccgtaagggtcttgacgaaaatttgtataccaccacgaagacgcaacaccaagtggagagttgactccttctggatgttgtagtcagcaagggtacgtccgtccttgagctgcttgccgagaaaaatcagcctctgttggtctggggggataccctccttggtctggaacttaaccttgaccttgtcatggtgtc

SEQ ID NO: 209737 - DNA, 372 bp, Glycine max
cttacaatcaccacgagtgaaagagaaggaaaaagaaaaagaaagactttctcttaatcatcatgaccatgaaagactccatagttctatattcagctttgggaagaggacaccttgtttcaaaggaggaactaggtaaactcatactaagccaccacccttcactttccatcaccattcttttcctaaccccaccccccaaccatgacacccccacctcccccaccgccttcacctgcgacgccaccgccaaatacatcgccgccgtcaccggctccaccccctccatcaccttccaccgcatcccccagatctccgtccccaccgttctcccttccatggccctcaccttcgagctctgccgcgccaccg

SEQ ID NO: 209738 - DNA, 494 bp, Glycine max
  unsure (1)..(494): unsure at all n locations
ataatgaatcacacttttttctgaacttaataatattctatcgatctctaattctatactactagtgctccctccatagttccactaacttattcaaagccatgattgaagatccacctttcgccattgcttccgtggcactgattttcattttaaaaatcctctgtctaatctccttccctttgtccgagtccatgagttccatcactcggtcccccaactcggtggaactcactaacccgtctttgttctgcttcaccgccaaacccaccttcatttcctccaccaagatcaccttattcagcttctgctctgcgtagagaggccacgccaccattggcacaccttcacacaccgncttcaacaccgagttccacccgcagtgagtcacgaacccacccaccgagtcatgactcagtatcgccgcctgtggggcccagtccctcaccactaaccccttntcctttgtcctctccaaaaacccctttggcaac

SEQ ID NO: 209739 - DNA, 495 bp, Glycine max
gtagggattaaagcctgttcgacgagtcttaagctttccttggccaagccctatggttaacagtccctcgttattttctacaaatggcaggtttttctgcattgcttcataattagaactgcattttttgctgacaggatcttcgtctttgtcatctatgttttgcttgttattattggcgttgtccatttgctgattcttattcttcaaagcatgaggaggtgaaaagctttgaggcaacacctctctggagaatagagcctgaaaggccagactcccctcttcagagacctttttccaagaatcagtaagattgctaacacttctacgacgattactaaagtgaatggctaattggttagcatcagggggttcaggctcttccttccctttgtcatccttctatagtgccatagttttcacatcgttgctagaggccgggtgggaaccacatgaggaaccgtcaaccgggtttttgtcctttgttttgctgga

SEQ ID NO: 209740 - DNA, 231 bp, Glycine max
aaattcgaagagtacagagactccataaaagccaagagccacaaagctctccaagaagcaccctcgttgcatagcagacggcaacgagcttctcaagttccactgcacctccttcaattgctccctgggcctaaacggttcctccaacttgagcaactcgataccacagtgtaacgtgtgcagcataatcaagcacgggttcaaggtcaccggatgagccggtatcttgac

SEQ ID NO: 209741 - DNA, 391 bp, Glycine max
gaagctgaatcacgtgcaatttctggaaggaaaggcacccactctgccaaggatcctccagagatagcatataactgatttgaccacggcatcggctaagaaagccagagacttcttgcctttcctgcaccgaagtagaagagttcctgctgttgaggaatatgtgctcagaggtcatcgttttaagttgttaattccaaaagaaacttgcagcattgctttctctttttctggagtcaggtgtccaggtcgtgctgaaccatattctgacgaagcaattgctctgatgaggagaaagataatgcaaagagatgtagaggtaaatcaattcctttctgaactttagattcctgtatgcccgcttatttaattggtaaatatttcttatttt

SEQ ID NO: 209742 - DNA, 450 bp, Glycine max
  unsure (1)..(450): unsure at all n locations
catctttcttcttcttttccttcaaacaatcaaatccacccacggcaccctctcacataaaaaaaaatctcagatttcttcattccttccattcaattccaatccaaaatggatcaacaccacttnctccaccaccaccactatcaccacccccaagaacaccgcaatcgatacacctccctcacacctcaatcccaccttcacagtcaccaccacaataatcttcctccaccaccgccaaatccttctccgcctctttcctaccaccgcacaccgnaaccctacacccctcctacaccccaaccccaacatcaacaacaacaattcccttatacacccctcccagaccgncctctcgaagaagaaccccaacctcaacgtcatatcccatacgatcttctncctcgccgnaccaccaccctnccctggaaccctaaccctaaccctaac

SEQ ID NO: 209743 - DNA, 448 bp, Glycine max
gagtagagagaggttgaaagttaagaagtagcaaagatgtttccattcgggcacaagggtcaaaagataaaggggactatggaggttatgcagaagaatgagttggatatcaacagcatcaccagagttgacgggatcgtcggcaccggcttagacttcttaagcagagcactcgatacagttacttttttagcctcctccatctccatccaacttattagtgctaccaaagctgatggagggaaaggaaaagtaggaatggctacaaatttgagaggaaagataacattaccaaccataggagctaaagaagaagcatacgaagctcaattagattgggacagagacttcggaattcccggagcattttatattaagaacttcatgcaaacgagttctactcaagtctttaattctcgaagacattccaaaccatggaaccattcac

SEQ ID NO: 209744 - DNA, 462 bp, Glycine max
aaaaagttcaaacctgcatgattgcatttattattttggtttccattacacaaacatggtttattaatgacaaatacaagtacattcagccactccaaatacataacttaaacatacacaactgatgaaggaatcagattccttctatttcacatttatttaaagccagggacagtacttcagcaaccatagagcccttagatagagatactgttgggaattcctctgaaagtcaatccctcctcactagaaggatagagcaaagtgtaaggcattttagccggcccatagcggtttctcaatggctcattattggtcttctctataagcttcttttcaatctcttcaagattctttccaaacctcttaaaggcctctaatggcccggcatcagaagtccagtagtcaccgccatctctctgcccaaggtagaactcatcaaatgcgtgccttgataaaatt

SEQ ID NO: 209745 - DNA, 223 bp, Glycine max
ggaggcaccgatgctattgctactacacgtgttgtaattcgtagagagaataagcagtcacctactcctgctttgaatggaaacgttattgatccaacatttagaggtaccggagaaagaggggatatcgccacttcaagtgtagagggttatattactgcactaaacaaaatgctggattcacaggaacgattagcattcgacgaatgaattgtagcacctt

SEQ ID NO: 209746 - DNA, 376 bp, Glycine max
aagcaaataagaagtgcatttctcatatattagacccatgtggagacttacaaaggtaacattgttcaataatatggtccatacttaaaaagatcacaaagaaatcacaaatcgctagctgaatttataacttgaagcgtgaattctaacatttaggcgctagaattctttcgacaaatacaaatcattcctttgaatcgagcattttgtttagagcagtaatataagcctctacacttgaagtaacaatatccactccttatccggtaccactaaatgttggataaataacggatccattcaaagcaggagtaggtgactgcttattctctctacgaaatacaacacgtgtagtagcaattgcatcggagcctcc

SEQ ID NO: 209747 - DNA, 367 bp, Glycine max
  unsure (1)..(367): unsure at all n locations
tctcaaccctagtcaaagagagtcaagcacatttttttgtttgagtgtgtagcaaagggtggtaggtagaggagcttgttgtggttggtaggtaggagagcgcaagataatgcggcaaagttgttgcaattggggaaggttanagtagnagtttctttgcatggtattggtggaggagcctttggcttgtactgattcaattcagaagcttgaggttcagaagcacttgaagaacttgaataggcctcctgttaggtccatcaagagtcctgatggagatgttattgattgcatccatgttacacaccagccagcttttgatcaccctgacctcaaaaatcacaagattcagatgaaacctaatttc

SEQ ID NO: 209748 - DNA, 521 bp, Glycine max
aaaaaaatacagtttccttgtcccataatagaatattctgttcacattcacacctcaaccttcacagctctagagagaggagcaaacaaaaacaacaaatatatataatatataatataaacagggaaaaccaatgaagaaacttgtttcttgtaactctaagaaagaaacccaccaccccttttctccaacaattttttggagacttcaaagagactaggagcttcattatacaccacaaagctaaggggtaccacaaagttactaaaataactacagtagatgaaaataacacctagttttttttggtggtttttttttctttttttgtttgattaacatgaatgatcaagggcaatttggatttctaccaggaccaccatagtagaagtagttaccccaatctccagcactaccagtttgaacattgtagcagctatcttgctcagtgtaagtgccaaggtcttttggagctctagcttgttgtcaccataacaatctgaatgttcttgaagtaacta

SEQ ID NO: 209749 - DNA, 406 bp, Glycine max
catttatagaaagaaaaaaatgaagaagaaagagttctgaccatggctagcatcattatttatgccttcatccatagtggacgaagaagcgaggtttgaagccgaagaggcggaggtgcaagcatggaggaactctgagaggttcaagctaacaaaaagaccatacacagcaagagatgtggagtccctccgaggcaacctcagacaaacctatgcctcgaacgagatggcgaaaaagctctggagccttctgaagaaccaccaagccaacggcacagcctcaaagactttaggagcacttgatcctgttcaagtcactcaaaaggccaagcacttggacacaatctatgtctcaaggtggcagagctcagccacacacaccacgagcaacgagccgggccctgac

SEQ ID NO: 209750 - DNA, 549 bp, Glycine max
cgaataagcaccaagtaaaatatatttaagggaaggagtaaaccaaattacaaaacagtaaaaccagatttctttgtgctccttgtccacaattgcatgtccaaatatacactataagtaaaatatgtttaacagtaggagtaaaacaaattacaaaacacagaaaaacaagttttccttgttctccttgcccacatggccaagagtctgaacaagtaagaaatataagaaattatgaaggcaaaaatagcagaatgattcaatggcccgtttaatacttcaattattgaggacatttattccaaattccaatccaacacagaaattggtgaattttccccaagttccactctcggcagtatagttctgcaaaagtagcactttcacattctggccttagcaaccacaatactgcctctatcaatttctacagctcctggcctagtccatgattctttaaactgctcttcagttactccttttcccattgcagcagttgaagccacacctccctggacagtcttgagatacctatcatagtagttagca

SEQ ID NO: 209751 - DNA, 285 bp, Glycine max
tgttcggatttgaggtgcagctatgacttctttgagccgtgtattagtagtttctgatactccaatttttggtggtggtgttgttcaaggagtcggtgcacaagcttgtgtaagaatctgggtttttcttcaatatgaagtactttgaggaaaaagtacaggctggtgaatgggtagaagttgagaagtacttaacagggtttaccaaagttgatgataatagatactccatgaaaatattctttgaaatcaggaagcaaaaatatctagtagcacttgatgggc

SEQ ID NO: 209752 - DNA, 317 bp, Glycine max
tagagcttcgagctagcaactgaccatttcaactcaaagaacattcttggaagaagaggctttggaatagtttacaaggcatagcttgaatgatgggtctgttgaggctgtcaaaaggttaatggactataatgcagccggaggtgagatccaatttcagacagaagttgagaccataagtttggctgtccaccggaatcttctgcggctttcggggttttgcagtactcagcatgaaaagctccttgtttatccctacatgtctaaaggcagcgtagcctctagattaaaagatcacattcacggtcggccagctt

SEQ ID NO: 209753 - DNA, 488 bp, Glycine max
aaagcagaaattttaggtcatccatttcaacaaagaagatacttatacatgactttcctcttttttttttttctttttacagatgaatacgagcattacatagctattgacacgaatgacaatgtcatatttaacatttaaactacaccttttaaacaaggagctataggggaaaaccaagatacttgtttgtcacctaggaccaaaaagctccatggcttcaactacgagtgaagattcctttattaaatctgaatatctttgaggctcacaagaccgaaaccttggggtttcaatcctttgggaggcctcccatttttcagctaagccatccccttctaacatcttcaatacttttgacatcttggggcggggcgaaggattgaattgtgtacacaagagtgcaacctgaaccatttcttctagttcaatcagatcgaagttgccctttagatctttgtctaccatttgactcaatcttccatcct

SEQ ID NO: 209754 - DNA, 360 bp, Glycine max
  unsure (1)..(360): unsure at all n locations
ctttttcacgcgacgccctagttcatttttcttctccgttctcttctctctctgttcttcactcactctcattcattcaccatgacgaaacaacatgccaattggtctccttacgataacaacggaggatcatgtgttgcgattgctggagcagattactgcgttatcgccgcagatacgagaatgtccaccggttacaacatcctcactcgcgattactccaaaatctcccaactggctgagaagagtgagatggcttcatcaggctttcaagctgatgtcaaagctttgcagaaaggtntgtctgctaggcattagatttatcagcatcaacacaacaagcaaatgagttgccctgcg

SEQ ID NO: 209755 - DNA, 459 bp, Glycine max
gactcagacaaaaatccaatgcaaatttaagtgaaagcagtctagttataatgggagcagactagtacttgttcaaagcaatttcactggaaatgctattcttaatttcgcctcatgggaaaaacccactacgtcattttaaattttagaagcatttcaaacattctcaatccaagacaggtttctccaacaacaatttcctgtaaagcattagtctttccttagggccatgtattcacgatgaataccactggcatttaggatgacgatttcaaccttatctccggggtatatatctctctcagttgcagatgcaaaaacagttttgaccagatcaactgcttttgcttcagacaatggagtaacagcatcctgggcaggtaacaggagtgggctaggagacttcagctggttatcaagaaatggcataataagtgtggatccagaaccctgagagct

SEQ ID NO: 209756 - DNA, 352 bp, Glycine max
aaagattcgattctactagctgggatactagctggacaggagaagtttggaggcctcagagatggatactatatccatgggcaatgtgctattataatgtttgatgttactgcccggctaacatacaaaaatgttcccacctggcaccgtgatctttgcagggtctgtgaaaacatcccaatagttctttgcggtaacaaggttgatgtcaagaacaggcaagtgaaagcaaagcaggttactttccacaggatgaagaatttgcagtactatgagatttcagctaagagcaactacaatttcgagaagcctttcctctattaggcctggaaacttgcaagtgatcctaatt

SEQ ID NO: 209757 - DNA, 456 bp, Glycine max
aaaggaacataaaccctcatttttctaatcaatagtatcgagtttaacttgaaaaaaaaacccaaaaaggaacaaactctaccctccatcggctaaaccccaattcgcatggtatattaaaaagaaccccaaaattttgtcgaaacaaccaaaatcctcatctttttaacgcccatggttgatatattaaactgaggttttaaatttaagcaacaaatctggatgataattgattcagatcctcgaattcgcatccaaaaatgtcaacactacaacccccaacagcacatacagtagcatacaaataccagcgcactcagaaaaacagccctctactcaaaagattcatcatcatcgtcagggaggggctgactagcagctgcaagaagctcagcctcgtgctgttgctgtgcagctaaatcaatttgaacttctggtggagccaatgcaggagat

SEQ ID NO: 209758 - DNA, 463 bp, Glycine max
acagcgcatgagaattgatatttattgtcgaaaagttgcaaaacgtgagacgatgataaaatttgtactaaattacatttttaaacttgcaaattgtactatatttatttagatatacccccttccccccaaaaaaactgagagaaaaaggtcttcttcactattttattaattaatacgagagggaaaaatgcttccatatatgtagcttttagtaatgtacagcagcaatttcctctcacttccaactgcagtctttcaagtcttaagataggttggtataggtacaccagactgttctgtcaactttttataagcagcttgcaaccttctagtgactggtcctacttctccattgccaattatgcgaccatcaaccttcactacggggcttagttctcccattgttccagtcgtccatacctcatctgcagtatgcacttctgacaagctgattcggcgc

SEQ ID NO: 209759 - DNA, 324 bp, Glycine max
ataccaatagttgatgataatgactcattattggatatatactagtcggagtgacataacagctttggcaaagaacagagcatatacacatattaatcttgacgaaaagactgttcatcaagctttgcagttgggccaggacgcatatagtccctatgagcttagaagtcaaagatgtcagatgtgtttgcgttctgatcctctgcataaagtgatggaacgcttggcaaatccaggtgtcaagcggcttgtcatcgaggaagctggcagcaagcgtgtagaaagcattgtttcattgagtgacatattcaagttcttcattgg

SEQ ID NO: 209760 - DNA, 347 bp, Glycine max
ggcaagaatatcaaattggtctcttgtcttcctcctcatctctacactactccacatagagcccagcctctcaagcccaagcccaagcccaagcccaagcccgttcataaaatcctcctgcagcagcacccagtacccagccctctgcgtctcatccctctccgtctacgcctccagcatccaacaggaccctcaccaactggttcagacagcactctccctctccctgaaccgcacccaagccaccaaaaccttcgaggctaactgcaacaaattcagaggcctgaaacccagagagcacgctgcactcaaagactgcgccgaggaaatcagcgacagcgttgacc

SEQ ID NO: 209761 - DNA, 475 bp, Glycine max
aagttgcatgagaagatccatatatctataaagacgcacatttataataattacatagagcacataaaagaagaaaagtaaagcattaagcaaccaagatcattgttcccaactagtgttgtgcagcatagtggttaataagcgagagagcattgctagtaacctgagcaacattgagcatcctagccctaatagagtccttgatcttcccattcagcgccttcccggagaatccatcgccgcaagtgctctcatcggtcaaagcagaactgacccatgtctccacgttgctaatgtgccacgtgaagtcctcacccttaaccttacatagcttgagctccttcagcgaccggctgaggcggtcaacgctgtcgctgatttcctcggcgcagtccttgagtgcagcgtgctctctgggtttcaggcctctgaatttgttgcagctagccacgaaggttttggtggcttgggtgcg

SEQ ID NO: 209762 - DNA, 331 bp, Glycine max
gaggctcacacacgcacagatctgatctatctgaagctgaaaacgccgacgcccgacggagatgatgaagatggggtcctcaccttcacgttgctccttcttcctattcctcctcctcctagaggcgctcttcccctcgtcgctctccgagatccggttctccgagatccgaaacgacgatcgctccatcgttcccttcgatcagttaggattcacccacaagggtcgccttgagctcagcgtttccaaaatatcactctccaattccaatttggacctctccaaagtgggattcttcctctgcaccctggattcctggcttcatgtcttc

SEQ ID NO: 209763 - DNA, 403 bp, Glycine max
gcaagggatcagtttttatacttaaaagtaatatatgttcaaagcactacacaagggtttaggatattataacactaatgcaaaaactggcatgagtccaaaacacaaaatatagcccaatgatttatgaataatgactattcccataaaatgtaacatgcaaatttttactggctgttgaaatgaaacctgaaagcattgctgagcatgggaccaacttgttcaacaactaattttgtattttgaaagaaattacaattcaaattcattttcaagcttcaaggcctttggggaagccttttccttttcggcatcgaagacaaaatacggattgggagcctttggcttgaacttgtacccagtaaaaaaatagaaagcaagggtggccaacttaacagcaacc

SEQ ID NO: 209764 - DNA, 284 bp, Glycine max
gccagtttatccctagcgattccccaatatggaatatttgaaaatgtaaattcagtggacgagctagcaaaaatgcctcaatggacagaagaaaagcctctacgagttgctactggtttcacctatctggggcctaaatttatgaaagagaatggacttatgcatgtcacattttcaactgctgatggtgcactggaggcagctcctgcgatggggatagctgatgctatctcggaccttgtaagttgagggaccacactgagagaaaacaacttgaaggatat

SEQ ID NO: 209765 - DNA, 348 bp, Glycine max
  unsure (1)..(348): unsure at all n locations
cagagcctctgcttccgacacaaatcaatctttctgatcatatattattcttttagtttttttaatttattctccatacacatgcagacaataagttcgaacaagttcaggagcggcatggatttcttccaccgagcgaaagcggagcgcctccgcagccaccacgacaagtacctcctcgcggaggaggacgaggagtcggagacgcaagaccgcaacggctcctccaaaagcgcacggaggacggtagaatacgtggccgaatacgacaacataattcgcctgaagagctgntacagcaagtacctcaccggttccaaccacctcttcctcttgggcatgacgggc

SEQ ID NO: 209766 - DNA, 297 bp, Glycine max
ctataaagcaggggagatcatgtcttaagaggcttagtatactggaattaatacaaggcacttattgaagacaagcaagaaggttgaagagttctctggtatgtatttacaaccacacaaagctgttgtaggtgataatgcctttctccatgaaagaggcgttcaccaggctggattgttaaagcatagaggtacatatgaaatattgtctcccgaagatattggccatgaaaagtccaatggagttaatatggtactagggaatctaagtggacgccaagctttgaaaagtcgact

SEQ ID NO: 209767 - DNA, 551 bp, Glycine max
cgggaactattccttcttttattctccttgatcatcaagcaaataataagttcatttctcatatattagtcccatgtggagacttacaaaggtaacattctccaataatatgttccatacttaaaaagataacaaagaaatcacaaatagcaagctgaatttataacttgaagtgtgaattctaacatttaggtgctagaattctttcgacaaatacaaatcattcctttgaatcgagcattttgtttagtgcagtaatataagcctctacacttgaagtaacaatatccactccttctccggtaccactaaatgttggataaataacgtttccattcaaagcaggagtaggtgactgcttattctctctacgaattacaacacgtgtagtagcaattgcatcggtgcctcctgtaactgtacttggtgagtattcaagtacttttacggtttccttcactatgagattaatagccttgtaagctgaatctactggtcctacaccaacagaacaagcaacatgtgtgctaccatcactaagaacaagtttg

SEQ ID NO: 209768 - DNA, 291 bp, Glycine max
ctggaacagctataataattaagaattctagttctccctcggttaaaatcttggatacgtaaggttgtcttagacagagatgatgaacaattaaagaaaactgacaacaaaccaacaccgatggaagaagctgtgcaagctgcaaaatcagctgcagctgcagctgcagatgtggcaaaagcgagccaagaaatgctggcttcaaaaggcgaagagatggagatactttgaggaagttgagagccttttagataagcaagtacaagaaatgaagtcaatgaccaatgccat

SEQ ID NO: 209769 - DNA, 394 bp, Glycine max
ctacataaacacttcccacccaaattttattggaggaagcaagagcattagaaatagctgcacagcagaccaagtcgtctagggttgctataccagtttctaggcaaaaggatgctctggaatctgataagggatctgcctctgaaagaagtgtgaagtctaaggctattcttgcaagacaagctaatggagtagttcctgatccgggagtccgtgctgcatcagatgttgaaaaaattgtaccatctggaaacactggtggatcaagtagggagcatctcatcgatttttggaggatgtgatagccgtatgtctgagaaagagaatatatctagtaaaccgcatgctgaaccagttcacagcattgagcaatcagtctctatgatccatttga

SEQ ID NO: 209770 - DNA, 395 bp, Glycine max
tggcctcgccgactcggttgctatctgcgagagagagtgagtgagaggttctcttgcagcaacaaggtttagtgacaccaaacagacgggaaatgggtcgaggggtcagagctggaggaggacagagttccttggattatctctttggcagaggggtacctgcctgcagtgcaaatggagctcgcactcaaaatgcaagagctccttcaccaccggttgataagcaaagtccagcaccagcaccagcaccagcacctgcacctgcagcagcagcagcaccagcacctgcaccagcaccagcaccagcaccagctgataagcaaattccagctggaattcctggaagtctcaaaaacaattaccatcgcgctgatgggcaaaactgtggcaacttt

SEQ ID NO: 209771 - DNA, 423 bp, Glycine max
  unsure (1)..(423): unsure at all n locations
attctagaggggtaggtactctttggaaaagtctgctgttatttacaaagactgggttttcactgatcaagcattgcctaaagatcttgtcaagagaggagttgcggttaaggatccatctgctccccatggagttcggcttttgattgaggactatccttatgcttctgatgggctagagatatgggatgccatcaagtcctgagagcatgaatatgtctcattctactacaagtcagatgcagcaattcaacatgatcccgagctccaagcttggaggaaagaacttgtccaagagggtcatggagatttgaaagataagccatggaggcaaaagatgcaaactcgagaagagttgattgaagcctcggctaccctcagatggatcgcttcagcccttcatgcagctgntaactttggaca

SEQ ID NO: 209772 - DNA, 494 bp, Glycine max
caatccaaaaaataatccagtagttttaagttcagtccaaaaaatagtcatgtgagaactctcagatcaatgtttatgtacccagaaataatgagatgtgaaaatcactaatttattgactacaacaaggatagttaggaagtttaacttaattttacacctttcatccgtacaagacttgattgtttataaagaagactcaatatgatgggtggatgaaagcaatctcattaggcacggaatttgagactcactgattcatagcttggaacatagagaacatctccatatgatgccattgtgagaggagaacaaatgagctttcgcgaaattgaagtgatatccttcgaggttacttcatccactgccttcaagaaatcctccacaggtttccttttaccatatgtcaaaatttgtctttctatatcttctgaaacaaccatttttgattccaaattcaataaaattgcagatttgggagcctgtttggctcg

SEQ ID NO: 209773 - DNA, 311 bp, Glycine max
ttctgatccatatatatcatactttctttagtaataacttaaagaaccccacaataacaccaaccatgtccacaattgcaaagagagatttgagttctaatgaagtagtgagtgagctgagaagaggtcctaggactctagaagaagacatgcttactcatacactatattgctcgtcatggagaaagccgtaggtatatgttagccaaaagtgcaggatagaagaggactggaaaaagttgcagacttagatggctgaattattagaaaccagacattaagagagggaacctcactccacaggagcaact

SEQ ID NO: 209774 - DNA, 485 bp, Glycine max
  unsure (1)..(485): unsure at all n locations
natggctaccacgatagcctactgcganactncccggacgacagctactagccggcggccgcccttttttttttttttttttttttttttttttttcattttttccttattctatattatggggcacttttggtttttttccccatcttcacctctattcctttattaaatttttctttaccttttcctctctatcctcgggagaaaaaatcccctcaaataacaccaaaaataccacctggtacggggaaaaaacaaacacacctcaacccatatataaaaataatataacagggagaaccccaaacaccccacccctagattattcatataaaaaaaacaatattaacaaagggactttacaaaaaaaaccccccaccactacaaaataattcccccaaaaaaagaacctccccccccaaaaaaaaacccgtacaaaaaaacacccaaaaattgcttcttctcccaaaaacacacccccccac

SEQ ID NO: 209775 - DNA, 343 bp, Glycine max
aagatagagagtgaagtaactgaagagaagaaaaaatgccgagcctcaacctcagcaccaacgtgtccctcgaaggcgtcgacacctcttccatcctcgccgaagccacctcctccgtcgccagcataatcggcaaacccgaagcctatgagatgattgtactgaaaggatcagtacccatagcttttggagggaatgagcagccagcagcttatggagaataggtttccataggaggtcttaaccctagtgtaaacaaggaacttagtgctgcaattgcttcaattctggaaaccaaattgtcagggccaaagtcgcgggtcttcttgaaattctatgacac

SEQ ID NO: 209776 - DNA, 485 bp, Glycine max
aagcggtgccagataatgtttgtcacaaaaagtgtcaaacacatatgatccccatttatccttgcaattaagcaagttacgtttgcgcttaggctaccagaaatcccgagtgtacttatataatgatacaaacatagacataaacacgggtgaaacataatgaacactccatccaacattcaaggtaccacaaccaatgtaacatggaattcggatttcagaatgtagatccattccatccgaagttggaacccttggtgtcatagaatttcaagaagaaccgcgactttggcactgacaatttggtttccagaattgaagcaattgcagcactaagttccttgtttacactagggttaagaccaccaatggaaaccaattctccataagctgctggctgctcattcccaccaaaagctatgggtactgatcctttcagtacaatcatcacataggcttcgggtttgccgattatgctggcgacg

SEQ ID NO: 209777 - DNA, 412 bp, Glycine max
tttttttttttttttttttttttttttttttttttttattttttttttgttttattgggtatttttaattttttttattttttaattttatatatgtatttttgttaaatttaaataaaaaggagaaggaaaaaaaaatttagagcataaacaaaagaaataaaaaatttccaaaaaaaaataaaacaaaaaaaaagaagaaaaaaaaaaaaaaaaaacaaagaggggggataaacaaaaaaaaaaaaaaaaaaaaagggggcaaaaaaaaaaaaaaaaaatgaaaagagaaataaaaaaagacaaaaaagggcggtgggagggaaaaaaataaaaaaattaaagagtcttaaaaaacataaagtggggttaaaacaaaaaatataaaaaaaaaaaaaaaaaagacttctgg

SEQ ID NO: 209778 - DNA, 387 bp, Glycine max
  unsure (1)..(387): unsure at all n locations
gaaaaatttctccttgtttagtacggcacacaagtgagatcaaagatggaaaatatgccaccaggttatcgtttctaccccacagaagaggagctgatttcgttctatcttcacaacaagctagaaggagaaagggaagacatgaatcgagttattccagtcgttgatatatacgactacaacccatctgaactcccacgtaaaaatcttatatatatatatatatatacatatatatttccctcatctccctctttctcttttcatttttctaattgttttttcctttcaatcaaaatcgagcttgacttgaaagctatggtacaagttgatttattgcatatatatagaagcaaagcacattctggataattnaagggtacatac

SEQ ID NO: 209779 - DNA, 316 bp, Glycine max
ataggaacttgcagaaacataaacatattagatgtcttagtgaagttgagaacaatgatgagcttcatgtggttatgttcccattccttgcatttggtcacattaacgcatttgttcaactctccaacaagttgttctctcatggagttcgtatcactttcttgtcagctgcatccaacattcccagaatcaaatcaactcttaatctcaatccagccatcaatgttatcccactatacttcccaaatggcataaccagcactgctgaattgccaccaaacttggctgcaaatctcatacatgcacttgaccttac

SEQ ID NO: 209780 - DNA, 548 bp, Glycine max
agagaattcatgcactaactggtcttattataactacagtagaatctggagaaaggagacacattggaagagactagactaagaaaatggattagtcttagtagactttattttacattaatattggaagagaatagaccaagaaaatgagcactgaccaaactagtcacacacattcacacacaaaacaactaatacacgatcgaacagttcaaattttaaatgatagcttatagtccaagaaatccgaatcctgaacactaagccatagacttcaactgggcaaccagatcagtgatgaatttgttctgaattcctttattcaataaaaactccttccatttcatgtggttttcttttatttgcttccctggctctttatcatcctccaccatgatagtttttactgccttcagtatatcctctttcttaaagtccccatcttcactcctattcacctctatccctgcctccaaagccttggctatgagcttagcattgaaaaactggtcagccttgaaaggcaacagcaccagttcacaatcact

SEQ ID NO: 209781 - DNA, 392 bp, Glycine max
aggtagcggagatcctagcactctcttctgcagctttcgccgacagcttcattcaccatggctgagcaaaccgagaaggcttttttgaaacaaccaaaagtgtttctcagctcgaagaaaactgggaagggaaagagacccggaaagggagggaaccgcttttggaaatccattgggcttggatttaagactcccagggaagccatcgaaggaacctacattgacaagaagtgccccttcactggcaatgtttccatccgaggccgtatcttggctggaacatgtcacagagctaagatgaacaggactattattggtaggaggaattatctccattttatcaagaagtaccagaggtacgagaaaaggcactccaacattcctgctcatat

SEQ ID NO: 209782 - DNA, 542 bp, Glycine max
caaaacaatgcccctccagcttcctttaaacttcaacacaagaaggacaagcacaaaatggtatcttcatgccattcatgcatcaaatataaataacaaaaccgcaattgcactggctgtcagctgaaggctttgtatactccaaaggccaaaccaacaaaattttgttaatcaaccatcgtcatccacagcaccaacatatgtgaggtccgtccgtctcacccttacagcccctttaagccagctggtggctcgaatattagcatggtcaccacttcctatgctagcagtattacctgccgaagagtaagatccagtaccatcttctaagagtgtccaaggatctatttccaaatcattgtcctgttgttttgatttccctgatgcattagaagcaacccttgatagaactgggttcctctgaggaatagttgaactactggagttagacccaggatttgtaatgctgggttgaaggcaaacaagagcggaattggaaatagatggtggctggcaggataaagagcaccgcataaagggga

SEQ ID NO: 209783 - DNA, 376 bp, Glycine max
cacaactctgctacccttttctctctctctcggatttcttgcgcggtttatcatgggggatagtcagtattcgttttctctcaccacatttagcccttctggaaagcttgttcagattgagcatgctttgacggctgtcgggtctggacaaacgtctttgggaattaaagctgcaaatggagttgtcattgctaccgagaagaaattgccatctatattggttgatgaagcatcagtccagaaaattcagttattaacaccaaatataggagtcgtatatagtggcatgggtcctgattttcgagttttggttcggaaaatcaagaaacaagccgagcagtatcaccggttatataaagaaccaattcctgtcact

SEQ ID NO: 209784 - DNA, 531 bp, Glycine max
cgcagtgcaattaataatgcattgaacttaactggaaatataaaaataacagagataaggaacaatcagattctaaaagggtgaaaataataaattagcaatagtcattaagtcattccgcaccgtctaaacaaactaggtttgtttgaaaatgttgatgactttggaaaagggtttatctgaaggcttgctggtcatcacaacgagtagctcgcaaattcactattgccatcacaatgtcaataattaagctaccaattaaacccaactgtgaaacaaacaacttcaggaacacaagagttcttcattgcagattattctacttcagccaaatagtcgtcaatttcagctggtgtcaataccctgaactttttatcagctccaattatgccaatttcaatgttttttcctgagatctgtccctcaaacccttccttcagagtcaatattgctgtgtggactgcatcatcaagctccatatcatctgtgtacctcttctcagaaacgtctttgcattagaacatttttccc

SEQ ID NO: 209785 - DNA, 270 bp, Glycine max
ctcgagccgcagttctttaccatctctggatttcccgcttccgggcgttacacttcccccttcatagcctgattttgttgcgcccggaaaaactattattactacactcccaaaaggactcaaagaggcctctgaaacatcaccgactcccactgcgtcggttggcttatatgtagattgaggttcaatatacgagactccgataagttttggggctacacatctgctagaacgaaaggctttcaagaccactagaaaccggagtcactt

SEQ ID NO: 209786 - DNA, 525 bp, Glycine max
aatcaccataaattagaatttcaactagcaatacaatacacttattcaaaaccagttcctgatccattgattatgatttggtttttcaaagggattcaatccaaaaaatagtctgtgagaactatcagatcaatgtttatgtaccccgaaataacgagatgtgcaaatgtggctagtgcacaatcactaatttattgactacaacaaggatagttagggaagtttaacttaattttacacctttcagccgtacaagacttgattgtatacaaagaagactcaatatgatggatggaaacaatctcattaggaacggaacttgaggctcactgattcatagcttggaacatagagaacatctccatatgatgccattgtgagaggggaagaaatgagtttttgcgaaattgaagtgatatcctttgaggttacttcatccactgccttcaagaaatcctccacaggtttcctctcaccatatgtcaaaatttgtcttcctatatcttctgaaacaaccattcttga

SEQ ID NO: 209787 - DNA, 352 bp, Glycine max
agctgaagtaattgaaccaaagaagaatgattcaaaggctaaaaaagcagctgataagaaagtgccaaagcatgttagggagatgcaagaagcactagctcgaagacaagaagctgaagaaaggaagaaaagagaagaggaggaaaggttaaggaaggaggaagaggagcgacgtaagcaagaggaacttgagagacaagcagaagaagctagacgtagaatgaaggaaagagaaatggaaaaactccagaaaaaaaagcaagaaggtaaactgttaactgagaagcagaaagaagaagcccgtcgtctagaggcaatgaagaagcagattctcaataacacagggggcatg

SEQ ID NO: 209788 - DNA, 383 bp, Glycine max
  unsure (1)..(383): unsure at all n locations
cagcacaaagcagggttactagtctagttcaagctaccatctctctctctctttcttagagcctccttgccagaagttaaaatggcccaagaaactttcctattcacatctgaatcagagaacgaggggcaccctgacaagctctgagaccagatctccgatgctgagctcgatgcatgctaggagcaagaccctgacagcaaggtagcctgtgaaacctgcaccatgaccaacatggcgatggttttcggagagatcacaaccaaagccaacgaggactatgagaagattgagcgagacacatgcaggaacataggnttagtctctgaagatgtaggtcttgatgctgacaactgcaaggtcctcagcaacattgagcaaca

SEQ ID NO: 209789 - DNA, 521 bp, Glycine max
agtaaaattgtatactctctataatttgagattattacatatttctagcataaatcttgagagaacatttttttttgtttcatcatataaaatatatatgttctgaaagaacacatacaagtacacaaaaaaaagggggaaattcataaaaaaatacagaaaaaaaaaaacagaattgagtaagagggaaggaaacatagagaaaattttagcaatcagataataagaagccagtagtagtgcaaaagtcccttgccaagagtgttggaaccccttttagttaagcaggtaccttctcccccttgagtggcttcaccacttcccatgtgaagtcagggtcatctctgccaaagtgtccatatgcagcagtcttcaagaacctgccatttccacccctcttgagatcaaggttgatggagatcatgccaggcctgaagtcaaaactctccttcacaatgctgaggatttccttgtcagggatcttcccagtgccataagtgtcaacaaacacagacaagggc

SEQ ID NO: 209790 - DNA, 280 bp, Glycine max
cgtaacttcatctgggtttcatgaaaaaagattaaggaatacaatgggttccgataatcaccagaacttggagttcttgaaggagatcggtttgggctcttccaacattggctcttacattaaaggccagaggaaagccactggttcttctgtcacttctgttaatccttctaacaatcagagtatagctcaagagaccgaagcaactttgcaagattttgaggaggggttgcgtgcttgcagagaagcagctaagacatggatgactataccggcaccg

SEQ ID NO: 209791 - DNA, 423 bp, Glycine max
gggaaaccccccttttattggaattaaacctaaaaaaaggccttttgcctgaatcatttagctacttggacttgggcccatcttgggcctgaaaattgaacccatgacatggggcccttactaaaaaaactaccccggccccaagaaaaagcttcccccctccccaatttcatgaaagctgaataagccccccattgggataatggggggggatcagggtccgggcacaaaccatcaagcatttgggcttccttagtcatgggagggcccaaactcaccttattttgtttgccccaaaaagcaactttaaaagcagccccaacccttttattcttttaaaaaaaaattatttttggaacaagaaccctttttaggttcccttcttccatcattttgaacacataaaaaggaaaaagcgccttt

SEQ ID NO: 209792 - DNA, 531 bp, Glycine max
gaattctagcaaatatcttatataatattttagaggtggatcaacaacaagattctgttccttactgccaaccagttacctaaccaccaatttacaagtcaacaaagtgaagttcacttcaataatttcctgtgtagctttcataataactaataagcttgatatcccagtcaatgattatccactaccattgacaatggaggcaggacactgaacaataaggggggaaagcagatgtaaaaagcagtcagcacaccaaagtatacaaattctactatatatacatcaaccactcccacgcttaaaatgttctctaataaacctttccgcatgagtagggtacttatctctaatgtattcccgaaggcacttctgataggagaaatcaatccagccaccatcagttcttacaacaaaaagacaccttgattgtcgatattggggatgacggtcaaccataatggattcaaggccacacccaatcttatcttcagaatgtggatggtatgcaaggagcttttcaactatagc

SEQ ID NO: 209793 - DNA, 352 bp, Glycine max
cttagaatgaaaaaaacttaaatcaaaatacttaatagcatggcgatacatttatacaaaacttctaccccaagcacacgcaatggagccgtagacagtcaagtaaaatccaatccacgaaatcatttgatctatggacagcatcgttgaggtaaagagccgaatgccagaggaatcattaccgcagggcatagagggggaggtcataagcgtctataccgtaaaattgattttcgacggaatgaaaaaaacatatatggtagaatcgtaaccatagaatatgaccctaatcgaaatgcatacatttgtctcatacactatggggatggagagaaaaaatatattttacacc

SEQ ID NO: 209794 - DNA, 454 bp, Glycine max
tttttttttttttttttttttttttttttttttttctattttttttttggtttttttggtttttttttttttttttttcttttttttttttaatttttttttttttcttttgggaaacaaaatcccccccctttcctttaaataaaaaaaaatctccccaaaaaaaaaattttaaagtgtttttttcccggaaaaaaaaaaattttcggtttggaccccccatatatttacccccccccccttttggggcgcctgggggcttttttaaaaaaaaaaccctccccccggggaggcacaccctacacacctgggggggattaaaaaactccttgcaaaaaaaaaacccggggaaaaaaaacccccttccttttttaaaaaacatggcccctccttgggggaatagttttcccaaagggggaaaaccccctaccgcaaaagtcggttttttttcccc

SEQ ID NO: 209795 - DNA, 400 bp, Glycine max
  unsure (1)..(400): unsure at all n locations
ccacccttcaataggcggagatcaagcacgcccgtcttgccatggagggcttctagggctttgcagtccaagccgccgccaccggcaagggcccgctcaacaactgggccacccacttgagtgacccactccacacaaccatcattgacaccttctcatcctcctcttaagaagaagagtctttcttgagcctcgtcactattactagcatattagaaaagtcttttcttcttcggctttaggttagaattagaacattttcacttagttggattagtagtacttgtgaaaaacttgtaacgagaaattggagaagctaagcagaaatgcttctgctagatggtaagcgttctcctgtaaatggtnattatgcacggaatcgagatggaatgacgatggt

SEQ ID NO: 209796 - DNA, 408 bp, Glycine max
accctcggcattccctcttgattccgtgcgtggtaaacatttacaggagaacacttaacatcaagcagaagcatttctgcttagcctctccaatttcaccgttacaaggtttttcacaagtactactaatccaactaagtgaaaatgttctaattacaaccaaaagccgaagaagaaaagacttttacaatatgcttgtaatagtgacgaggcacaagaaagactcttctttttaagaggaggatgagaaggtgtcaatgatggttgtgtggagtgggtcactcaagggggtggcccaattgttgagcgggcccttgccggtggcggcggcttggactgcaaagcccaaaaagcccaccatggcaagacgggcgtgcttgatctccgccaattgaagggtggcttgag

SEQ ID NO: 209797 - DNA, 331 bp, Glycine max
ctagccaaattaggattaggattagggctaccaataccaataccaataccaattctattctatggcttagctcaagcgcccaaatacacggtctcggaaccccttcctcccgaaccctatttttaggtcagaggctaaataccaaggccgcctttatcaagctcaagtccacacctagaagactccgccctctcagagtggctaatgagaaagtcgccggtatcgattagggaaccaccaactccgccgaggctgccatggaaagcggcatgcccactatcatcaccaacgccgagggccagagaaccacgccctccggcgaggcctacac

SEQ ID NO: 209798 - DNA, 526 bp, Glycine max
cgaacctatgaaatccgtgtctaatatttgaaggaaacacgcacccactctggattgacaaaaattattaagaatttggaacagaagaaaacatataatgggggaaaaaatactaacatatacctctctattggtaataactagttgcctgctcatttagagtcagtgaaatctgcatcaatgacatcaccgtcgggtcccttgcctgaggattctgaggggccagagtcggcaccgggtggtggtgttggccctcctgcgcctgcagctcctggttggttgtaaagggactgaccaagctgcatgacttcctgatttagtgcagccatggcatccttgatagcttgggttgaacccccagaaatggcgtctttaagctctcctagttttgcttcaaccttctctttcacagggccaggaaccttgtctccaagctctttcaattgcttttctgtctggtataccacagagtctgcctgtttctttgtgtcaatagcatccctcttctctttgtcttccttcgaaa

SEQ ID NO: 209799 - DNA, 493 bp, Glycine max
  unsure (1)..(493): unsure at all n locations
ctctcctctatccttcgagcccacagtcaataatgtctcttccaactccatcgctcccccttctccgttgcatccattttcacgattccaatccattaaaaatagaaagccaaaaccccatcatattcctagaatcacatgcagaggaaaccaaaacaatccaacaccaaaccctaattcccagggagaacctccacatattgtaggacataggaggaacgttctacttggcctaagagggctttgaggagctgttactcttaacaacaacaacccttttgcctttgcagctccaatatctcctcctgacctaaacacgtgcggtccaccagacctacccgcagagagaaaacccaccaattgttgccccccatcttccaaaatcatagatttcaagttctctccctctaaccaacccttgaggagaagaccagccgcacattaggncaacgatgagtatctagccaaatacaaaaaagcccttgacctcatg

SEQ ID NO: 209800 - DNA, 430 bp, Glycine max
aatacataatcaattattttattaatcaagtattaaatgaatcagcatatgataggaaatacataatatctctttatgagttacacactttattggaaactagtaaccatatatgtattaccacacacacatatataagtggttgaagcatatagataattttcaatccgaaagaagctctattttgatgcctctgattttaacacgccctttcccatatttgggaaccagcgtcaccctaacactggcatcatcttccgcttccaattcttccaacaaatccgtaagtcccagcctcaaacaagtaatgatgcccttgtttttgtgcatatgtgaatgaggcacactcacaaagcttcctgcaaattctgtattatctggtcgaatctgcttatcatcttcatcattgataaacacatcaaatttcaca

SEQ ID NO: 209801 - DNA, 333 bp, Glycine max
  unsure (1)..(333): unsure at all n locations
cttgtctcctacgcgcccgatgtaactgctcatgtccaacaaggtaaaattaccaaactcaccggggttaagaccaaagagctcttgctctggatcacgctcagagatatctatgttgatgaccctcccactggcaaaatcaccttcaagacccctgccggcctatttaggtcttttcctgtctccgctttcgagattcaagaggagcctgaggctaaggacactactaagcgcgtgccggataccgctgagcctgtgcaagtcaaggaactctgattttattctcaaacaaggtcgccgtggnggttagcgtgcaaaatatatttatatata

SEQ ID NO: 209802 - DNA, 462 bp, Glycine max
aacaatatcgtaatccattttcttttcaaagccagaacaaggagatgatggttaattagcaataaagccgcacaatatctgaaagcttaacataaaaggtaacataaataaacttattaataaacatatatataaatatattttgcacgctaaccaccacggcgaccttgtttgagaataaaatcagagttccttgacttgcacaggctcagcggtatccggcacgcgcttagtagtgtccttagcctcaggctcctcctgaatctcgaaagcggagacaggaaaagacctaaataggccggcaggggtcttgaaggtgattttgccagtgggagggtcatcaacatagatatcactgagcgtgatccagagcaagagctccttggtcttaaccccggtgagtttggtaattttaccttgttggacatgagcagttacctcgggcgcgtaagagacaagctt

SEQ ID NO: 209803 - DNA, 542 bp, Glycine max
atcagcaggagatatacatgtgtgtgtgtgtgtgaaaaaaaaatggaagaaattattagaaggggactcatgttgaataataaatatccctaataatttagttttttacggtgtttgatgtggtcgcgtgatccatataactaattgcacctagtgggataagtaagactattgttactatcatagtaatatatgctcaattaacatacctgatgtgtaagccagtagtgtctatctctcatctcaattaagaaatcaaatgttggaggtgctttcctctcaagaattgtcttctgagaatttctggctctggcttctgcatctcccagagtaacactttctattccgccaatctaataaagcaaatggaggtgaatcttgaatattactgttgattatattgcacaatgattcatggctccacaaatcaagtaaatctttaaatctttaacatcaaatattaatctactaaatgcttattgaactgaatgggtgatataatttttcaggatacttttgaaaattaaaacgtcaatgaaaac

SEQ ID NO: 209804 - DNA, 546 bp, Glycine max
ctcgtgttcaagctgcaagcaccagcactttgatggtgccttgactatttgctgttagaatagtggggcgatcactcttccagcaaacagcgctgatgaaatatgatccagcctcatcttcagcgtcatccatatcaggggacccaaatctgtgcgaagtcaaaggtctcgagatttccttgtggtaaacaaagacttcatttgtttcactgccacacgcaatatattcactgcttactgtaagaccaacaaagtttttctcatttgcatggcctttgaaagtacgaactggtaagttttccttcacatcccataatcgcagtgtactatctgttgatgcagaagcaagttcatcattagacagaaatttcacgtatgaaacagccttcctgtgcccactgaaaacatggactggacggctaatatttctcaaatcataataatggatatgatggtctgctgacccaactgcaatataattgccagatccaggattatatttgacacaacatatgtttgctttcatgtctatatttagaacactag

SEQ ID NO: 209805 - DNA, 325 bp, Glycine max
agtatttccctacctctcccttcaagaagcagatcttcgtcaagaccctcaccggcaagaccatcacccttgagagaggaaagctctgacaccatcgacaacgtcaagagccaagatccaggacaaggaaggaatccccccggaccagcaacgtctcattttcgccggaaagcaacttgtggacggccgtacccttgctgactacaacattcagaaggtgattgctcttcacctagtcctccgtctccgaggaggcatgcagatcttcctgaagacactcaccggcaagaccataaccctagatgtagaaagctccgacaccatc

SEQ ID NO: 209806 - DNA, 481 bp, Glycine max
caacacaaaccgaacttattttcaagggacattattacagacccattaaacatcaaagttcttcaaatgttttgggaacacatccaacattacacaacgagcttaaaaccccccacggagacggaggacaaggtgaagggttgattccttctggatgttgtagtcagcgagggtccttccatcctcgagctgcttgccagcaaaaatcaccctctgctggtccggggggatgccttccttgtcctgaatcttggccttcacattgacaatggggtcagagctctccacctcgagggtaatagtcttacccgtaagagtcttcacgaaaatctgcataccaccacgaagacgcaacaccaagtggagagttgactccttctggatgttgtagtcagcaagggtgcgtccgtcctcgagctgcttcccggcgaagatcagcctctgctggtctggggggattccctccttgtcctgaatctta

SEQ ID NO: 209807 - DNA, 285 bp, Glycine max
catccgcagctgcttttattcgcaccgcaaacagagagccatggccgtcggaaagaacaagcgcatctccaaggggaagaagggtggcaagatgaaggcagctgatccctttgccaagaaagataggtatgacattaaggctccttctgtttttcaagtgaaaaatgttggcaaaaccctcgtctctcgtactcagggtaccaagattgcttctgaaggactcaagcatagagtgtttgaggtctccttggctgatcttcaaagggatgaggatcatgcattcaa

SEQ ID NO: 209808 - DNA, 490 bp, Glycine max
ggggtctaaacaaaacccagatatatattacgcaccaaaaatgtcttctcgttgtctaaacaaaactgtcactcagcttacacagaaacatttgacagaacagtaagtttgtaacttaaattttcaatggtaacataagaaacagaaaacctagaacaatttgaatatgcattatcactaaatcaagctccaacaatttcagggggttcctctgccactatttcatcagcagggctgtctacctttgcaccaacatcctcggagtaatctccatgaacctccatcagtttcccaagatcaaacttaggagctttcaggatcttgactttacgaacaaacacattctgcagagggtaaatactagatgttgccttctcgatctcttttccaataatctcaggaataaacttccggaccaactccttcaaatcacatgctgttgcctgggtggtcatgatctccctcatctttctacgaatctgtctaatct

SEQ ID NO: 209809 - DNA, 408 bp, Glycine max
caagggacaccctgtttgggctcatctttttatttttcttaccaaaccaaaaggggggcaaattataatcccaacattggcttggtttatttgggtattggaaaattcattctcaatggcactctgggttggtgcacttttttggagaccccccctagagttgtaaactccacttgggcccttagacaacaaacacaaatgggtccctttttttaccaccctccctttggtcaacacaacaattccatgacaattctttatagggctcaacctatgagccaccaccacacttgttctttctaccatgacttgttccaaagcatcttgaaccaccttttctgattgactattaagtgcccttgtggccccatccaaaagcaacacttttgggttttttagcacacccct

SEQ ID NO: 209810 - DNA, 518 bp, Glycine max
  unsure (1)..(518): unsure at all n locations
gtgtgtcttgaatcatcagaagcctttggccttgatgccaatcacttgaggtacatcactgatcacttccggtacaaatttgcgaacgagaggctgaagagaacagcaagatattattcatccaattggagaacctgggctgctgtcaacattcaatttgcttggagacgttacaggcagaggactaaaggtccagtgacccctgtaagggacactaatggaggcactgaacgcaggctcttgcaatatgctgcaatgttcatgtcaataaggccacatgaccaccttgaatgaaaactggtgtgtccatgatttttcttattgttgttggttattgatcctcaataaaattgtatttcaaatccattagacctgttgaaggtgaaatgtattaaaaaaaaaaaaacaacaaggtgagtacgagtaattgaaaaaattattgagaccccttctttcatttgatngtaagtttaccataatcatntttcatggaaattgtgtcttgagcaatccccatc

SEQ ID NO: 209811 - DNA, 423 bp, Glycine max
  unsure (1)..(423): unsure at all n locations
gggtagtcttgaagcggaaagaacaacagtaggattggcagcaagagacccttcagggattctctccccatacacctacaatctaagaaacacaggccctgatgatgtttacattaaagttcactactgtggaatttgccattctgatctccaccagattaaaaatgatcttggcatgtccaactatcccatggtcccaggacatgaagtggttggtgaggtactggaggtgggatcaaacgttagcaggttcagagtgggagagttggtgggagttggactcctcgtaggttgctgcanaaactgccagccatgccaacaagacattgagaattactgcagcaagaagatctggtcttacaatgatgtttatgtcgatggaaaacccacacagggtggctttgctgaaaccatgatcgttga

SEQ ID NO: 209812 - DNA, 301 bp, Glycine max
aaacaaaacacagcttcttttttagagtgaacaacaaatacagctttagttctcaattaattaataacttttccagactcttcatgatggaaggatggatgttgcgtgtgtccggctagtagtatactttctttcttttactgatcgacaagtttgctgcctttgacatccacaacaaacctgtatctcacgtcattcttctccaacctttcaaaggctttgttaatgtaatccatgtttaccatttcaatcatcgaactcagacccttctttttccagaactccaacattttctttggct

SEQ ID NO: 209813 - DNA, 327 bp, Glycine max
attctccctttcctctccgaaccctcgatcactctcacgcgctcctatattcgctcctccaccgtcgctctctcgaacaaccacaacaccatcttcatcacatggcaaacgcagcatctggtatggcagtccatgatgactgcaagttgaggtttttggagctgaaggcaaaaaggacacaccgtttcatagtttttaagattgaggagcagcagaagcaggtcattgtggagaagcttggtgagcctgcccagggctatgaagatttcactgccagccttcctgctgacgagttgccgtatgctggttatgagtttgagtatctga

SEQ ID NO: 209814 - DNA, 474 bp, Glycine max
atttctctctgccttgctcatttacacacctctccaaccttttactttcagctttatttgaatccctctctctcctttccaaatggccagcgttgaggttgcacatcaaacaccaacaacagttccagaaaatgaaacaaccgaggtaatcaagacccaggaaacaaccccggaaccagtgccagccactgaggctcctgcaacagaacaagcagcagctgaggttcctgctcaagaagaacaacaagcaactgaggttcctgccccagaatcaaccaccgaagcaccaaaggaagaaaccaccgaagcaccaacaacagatacagtcgaaacaacaactacagaagaagccaagccagatgagcctaaagaagttgcagttgagaccgacgaggtggtgacaaaagagacagaggaagagaagccagctgcacaagagaaatcagaggagaaaactgaagaagtgaaagaaga

SEQ ID NO: 209815 - DNA, 465 bp, Glycine max
atcatggtggccgtaacccgcctcgcgaagcgcgcgtcaaccttctcaccccgagatgaggaggtgcctgagctcctccgaagtcaaatcccacgcgccgccgcacgacgccgcgtccttccgcccgtttccgcggcgcgaagatctgagcaagcggtgcgtgcagtgggcgttcctcggctgccccggcgtcggaaaaggaacgtacgctagtcgcctgtccaacctcctcggcgtccctcacatcgccaccggcgatctcgttcgcgacgaactcgcctcctctgaccccctttcttcccaggttctcttcttcttcctcttcactttgaattaactagattaatttttgtaacgcacatttggtcaaggttattgaaatttctgcgtacggcgcagcgcttagacagaaaaatgggatgataattattattttaaaaaatattaaaaagttgtcatctaatc

SEQ ID NO: 209816 - DNA, 584 bp, Glycine max
  unsure (1)..(584): unsure at all n locations
atctaagtaagtgttgagagaagagtgcgtttgtttgtttgaaattaagtagtaaagatgtttggaatcatcggaggaaacaagggtcacaagataaaggggaacttggtgattatgcgaaagaatgtgttggatatcaacagcatcaccagtgttaagggtgtcattggaaccggcattaacatcattggaggtgtcgtcgacaccgttactgctttggcgtcccacatctccatccagctcatcagtgccaccaaggctgatggacatgggaaaggtaaagttggaaaggctacaaatttaagaggacaagtgtcgttgccaaccttgggagctgncgaagatgcatacgatgttaattttgaatgggacagtgacttcngaattcccggtgcattttacataaagaacttcatgcagttgagttctatctcaagtctctaactctcgaagacattccaaaccacggaaccattcacttcgtatgcaactcctgggtttacaattcaaaaactacaagactgatcgcattttctttgccacaatacatatcttccaagcgagacaccagctccacttttgag

SEQ ID NO: 209817 - DNA, 259 bp, Glycine max
gttgaaacatgcgtgattgcctttattgctttctcttcgatctgttataaaaacagaatacagcaaacacgagaacattcaaccaccccaaatgtaacttgaccatacgtaggtcgatgaaggaatcatattcctcctatttcacattattgaaaaacaggcagagtagtacagtcaaccctaatgagagagcccttagatagagatactgttgggaaatcctctgaaaggcaattccttctcactagaaagatagagc

SEQ ID NO: 209818 - DNA, 252 bp, Glycine max
cgccatgtctcactacaagtttgttcttgcaattgagaacacttttactgagagctacgtgacagagaagttattctatgccttagactctggtgcagttcctatctattctggtgcaccaaatgtcatggattttgtcccttcacattcaataatagatggtagaaaattcaactcattggaagagttggcttcgcacgtgaaggctgtagctaatgatccagtagcctatgcagaataccatgcatggag

SEQ ID NO: 209819 - DNA, 310 bp, Glycine max
cgccatgtctcactacaagtttgttcttgcaattgagaacacttttactgagagctacgtgacagagaagttattctatgccttagactctggtgcagttcctatctattttggtgcaccaaatgtcatggattttgtccctccacattcaataatagatggtagaaaattcaactcattggaagagttggcttcgcacgtgaaggctgtagctaatgatccagtagcctatgcagaataccatgcatggagaaagctgtggtgtaccttggtaactatggaaaaactcgagctgtgagccttgacacgt

SEQ ID NO: 209820 - DNA, 350 bp, Glycine max
attcaacttaagagatcaatatggccaccaccactacccagcctccctctaatatctgttttttccttctgttgttgcttctagcacactttcatttgggcataagccaacttgagctgaattactactctaaaagctgcccaaaagctgaagagatcatcaaggaacaagtcacacaactatataacaagcatggaaacactgccgtttcgtgggtcagaaatctcttccacgattgcgtggttaagtcatgcgatgcatcattactgttagcgacggtgagcgatgtaatggtcgagcagacatcgataggaagttttgggatgagaaactttcaggtacgtaaacac

SEQ ID NO: 209821 - DNA, 550 bp, Glycine max
gaagaaatagaaaaccatcaaccgcaaccgtgtaaatttctggaactttccaccatgatcgagatcctacacctgtagaacactaacttcaatacccgaatgatttaaacaccgtattccttcgacaccattatcatcaacaacctcaaattccaagcacaagttctctgagttgttttgtgagatagcacatagcatagcaaggaaggagtattacaaccgaaaccctgaagaaaaaaagagtagaggaagaaaaaacacctgcaccaccaacgatgggtgtggattactacaagatcttgcaggttgataggagcgccaaagacgacgacttgaagaaggcttataggaaacttgctatgaaatggcaccctgataagaaccccaacaacaagaaagaagctgaagctaagtttaagcagatttccgaagcatacgagggtacttagtgatccccaaaagagagcaatctatgatcaatatggagaagagggtctgaagggtcaggttcctcctcctgatgctggtggtgctggaactggaactactt

SEQ ID NO: 209822 - DNA, 348 bp, Glycine max
ctggtcattaatgcatcaaaagatagggtacccaatatcaaattcaatgtagctaaagtgttgcagtctctcatcccaattgttgatcagtctgttgttgagagtaccattcgtccctgtttggttgagctcagtgaggatccagatgttgatgttaggtttttcgcctcacaagcactacaatcttgtgatcaagtcaagatgtctagctagatcagtttgcatgtggtctttagttttttttttttcttataagatttacattttcttctgtaattgacatgacgccaacttgcccaatcctttggatcacattaattgttgtgatcctgctttgctttcatttta

SEQ ID NO: 209823 - DNA, 551 bp, Glycine max
atcgaccatatcactttcgtcaccttcacagatacattcgttgcaatcatccatctcacttccacaaattcctccaaattctaaccaaacccttcactactccaaattccaaaacttcttcacactccttcttttccctcttctgttgcccgatcttctgcctccaagattttggtatttgggattgatcacctggagttggaaatggttaaaagttatggagtgttctgatttgcaaaagatatcatgttgcggtgcttagagggacttaagcctttatttgcttccatattacgatgttgtgacctggatatatataaccagccaagaggccttgaagatcctgaacttcttgctagagagactgtgttcagtgtaagcgaaatagaagcactttacgagctcttcaaaaagattagcagtgctgtcatcgacgatgggttgattaacaaggaagagtttcagttggcattgttcaagacaaataaaaaagaaagtctgtttgctgatcgggtatttgatttatttgacacaaagcacaatgggatact

SEQ ID NO: 209824 - DNA, 352 bp, Glycine max
ttgagaagaggatgtggagggacaaaatgcgtcacaagcgattgaaagaacaaaccaagtccaaggaagggactgatgcaacaaagcaaaggcaatcccaagagcaggcaaggaggaaaaagatgtcaagagctcaagatggaatactgaagtacatgctgaaaatgatggaggtttgcaaggcacaagggtttgtttatgggataattcctgagaaggggaagccagtgactggagcatcagacaatcttcgtgaatggtggaaggacaaggtcaggttcgatcgaaatggtcctgctgccatagtgaagtatcaagctgataatgcaatccctggaaagaatgatggatg

SEQ ID NO: 209825 - DNA, 492 bp, Glycine max
gggttttagggcattttttcgcaaccagaaaacccccaattctctttccaaggcttcgtcaattctccttccaaagcttccaaatgcttcgctccaatggctttaggctccttcgatcgctgcccgaaaaactcctccgccacgccaacgaacccatatatgatggagtgtgccaaaggggttataggacattgagttctggtctttgtaatccatccagagttattgggaatttttctccaaatgttggaaatggtgttaatttgaagaacttgttgctttttggagccgcggatacatattgggggacatctagatccgttcatgggtcagcatcattggcaagggactattacgaagtgcttggtgtgagtaagaatgctagttcttctgaaataaagaaagcatactatgggcttgcaaagaagctccatccagacacaaacaaagatgatcctaaggctgaaagaaagttcaagagtttcatggcta

SEQ ID NO: 209826 - DNA, 404 bp, Glycine max
ccagctaccatgtctctgtttctgtcttagagcctgcttgccagaagttataatggcccatgatactgttctattacatatgaataaaagaacgacgggctccctgacaagctctgcgaccacatctcctatgctgagctccatgcatgcttatagctcgaccctgacatggagggcgcctgctaaacctgtaccacaaccaacatgtggatggttttaggagagatcacaacccagggcaacgtgtactatgataagattgcgacgtgcacatgacggaacattgtctttgcttctgatgatggatggccttgactctgacaactactggggactggacagcattgatcaaccgagcgctgatattgctcaaggtgggcacggacacctcacatagaggcctg

SEQ ID NO: 209827 - DNA, 435 bp, Glycine max
ccttctcaactcccacctcgactccgtgcccgccgagcccgataaatggctgcacaatgccttctgcgaccaccgcaccgcctacggcgccatcttcggccgcggcgcccaggacgacaaatgtatcgctattcagtacctggaagccatccgcaacctcaaatgccaagccttcactccacaccgcacaattcacatctccctcgttcccgacgaggaaatcggcggcatcgacggcgccgccaagttcgtggagtccgaggaattcaacggactcaacgttggattctcgctcgacgaggggcaggcctcgccgggcgatgaattgagggttttctactccgataggggtccgcggaacgtgaagattagggctaaggggaggcccggtcatgggtcgaggatgtatgatgggagtgcggaggagaatttgat

SEQ ID NO: 209828 - DNA, 287 bp, Glycine max
caagctaccatctctctctctctttcttagagcctccttgccagaagttaaaatggccgaagaaactgtcctattcacatctgaatcagcgaacgaggggcaccctgacaagctctgcgaccagatctccgatgctggagctcgatgcatgcttggagctggaccctgacagcaaggttgcctgtgaaacctgcaccaagaccaacatggggatggttttcaggagagatcacaaccaaggccaacgtggactatgagaagattgtgcgtgacacatgcacgaacat

SEQ ID NO: 209829 - DNA, 484 bp, Glycine max
  unsure (1)..(484): unsure at all n locations
gaaagacaaaggaaggcacattcaaaggatctatgcaatctctttgtttgcggccatatgcttcatctgggcttacagattgagccacatacccgcatatggcaaatgggcttggcttggtttgtttgctagagaactctggtccggtttctattgtctatttggtcaagccctccgctggaacatgctgttcagaaaaaccttcatcaatagactctctgaaagatatgagaatagcttgccgagagtggacatgttatgtgttcactgtagacccaatcattgagccacccatgatggtgattaatacagtgttatctgtgatggcttatgactatccagcagagaagctcacagtgtatctctcggatgatgcaggctcagacataactttttatgctcttttagaggcttctacctttgtcaagcattgngtgcccttctgcaagagaattaaggtggtatccgagtcacctgctgctta

SEQ ID NO: 209830 - DNA, 350 bp, Glycine max
taactcaactggatatggtgatgagcttttatgggcagctagttggctctatcatgctacgggtgatgattcttaccttcagtttgtgactggccaagatggagaagactatgctcaatggggaagcccaacctggttcagttgggataacaagcttgctggaactcaggttttgttatctagattaagcttttttaaggcaaaggacatttcgaattcatatagctctgggctccatagttacaggaaaactgctgaggctgtaatgtgtggtcttcttccggattctccaacagccacaaaaagcagaacagatgatggtcttatatgggtgagccaatggaactctt

SEQ ID NO: 209831 - DNA, 328 bp, Glycine max
attttacactttaaaaatgttttctggcctaatgtagaattcttaggagtagttgcagagacatcttatggatgcagctactttcttaatctccacaaggctatgggtcgtcctgtccttgtttacatgcctgctgggcagctggccaaagacattgagaaaatgtctgatgaagcagctgctaactttgctttcatgcagctcaaaaagatccttccagatgcttcttcaccgattcagtatcttgtgtctcgatggggtacagatattaatacactaggttcctatagctatgatgcagttgggaaaccacatgatctgtatgaga

SEQ ID NO: 209832 - DNA, 608 bp, Glycine max
  unsure (1)..(608): unsure at all n locations
caacaacaactatctctcatccttcttctttctgtatccgtaacacttgcaacacacatggctacaatcaccaacactttcatattcaaaccccccatctctcatcacccaaagcagcttgtctattcccaccgatcatactctacgcagtctcaccaaatataaaaccccctccggagcgaattctcggcggctggttccgaaagccacggcggctcccggggccaagaagacagaaaagccgcacgagagagtccagcgagtccacagcgtggaggagttcgagtcggcgctcgaatccgccaaagacaggcttgtggcggtggaatacgctgccagcgacagcgaggagagcagccagatataccctttcatggtggagctgagccgcagctgcaacgacgtggagttcatcctggtgatgggcgacgagtcggagaagacgaaggagctcctgaagcgggagaaggtggagaatgtgcctcacttcagcttctacaagagcaaggagacgatcacgaggaggaagggattggtcccgacatgctggtaggngatgtgctatactacggtgacaaccactcttgtgtggtgcagctgcacaacgt

SEQ ID NO: 209833 - DNA, 475 bp, Glycine max
tttttttttttttttttttttttttttttttttttttttttttttttttttttttttttgggttgtttttttttttttgggcccaaaaaaggggggtatttaacatccccctaaaaaaaaaaaaacccaccccccattaatttttttttttccaaagtttttaaaaaaaccctcccattgaccaattttctcccaacgttctaagacggggaaaagtttaattaacgggggggttattggaaaaacccccaattttttttcccccccccggggggggctttaaaagaaagcaggttccttttccaaaaaggttataaaaccgggggggggggggcccaccttaaaagaagagaaaatacaggtggggtgtaaaaaaattaatttgggcccccaaccccctggcccctggaaaattccccaagggggccccctttgccagaaaccggcgacccgcctttaatggtgccacctttgt

SEQ ID NO: 209834 - DNA, 536 bp, Glycine max
  unsure (1)..(536): unsure at all n locations
ctatatgttcccctgcaagagctgccactgtttatattagttttaatctgtagcatgatgctgcttgccgagttattgcaagactaaaaaaggaacgagatgaagctaggtccttacttgcacaagcagagaggcagttccctggttctgcaccaaatgccataacagcaaatgcccccgtcctgagcaatgggaaaagagctgctgaggatgaggatctggctcctggtgcaaagaaaattcatcctggaatatcttctagcataatttctgagctaactgattgcaatgctgctctttcccagcagagaaagaagcgacagattcctccaactttggctcctgtcgaagctctagaggcatatacccagatatctagtcatccctttcacaaaacaaacaaacaaggcattatatctcttgatatcctttattctaaggacttaattgcaactggaggtattgatacaaatgctgntatttttgaccgaccatcangacagatattatctacactcagtggtcactctaaaagg

SEQ ID NO: 209835 - DNA, 538 bp, Glycine max
  unsure (1)..(538): unsure at all n locations
ctatatgttcccctgcaagagctgccactgtttatattagccctaatctgtagcatgatgctgtttgccgagttattgcaagactaaaaaaggaacgagatgaagctaggtacttacttgcacaatcagagaggcagctacctgaaggtgcaccaaatgccataacagcaaatgccaccgtgctgagcaatgggaaaagagctgctgaggatgaggatctggatcctgatgcaaagacaattcatcctggaatatcttctagcataatatctgagctaactgattgcaatgctgctctatcccagcagacaaggacgcgacagattcctccaactacggatcctgtcgaagctctagaggcatatacccagatatctagctatccctttcacactgcatacgaacaaggcattatatatcttgatatcctttattctaatgactgaaatgcaactgaaggtattgatacaaatgctgtgatatatgaccgaccatcangacagatattatctacactcagtggtcactctaaaaggtg

SEQ ID NO: 209836 - DNA, 331 bp, Glycine max
ggaaaactcaaacaagttttgtgcaatttactgagcaatgctgttaaatttaccgaggaggggcacatagctgttcgagcatgggctcagaagccaagcttgcagagctcaatgattgctactcaccaatacgggtccagtagacttttgtcgcgcttgtgttgccgccaaaatgaagcacgtgatgacgtggaagacttgaacatccaacaagatccaaattgtatggattttactattgaagtggatgacactggcaaaggaattcctaaagagaagcacaagtctgtttttgaaaattatgtccaagtcaaagaaactactcttggcc

SEQ ID NO: 209837 - DNA, 448 bp, Glycine max
ggcaaattaaactatgacacatgaatgctttatttatttatttactatttctgatttatatataggctagttagtggtgtaaaaagatatctcctgtcattgtttaatttaaaaacttgataacaatcatataaagcaattaaaaaagataagatttactgctcactcttaagtatatattcttttgatggctttaagtaaagcctctttgttgatgggtttgattaagtgatcgtccattccagcttcaatggacaatattgcctctttccctgtattagctgttaatgcaaagataggaatgtgaacaccatgagacttctcaatctcccttatccgtctcgttgactcatatccatccattaccggcatctggcaggccattaagatgaaatcacatggacgattggaagaattcctagttagaccctcttcaactgtctgaaca

SEQ ID NO: 209838 - DNA, 531 bp, Glycine max
ccaagactggatgatccaatttcaaggacctttgagcagtgttcttcagatacatttcagatagatggtgcatgtgcatctccaatttgctatgtgtacctatatagatctggggcagaggaaggttgggagcctgggaatgtaaaaatctatggctacaactcagagcctgttactttcgatgacaacacctacatcccaaatggcacgtggaatgggtataatctgtgcgacactgctaatcctgattttataagtcagttatttgggtccgaatccacattgacttatttacatcccagagatcgacagtgaaagactgctatgatgttatacacttgactcagacaggcatggaagtacaccttgtgcatatagccgtgaaaggtgaaacttagtagtagaactctatgcggagagcagggacatgagatgtgtaaggtcaaagtcagttactttgagacttggattttatgctttgtgggagttatgttaaaatttaagttaatgaaaggagaaattctagtaata

SEQ ID NO: 209839 - DNA, 529 bp, Glycine max
ataactaatttttttcctttcattaactaaaattttaacataggtgcgacaaagcataaaatccaactcacaaagaaactgactttgaccttacacatctcatgtccctactttgtgcatagagatctactactaagttacacctttcacggctatatgcaaaaggtgtattgctatgtgtgattaagttaagtgcgtaacattattacagcagaaaactaagaacaaagcctagaaccaaactcatgagccatttctgagggaatagttggtgtgaagaagaagaaggaggagtctcgcacagattatacccataccacgtgccattggggatggaggtgttgaaatcgaaagtaacaggctctgagttgtagccatagattttcacactctcaggctcccaaccttcctctgccccagatctatatatgtacacatagcatattggagatgcacatgcaccatctatctgaaatgtgtctgaagaacactgctcaaaggtccttgaaattggatcatacaggcttgg

SEQ ID NO: 209840 - DNA, 504 bp, Glycine max
tggctaaccaaccctgacactccttcttgtccgcttcctcttcgatcatcgcttcagaatgccgccgaagttcgacccctcccagatcgtcgacgtcttcgtacgcgtcaccggcggtgaggtcggcgcggtgagttccctgggaccggaagatcgggcccctcggtctctcccccatgacgatcggagaagatatcgacaaggaaaccgtcaaggactggaagggcctccgcgtcaccgtcaagctcaccgtgcagaaccgtcaggccaaggtcacggtggtcccatccgacgtcgcgctcgtcatcatggccctcaaggtgcccgagcgtgaccgcatgagaacgaagaacatcgagcacatcgggaacatcttgctagacgacgtcatcgagatcgctagggttatgaggtcgaggtcaatggcgaacgaccttagcggcagcattcaggagattctagtgacgtgcgtctacgtcggatgccacggtgatggacaggatc

SEQ ID NO: 209841 - DNA, 447 bp, Glycine max
aaacaaatatacgcataaatgctaaaatccattaacaaaattgtatcgaaaaaatatcataatgtgagcagagaaagaaactaatcagcccataataataatatctctcgaaaccatcatgtaaattatccaaagcggtaaaataaccttacacaaaacgatcgatggttcccccaaattgatattaagaagaacacgaaacgatctgaagaaagacaaaagaaaaagagagaaagagagtcacaaagccttcctccttaatcgagagggacctcaacatcaccatcggtaatctcctgctgcaagtccttgggatcctttccatcaacggggcatacgacggagacgcacgtcccgagaatcttcttaatgctgccgctgaggtccttcgccattgacctcggacttataaccctagcgatctcgatgacgttgtctagcgagatg

SEQ ID NO: 209842 - DNA, 556 bp, Glycine max
  unsure (1)..(556): unsure at all n locations
ggcattcactaaatcctaccaatagcctggtgttgaaagttctctctgcatctccttcagccttttctgctaacccaaaatctaaagtgacaagtcctccatcactcactggaacttcaatctcattaggttcaattataccgggcaggaattaatgcccggatattgatctctggctcattgagcttgttcagcaaccgatttttcaggtcaggtgtgcataaggctgggagtccaaccaaacatgataagtcaggtaatgagcagttcttgaatgaacttagcatatggattgatccatgaacaacgtgacctcaaggctgtgaatgttcagcaccgcgaagatggcgaatctaatgacccagccatctatcggatcaatgataatttggaatactctgttgaagtttatgagtggtctgggacagcatgggaaccttacgtagctgatgatgttcaagtgcaatgttacatgatgagcccctatgtcttgaagactntatcaactgatggcaagggccgttatttcacatcatttaaggttccagatgtctat

SEQ ID NO: 209843 - DNA, 493 bp, Glycine max
ggaaaaagggaaaaagtaatgcatctataataaattagaaacggcaggtagtatcattgccaaatcaaaattttcgatctcaaaataagttcaaccccgcactacaaactacagtatcttaaagcaaaggtttacatctacttgctgtatagatgaactgcagtgaagatgaagaaacccaccatcattgaaaatgatgctccataatagggataggctgctggtataaatctttcatattcattgtgtctaaagggacgaacaggaatctgctttgataaagataagcttgtatatccaagtttttcgtactcaactttgaattggaaaaccccatagacatctggaaccttaaatgatgtgaaataacggcccttgccatcagttgataaagtcttcaagacataggggctcatcatgtacaaatgcacttgaacatcatcagctacgtaaggttcccatgctgtcccagaccactcataaacttcaacag

SEQ ID NO: 209844 - DNA, 612 bp, Glycine max
caacaacaactatctctcatccttcttctttctgtatccgtaacacttgcaacacacatggctacaatcaccaacactttcatattcaaaccccccatctctcatcacccaaagcagcttctttattgccaccgctcttctctacgctttctcaccaaatttaaaaccccctacggagcgaattctcggcggctggttccgaaagccacagcggctcccggggccaagaagacagaaaagccgcacgagagagtccagcgagtccacagcgtggaggagttcgagtcggcgctcgaatccgccaaagacaggcttgtggcggtggaatacgctgccagcgacagcgaggagagcagccagatataccctttcatggtggagctgagccgcagctgcaacgacgtggagttcatcctgatgatgggcgacgaagtcgagaagacgaaggagctcctgaagcgggagaaggtggagaatgtgcctcacttcagcttctacaagagcaaggagaagatacacgaggaggaatggattgatcccgacatgctggtaggcgatgtgctatactacggcgacaaccactctgggtggtgcagctggacaacgtggaga

SEQ ID NO: 209845 - DNA, 484 bp, Glycine max
ctcagactcggagctcgaggtcgagcgacaacaactatctctgagcctgcttctttctgtatgcgtaacacttgcaacacacatgggtacaatcaccaacactttcatattcaaaccccccatctctcatcacccaaagcagctgctttattcccaccgctcttctctacgctttctcgccatatttaaaacgcggtacggagcgaaatctacgcggctggttccgaaagccacggaggctaccggggccaataagacatagaagccgtacgagagagctcagcaagtcgacagctagccatattcatagtcggcgctcgaatgcgccaaagacaggcttgtggaggcggaatacgctgccagcgacagcgaggagagcagccagatataccctgtcatggtggagctgacccgtagctgcaacgacgtggagtccatcctggtgatggacgactagttggagaagacgaatgagctcctgaag

SEQ ID NO: 209846 - DNA, 456 bp, Glycine max
ggagatgcctgtgcaaattcgcgaagtacttagcggtacacctcactcactgaacgggaagtatggcggacaaggctgttacaatccgaacccgaaaggtcatgaccaacaggctactatgcaggaagcaattggtcgttgatggcccttcatccacgcagggcagatgttaccaaggctgaacttaaggagaagctggctaggatgtatgaagtgaaagaccctaatactgtatgtgtcttcaaattccgaacacattctggaggtggcaaatccactggatatggtttgatttatgatacagtggagaatgccaagatgtgtgagcccaaatacaggcttatcatgaacggccttgacaccaaggtagaaaagtcaaggaagcaaatgaaggagagaaagaatagagctatgacgattcgaggagtagagaaaaccaacgctaccgatgctgac

SEQ ID NO: 209847 - DNA, 528 bp, Glycine max
  unsure (1)..(528): unsure at all n locations
gttgttgggtcgtgagtggaatcagcaaccatgaatatgatgcgaaggttgaagagcattgcttctgggaggacttccatttcttcagatcctggaggggataataactcaaaaagagccaagtttgaaccagaaactggagtgaaagctgatgagaaaacaaataccactgagacaatctgcacagatcaggaacagcttatagacacctcaaaagaaacttccaatgtacgcacatccgatgtatctacagtagctagaaccgagaagtcgggttttgaagagcttcctaaagaattaaatgaaatgaaaattagagatgagaaaagcaaaaacaacagtgaaaaggatatagaagcaactgtagtgagtggtaatggaacagaaacaggtcaaataattacaactgccattggcggtcgagatggacaaccaaagcagacaatctcttacatggctgaacgtgtggtaggtactggttcttttggtatcgattttcaggctaagtgccttgaaactgnggaatct

SEQ ID NO: 209848 - DNA, 468 bp, Glycine max
tttggacattccaagctccaaccttcgattctttcttgtcagaggaagcccttatataactgcttctgtcacaaagccaacacctctttccatcaaaacagtgcacaccgtagtttccttgtcttcagatgattacaacaccaaacacacccttaagcttaacaacagtcaggcatggatcatatacacctcctctccaatctacttgaaccatgttccttctgaggttacatccaagccattttctggcatcattcgtatagcggctttgcctgattctgattccaagtatgtggaaactcttgacaagttcagttcttgttaccctgtgtctggtgatgcagcactcaagataccttcagtgttgagtttaaatggcaaagaaacgttctgtggacttgctcatgctggctcaccctcttcatgctaagcttctgtatatgatcgtgatgttactgcgctgaatga

SEQ ID NO: 209849 - DNA, 615 bp, Glycine max
  unsure (1)..(615): unsure at all n locations
ctcacacatgcccctatcttccttagctacctagattattcacttcaattcctcacaagcaacaccgtttcttgctccaatggcagctttgtatctcccaataagcatgttggcactcattgttgttgtttctcttgggttgaggagtggtgttcaaggtgcaccacaagtgccatgctacttcatttttggtgattctttggttgataatgggaacaacaaccagctccagtctttggctagggctgattacttgccttatgggattgacttccctggtggaccttctggaaggttttccaatgggaaaaccactgttgatgcaattgctgaacttttgggattcgatgattacatacctccatatgctgatgctagtggcgatgctatactcaaaggagtcaattatgcatctgctgctgctggaattagagaggaaactgggcagcaactgggagggcgtattagttntagtgggcaagtgcaaaattaccaaagcacagtgtctcaagtggtaaatgtactgggatatgaggactcagctgcaaattacttgagcaagtgcatatactcaaatgnngtgggtagcaatgattacctcaacaactatttcat

SEQ ID NO: 209850 - DNA, 523 bp, Glycine max
cagcaaacaacatactattattcactataattaaataagcaatcttgcaaaactttaccacaaattacacctgtacttgtgaacccatgaacatttagcatatatgaatatgtaagagaaagagagaaaacttaagactcttatgccttaaaaggagtagcacattcgaagaacattaaatatggttgtggcagagcttaatagccactacccactagaacatgttgattgttcagagatcatatctgagctaagcgttggatatcaacagggtaagcatctgatgcagattgagcactgtaagctctctgagccacaacaacattgccagcttcagtaggatgaaaagcatcccaaaacaagtactctctcctgttttggcatggtgtttgcattggaagacatgtaatttgaccattgttccttcctaccccacagcacccagcatttgtaacactgaaaccataggctgaagggttgcttataatatatgaaagatgccataagagttaacatagatgac

SEQ ID NO: 209851 - DNA, 617 bp, Glycine max
  unsure (1)..(617): unsure at all n locations
acctattcagccgccatgcacactctcctccgatccactctcaggaccaagactgcttcatctttagcatatgctgtggtttccagaagtgctcacgaaaatctccttcaggctcccttattgtctagatcaaatagcactgaggcttcattggcaaaggataattcctctaatgatgtaaaaaatggtcaagggtacaaaggtcatagtatgcttgctcctttcacggctgggtggcagtcttctgatttgcaccctctgatcatagaaaagtcagagggaagctatgtatatgacattaatgggaagaaatatcttgatgcacttgctggtctatgggccacttctttagggggaagtgagccacgccttgttgatgctgccgttgcacaactaaagaagttgccattttaccattccttttggaatcgaaccacattaccttctttggatctagcaaaggaactcctagaaatgttcacagccagaaaaatggggaaaggcttttttggtaatagtggatcagaagccaatgacactcangtgaaacttgtatggtattataacaatgcgctgggaagaccagattagaagaaattcatagctcgtgcctaatc

SEQ ID NO: 209852 - DNA, 483 bp, Glycine max
aggaaaccaatttattgacatttacaataacgaaaaggttggaacaaagtcttatcaagttactacaatatttccttttcccccggaagtgggcgcagcagagtttattattccatcatgaggcctaagctacttgcgctgagacttgagctcctgtaccttcttttccgtttctttcaaagctttcccataaatgctgattaactcttcaacttctccaggagatataatatatggtggagacatcatgatgttatctcccgcaacacgaactaacatcccatgcttctcacattgtgctccaaaataggcacctattccccattcaggaggaaatggatcattacgtgacttgttgtctgtgaactcagtgcccagaatcaagccagttccccgtatctctccaatgatgggactgtcagaaaaagcttttatgccatcttgaaaccttggggcgatcttgttcacttggtcaacaatatt

SEQ ID NO: 209853 - DNA, 578 bp, Glycine max
  unsure (1)..(578): unsure at all n locations
ccaggcggcgccgtcggaatcgtcgccggcgtcgagtttgggcgaattgcccgagagttgtgtcgctcagatcatgacctacatggatccgccccagatttgcaagctcgcaaccctcaatcgcgcttttcgcggcgctttcctccgccgatttcgtctgggagtccaagctgccgcccaattacgacgtccttctccgccgcatcttcgccgatttcccctcccatttgggcaagagagggatttacgccaggctttgcaggctcaattctctcgacgacggcaccaagaaagtttggctggatcgaggcatgggtaaactgtgtttgtgcgtttcggccaagggactctccataacagggattgatgataggagaaactggaaccatatccccactgacgaatctagattcagcagtgttgcatacctccagcaaatctggtggtttgaagtggatggggaagttgagttcccatttccagctgggaaatacagcgtattcttcagaatacatctggngcgagccggcagaggtttggacacgagtctgcaacaccgagcatgttcatggttggga

SEQ ID NO: 209854 - DNA, 549 bp, Glycine max
cttcaaatatgatccacgtttccttgtcatggaatggtcttttttgttccatctgccacaagtatataatattcttcaccatacaaggttatgatagaatgttccagtcctccagactaattaaacaaatatttatacatcgcctccttgcttctacaaaattctaaaccttaaagaaccatattaaaaactcgattctctattcctcctgatgcggcctacgctctatacatataaatactagtatacattcatatgtattttttagcaaaggttaagagtagtttaaaaatgctttaacctttctgaattcacttggatatatcagcacagaatctaaacagagaccccctttagtatgtgtgcaatcaatttgagtcatagagaatttaacttttgttgatgcattgccatcctcgacaacaaaatcgcctgcgtggtaatagatccatttacctggtccgttcagaaaacactgggatgcaacatactggccatctgaagtccatagctggaaacgtacaggctttttgtcccaaccatgaacat

SEQ ID NO: 209855 - DNA, 612 bp, Glycine max
tggcaccccaaataaacacaaacatggacgcatcaaaactcaatcaattgaagcatttcatcgaacagtgcaagtccaacccttccctcctcgctgatccttcactctccttcttccgcgactatcttcaaagtcttggcgcgaaaacttcctgagtctgcttattccgaatcgacgggcgtggagagggatgaggacatagaggatcttacggaggagcacgagaaggtagaagaagaagaagaagaagaggacgatgtaattattgaatccgatgttgagcttgagggtgaaacctgtgagcctgatgatgatcctccacagaagatgggagacccctctgtcgaggttactgaagagaatcgtgatgcatcgcagatggccaaaattaaagccatggatgctatttctgaaggtaagttggaggaggcgattgagaacttaacagaagctatttcactcaatcctacctctgccataatgtatggaactagagccagtgtttacatcaaaatgaagaaacccaatgctgcgatccgtgatgcaaatgctgacttggagaataatcctgattctggctaaggatacaaatcacgtggcatagcacgagca

SEQ ID NO: 209856 - DNA, 455 bp, Glycine max
caaacgtccaaattcactcgggaaaataacatggcattgttgacaaataaacatactaccaacacgagctatataggggcacctaagaaacaggactaacaaacggctaaaagtttaattatttggggccgatgtagaatgccatactcattcaatacccgatgccagagggctggaaagtgaaagtctctaatgacttacaagcatctaaaagtattgactcgggaccacctccaagtttggtcatcattttcgcaattacaggagctacctttggatttgataggcgcttggcaaaatcagcaaggtccttcataacatctggaagagcagccataatctgtggatcaccaaatgacgccatcagttcagggtcactcaagattgtgctaaaatgaatgtttccaggcatgccaccagcccctgggaatcccccaggcatgccaccagcccct

SEQ ID NO: 209857 - DNA, 404 bp, Glycine max
cctcggggaattccaattccacattttcaagaaataaggaggcaaaaatgttcatatatgaattggaattatttgttttcttattaggcctatcctgaagccaaaggaaatgagatcggaattcctcggggaatcccaattccacattatcaagagttaaggatgcagacacgatcatatatgaaatggaatcattgggagacttatgtaagcctatcccgaagccacacgacatgagatcggaactcctcggggcattccaatttcacgtctctgggacgtacggaggcatacatgctcatgtatgagttgcaactatttgatcaccttattaggcctatcttgaagtcagtggctatgaaagcccaattcatcgctgggaccgagcttgacaaccctatact

SEQ ID NO: 209858 - DNA, 564 bp, Glycine max
  unsure (1)..(564): unsure at all n locations
gggataaggacctatatgttaggccataactagcctgcactttgaaatctatttcagtttgaattttgaaagtgagtgtggcgtaccgtgtacgtatctgcagaaagtgaatgaatggtaatgggggaagaagggtgcaaggtatgtgttacaggaggcagtggttacattggttcctggctcatcaagaagctactggccaagggctacacagttcatgcaactctcagagacttgaagaatgagtcaaaggttggcctcttaaagagccttccacaatcagaaggaaaactggtgctgtttgaagctgatatttacaacccaaatgattttgaccttgcaattgaaggctgcaagtttgtgtttcatgttgctactcccatgatccatgaacctggctcccagtacaaggatactagtgaagcggcagttgctggaacaaaagcattttcctgtcttgtgtgagagcagggacggtgaagcgtctcatctacaccgcgtctgttggttctgcttctncattgaaagaaagatgggagcggttcaaagatgcaatggatgaaa

SEQ ID NO: 209859 - DNA, 501 bp, Glycine max
gaagccgagtttattttttaatcataattgcgaaaacaatagtaacaacagtaagatagggagcaagaagaaatgaggcagacgcctggtgcatattgtattacaagcagatatagcaatcaagggtgtagatggagactagatatcacccatccttcttgcacatttgatacaatcatccaatagcatcttggcgtcatatttgtatacaaagcctttgtcacacagctttgttgaggcccacttgatatccttcttcagcccatcttcatattcttgtttcacattgaattctggataatgaagagcgtaatgattagccatctcttctaatgaaatatatgaacttgcacacaagaatcttccactgatcgaggtgctttccatgcagaaaatatgagcttcacagacatcatcaacgtgtacaagaggaattttccccaacaattcctttaggaacttgagtgatatgtacgccctttcattctgcatgatctgagc

SEQ ID NO: 209860 - DNA, 571 bp, Glycine max
  unsure (1)..(571): unsure at all n locations
gattcgacgtgtcctaactctgaaactctactattctttctcctccgcagaaccttaacaaccaaaaccaagcattacagttcccaatttcacagaaacaccagaattgatcaaaacacataacaaaaaaaaagtgaaaatggcgagcgctgtanagaaagagggtggcgcgagagaggaaactttctctttggagcttcctgctccacctggttggaagaagcagttcatcccaaagaaagctggcacccccaagaaaaatgagattgtgttcactgcagcaacaggagaggagatccataacaggaagcagctggaaaaatatttgaaagcacaccctggtggtccagctgtatcagaatttgactggggcactggtgagaccccaagaagatctacaagaattagtgagaaggcaaaggcagctccttcatctgtaagtgagcccccaaagaagcgtactaaaagatcatcagcctcacaaaaggaaacttcncaggaagaaaaagaacaggagatnaaggaaaagcggaatgcagaagctgatgacaccactaaggatgataatgat

SEQ ID NO: 209861 - DNA, 585 bp, Glycine max
acgggcaggaccaaattacttggcatcactgccttacatatgattacatgtccatattacatatcttacaacataatgttacaatagcaactagaagctacacgtatgtccaatacacccatgaatggtaccttatagggctatgttctacaattgtatattgtttcaagaaacaatcagataaataacagtaagaaaaactaaagtcatcttcaaacacagatctaaaggggtcagaatgagaggagagatgccgagaacttattaatctattccctgctccaggcttttgacctcaccagttcagctcccatgatttccattcacagtcaactctgtttcagccttcttgtttatctcatcaagcttgtgatgttcttcaccaatcacttttgttccttccatttccccaacttcaaattcatgagtacttttgacgtgttcctctttatccactccttccacttcaaccgttttgtctgcagtagtgcatgtttccgatttctctggctccccagatccacgatattcttttgtctcttcctgtggttgctcaatctttacttcatgctttctcagaaaaac

SEQ ID NO: 209862 - DNA, 523 bp, Glycine max; identical to SEQ ID NO: 209850

SEQ ID NO: 209863 - DNA, 586 bp, Glycine max
aatccctatttttcttcctcagtagtgtcatttacgcttctcttctctgcagcaactatgcctaaccctaaggtcttcttcgacatgaccatcggcggtcaatctgctggccgcatcgtgatggagctctacgccgacgttactccccgcaccgtcgagaactatcgcgcgctatgcaccggcgagaagggcgtaaggcggagcggcaagcccctccactacaagggctcgtccttccaccgggtgatcccgagtttcatgtgtcagggtggcgacttcaccgtcggaaacggaaccggcggcgagtcgatttatggcgccaagttcgccgacgagaacttcgtgaagaagcacaccggtcccggcatcctctccatggcgaacgccggtcccggaaccaacggatctcagttcttcatttgcacggagaagacagagtggctcgacggaaagcatgtcgtgttcggacaggtcatcgaaggattgaacgttgtcaaggacatcgagaaggtcggatccagctacggcaggacctccaagcccgttgtcatcgccaactgcggtcaactctcttagacgacgttga

SEQ ID NO: 209864 - DNA, 417 bp, Glycine max
aggcgaattatagatgtcctaattttattgaagggggctcatcatgttttttttatgcttctcataacagactccattcactcactctatgaaccccaaccaaccaaccacatgatactgatattgaaaaggaaaggggaagggtttcgaaatgatatccttaacaccacaatcccctaaacgacgacccgagaaagaaaagaagagaaaaaaaaggcaaaaacgacaccgaaagaaataacacagattcagagattaaagccgcgggtcaacgtcgtctaagagagttgaccgcagttggcgatgacaacgggcttggaggtcctgccggagctggatccgaccttctcgatgtccttgacaacgttcaatccttcgatgacctgtccgaacacgacatgctttccgtcgagccac

SEQ ID NO: 209865 - DNA, 595 bp, Glycine max
  unsure (1)..(595): unsure at all n locations
gatgaagaagaaaccgtgtcgacttcggaggacgcaatttacggggagaaggtggagcctgagtttgatttgatgaagacaatgctgcgaaagtcgtatacgccgaagaaggttgccgcggaggaaaaaaacgttgaattggaagtggggaatagcagtaaggacactcttgtgaacgaggaaaggaaggaagtgaagggctcaagttcgggttcggtttcgaacaggaaggacggaccgaggtttaaggatttgggtgggatgaaggaggttttggaggaactgaagatggaagtgatcgtgcctttgttccacccccaattgccaagacagttgggagtgagaccaatggctggcattttgttgcatggaccacctggctgtgggaagactaaacttgctcatgccatagctcatgagactggtcttcctttctatcagatttcagctactgaggtggtttctggagtttcaggtgcatctgaagaaaatattagagagctttttgctaaagcgtacaggtctgcgcctgctattgtctntattgacgagattgatgncattgcatctaaaagagagaatttgagcgtgagat

SEQ ID NO: 209866 - DNA, 577 bp, Glycine max
  unsure (1)..(577): unsure at all n locations
gtttaaaatctccttcagttccactgtccacaaatgtacttctgtcaatggatagccttccaccacaatcaattgcagcacagactacagttggaagaattgggttaagtaatattgacctgaataatgtatatgatgatgtacaggattatgttgagaacacgaggaattgtcgtcctcctctgccttcaggaaatgggtctcttgatcatcctttattggtccaatgtgactctctcaagtcaagtccaccacagacaagtagaaactcagattcaacctctacccagtcaccatctagttctagtggagaagctcagagtcgcacagatcgaattgttttcaaactatttggcaaggctccaaatgatttcccccatgctctccgatcacagatccttaactggttatcccacagtcccacagagatagagagctatataaggccaggttgtatcatgttgactatatatcttcgcctagaaaattctgcttgggaagagctatgctacaatctangacccagcttgagaaagcttgccgcgtcaaatgatngtttctggagaacangatggat

SEQ ID NO: 209867 - DNA, 466 bp, Glycine max
aaagtatagtcacctgtagtaaatgttatataatcattgattgatacaaagtaccctcctaaatgccggcaagcttaccctattatctttgcatatacatgaactaataacaccatctacctaatatttgctagatagaacagtgagcattttgtgccgaacatctgaagtgaaggtaaaccttccctacatattttgatgacagctactatcacagatgtatatacttagaactaaagactttcaaacccaaaaaacaaaagtgcaggcctactgcaaagaatacctgatatacaacattagattgacccatactccaatgattcccagctgaagggctggaatacataataaactttgggtgagcttttgaagagcaaagctacacagacacacacagctgcaatggccaccattgacagcattgctggcctgaaaaccagtgcccttctcatgccaccataca

SEQ ID NO: 209868 - DNA, 582 bp, Glycine max
tggcaccccaaataaacacaaacatggacgcatcaaaactcaatcaattgaagcatttcatcgaacagtgcaagtccaacccttccctcctcgctgatccttcactctccttcttccgcgactatcttcaaagtctcggcgcgaaacttcctgagtctgcttattccgaatcgacgggcgtggagagggatgaggacatagaggatcttacggaggagcacgagaaggtagaagaagaagaagaagaagaggacgatgtaattattgaatccgatgttgagcttgagggtgaaacctgtgagcctgatgatgatcctccacagaagatgggagacccctctgtcgaggttactgaagagaatcgtgatgcatcgcagatggccaaaattaaagccatggatgctatttctgaaggtaagttggaggaggcgattgagaacttaacagaagctatttcactcaatcctacctctgccataatgtatggaactagagccagtgtttacatcaaaatgaagaaacccaatgctgcgatccgtgatgcaaatgctgctttggagaaataatccttgatctgctaag

SEQ ID NO: 209869 - DNA, 455 bp, Glycine max
caaacgttcaaattcactcgggaaaataacattgcattgttgacaaataaacatactaccaacacgagctatataggggcacctaagaaacaggactaacaaacggtaaaaagtttaataatttcggtaagattaaaaatgcaataaacattaaatacccgatgccagagggctggaaagttgaagtctcaaataacttacaagcatctaaaagtattcacttgggaccacctccaagtttggtcatcattttcgcaattacaggagctacctttggatttgattggtgcttggcaaaattagcaaggttcttcataacatcttgaagagcagccataatctctggatcaccaaatgacgccatcagttcagggtcactcaagattttgctaaaatcaatgtttccaggcatgccaccagcccctgggaatcccccaggcatgccaccagcccct

SEQ ID NO: 209870 - DNA, 613 bp, Glycine max
tggcaccccaaataaacacaaacatggacgcatcaaaactcaatcaattgaagcatttcatcgaacagtgcaagtccaacccttccctcctcgctgatccttcactctccttcttccgcgactatcttcaaagtctcggcgcgaaactttcctgagtctgcttattccgaatcgacgggcgtggagagggatgaggacatagaggatcttacggaggagcacgagaaggtagaagaagaagaagaagaagaggacgatgtaattattgaatccgatgttgagcttgagggtgaaacctgtgagcctgatgatgatcctccacagaagatgggagacccctctgtcgaggttactgaagagaatcgtgatgcatcgcagatggccaaaattaaagccatggatgctatttctgaaggtaagttggaggaggcgattgagaacttaacagaagctatttcactcaatcctacctctgccataatgtatggaactagagccagtgtttacatcaaaatgaagaaacccaatgctgcgatccgtgatgcaaatgctgctttggagattaatcctgattctgctaaagggatcaaatcacgtggcataacacgagcaa

SEQ ID NO: 209871 - DNA, 437 bp, Glycine max
caaacgttcaaattcactcgggaaaataacattgcattgttgacaaagaaacatactaccaacacgagctatataggggcacctaagaaacaggactaacaaacggtaaaaagtttaataatttcgggaagattaaaaatgcaataaacattaaatacccgatgccagagggctggaaagttgaagtctcaaataacttacaagcatctaaaagtattcacttgggaccacctccaagtttggtcatcattttcgcaattacaggagctacctttggatttgattggtgcttggcaaaattagcaaggttcttcataacatcttgaagagcagccataatctctggatcaccaaatgacgccatcagttcagggtcactcaagattttgctaaaatcaatgtttccaggcatgccaccagcccctgggaatccccca

SEQ ID NO: 209872 - DNA, 185 bp, Glycine max
gatactttggctgaagcgcagttccacattgccatgaaataatgaggctactctgttcatatgtgaattggaattgtctgatttcttctttggcctgtcctgaatccaaaggaaatgagatcgggatatctccggggcgccgagctgcgattcgatatagtgaggtcgttcaaggacggaagagt

SEQ ID NO: 209873 - DNA, 486 bp, Glycine max
gatcgagataactagagacagtgagatgaacatgaaagcccttgttgtcttcgatgctacaattgagggagcatgggaatgccatgcgtacgatatggtccctgtccgaatgaacactgtctatggggcccgtacttccgaggtgaaatgctcaagacgtaggcttgctgtggaagcacacatcatcttcggcttcgagaccattcctgaacagagcgtcgaagcaccaaaggactgcatccatggcgaacaatatagatcagactccaggacagttaaccaacacgcttactggtatgccagagacctctaagtccatcccaaggacacatctgcgttcagtatagatggcaccgtactctctaatattgcatgctacggaatacatgcatatgtgtgctgaaatataactcgtccttgactgatgaatgagtacacaagggcaacgcagcggcactgcccgagactcttaagaattacaacagc

SEQ ID NO: 209874 - DNA, 368 bp, Glycine max
ggaacaagggcgcattttttattaaagccacgaaagagaaaacaacatagggaaggctcttacatgacttgttgacacacagctgaaacaacataaagtgaagcttgtgcccctatttgaacgcgtggtattacatttagatagataggagcaagctagattgttgagaggagaaggaactactgactgtagtccaggggattaggaagctcaaagggcctgctttggcctctgtggcctccgaagagatcgctccattggtctccaatgatcccaacaatgttgtatccctgccttatcaatttatctgtcgctgctgttaagcatgaaactgcattgggagagaaaggatcttgtggatccttgag

SEQ ID NO: 209875 - DNA, 448 bp, Glycine max
gggataaggacctatatgttaggccataactagcctgcactttgaaatctatatcagtttgaattttgaaagtgagtgtggcgtaccgtgtacgtatctgcagaaagtgaatgaatggttatgggggaagaatggtgcaaggtatgtgttacaggaggcagtggttacattggttcctggctcatcaagaagctactggccaagggctacacagttcatgcaactctcatagacttgaaaaatgagtcaaaggctggcctcttaaagagcctttcacaatcagaacgaaaactgatgctgtttggagctgatatttacaacccatatgattttgaccttgcaattgaaggctgcaagattgtgttacatgttgctactgccatgatacatgaacctggctcccagtacaaggatactactgaagcggcaggagctggaacaaaaagca

SEQ ID NO: 209876 - DNA, 620 bp, Glycine max
  unsure (1)..(620): unsure at all n locations
ccgaaaatgaaatcaattgttccagagatttcattttcggatactccaccaccttgatccaaaactcgaagatcttggtgaggaagcccatggcaaatcagcagaacatagtggtggcagatggcacagggcagaagaacatgcccacaggaatagtcctccataactgcgagatcatgccggaccctaccctcttggcagaccgcttgagcgtgaagacttacttggccaggccatggaaggcattctcaagggcagtgttcatcgagaatgttatcggggacttgattcagccagatggttatattccatggaacccaattgaaccaaacacacaggattgctacttcgctgagtttggcaacactggaccaggttccgttgctcaagcaagagccaagtttggcaaaggtctcattagcaagcaggaggctgcacaattcactgctgagccttggctccaagctagcacttggttgcctgctgctggcgttcctttcgatgctagcttcaccaaagcttaaggatccgagacaaaccagcatcttgagtgttataatctcttttatagcctacctaaattaataaaactataaacaggaaatcgantacctaatttc

SEQ ID NO: 209877 - DNA, 584 bp, Glycine max
  unsure (1)..(584): unsure at all n locations
ctagctcctcgaaaatgctggcacgcctcgccgcgagtcgcttcaacgagatccgtcagattttccgtcagccttctagggctttctcgaccgctctgaactaccaccttgacacaccggacaacaaccctaaacttccatgggaaattcaccgaggccaatcaagcaaaggttaaggagattttgtctcactatccatccaactataagcaatctgctacaattcctcttttggatcttgcccagcagcagcatggtggctggctccctgtttctgcaatggatgcggtagctaagattgtagaggttcctcccatacgggtctatgaggttgccacattttactccatgttcaaccgagctaaggttgggaagtaccatctgttgatttgtggaacaacaccttgtatgataagaggttcacgaggaattgaagaagccttattgaaacacttgggagtgaagcgcaatgaagtaacaccagatggtttgttttctgttggagaaatggaatgcatgggatgctgtgtgaatgctactatgattacagtggccgattattcaaatggatncganggatatac

SEQ ID NO: 209878 - DNA, 526 bp, Glycine max
  unsure (1)..(526): unsure at all n locations
aactaaattatctttcatcgtaatctcaaatttcattcatgatgattaatgtacagagtacagaaacgcatagataacgctggtaagtaataaacaagccaagaaatttatggatggcgtttatggaacaaatttttgaaacggaagccatccaggatgattcatacaaaaattggttgagcatctaacagtctgacaatgtttcaattaaggcaagctccaagacatgcaagcctcacattattgaaggcaaaaagtatacaacacttcagcaggaatccaggtcacggcagggaggaggcttgggctcacttaacaaagtagtgttccctccttcaggtccactcttaattcggcggngattttgggtgccgtgcggtggcttctcaccctttctcagcttttctactatctcaactactttctcttggggttatatcttcaaagtaantataagtatatccttccgatccatttgaaatatcggccactgtaatcataggagcattcacacagcatcccatgc

SEQ ID NO: 209879 - DNA, 597 bp, Glycine max
  unsure (1)..(597): unsure at all n locations
tgatttacaacttttttcttcctcatggtcacaatgcttttaccacttgttctatgtcttactctccctgtgtttttcttgttcttcatccaacaccttagagccttcaagaaaccccccctacctccaggtcctaaaggccttccaataattggaaatttacataaattagataactccattctttgcatgcagctatggcacctctcaaagaaatatggccctatattttcccttcaattaggtttaaggaaaactattgttatttcctcaccgaaattggccaaagaggtactgaaaaaccatgacctagagtttagtggacgacctaaactacttccccaacagaaattgtcctataatgggtcagagattgtgttttccccgtacaacgaatattggagagaaatgagaaaaatttgtgttgcccatatctttagttcaagcgtgtctctagctnttcatctataagaaagtttgaggtgaagcaaatgatcaaaacaatatctgggcatgcctcttcttcgggtgttacanactngagtgagttactcatatctctctcaagcactataatatgagaagtgcttttgggag

SEQ ID NO: 209880 - DNA, 523 bp, Glycine max
  unsure (1)..(523): unsure at all n locations
attacttatttttggttcttaagtttaatataaatattacattattatctagtctttcactagaaagcagaaacaataaatttgcagcatagtatagtggcactatttccttaataattgacatccagtaaattattattattattattattattattattattattattattattatacgaccaaaagaaaagaaggcaccagaagtaccgcgttcaccacaaacagatacaaagaataatgccacaaaacaaaccaaaacagcacgactgaaaataattttacaacacgcctttccgataatgaaaggactgtacaacctcttattttcacttgatttagatcccatcatcatttccaccaagaccaattaattaagagatttttgtttttctgaggtcccacacaaactntntcttcatcctaaccatcctttctatctactntaatggctacttctaacatgaatttgccccttatctacttcgtatttaccggtcttgatatcnaaacaaaaagagga

SEQ ID NO: 209881 - DNA, 537 bp, Glycine max
tcttactcgatccatggatcgttgtatggcttctgcgtggaacacatatatagatctgggaatattattgccgtaaggtgcagaggcacaacctgcgttcttcgtgctcggggattctcttgcggataatgttatccacaagctttttggcatctacagctcgggcacatgctcctacttatggcattgatttcccatccggtagacccactgcccgtctgtctaatggctactacatacctgacttcatcagtctgtcacttggggcctaatccacattgtcttatttagatcccgagctctacagtcaacgactgcttggtggtgccaactgtgcttctgatggcattgcaattctcactgacactggactccagtttggcatcataatcctaatatatccacagttggagtactggccagaataccagtagagcgttagtgctatgatctgacctgagcagactgaacgcttaataaatggagcattattcctcagtactattgcaggcaacgactatgtgaataactattact

SEQ ID NO: 209882 - DNA, 548 bp, Glycine max
  unsure (1)..(548): unsure at all n locations
gaggatgcatacaagtcaccattgagtgtcatcattcttgatgacattgagagattattggagtatgtgcccattggtcctcgattttcaaacttgatttctcagacactgctggttctgctcaaacggctttctccaaagggggaaaaaactcatggttattggcacagcatgtgaactagatttcttggaatcaattggattgtgcgataccttctctgttacttaccatattcctaccttgaacacaacggatgcaaagaaggtcctagaacagtcgaatgtgtttactgatgaagatattgattctgctgcagaggcgttgaatgatatgcctatcaggaaactatacatgctgatcgagatggcagcgcatggcgagcatggtggatctgcagaagccatcttttctggcatagagaagattagtatcgctcacttgtatgattgcctgcangatgttgctaggttataagttgttgtattaagcgctatctaagttagagtgcatataatccttattggagtgaaatctttcttaacagttc

SEQ ID NO: 209883 - DNA, 480 bp, Glycine max
cagcacaaccaaacaaacactgattcaaaaaaatctctgtaactgaaccggaacaagcaatgtaatgaactgttaaaaaaagatttcaactcaataaggattatatgcactctaacttagaaagcgcttaatacaacatcttataacctaacaacatcctggaggcaatcatagaagtgagcgatactaatcttctctttgccagaaaagatggcttctgcagatccaccatgctccccttgcgctgccatctcgatcaacatgtatagtttcctgataggcatatcattcaacgcctctgcagcagaatcaatatcttcatcagtaaacacattcaactgttctaggaccttctttgcatccgttgtgttcaaggtaggaatatggtaagtaacaaaagaggtttcacaaaatccaattgattccaagatatctagttcacttgttgtgccaataaccatgagttttttccctttggag

SEQ ID NO: 209884 - DNA, 549 bp, Glycine max
ggagtcggtccgaacgaggatccacccccttccttgacgaacacagagacgtgtgttttggattctatttgtgccgtggtttgagatttagatgcaaataaatatataccctgtcttgtgccgtgtcccctttaagccaattggaattcaaacaaagtttcggttattggtgttcatttttcttcctccatctttctctaaaacattaattgaactctccattccttaaattttaccaacgagctagttccgacacagacaaagcaatggcaaagactgagttagaggtgactgttgagagcaagaacatagaactaaagcacctgggatttgtgaggattgctgctattcaaacttttgcgattgtgtcaaatctgtatgagtacgcatagcagaattctgggcctttgagatccgctgttggaacggttgagaacactgtgaccaccgttcttggtactgtctgcaacaaattcaaggactttcctgatgatgtcctgggttatgttgacacaaagtggatgaagcttacacaagttcgatgagcat

SEQ ID NO: 209885 - DNA, 478 bp, Glycine max
ggagtatgttccagagtccatgtatagagtcttaaagcactatagcaatgctaatcaaagaatgccaatcatctacgtaaaactttatatgtaccagattttcagggggttggcttacatccacactggtcccaaagtttgccacagagatttgaagcctcaaaatatactggtggatcctcttacacaccaagtgaagctatgtgattttggaagtgcaaaagttctagtcgaaggtgaagctaatatatcatacatatgttcacgattctatcgagcaccagaacttatatttggggccacagagtataccagttcgattgatatttggtcagctggctgtgttcttgctgaacttcttttgggccagccattattccctggcgaaaatgcagtagaccagcttgtacatattataaaggtgcttggcacacccacccgagaggaagtacgctgtatgaatccccaatacaatgac

SEQ ID NO: 209886 - DNA, 514 bp, Glycine max
  unsure (1)..(514): unsure at all n locations
tccaaacaaccttctttctttttctgtgatcctttctttcaggttcttaacttgatcagtgtgcagtgtccaaatcataagggtagctgcaaattgcaatggctaagcatgatgttgagggtggttccttctctgcaaaggactaccatgatcctcctccagcaccgttgattgatgctgaggaactcacacagtggtccttctacagggctatgattgctgagttcattgccacaatgctcttcctttacatcacagtgctcactgtgattggttacaagagccagagtgatgtaaaggctgggggtgatgtgtgtggtggagttggcattcttggcattgcttgggcctttggtggcatgatcttcattctggtgtactgcactgctggaatctcagggggtcacataaacccagcagtgacatttgggctcttattggctcgcaaggtgtctntgattacagcaataatgtacatggtggctcagtgcttgggagccatatgtggagttgg

SEQ ID NO: 209887 - DNA, 231 bp, Glycine max
aagtaaaagcatggttttatatatatttttttccacgttgagtacaagagattaaattacctaaaagaaaatatcacacactgaaagaaaggaaagtgcttgaaaatactaaagggtatttaccaatggctcttgtctttgaaagaaccttcaatctacataataggatcaaagaaaaggttgcaataaaagcacaagcaattgccattattgacaatatttatattattc

SEQ ID NO: 209888 - DNA, 453 bp, Glycine max
aagtacatatgatttaagcttcactataaacaaagatacacactatggaattgcttgagataataaaaaatgcagttaacactagagttaattaatgaaatgaaaataattaaagaataaagaagcacaatcattactttttaattaatttatattgcttgattttgaaactcattacttttattgccaattaagtattgcctttttgtgcctatggtgtttcggcacgccaggaaagcaaggaattccggtaacctcaatccaatcagttccatgaaaaaacttagatggtgagaaccaacgtgctgcttttgaattgaggttccaaatcccagcccatttcacacgcttggatttgtctgaaccggggccaatgttgtggtactcggcatagaagcaagtgtccataccagaaggaccctctagtccttgccatggcaaatacccatcagc

SEQ ID NO: 209889 - DNA, 542 bp, Glycine max
  unsure (1)..(542): unsure at all n locations
tgaacaatggcgtctctctctcacctcaacaaactcctctgcatgcccccgctcaactcttcaccctctatttcgccaccacgcagcagcgtcggaatttggaccaaacctgtcggaaggccgaggctactggtgcctgtccgagccggcacgagcgacgacgagtgggggccggagaaggaggaggcgtacggcggcggcgtagcggtggaggagaaaccgacgaagtcggagacggagacggagaagctgaagaaggccttggtggattcgttttatggcaccgatcgtggactgaaagcaacgagcgaaacgagagcggagatcgttgaactcatcacacagctcgaggccaagaaccctaaccctgttcccaccgacgccttgactcttctaacggaaatggatctcgcgtatacatccttgcaggtttatntccattgttgtcaagtggaacactaccattggtcaaggtagaggaaatatcccagattattgactcgctgaantttaccgtccaaaactctggtcagttcgctggt

SEQ ID NO: 209890 - DNA, 375 bp, Glycine max
gatgttacttgaagttggttgatgcctttcgattctgctcataaaccatcacattaacaaccaaccaacaattcgcaacacagcattaacaaactgttctacacatgtatcttcaaaatcattgtataaaattcagaccctttacttatttataaacataagcctgatattgaccaccaaagtaaactagtttgttttgtttatcttggcaaaagagagcttccttctttgataagaacaaacacactgccaccatcgccccttgagatacgcaattcttcgtcgaggtatgtggtgagtaaccaggactgagcattgctgttggaaattgggatcttcaagggaggcctacttgaaattgttttcactaccgat

SEQ ID NO: 209891 - DNA, 620 bp, Glycine max
aaccctagctggataggtcaaacatcatcatgtcggacgaagagcaccatttcgagtccaaggcagacgccggtgcctccaaaacctaccctcagcaagccggtaccattcgcaagaacgtgctacatcagtcatcaaagggacccccttgaaaggttgtggaagtttcgacttccagaactggaaagcacggtcacgccaagtgccactttgttggaattgatattttcactgtcaagaaacttgaggatattgtgccctcttctcacaactgtgatgttcctcatgtgaatcgtactgattaccagctcattgatattgctgaggatggatttttgagtctgcttactgaaaatgggaacaccaaggatgacctcaagcttcccactgatgagagtctgctcactcagataaaggatggatatgctgagggcaaggatcttcgagtgtctgacatgtctgctatgggtgaggaacagatttgcgctctgaaggatattgggccaaagaactagcttttggtgctggcagcctgtcgtttctatttaagcaaagatccttatgtaagactttatattgtattgttcaagacctggcttatggcttatagaatctagtca

SEQ ID NO: 209892 - DNA, 509 bp, Glycine max
  unsure (1)..(509): unsure at all n locations
atcaatgcaggcaatgaaaatctcatcatatcgtaccgaaaaaaaccttcccacatttgactcctcctttataacaaagtcataggacagcatagaaaaccagaaaaaatgtgatatagtttctgtgaccacatccataaacaccattgttaagactagtctgactagaatctataagccataagccaggtcttgaacaaaccaatataaaggcttacaaaaggatctttgcttaaatagaaacaacaggctgccagcaccaaaagctagttctttggcccaatatccttcagggcgcaaatctgttcctcacccatagcagacatgacagacacaacaagatccttgccctcagcaaatccatcctttatctgagtgagcagactctcatcagtgggaagcttgaggtcatccttggtgttcccattttcagtaagcagactcaaaatccatcctcagcaatatcaatgagctggtnatcagtacgattcacatgaggaacatcacag

SEQ ID NO: 209893 - DNA, 601 bp, Glycine max
caacacaacattctttcgtgaaactcagaaaaccctaaacccctctcaaaccttgtagattccgacatcctagaattagttactggtttagtagcttagcttcactcactttctatttcttccagaatgccaaatccaaagcacattattctgcagagctttgtcttcctctgcctgcttcttcaggcatcgtcaaaatccacgatcgagccatgctcgaactccgactcatgcaacgcgcttctgggctacaccctctacacggacctcaaagtctccgaggtggcgtcgctgttccaaatcgaccccatctcgctcctcaccgcgaacgccatcgacatctcctaccccgacgtcgagcaccacatcctcccctccaagctcttcctgaaaattcccatctcctgctcttgcgtcgacggcattcgcaaatccgtcgctactcactacaagacccgcccctccgacaccctctcctccatcgccgacgccgtctacgccggcctcgtctcctccgaccagctccgcgaggccaattccatctccgacccttcggatctcgatgtcggacagaacctcgtcgttcctctaccttgacgtg

SEQ ID NO: 209894 - DNA, 440 bp, Glycine max
gatgatgcatacgagtcaccattgattgtcatcaatcttgatgacattgaaagattatagaagtatgtgcgcattggtcatcaagtttcaaacgtgatttctcaaactctgctggtgctgctcaaacggcttggtacaaaggggaagtttactcgtggatcatgtcacagcacgtgaactaaattgctcgaaatcaatagtatggtgcgataccttgtctgatacttaccatagtcctaccttgatcacaacggttgcatataccgaactagaacaggcgattgtgaatactgatgaagatctcgaatctgcttcacatgcgtagcatgatgtgcctatcacgaaactatccatgttgaccgagacggcatctcatggcgagcatagtatatctgcagactccatctaccatggcctatagaacattagtatagttcact

SEQ ID NO: 209895 - DNA, 374 bp, Glycine max
catcacaacccaacttactctgtttcaaaaaaaattttgtaactgaaccggagcaggcaatgtaatggactgttaataaaagattgcaactcaatacggattttatgcactctaacttagatagcgcttattacatgatcttatcgccgaacatcgtcctggaggcaagcttagttgtgagcgatacttatcttctctttgacataaaagatgggttttggatagccaccatgctcgccttgcgctgacatctggagcaacatgtctagtgccctgataggcatatcagtgatcggccactgtagccggatcaatatcttcatgaggtgacacattccactgtgctcggaccttctttgcatacggtgtgttca

SEQ ID NO: 209896 - DNA, 404 bp, Glycine max
gaggatgcatacgagtcaccattgagtgtcatcattcttgatgacattgagagattattggagtatgtgcgcattggtcctcgagtttcaaacgtgatttgtcagactctgctggttctgctcaaacggcttgctacaaagggggagataactcgtggatattggcacagcacgtgaactaaatggcttggaatcaataggatggtgcgataccttgtctgttacttaccatattcctaccttgatcacaacggttgcaaagaccgtcctagaacagtcgactgtgtatactgattaagatatcgaatctgctgcacatgcgtatcatgatgtgcctatcaggaaactatacatgttgatgcagatggcagctcatggcgagcatgctatatctgcagactcca

SEQ ID NO: 209897 - DNA, 434 bp, Glycine max
atcacaaccaaacttactctgtttcaaaaaaatctttgtaactgaaccggagcaggcaatgtaatgaactgttaataaaagattgcaactcaataaggattatatgcactctaacttagatagcgcttattacatgatcttatagcctaacaacgtcctggaggcattcatagaagtgagcgatactaatcttctctttgccagaaaagatggcttttgcagatccaccatgctcgccttgcgctgacatctggatcaacatgtatagcttcctgataggcatatcagtgaacgcctctgtagcagaatcaatattttcataaggtaacacattcaactgtgctaggaccttctttgcatacggtgtgttcaaggtgggtatatggtaagtcacagagaatgtatcacagagtccaattgactccaagaaatct

SEQ ID NO: 209898 - DNA, 554 bp, Glycine max
atcgaaacctacatggttacgaaattaaatttcccaccttctactgcactccgagtaacaactcgcactatatatgttgcattgacaatgttaattggcatatgtatcccgttctttggctctcttcttggatttcttggaaggctttgcgtttgccccgacatcatattttttgccctgtatcatatggcttaagcttaaaaagcccaagaaatttggcttgtcttggacgattaactggatctgcattattcttggggtaatgttgatgatagtatctccaattggtgctctaaggaatatcatattatcggccaaaaactacgagttcttctcataaactattgatgcaatcattgattccccaaccgattttaaagttgatgagtgaaactaaataacaagatagcacgcagacatgcgttatacattgaatatagataagcttaataggatttgtggaagtgatacacacacaactagcctggtacagaattatacttcttttgaagtaacaactatcttatcaccgtgtagcttatagcggaaacact

SEQ ID NO: 209899 - DNA, 473 bp, Glycine max
  unsure (1)..(473): unsure at all n locations
atcgaaacctacatggttacgaaattaaatttcccaccttctactgcactccgagtaacaactcgcactatatatgttgcattgacaatgttaattggcatatgtatcccgttctttggctctcttcttggatttcttggaggctttgcgtttgccccgacatcatattttttgccctgtatcatatggcttaagcttaaaaagcccaagaaatttggcttgtcttggacgattaactggatctgcattattcttggggtaatgttgatgatagtatctccaattggtgctctaaggaatatcatattatcggccaaaaactacgagttcttctcataaactattgatgcaatcattgattccccaaccgattttaaagttgatgagtgaaactaaataacangaaagcacgcagacatgcgttatacattgaatatagataagcttaatagggattgtggaagtgatacaca

SEQ ID NO: 209900 - DNA, 572 bp, Glycine max
  unsure (1)..(572): unsure at all n locations
tatgctttctcaactatccgaaaaaagctacaatatgcagtatatttgttatcttttcaagatcttcaatctctgcatattgtagatcttgaaaagataacaaatatactgggtcacaaattttcaagtcttccaaatgatgatctggttgggatggaatcttgtgttaaagaattagcaaagcttttacgtttggggtccgttaatgacattcaagttgtggggatgagtgggataggtggaataggaaaaacaactcttggtcatggtttttatgtagaaatctctcattaatatgattttggttgtttcattgatgatgtaagcaaaattgatcagaattctagtgtatcaggtttacaaaaacaattaccttgtcaatctcagaatgaanaaagtttagagatttaccatctatttaagggaacatgtttgttattgactaggctatgctagcaagggaattgatagttcttgataatgttgatcaagttggactcctaaagatgtttccaaggagtagagatactttgtacgtgaatgctangtgaaggggcagaatcatcatattt

SEQ ID NO: 209901 - DNA, 557 bp, Glycine max
  unsure (1)..(557): unsure at all n locations
gtgctttggagggagacagtggtagcagtagcacaagctcctttctctctcggacccaaacctacgcccttcttaagcaacaattgcaagtggctgctaaatctgaggattacaaggaagcagctagaattcgagactcgttgaagcaatttgaggacgaggagcctgttttgcgtctgaggagactattgaaggaagcaattgctgaagagagattccaggatgctgctagttaccgtgatgagctaaacaatattgccccacactctcttttaaaatgttgcagcgatgctacaacattgggaatcagggttcaagttaggagtgtatatatagagggcagaagtcagccttcaaaggggctatacttctttgcatatagaataagaattaccaataactcagaccaccctgttcaacttcttagaaggcattggattataactgatgctaatgggagaacggaaaatgtctggngaattggagttgttggtgaacagccattaatacttnctgganatagttntgaatactcttcagcatggcccactgacaca

SEQ ID NO: 209902 - DNA, 558 bp, Glycine max
gtcgagcactagagtcttgtactgctagactgaaagagcttccttgttcaatggctccatttggctccttggtcattctcccctttttgttgatagcaacagtgacttgttctacttcagagaaggaaaatagtaaaactttcatagtccaagtccaccaccaaaccaagccttccatattccctacccacaaacactggtacgactcctccctctcttccatttccaccaccgcttctgttatacacacctacgacaccgtttttcatggcttctccgcaaagctctcaccttcagaggcacagaagctgcaatcactcggccacgtcatcactctcattcccgaacagcttcgttcccttcacaccacgcgctcccctgagtttctcggcttaactaccgccgacaggaccggcttgctccacgagaccgatttcggctcggatctcgtcatcggagttatcgacaccggaatctggccggagcgccagagcttcaacgaccgcgacctctgccccgttcccgccaaatggaaggaaagtgcgtcgccggacaaaa

SEQ ID NO: 209903 - DNA, 622 bp, Glycine max
aacatgtttaccatgtggcagggagcaaaactaaagcaaaggaattggagcttttgttagcaatattgccagacaataatgggtctctctatggtgatctcaagcgaatttgtgaaactgaccttggcttaatttcacaatggctggctgacaaagcatgtcttcaaaatcactaaacagtacctggctaatgtgtctctgaagatcaatgtgaagatgggaggtagaaacactgtacttcttgatgctgtaagctgcagaataccattggttagtgacataccaaccataatttttggagcagatgtaacccacccagaaaatggagaagactcgagcccttcaatagcagctgtagtagcatcccaggactggcccgaagtgacaaaatatgccggtttggtatgcgcccaagctcataggcaggaacttatacaagatttgtacaaaacttggcaagaccctgttcgtggcacagttagtggtggcatgatccgagatttactggtttcctttagaaaggcaacaggacaaaagccactacgaattatattttacagggaccgtgtaagtgaagggcaattttaccaagttttactttatgagttggatgcgattcgga

SEQ ID NO: 209904 - DNA, 468 bp, Glycine max
ctgtaaaggccttatggcaaaattttctacaaagattgacatagaatattttttacaatgctaaatttgacatctatatagaatctaatagtacttgtaggaattcattctaagctatgcctcaagaactgtaatcatggatttatcacaggaaacctacacgactaatgtacaaagtaatgtgagctgaacattgcattccatgattgttttcacttacctaccatgttgatgcttgccctatatatctatcattccaccaaggccaagtcactagcagtctaacagtaaaacatgaccctcttcacattttctttcaagtctggcaatggcttgacactataatcaccagctgctcgtattgctttggcaccataaccattgccatcacctgcagagccaatggcttgcatatctggctccatatagaaacgtgctcgaaacgctgctaaatgtgcataatatgct

SEQ ID NO: 209905 - DNA, 514 bp, Glycine max
aacatgtttaccatgtggcatggagcaaatctaaagtataggaattggagcttatggtagtaatattgtcagacaataatggggctctgtatggcgatctcaagcgaatctgtgaaactgaccttggattaatttcacaatggctgcttgacgaagcgtgcctgcaaaatcactaaacaggtcctggctaatgtgtctctgaagatcaatgtgaagatgggaggtagaaacactgtacttcttgatgctgatagctgcttaataccatcggttagtgacataccaatcataatttgtggagctgatgttacccacccagaaaatggagaggactcgagcccttcaatagcagctgaagtagcatcccatgactggcccgaaatgacaagatatgccggtttggtatgctccctaactcatatgcaggaacttatacaagatttgtacaatacttgacaagaccctgatcgtggcacagttaatggaggcatgatccgagatttactggcttact

SEQ ID NO: 209906 - DNA, 568 bp, Glycine max
cttaaagcaaagaggggccttccatggacccccagcaacctcctctaaaacattggatgctgctgggagactgagttcagtggagtctactgaatacaaaagtgagctgtttgttgcgagtactgaagatgcagaaaatgggtatggataggaatgatggctctgatcctgctgagggaatgcctgtatttcagaatgtcttgaaagatatgattcctggggtaaaggtgaaggtattcaaggtgataactccagagaaagtagacaaggatctatctaatgtgattgagaagataattgaggacgaagacggagacgaagacgaagatgactagatggaaaatgatgcataaagtctagaactggatgagattaagtttgagactgaccattatggagatgatgagattgaagtaaatgctggtctgggaacttttgaacgtgaagaccataatgagtttgctgtcaaaattgccattgttggatctgttcagacactgtctggtgatctatcctctagagatatgcttcgagtccatgctatgctggagatgaatgggcgtggttc

SEQ ID NO: 209907 - DNA, 319 bp, Glycine max
gccaggggcacctaaagcggggagtggagacccattggaggatttctgcgagacaaaccctgctgatgaggaatgcaaagtttatgaatagaggagagctccttttctaacgtatcatgtgaaaaagaaggaaattgttcagacagtctatctgaggagagattttcaaagtttatatttatttgcagccaataataagttttggcgtgactgaatgaatatcacccatatattgattgatattgaatttctgaattcttgtaactgatttgcaattcttcgaatcttttaatcattgctcagtgttaagtggaaggct

SEQ ID NO: 209908 - DNA, 318 bp, Glycine max
gccttccacttaacactgagcaatgattaaaagattcgaagaattgcaaatcagttacaagaattcagaaattcaatatcaatcaatatatgggtgatattcattcagtcacgccaaaacttattattggctgcaaataaatataaactttgaaaatctctcctcagatagactgtctgaacaatttccttctttttcacatgatacgttagaaaaggagctctcctctattcataaactttgcattcctcatcagcagggtttgtctcgcagaaatcctccaatgggtctccactccccgctttaggtgcccctggc

SEQ ID NO: 209909 - DNA, 564 bp, Glycine max
  unsure (1)..(564): unsure at all n locations
atttggaacaaacaacaatagaggggttgtggtgctctgtgtgctgcaatttccttttgagcttgtgtttgattcatcaaatcatcaaagatgactgtaggggcaggaatatctgttgcagatgggaacttgatggtggtgggggaaaaaagtgctgagccatgtccatgacaaggttcttgttacccctgcatgtggtggtgctttgctcaatggggcattcattggggttcaatcccatcacaagggtagccgtacagtcttcccaattggcaagcttcaggggttgcgatttatgtgtgttttccggttcaagatgtggtggatgacgcatagaatgggcacttgtggacaagatatccccattgagacgcagttcttgctcgttgaagcacacaatggctctgatattgaaggaagaagagaccaatgtgctgctacctatgcagttttcttaccccttctcgaaggagatttcagagcagttcttcacgggaatgatcaagacgagattganatctgtgtggaaagtggattgcctgctgtggaggaatttgatgggac

SEQ ID NO: 209910 - DNA, 452 bp, Glycine max
  unsure (1)..(452): unsure at all n locations
atttggaacaaacaacaatagaggggttgtggtgctctgtgtgctgcaatttccttttgagcttgtgtttgattcatcaaatcatcaaagatgactgtaggggcaggaatatctgttgcagatgggaacttgatggtgttggggaacaaagtgctgagccatgtccatgacaaggttcttgttacccctgcatgtggtggtgctttgctcaatggggcattcattggggttcaatcccatcacaagggtagccgcacagtcttcccaattggcaagcttcaggggttgcgatttatgtgtgttttccggttcaagatgtggtggatgacgcagagaatgggcacttgtggacaagatatccncattgagacgcagttcttgcttcgtgaagcacacaatggctctgatattgaaggaggaggagaccaaggtgctgctacctatgcagtttt

SEQ ID NO: 209911 - DNA, 540 bp, Glycine max
ctccagtgggttcttcttcttctattacatcaacgtcgtccaagaccatgaccatggccatggccacgatcctgctcctgttcacggtcttcgcggtttcatcggccctagacatgtcgataatctcgtacgacaacgcccacgccgccacgtcgcgcagcgacgaggagctgatgtccatgtacgagcagtggctagtaaagcacggcaaggtgtacaacgcgctcggagagaaggagaagaggttccagatcttcaaggacaacctgcgattcatcgacgaccacaactcccaagaggaccgaacctacaagctcggactgaaccggttcgcggatctcaccaacgaggagtacagggccaagtacttgggaaccaagatcgatcccaaccggaggctcggcaagaccccgagcaaccgatacgcgccacgtgtcggcgacaaactacctgaatcggttgattggaggaaggaaggtgctgttcctccagtcaaagaccaaggaggctgtgggagcttgtgggcattctcagcaatcg

SEQ ID NO: 209912 - DNA, 362 bp, Glycine max
cgggcaaatccaaataatgctgggttggcacatagtctacataacctgggaaactaacagcaatcaaatatgttcgccatttggaattggaatttgaatacaaataccgtgcatcaataatttaaccctatgtacacagccaatatctgactgaaatttgatacagaatagtttcaatttgtatcataataaaagggcacagagaaatttatgtgaaggtaaaggggaagtgtatcagctggggtttaaattcttcgtctttcatttacttcataatgggctccttcctgcacgttcacatttcctttatctgcttaagcactgctgaccttgttcttacgcccaaagggccaatggggttt

SEQ ID NO: 209913 - DNA, 429 bp, Glycine max
atcatgccgaccatgcggcagggagcagaactaaagcataggaatgggcgctaacgatcgcactattggcagacaataatgggtggctctatggcgaactgaaacgaacttgcgatactgacctaggctcaacaagaccatgcctgcgtgacgacgcatgccttcacaatcgctatacagtacctgactaatgcgtctatgaagaccaatgcgcagacgagagcgtcgacacactgtactcgtagatgctgacacgctgcagaataccactgggctactgacatgaccaaccatacagatgtggagcgatacgttacccacccataaggatggagaagactggagccctcaagtagcagctggacaagcacaatacgactgtctcgaagtgacacaatatgccagcttggtatgcgcccaagctcataa

SEQ ID NO: 209914 - DNA, 614 bp, Glycine max
ctcgagccgctcgagccgattcggctcgagcagctggctcatcaagtccaagaaccaacctaccttttgcaatctcaattcaatggcgttctctctcattgcgaagcgcttgctctcctcttccctcctctacaggtacctccttatggcccggcgcttccgcttcccaccgctctttcaacaccaacgccatgcgccagaatgacaaccgcgccgacgaccacagcaccgacatggatcgtcactccgaacgctctttccctagcactgagcgccgcgacgatatcttctcagatgtgttggatccatttgttccgactcggagtttgagccatgttctgaacatgatggaccaggtcatggacaatgcgatcctctccgcgtcacgcggtatcggagctggcgctgcagtgcgtagcggatgggacgcgagggatacagaggatgctatgcatctgcgcgtggacatgcctgggctcggcaaggacgacgtgatgatctgcgcggagcacaacactctcattatcacaggtgaaggtgctgaagaaggcgatgaagaatacagcgctcgtcgctacactagcaggattgacttgccggacatagctctacag

SEQ ID NO: 209915 - DNA, 361 bp, Glycine max
cattgacatttaaaattcaaactgcattagacttttaaacaggagggtcattcacaactctatataacaatgattacagatacgtttgaagtttcaaaaccaaacacaggaacaatactattaagctgttatatgtactaactagattgatcaccacctaataaacgaaaactaaagagtggtgtcgatgcaaaatggccaaatcagattgggttgttgtactcaaccttaacactgaacacgtatgtcctctgttcctacttcattattggcacaacgaccttgagcacaccgtgcttcatctcagctatgatcagggcaattttgtagagcttggccggcaagtcaattctggtagtgt

SEQ ID NO: 209916 - DNA, 616 bp, Glycine max
cagctattgaacgctcaaaatctgttgagtcagccattctaggtaaatacaacatttggaggaaagaaattgagaatgaaaatgtcgattctactgttcggttgatgcgggaccagatcattatggcaagggtatatttaaagcattgcaaagatgaagaacaaggtcgaactgtacgaagaactaatttaccggctcaaagagagtcaacatgctttaggtgatgcagtttctgatgcggatctacatcgcagtacacatgggaaaataaaggctatgggtcaagttctatcaaaagcaagagagcaattgtatgactgcaacttggtcactggaaaactaagagcaatgctacagacagctgatgatcaagttaggagtttgaagaaacagagcacattcctcagtcagttggctgccaagaccataccaaatggaattcattgcttatctttgcgccttaccatagattactatctccttcctcctgaaaagagaaagttccctgggagtgagaatttggagaatcccagtctttatcactacgcactgttctcagacaatgtcttggctgcatctgtggtgtcaactcaactttatgaatggcaggatcctt

SEQ ID NO: 209917 - DNA, 507 bp, Glycine max
caaagaatacagaaatatgatatttaatttctagttctgtccgagtatcaaatcagagtattgtacaatgaggaggttttatggtactaaacaaggtacactacttttgtaccttgtctaaaatgggtgactggggtagtgaacaaattaaatgaattgaaagcaagaatcgaggtgggaaagagatgatgttgggggacaaatatagatcatcattctagcaaagacgctgtagttgaaatagccaagccagaaaggtgatagaaaatatcagagaattcttctctgtactttggaccaaattatcagtactattcatttagcttacagtttcaaagatagggatgattgtacttgacatacttggcccagtaagaccgatattttgtcatggcaatttctaaccatggtttcatattaccattgtagtgtacaactgctgcattctcaatctctgatcgatccaaacttggattataacccaaaccaagtacatgccatgattta

SEQ ID NO: 209918 - DNA, 459 bp, Glycine max
ctgtaaccttttctctccggttaccaaaaccgtaagttgctgaacatggacccgcaatcgccggttcgggcggaactggagcctccggttccgacggtctccccacggttcgcgctcacatccagttcgcagcggaaaaatggcgatcgcggtcgatctgagcgactagagtgcctacgcggtacgctgggcggagcataactacctgcgaccgggcgacgccgcgatcctcctgcacgtgcgtcccacgagcgtcctctacggcgcggactggggcttcgtggatctgagcgcggcggaggacggcggcgacgaggagtcgcggcgtaagctggaggacgacttcgacaacttcacggcgacgaaggcgagcgacctgtcgcagtcgctggtggaggcgcagataccgttcaagatctacattgtgaaggaccacgacatgaacgagaggctctgatt

SEQ ID NO: 209919 - DNA, 593 bp, Glycine max
accatccacaggcgctttgatttgaagggttcttcacttggacgaataacaattaagcccgagtcggagattagtgaaacaactatccttaaagatctggatctaaatttcatatttcgactacaaaaatcttggtttcaaggattttgcaggcaaattgatagggactgtgagcttctggaacaagagggaattatggactatagcctgctagttggtattcatttcaaagatatatcagaaaatggtgatcttatttcttcaagatctcatactcttgctggcgattcagagagtgaaggaactccctgtatttctagagtagacatggatcaacttcttctagatcctaccagttgggcgagtatcaaattgggggtgaacatgccagcaagggctgaaaggacggtgaggagaagtggatgtgaattacaacttgtaggagaaccaattggagagttctatgaggtggatctgatttttggtatcatagacatacttcaagactatgacatcagcaagaagctcgagcatgcctattagtccattcaatatgacccaacgtcaatatctgacgtggatcccagacaata

SEQ ID NO: 209920 - DNA, 497 bp, Glycine max
aaaaggattgattatgtacactcatcttccatttcctatataataatatacatctcaatttgatacaaaatgtattgagtgcttgtcatctcttcccccatttgggagaaatggaataaatatattctagcacaaaattttcttgctttcagcatttcatcatgtatactatataattactgccctatatatacatagaaataagctaattaagatcaaagttgaaaaaaatggatttgtacccaaagtcacatggacctcaattgtggttccaatagttgaaaaatttcaaggctaccgaggttgagagtagcgagggtatgaatggaatgtaacagccacataattgtgtttggctttcaagagtcttcagaaaatattttaaatatgaagtcacgaaaacgccttgaatattgtctgggatcaacggcagatattgacgttgggtcatattgaatggacttataggcatgctcaagcttcttgctgatgtcata

SEQ ID NO: 209921 - DNA, 553 bp, Glycine max
agaacccctctgcttacctgtcatgctttcttatcctcttgatcattcttttcccaacccacgcacgtgccgacctccccggcacgtgggagcttctcgtcccggacgccggcatcgcctccatgcacaccgccgtcacgcggttcaacacggtggtcctcctcgaccgcaccaacataggcccgtcccgaaaactcctcccaaaaggccactgccggtcggacaaaaacgacgccgtcctgaagctcgactgctacgcccactccgtccacctcgaccttgccaccaaccaaatccgccctttaaaaatcctcaccgacacctggtgctcctccggccagttcctccccgacggcaccctcctccagaccggcggcgacctcgacggcctcaaaaagatccgcaaattctccccgtgcgacgacgcttcgtgtgattgggaagagctcaacgacgtcgtattggccgagggccgatggtacgccaccaaccagatcctccctgacggttctgtcatcataatcggcggacgcggctccaacactgtcgaatt

SEQ ID NO: 209922 - DNA, 513 bp, Glycine max
agctaccgtgcgccggggtgtcagtactccgtttcaaaaacgctccgtattgtgcacccccacaaaccacaatctcagctttagaatagtctccttctaaagctaacatcgctgatgaccctgcggaagggtagtttctcgggccaccttgtaatttagggtattccttaacgatgacgtggcggttgaaatcgtacatgaccgatcttgtgttagcgaaaacaaaaaggtgaccgtttgggagaaggcggacgtaggggtaaaggttatccatttgcgtgtcttccgtttcggataagaaagggaacgaaacggcgacgttttgtttgggtgggaagaattcgacagtgttggagccgcgtccgccgattatgatgacagaaccgtcagggaggatctggttggtggcgtaccatcggccctcggccaatacgacgtcgttgagctcttcccaatcacacgaagcgtcgtcgcacggtgagaatttgcggatctttttgaggccgtcgaggt

SEQ ID NO: 209923 - DNA, 570 bp, Glycine max
agaacccctctgcttacctgtcatgcttttttatcctcttgatcattcttttcccaacccacgcacgtgccgacctccccggcacgtgggagcttctcgtcccggacgccggcatcgcctccatgcacaccgacgtcacgcggttcaacacggtggtcctcctcgaccgcaccaacataggcccgtcccgaaaactcctcccaaaaggccactgccggtcggacaaaaacgacgccgtactgaagctcgactgatacgcccactccgtacacctcgaccttgccaccaaccaaatccgccctttaaaaatactcaccgacacctggtgctcctccggccagttcctccccgacggcaccctcctccagaccggcggagagctcgacggactcaaaaagatccgcatattctccccgtgcgacgacgcttcgtgtgattgggaagagctcaacgacgtcgtattggccgagggccgatggtacgccaccaaccagatcctccctgacggttctgtcatcataatcggcggacgcggctccacactgtcgaattctcccacccaacaaaacg

SEQ ID NO: 209924 - DNA, 461 bp, Glycine max
agttaccgtgcgccggggtgtcagtactccgtttcaaaaacgctccgtattgtgcacccccacaaaggacaatctcagctttagaatagtctccttctaaagctaacatcgctgatgaccctgcggaagggtagtttctcgggccaccttgtaatttagggtattccttaacgatgacgtggcggttgaaatcgtacatgaccgatcttgtgttagcgaaaacaaaaaggtgaccgtttgggagaaggtggacgtaggggtaaaggttatccatttgcgtgtcttccgtttcggataagaaagggaacgaatcggcgacgttttgtttgggtgggaagaattcgacagtgttggagccgcgtccgccgattatgatgacagaaccgtcagggaggatctggttggtggcgtaccatcagccctcggccaatacgacgtcgttgagctcttaccaatcacac

SEQ ID NO: 209925 - DNA, 583 bp, Glycine max
  unsure (1)..(583): unsure at all n locations
gcaagaataagaaagtctggacaaaagcgtgccaggcgtgagaccattgttggccctgctattgataagggtgtggctcatgagtctgttggagtaaaaccagccaccttggttccaaaggaaatccctgtgataaaaaagaaccatgtcttaaagataaacattgttcccaaagcaacagtgaaagaacataaagatgatgacacaacacaagagttacaagagccagaaaaagatgttccggatcctaacaaatttttgactccagatgaattggagagaggaaagttgcctcctgaggaaatcttatcccttccaatgtttaagaactatacagctggaaatcctgctcctgtgttgtatattaagaatttggcaaaagatgtgattgctgatgatttctattttatatttggctccttggttggaagtattgatgctgctaagtctggtcttcaagtcaaactgatgcangaaggacggatgaggggtcaagcgtttataacgtttccttccattgagttggcccatcatgcctttgatctagtgaatggatatgtattaaaagggcagcccatgatca

SEQ ID NO: 209926 - DNA, 619 bp, Glycine max
  unsure (1)..(619): unsure at all n locations
gaagagaggaagttttggggtttgaatctatagaatagaatcaaaccaaattgaaagaagatcgatcgatcgatcgatggctctggtcggagttgaagtgaagcatgcggcggagggcgcaccggaggagaattgctccgccaagcccaccaagcagggcgagggcctccgccactactattctcacaacatccacgagcatcagctccttctccgtcaaaagacgcataacctcaaccgtcttgaggctcagagaaacgagctcaattccagggtgaggatgctgcgcgaagaattacagcttttgcaggaaccaggctcttatgttggtgaagttgtcaaagtcatgggcaagaacaaagtccttgtcaaggtccacccagaggaaaatatgtcgttgatattgacaaaagtattgacatntacaagattactccatccactagaagtgcacttcgcaacgacaggtatgttcttcacttagttctgccaagtaaaagtgatccattgggtcatctgatgaaaagtgagaaaggtcccgattctacttacgacatgattgtggtttagacccagcaaataaagaaaataaagagtcatgagtaccaatcaacatcct

SEQ ID NO: 209927 - DNA, 390 bp, Glycine max
agggggcctgaaaataaatcttttaaaaaacccctataaaaggagggggcccccccaaaaccccgacccgggaaaaccccaagaaagaatcctttgaatcgggcccaaacttgggaaacttaagccaaaagaaaccccatgcccctggaaatggaaaaacccccaagggggggccgccgcccattttcgcgggaaaataatgggccccccaaacctgaaaaaaaaaacccttccacaactttcccaaagacctggttttttcaggcccctttttcaacaccctggccccagccctttgaaaaaccccccgggtcacggggaccctccggtccctcaagggaaacattccacctttggggcaaacagcccttagttcaacccccgaggccc

SEQ ID NO: 209928 - DNA, 542 bp, Glycine max
gtcgacgagctaaccggcggccgccctttttttttttttttttttttttattttttttttttttttggcaaattaagtagtttccattaaatagccaaaagcaaaattcccattgcttctcccatcatcagtctatgttatatgcatactgaagacagagatgaagtggttgatacaaaaaggcataaatcataaatatgaaaagcttattgaatgattacaaatcagctcctcagacaatggagtggctatgtgtgactgcattgaaattaggtaatcgatttcctggttatagttttattaatttaggtaggctaaaaaagagattataacactcaagatgctggtttgtctcggatccttaagctttggtgaagctagcatcgaaaggaacgccagcagcaggcaaccaagtgctagcttggagccaaggctcagcagtgaattgtgcagcctcctgcttgctaatgagacctttgccaaacttggctcttgcttgagcaacggaacctggtccagtgttgccaaactcagcgaagtag

SEQ ID NO: 209929 - DNA, 601 bp, Glycine max
  unsure (1)..(601): unsure at all n locations
ccttaatgtctttgatgagtttaaggaaagcactaaggttgacaaggtggttgtcctgtggacagccaacacagagaggtacagcaacctagttgtgggactaaacgacaccatggaaaacctctttgcttccttggacaggaacgaggctgagatttccccttccaccttgtatgccattgcttgtgttatggaaaatgttcctttcatcaatggaagccctcagaacacctttgtcccagggctgattgatctggccatcaagaggaacagtttgattggaggagatgactttaagagtggtcagaccaaaatgaaatctgtgttggtggatttccttgtgggggccggcatcaagccaacatctatagtgagttacaaccatctgggcaacaatgatggcatgaatctctcagcccctcaaaccttccgctctaaggaaatctccaagagcaatgttgttgacgatatggtcaacagcaacgccatcctctatgagcccggtgaacatccagaccatgtggttgtcattaagtacgtgccttatgtangggacagcaagagggccatggatgagtacacttctgagatattcatgggg

SEQ ID NO: 209930 - DNA, 398 bp, Glycine max
ggataacttgatattaattgattacatacatgcatagctggcctgctctcaaataagtcggcaggaacagacatagagagattcaacgatcttcaaatttcacatttgccagaaatatataacagaatagaggggtatgggatatgagttaagttttgatcacattgaactacactatcccaaaccggtactcttaagactttgaacttcacgttgcactctaggatcatgttgttctcaggagctcatccaacgacaagccctcatgatgctttgcagcatagcgtcgctgctttgacaactgattgaccactggggtacccggtggaaccagaggggccttggtccagtgactcaggatgggcccaactgggtggaatgagtggaatttttcgtac

SEQ ID NO: 209931 - DNA, 555 bp, Glycine max
agcgagcgagcagtttcaaagagaggatttgggattgggaaggcgagggattgcgctgcgtctcttcctcttctctttcgattcatccctcattcataatcttccaatccaacaacctcagcctcacactcacacatacacacatctgaacgcgtatcgtccctcccatggcttcaaagcgcatcctcaaggagctcaaggacttgcagaaagacccaccaacttcttgcagcgctggtccagtagctgaggacatgttccattggcaagcaacgattatgggtcctgctgatagtccttatgctggaggtgtattcctagtcactattcactttcctccggattatcctttcaaacctcccaaggttgcctttaggctaagggtgtttcatccgaacatcaacagcaatggtagcatttgtcttgatatccttaagaagcagtggagccctgcactcaccatctctaaggtactgctttctatctgctcattgctgactgatccaaatcctgatgatccacttgttcccgaaatcgctcacatgtacaaaactg

SEQ ID NO: 209932 - DNA, 285 bp, Glycine max
aaaacatatgactatttctacattacttcatagagtaacaccacagccatgacacaaataacatcttgttcatgcgttcgcatcatgataaaaacatcacagtggctgttgaacatagctatttttatcaaattaagacaccgcccttccctatcccctcataacaaacataatcttaccccagaaaaacaggaagagaaaagctaacccaccaaagttttcatagatgccatccatttcaatatacattatctaaacacatatcagcccatggcatacttgtgg

SEQ ID NO: 209933 - DNA, 549 bp, Glycine max
  unsure (1)..(549): unsure at all n locations
ggcgaggaagttgtcgttgcccagggcgattttctacatcgtgatgcaatgcttgggtgctatttgtggcgctggcgtggtgaagggtttcgaggggaaaacaaaatacggtgcgttgaatggtggtgccaactttgttgcccctggttacaccaagggtgatggtcttggtgctgagattgttggcactttcatccttgtttacaccgttttctccgccaccgatgccaaacgtagcgccagagactcccacgtccccattttggcacccttgccaattgggttcgctgtgttcttggttcacttggcaaccatccccatcaccggaactggtatcaaccctgctcgtagtcttggtgctgctatcatcttcaacaaggaccttggttgggatgaacactggatcttctgggtgggaccattcatcggtgcagctcttgcagcactctaccaccgggtcgtaatcagggccattcccttcaagtccaagtgattcaatcaacggttcatgcttatcaagttgggaacaacaacacaacaaanatcaag

SEQ ID NO: 209934 - DNA, 559 bp, Glycine max
atatgactctggtgttatttttgattttgcaaattaaattacacaatcacagccgtacatcacacatgagttgggcctcttccaacttaaaagcagaggataacattggcccatgacgcgacacatgcaccacctaataatcataattttacatctttacatacaaaatacaaagactttaaattttaaaaagaagaaaagagataaacagatcatcttaatgaaatgaaaccaaaacccacaaacattggcttgatttttgttgttgttgttgttcccaacttgattaagcatgaaccgtttgattgaatcacttggacttgaagggaatggccctgattacgacctggtggtagagtgctgcaagagctgcaccgatgaatggtcccacccagaagatccagtgttcatcccaaccaaggtccttgttgaagatgatagcagcaccaagactacgagcagggttgataccagttccggtgatggggatggttgccaagtgaaccaagaacacagcgaacccaattggcaagggtgccaaaatggggacgtgggagtc

SEQ ID NO: 209935 - DNA, 512 bp, Glycine max
  unsure (1)..(512): unsure at all n locations
tgccgataccacagattgtggtttggagatttcttcagaggtcaaaaggttcagatgtactagcaacaaagcaggccttgttgtacattatcttgcttcagtatgttcctagatttctccgaatggtaccgttgacttcagagcttaagagaacagccggtgtctttgctgaaactgcatgggcaggggctgcatattatttgctgctatacatgcttgccagtcatatagttggtgctttttggtacttgttagctattgaacgcaatgacacatgctggcagaaggcttgcagtgacattgggtgcaaagaaaatttcctatattgtgggaaccggcacatggaaggttatagtgcttggaataaaacaagtgaagatattcagtcaaggtgctctgcgatgngtgatcctgcacattntgattatggaattttcgggcaagtcttgtcttctggcatcatttcatctaagaagttcatctccaatactggtactggttatggtgggggc

SEQ ID NO: 209936 - DNA, 531 bp, Glycine max
attctgtcaaccagtaattatataacttcaataataaacttgagaatagtacataagtttacatgctcggtggcccacagccaagttggcttaatgtataatactataatttacaaggacacagatgaagagtcattacaagtcttgaaacccttacaactgtaaccaggataattgtataatacattgctttcgacctttcttcacaaattcaatcatcatagtcaaccaaaacaagcattttaagagaacacatggaaattttagtcagcatcatccgcagagaagtcaggctcagggggtttctgtagtttcactaactccctggcagtcttggcaagtcgattgcgatgtacaccacgtagagtgtgcgcagcaaactttgaggctaacaaggcagcaccaaagctgtaggaactgccaccaacattttcatgagttccgtctgactcatcttccttttgacgaagcttcataattttcttttttgaataccgacgccatgctgcttgaataaagcatgcagcccag

SEQ ID NO: 209937 - DNA, 417 bp, Glycine max
gggcagggcaaggcaagatcttccaaagttaattagactggcagaaacaggtatcttcaatcttggccatgctgtttcaagaacatacacttttgaggaggcgggaaaagcattccaagatctcaatgaaggaaaaattgtcggtcgagctgtgattgagataatatagctctatattcccagaaatgcttttctgcagcagcaatagctatgcttttcacaccccacaagatatacatgctttggagttgcaaggtgttggtaccctgagaacataaataaatagatgtcttctgatgtttcattgcaggggcatgttcaaatgaaaactgtttttctttttgtgcatttctttgcttctaactcatgtaatcaggtaggtacaccaaggtgaagaataatagtctctgaatgctc

SEQ ID NO: 209938 - DNA, 401 bp, Glycine max
gagcattcagagactattattcttcaccttggtgtacctacctgatttcatgagttagaagcaaagaaatgcacaaaaagaaaaacagttttcatttgaacatgcccctgcgatgaaacatcagaagacatctatttatttatgttctcaggggaccaacaccttgcaactccaaagcatgtatattttgtggggtgtgaaaagcataactattgctgctgcataaaaacatttctgggaatatagagctatattatctcaatcacagatcgaccgacaatttttccttcattgagatcttggaatgcttttcccgcctcctcaaaagtgtatgttcttgaaacagcatggccaagactgaagatacctgtttctgccagtctaattaactttggaagatc

SEQ ID NO: 209939 - DNA, 576 bp, Glycine max
  unsure (1)..(576): unsure at all n locations
aaaaagaattattggatatcatagataatctctttatcaagaattatatatcggaagatgcgattctagatatggaaaaaaatatgtatagaaagtattttgattggatgggaatcaatagagaaatactaaatcgttccatatcgaatccagaattttggttcttttcaaaatttgtgatattttatgacgcatataggggtaactcgcaggttataccaatcaaattactttttttttcttctaatgtaaatcaaaatgttagtgaaaataaaaagaacattactagaaagaaaaaaaatgaatctcttgaattggagttagagactcgaaatcgggcaaaagcagaataccctgatcaacgaaatcttgaatcatctatctcaaaccaagaaaaagatattgaaaacgattatgtaggatcagacagtgaaaagaatagtcagggtataaagaaaaagaaagacaagaacaagatggaggcagaacttaatttcttactaagaaatnttttgattntacatttaaattggaataatttcttaggtcaaagaatatttaaacatgtcaagtata

SEQ ID NO: 209940 - DNA, 586 bp, Glycine max
gatctcttgttcttgtaatatatttataaaaattgttcttattaacatgaattttttctgggtatttgtgataaatttttcgtttattcttttgaattaatgaaagacctatggtttgatacataaaaaattgtttattgttttttctagacaggcgaactggttcgataacaaatatttcttttttcataaatttgttatttttctttttccttaagcctagaagaattaaattcttctgattttgaatcatcataatatctagacctagttctcctctttgaatagaggctattgtaatttctcttaaattttttaatctaatcaggagacaatatactttgacattgttaaatattctttgacctaagaaattattccaatttaaatgtaaaatcaaaaaatttcttagtaagaaattaagttctgcctccatcttgttcttgtctttctttttctttatacccttactattcttttcactgtctgatcctacatatatcgtttcaatatctttttcttggtttgagatagatgattcaagatttccgtgatcagggtattctgcttttgcccgatttcgagt

SEQ ID NO: 209941 - DNA, 539 bp, Glycine max
  unsure (1)..(539): unsure at all n locations
aaaggagcgagatagcgaggaaatttggttcttacttcttacccgcagacagaggaaggaagggaaatagatggaagctgtgtgtggaagtggaagcagtgtttgggtcacatcctcccttacacgctcacccaagatcacactccctctattccacgccagttaccagcacctaacagcatttccttcacaatcccttcttttctcctatcacccttctcgctatgctaatgctagaaccctccgcgccagaacctcctccaaacccattttccttccccacttaattgcttctctggaacaagttgaccagacttacattatggtgaagcccgacggcgtccaacgtggcctcgtgggagaaattatttctaggtttgagaagaaggggtttaagttaactggcttgaagctcttccagtgctcaaaggaattggccgaggagcattacaaggacctaaaacaaaagtcatttttccctaagctgattgactatattacttcangtccttgtgtgtgtatggcttgggagggtgtgg

SEQ ID NO: 209942 - DNA, 583 bp, Glycine max
aaaaaaaaaaacaaaacatcgcatgacccattcaaatctgatagaaacagaaaatgtaatgccaggaataggcttggagaatccgagtcaaaaagcaaaattttacaaaatttgagttactgtttaaactcgattaatgcagttattgaacctagaaacggcaagaatcattctaattgggcatctgtggtttattattctctcagccatggtgattggactggggtccaatcgcatacttcgccttccttgaaccatagagctatttcacgcttgccattctcagggctgtcactgccatgaacaacattccttcctgtttgaacagcaaggtctcctcttattgtgcctggttcagcttgaagaggatctgtagcccctataagcttgcgtgccgatgccactactccaacaccctcccaagccatacacacaacaggacctgaagtaatatagtcaatcagcttatggaaaaatgactcttgttttaagtcctttgtatgcttctcggccaattcctttgagcactggaagagcttcaagccagttacttaaaccccttttctcaaacctagaaatattt

SEQ ID NO: 209943 - DNA, 337 bp, Glycine max
gggtcaaccgtgacgccacaatcgctcttgcgcgtttcaatcgccttcgacttctttgcaacgggatcaggtgctcgtccttcacgatggcgggaactgaagcaaaaaaaactgaatccaaaaaacctgccgctaagcaatccggtgggaagaagaaggaggtgaagaaggagactggcttaggtctcacgcatcggaaggcggagaacttcggagagtggtattccgaggttgttgttaatgccgaaatgattgaatactatgatatttccggttgctatattctgaggccttggtcaatggcaatatgggagatcatgcaagagtttttcgatcc

SEQ ID NO: 209944 - DNA, 339 bp, Glycine max
ctggatcgaaaaactcttgcatgagctcccatattgccattgaccaaggcctcagaatatagcaaccggaaatatcatagtattcaatcatttcggcattaacaacaacctcggaataccactctccgaagttctccgccttccgatgcgtgagacctaagccagtctccttcttcacctccttcttcttcccaccggattgcttagcggcaggttttttggattcagttttttttgcttcagttcccgccatcgtgaaggacgagcacctgatcccgttgcaaagaagtcgaaggcgattgaaacgcgcaagagcgattgtggcgtcacggttgaccc

SEQ ID NO: 209945 - DNA, 372 bp, Glycine max
gggtcaaccgtgacgccacaatcgctcttgcgcgtatcaatcgccttcgacttctttgcaacgggatcaggtgctcgtccttcacgatggcgggaactgaagcaaaaaaaactgaatccaaaaaacctgccgctaagcaatccggtgggaagaagaaggaggtgaagaaggagactggcttaggtctcacgcatcggaaggcggagaacttcggagagtggtattccgaggttgctgataatgccgaaatgatcgaatactatgatattgccgggtgctatattctgaggccttggccaatggcaatatgggagatcatgcaagagcctttcgatccagaaacagccttcatggcttgatgatctccaaaaa

SEQ ID NO: 209946 - DNA, 339 bp, Glycine max
ctggatcgaaaaacttttgcatgagcttgcatattgtcattgaccaaggcctaataatataacaaccggaaatatgataatattcaatcatttgggtattaacaacaacctaggaataccactctgcgaagttatccgccttccgatgcgtgagacctaaggcagggtcctttttcacctgcttgttcttaccaccggattgcttaccgggaggtcttttggattcagttttttttgcttcaaatcccgccatagtgaaggacgagcacctgatcccgttgtaaaaaagtcaaaggcgattgaaactcgcaagagctattgtggcctaaccgttgaccc

SEQ ID NO: 209947 - DNA, 538 bp, Glycine max
  unsure (1)..(538): unsure at all n locations
ctctcaaccctttatccatctagaggtgcagcggctctcttctctgcacactccgaatgcagtccacactcttcaaccccacccattcccttatccacacttcaccacactctatcagacccaatcctggtcatgctgctctctccgatcgcgccttcatcgccgtggaaacccccacggagactgtgaatctgcacaaggactgttaccgcatcaccgagcccaaattgtatggcgcctcccaagccgtgctctacggcgactgtctctccgcggacgacatggccaaaccccacgccgacgcctgctcagcctggtacgagggcatcacctgcaacatgcaccttcttcacctctccgaggccgttcgcgacagcgctgctgctgctgacatggacaccttccgcttcacaccgttggcgtcaacgacgccatctacatgagcacccgtggcatgtgctacagccttcagtccagtgacctcattgcctacaggatcgataccganatggcataacactggtaccatggcaatatt

SEQ ID NO: 209948 - DNA, 457 bp, Glycine max
cacacatggcaatgaagaagcccttgtgggttgatccgtccctatgttcggtccttggactggccattagctttgattctcacgacaaggatttggagtccgaggaaagcctgtgggacttgtacgagagatggaggagtcaccagacggttccgcgaatccttggtgacaagctcaagcggctgaacgtgttcaacgcgaatgtgatgcatgttcataacaccaactcaatggataagccttacaagctgaaactaagcaagtttgctgacatgaccaaccatgaattcaggagtacctatgctggctcacaggttaatcaccatagactgttcatagacatgccacgtgggaacgggaccttcatgtctgctacggttagcagtgttcctgctacagcggattgtatgaagacaggtgctgtaactgatgtagcagatcaggccattgtggtagt

SEQ ID NO: 209949 - DNA, 481 bp, Glycine max
gtaataagcatatatatattgatggatacactggcattggatcggagatactaatagaaaacaccaaccaaagctaattagagtatgattttgtgggaagcattcaaacttcaaagttcatctttaggagatgatgaaggtcctgacggattattggaggagtttttgattgggtaggaagccaacatagctatgccacaaagaccctcctttttagatatgttcctttgcattctgatgtaaccctgttctccccattctggtccccaagagttcctcactatccagtaactagtcccatcaacagttgctacataccccacaatcgccacaccatgatttagctccgtgctacaatcaccagtaaatactgcctcggagtataactggaaatcagataccccggcatcaatggcttcagaaacaggttggttggcgacagctttgagcaatgcattttcatggttaccaggtacattct

SEQ ID NO: 209950 - DNA, 356 bp, Glycine max
gttctattttgtgaatgtaaccatagtggatagagccgctattctgcacattccatggacaggaccttattgttgattctgaataggagctgaattatggaaagcattatgtgtgactcttattcaatggatgggggaaatacacaatggttacaggcatcctttgtgaggaactcacaatgcccaacctcatggacatatatgatatgcccagggatatcgctgcctctgaggtgactgcatagaaagctgtactaagctgggacgatgacagaacgaaccatgagatcgagactacctgctgctgcttcacaggatgatagacgtgacggatcccatgcacgcatctatgaacc

SEQ ID NO: 209951 - DNA, 407 bp, Glycine max
gttattatcttttttttattgatggttacactgtcttttgtatcggagtatactaatattaaaacatcaatccaaagctaactagaggatgattttgtgggaagcatacaaacttcaaagttcatctttaggagatgatgaatgtcctgtcggattattggaggagtttttgattgggttggaagccaacatagctatgccacaaaggccctcctttttagatatgtgcctttgcatcctgatgtaaccctgttctcacgattctggtccccaagagttcctcactatccagtaactagtaccatcaacagctgctgcataccccataatcgccacaccatgatttatcttcgggctacaatcaccatgaaatactacctcggagtataactggaaatcagagaccc

SEQ ID NO: 209952 - DNA, 574 bp, Glycine max
cgaagcctcttaacatcacgcgctcccaccgcgtctcgtgccagtcccctgcatgttccacagcacactcctccgtctcctcccacgacctctgcgcaatcgcacgttgtcctttggacaacattgaaacctccgattgctcttctgccacgtgtcctcccttctactatgcttacggcgacggaagcttcatcgcgcacctccaccgcgatacactctccatgtctcagctttttcttaagaacttcaccttcggctgcgcccacactgcgctcgccgaacccaccggcgtcgcaggtttcggtcggggattactgtccctccctgcgcaacttgcgaccttatctccgaacctcggtaaccgtttctcttattgcttggtctctcactctttcgacaaagaacgagttcgcaaaccgagtccactcattctcggccactacgatgattattccacgagcgtgttgagtttgtttacacctccatgcttcggaatccgaagcattcttatttctactgcgtcggactcaccggaatctctgtagggaagaggactattctggccccggaatgc

SEQ ID NO: 209953 - DNA, 516 bp, Glycine max
caaacaaaataataattattattattatacacaaaataaatatcacaaaattaaaatataaaaaaatctaaccctgtagttcacgttttagttttgacctagtgtcaattacatacacatgatcgtggaattggggaacggagcctgaacccaaacccaaacccgtcaacttattttccatttacaagatccgacccgacccactggcatgggggcagtgatccagtggtaaacagaacacagtaacactagtttttgtcacggttgagactatcccaaagcgacgcgcattgcctcttatcaaaacccacgcgctggttttccaagtcatacacgacctcaaatccttgctgttgatagttcccaagtatggccccgggcccaccgctcagttcagtgtcatcaccaccgttcattagcatcagacagcccaccttcctcctagcctcatcctcaccgtccaagaactcgtaaaaataattcatcctaggcagcatcacattggaattattcccc

SEQ ID NO: 209954 - DNA, 564 bp, Glycine max
gttcaattatagcttctcatggaagccctccgcttcacgcaaaaatgtagtcaagaagaacagcttcatatcaagacagacatcgaatgaaggacaaagtttccttccaaaagaagaggaaatgaaatgggtgttccagaaatttgacaccaacaaagatggcaaggtttctcttgaagagtacaaggctgctgcaagggccttggatagggccattggggaagctgaagcagtgaaagcgtttagggtcatggacactgatgaagacggcttcattgacttcaaagagttcatgaagatgttcaatgaagagggtaggataaaagaaactgagatcaagaatgcttttcaagtgtttgatttgaacggcgatgggaagattagtgctgaggagttgtcccaagttctcaaaaggctaggagagagttgcagccttagtgcctgtaaaaaaatggtcaaaggagtggatgggaatggagatggctctattgacttgaatgagtttacgaggatgatgatgagtgggaagatactatgctaagtattatgactttggaatataaa

SEQ ID NO: 209955 - DNA, 521 bp, Glycine max
aaaaacaaaacatttgccctatagtaatttatatcagaacattgcacccgattactaacaaagcaggacagtcagttaatcaccatacatttaaccaaactatctataaccaatctacttcacaaaaaaagaagagaaactaaatattataagacacaaacttaagaaacactaaacaaggtcggtcctttatattccaaagtcctaatacttagcctagtttcttcccactcatcatcatcctcgtaaactcattcaagtcaataaaaccatctccattcccatccactcctttgaccatttttttacaggcactaaggctgcaactctctcctaaccttttgagaacttgggacaactcctcagcactaatcttcccatcaccgttcaaatcaaacacttgaaaagcattcttgatctcagtttcttttatcctaccctcttcattgaacatcttcatgaactctttgaagtcaatgaagccgtcttcatcagtgtccatgaccctaaacgctttcact

SEQ ID NO: 209956 - DNA, 556 bp, Glycine max
  unsure (1)..(556): unsure at all n locations
cgccatgtctcactacaagtttgttcttgcaattgagaacacttttactgagagctacgtgacagagaagttattctatgccttagactctggtgcagttcctatctattttggtgcaccaaatgtcatggattttgtccctccacattcaataatagatggtagaaaattcaactcattggaagagttggcttcgcacgtgaaggctgtagctaatgatccagtagcctatgcagaataccatgcatggagaaggtgtggtgtacttggtaactatggaaaaactcgagctgtgagccttgacacgttgccatgccgattatgtgaggctgttagcagaaaaggtggaagaaatgcgggaagctaggttgagttttttgctaaatttgtagttctgcatgatagagattgacgcattgaatttaggtttgcaacctgtatagagaatgcttgtttctctgagctaatgtacatttgaccaagaaaggcttagctcatgtgatattntattttttattgccccccttttctggtagacagtggttgatgctatctc

SEQ ID NO: 209957 - DNA, 447 bp, Glycine max
  unsure (1)..(447): unsure at all n locations
gttcactactactccttcactgtacttcaaaatttcacccttccaagtccccaacttgtacagttttactattagactgtacaatctctgttgctcttgctcaatccaatccaatccaagtcccgtctcagtcgaagcaagaaaaccatgtcttcatcggtgaagccgcgtcccatggatagctacaaggtggaaggcgcgcgcgacatgaggaccgaggtggtgttcaacggcgacctgcctcctgcgtcgtcgacgccgacgatgactgtcggcgagagcagcggcgaggaccgccgggtcgagatcaaggccccgaggaagcgcgccgtgacctgggtacaggacgagacgcgctctctcattggccttcggcgagagatggacgcgctgttcaacacctncaagtccaacaggcacctgtgggagcagatctcggcgactatg

SEQ ID NO: 209958 - DNA, 548 bp, Glycine max
aagagtgatgaatatgatccactataaaattagacaatatgtggtcactgcaaatgcatatttacagacatgttaaggccaatgattggaacggaatttgtgcaaagggactagctcctttttctatataaaactatatacagcattatcaaaacttaaaacaaatacaattccaggttagtgccgaacatacatcaaagatctgaacagtccccaccacagttctccagacattctatggtagctgaacattgaccacaccatgtacctgctttcaactcacaccacgatatatggcaccaggtcgaagatcatccatgttgtcaatatgtctgtaggtgtcaaattctcttagacatattcaaccccggcgggtcataatatcacggaaatcgtcttaagtgtgaaatatcttatcttcagtatgcacaggtatatggtcaggctcatcatagagaggtaatttaatggccattccttcatcaatgtgaagagtgtaattcgctaaaggcaatttacggtcaatacttctgattatctgatcttta

SEQ ID NO: 209959 - DNA, 415 bp, Glycine max
gtctctttctgtgtctctatctatcgttttctcaagataatgggcaaatcaccatgcgactcgagtcatgatccataagtgagaaagggaccatggatcatggtcgatgacttgttcttgataaactatcttgctgatcacggtgagtgtgtttggaattctccagccgaagcttgtggtctcaaacgaacatgaaagagctgtcgactccgtttgctaaactacctttgtcctgatgttagatgaggatacattacaccctgagaacagcttttgatcatagaacttcatacatagtggggctatacgtggtccaaaattgcaaaggatcttccatgaagaactgactgtgtgattaagtgcttctggagacctaggatccagaagcccatttagcaagctgagactctacaac

SEQ ID NO: 209960 - DNA, 479 bp, Glycine max
gcgtcattgatgaaggaaacgtacgttctccagttgcgcctggtgtctgtactgggttctgtcaacacagggaggcacagaatccatgatgtggaccatccacgactctgtttctaacctctatagttgcatggcaggaactaggctgagaattaccttttctcctagtatgccattgcttgagtgagggtaaatgctgcatttcataatgcaaggcctgagaacacctgctgtacctggggtgaatgatctgcccatcacgaggaacatgattgattggaggcgatgactatacgagcggacacactgccacgaagtctgggtatgtggaaacacttgagaccgccatgatcaaatcgacatctataggaagtcccaaccggtcgggctgctcagatggcatgaatgtatcagccgctaaaccttgcgctctgaggcattctccacgagctgtgtaggggtctagatgatcgacagga

SEQ ID NO: 209961 - DNA, 492 bp, Glycine max
tgaagaaactacaattctcactgaaagaaagttgctaactcttggcaccagttatcagcttaacatagttgataacaccaaaggcacaacaacattgagggaatgaggcttgtcatatcagctgtatgtgttattgtgctattttcttatgctgctgcgtatgatcctttggatccaaatggaaacataacgatcaaatgggatgttgtgtcatggacaccagatggctatgtagccgtggtaacaatgagcaatttccaaatgtttcggcacatcatgaatcctggatggaccttgggatggacatgggcaaagaaggaagttatatggtccatggtaggagctcaaaccactgaacaaggagactgttctaagttcaaaggcaatgtacctcactgctgcaagaaaactcccatagttgtagacttgctccctggtgtgccttacaaccagcaattctcaaactgttgcaagggtggagtggtggcaaca

SEQ ID NO: 209962 - DNA, 465 bp, Glycine max
gagtattatgatccggtttattttgaatctactggaataatacatcaaattacagctccctatacaccacaacacacacatataacttcagatttatccagtatcatctcgattttcaaattaaccaacactattcagcatctgataagcacttgtgaatcacaacacacacattcatgagtcgggcttggtttttttcaagcaattccgtaagattcttcatacctgatgtacgttgtggtgtgtgtaggaaaacttggcttcaaaatttcacagaaaataattggatctcgcctacatactatttcaccaaacagttatcatgacaagcattgtcaaaacgaatgctgggaagtttaataggttcacaggggcagaattagggaggattgggtagctatcaggtggtggaagcatgcattcctcaccattaaagtagaccttgcgaggaaatgcccacccctg

SEQ ID NO: 209963 - DNA, 524 bp, Glycine max
ctcgctcgccaaacgcccctctctctcctccaatggccgaccagctcaccgacgaccagatcgccgagttcaaggaggccttcagcctcttcgacaaggacggcgatggttgtattactactaaggaacttgggactgtgatgcggtcactatggcaaaacccatctgaggcagaactgcaggatatgattaatgaggttgatgctgatggcaatggaaccatcgacttcccagagttcctcaacctgatggctcgcaagatgaaagacaccgactccgaggaggagcttaaggaggctttccgtgtgttcgacaaggatcagaatggtttcatctctgcagctgagctccgccatgtcatgacaaatcttggggagaagctgaccgatgaggaggttgatgagatgatccgcgaggccgacgtcgatggtgatggacagatcaactatgaggagttcgtcaaagtcatgatggccaagtgaggaccattcatccataacctaaatttgaaagcatataagaga

SEQ ID NO: 209964 - DNA, 533 bp, Glycine max
aaaatattaacagcattagccaaccacatgtaaaaaacacaaatgcatccaattgttctaggttcataataataaccaaaaaataaatatgaaaatggagagtaacaaagcatggtgagacacagctaaccgaagctactaaaaacaaggaacaaagcaaacaagtaggataactagggagcagaagtagtaccagttaaagcaaacaagaaaaacagacactcaactaacaaaagctaataaccccaaatcaagatggacctaatggaaatagaattctcatcaaaacttatctgcactgtccctcttctctttatatgcttttcaaatttaggttatggttgaatggtcctcacttggccatcatgactttgacgaactcctcatagttgatctgtccatcaccatcgacgtcggcctcgcggatcatctcatcaacctcctcatcggtcagcttctccccaagatttgtcatgacatggcggagctcagctgcagagatgaaaccattctgatccttgtcgaacacacgg

SEQ ID NO: 209965 - DNA, 306 bp, Glycine max
attaaaaaacgttggggacagaaacagtaatgccaccaataggccctgagaaattcattcctataacacaatggtactaaatcagagttacttgataaactcgattaatgctgatattgaacctataaacggccagaatcattctaattgggcatctgaggtttatcaaactttcaaccatgatgataggacaggggtccaatcgcatacttttccttccttgaaccataaagctattccacgcttgcaattctcagggctgtcactgccttgaacaacattccttcctgtttgaacaacctggtc

SEQ ID NO: 209966 - DNA, 579 bp, Glycine max
atgagagtttcaatccctctgactcatttttctccgtgactgcaaatggtgttaccctcctctccaatttcagcgccacagccacttgtgaggccctctcacaggcctacattgatagagagtactcccttgcgccattgaattcagaagccttgactctcactttcaagccttctgataaatacaatggcactttcgcttttgtcaacggcattcagctcatcccgatgcccgagctgtttgattccggagaatcggtagggtatgctgaccaaaccacggatgtgaagagcttgaatctgcaaaccatgtttaggcttaacgttggtggacagtacatttctccaatccaagactctggccttacaaggatgtggtatgatgacaggccttacctttatggtggaagcactggtgtcaccaaccaagccgagaagaacgtcttaatcgactaccagaccatgccaaagtacattgctccttctgatgtctactccacatcaagatcaatggcgcctgacatggatgtcaacttgggcttaatctcacttgggtcttccaagtcgatcccaattccat

SEQ ID NO: 209967 - DNA, 498 bp, Glycine max
attgaaataatagtaagagtacttactagcactcccctaaaacataacacaaggacaaacagtttgcaccaaactacgaatgaatagatttataagttacaactcagtatatgccatcttaaaattaattgaaattcataaatattagctgtattagaggaattcagtgatgtgatacttttcagcagcctcattggccttcttcccccgatgttgatctagttgtatactcgattgttgccccggaattaaactctggtaattgtgcactatcatcataatatgcaggttctaaaggtactgggagagtttgagaatggctattaaacacggttacaacgaaagccatggtgggtctggcagctacattttcttgaacacagagtaacccaatgtggatgcatctcactatttcattctgtgaaccattgatcaaggtggcatctacaatatttgcagctgttccttccctccagtttcgccatgcaatacttagta

SEQ ID NO: 209968 - DNA, 350 bp, Glycine max
  unsure (1)..(350): unsure at all n locations
atcctatattctcttcttggatcatcttggttaagctgcagatcagaatagaataataataaataaagataagatggagactcatttggttttcttgcttggtttgatcttcactctagttgccggcgttggagcccaagcccaaagcccatccacctttcctgcgcctcccacaccccaagcatctccacctcccgtccagtcttctccgccacctgttccctcttcacctccaccctctcagtctccaccaccagcttccactccccctccatccccactcagctctcctcctcctttctctcctccaccctcctcccctcctctttttntncaccccccgcctctct

SEQ ID NO: 209969 - DNA, 469 bp, Glycine max
actcgaatgcaacgatcgataaactaatagtaatgtcatacaaaataactgccctcgaatacaaaacctcccctcaaatctcccaagaatgcaagcaatttatatagttcaaatacagtaataaactcccacgatcacatccacaaaataatatataaaggtaaggtatagggtaaatagcaaaataacatgaattggcagaaaaatctgcgagtccgaagacagagatcgatgtctagaacaacatggacagcaaagcacatccgaatactaagctcccaatcatcttctgaaaggaccacaagttttgagccccactgtcatcgccggagggagagatggtggagaggctgggaccgggagcaagggaaggagagagtgcaggagcaaacaccttggaaggagacggagctggagaagagacaggtggagaagaagaggtgtaactgttggggtcaatgagggtggt

SEQ ID NO: 209970 - DNA, 459 bp, Glycine max
ccatgtctctgtggagcaccgtatctgctgattgatgatgctgaggacctgcaacctcttgttggagataaccatcccgcttcgggcgaagctctctgataccatcatgatgctcgtaggcccgatgcagaacagcgttatgggtagaccacgacctactgcagctgaggacagcatcactcaacaggatgcctgcacgcactgatgatgcccactccattcggggtgtgcgtaccatgcagcatctgctacatctcggcgtaggcatccactgcttcgatacgacacttactgggcagagcacagccttcaatgatgaacgcgtcgacaccgtcgatcacaccaggcttgtgatccatgccccactcgatgtccaggccgatccacagcatatcacccaaatcgtataggagactgtcgacgggcccgacctgtgcgactacatctatgctgctgagt

SEQ ID NO: 209971 - DNA, 579 bp, Glycine max
aggaaattgaggagcttgttgagaagatcgttggtgggttgttttgtgtgttggccactcttgcggttgtgccggtgattcggtgcccgcgtggcggtcctgcggagatggtggcttctgcattggatcagcggattagggatcatttgttgtccaagaataacttgtttactgagggtgggaactttgtgagctcgtttcagcgtcctgtgttgtgtatttttgaccggaatttcgagttgccggtggcgattcagcatgattttcgctaccggccgcttgttcatgatgtgcttgggttgaggctgaataggctgagtgtgcagggggagaagggtgggatgaggtcttatgagttggacagtgctgattcgttttgggttgcaaatgggtcgctggagtttccggaggttgcggtggagattgagacgcagttgaataagtataagaaggatgtggatgaggtgaacaagaggactggcgggactcatggcgcggagtttgatgggacggatttgattgggacacgaagcatttgatgaatgctgtgaattctctgcctgagttgactgagaagga

SEQ ID NO: 209972 - DNA, 552 bp, Glycine max
atctccaattacagactatctttaattaatacaaaatgattttcaataaccaaaacatctcacttacagagtgaaaataaagcataaatggcaaatcatgcttttcaaaaaacttttcactacaatgaagataaagcatagaccactgtgctaccagaaactaccaagaagcaaccccctaactttataatcaagaaggcagtgaaggtttatattccttcattgtttttttctagacgatgaacatcaaacacagatttgactttgcctgtgttatctcgatgtcagagagattttctttgcacactaaagaataatttggcaaactgaaatgtgaattacattcacctctgaactactgagctggggtagaactagaaccaacattacccaaacccatcttctgccccaacaatgttagctgctctacaaagtcaactccagttagcatttctgttgctccatatataatatgtttggcaggttgctgatgttgtgcaagctcttgcagactgcaatattcaacgtaattaccaccaccaatcatgaaca

SEQ ID NO: 209973 - DNA, 557 bp, Glycine max
  unsure (1)..(557): unsure at all n locations
cattaatttaccttcatctttctctcagcttcaccttcaccttcaccttccgaattgtatcaaacctcaaaaaatggatcatcaaaacaaacacgtagcagtctttgctttcccctttggcagccaccttatgcctctcttaaaccttgtcctcaaactagctcattcccttccaaactgttcattctctttcattggcacacacaaatccaatgcaatccttttcccaaaaccccacatcccaaataacatcaaggcctatagcataagtgatggaatcccagagggtcacgtcctaggcaaaaacccaactgaaaaattgaatctttttctccaaactggtcctgagaaccttcacaaaggtatagaattagcggaagcagagacaaagaagagagtcacatgcatcattgcagatgctttagtaacctcttctctcctagtggctcagaccctcaatgttccttggattgcactttggcttcccaattcatgctcactctctctctatttctacactgactngattcgccagcactgtgcaagccgtgctggga

SEQ ID NO: 209974 - DNA, 503 bp, Glycine max
aaacttgataaattagatatttgtttgcttataatatttctttgctcgatacaaatcgccgacttattttaggatcttgtcggggaactaattcacaaacaaaacaaaaagcataaagttaactacaaacacaactaacccgagaatctattcaagttatacatcattttaatagttttgaaataaaataacccatgcaaacaaagaagtgctattaagatctagaaattacttccaccagagtgttgaaatcttgtgttgcttgcccttcaggcctacctgcatcttccacagtcttcttcaccctaagagcattgtctctaatcttcttcccttcttcatgcaccagaatcaaattcaagctctttaccaatccatttttggcgaacatcttaccttctatcatcatcccaatcttccaaacatcttctatcactcttgcagccaccccttgatctccaaagaatgggctgcagatcataggaacaccacttgaaacactt

SEQ ID NO: 209975 - DNA, 599 bp, Glycine max
  unsure (1)..(599): unsure at all n locations
ggaatacccgattgatccatcgctgcctgatataaagaacagtatatatgcgactgatgagtttcggatgttttcgttcaaggtgagaccttgttcccgggcatactctcatgattggactgagtgtccttttgttcatcccggagagaatgctcggaggagagaccccaggaagttccattacagctgtgtgccgtgccctgattttagaaaaggggcttgcaggcgtggagacatgtgtgaatatgctcatggggtgtttgagtgctggctgcacccggctcagtatcggacacgcctctgcaaagatggcaccagttgcaatcgaagggtgtgtttttttgctcacactgcagaggagcttcgtccgctgtatgtgtccactggatctgctgccccttcgccccgttcatctgcttcaggtcctaatgtcatggacatggctgctgccatgagcctttntcaggatcgccttcatcgggctcttccatgtcgccgtcccactttgggcagccaatgtccccatctgcaaatggcatgccactgtcttctgcttgggctcagccanatgtgccggctcttcattaccaggaagcaat

SEQ ID NO: 209976 - DNA, 598 bp, Glycine max
  unsure (1)..(598): unsure at all n locations
ctttatcctacgccctcctccctacttatcctgcgcatatttcgccgttttctcgccgagatcttgaactatctcctccgtgttctcactttctcaactacacaatattcttattgaattccagcggaaagaatcatgagttgcttcggctgttgtgaggaagatgactaccagaagactgctgaaagtggaggacagcatgtggtaaaaaactcaacaggaaatgatggaaacagtcgtgcatccgaaactgcaaagcaggggactcaagctgttaaaattcagcccattgaagttcctgaattacaagtggatgaactcaaagaaatcaccgatggctttggagaaagttctttgattggagagggatcctatggaagagtatattatggcgttcttaaaagtgggcaggctgcggcaatcaagaaattagatgccagtcaacagcctgatgacgaatttttagcccaggtttcaatggtttcacggctgaagcatgancattatgttcaattgcttggctattgcattgatggatactcccgagttctggcttatgagtttgcatctcatgggtctcttcatgatattttacatg

SEQ ID NO: 209977 - DNA, 495 bp, Glycine max
gcaatgtaaacaatgggatatataaacatgttcaagcaaatttccatccgcttctgaagcagtcactttcttatatctcacgtgcacacttatgcacatactcattgatacagatataaatatagacaaagattagtttggagtttcaccagcaggcccatgtcttgcattcaataaaggttgaagagctttgactacaatgctcatgtttggtctgaaatcagcttcatattgcacgcacagggcagcaacagcggccatcttagcaacagctttgggtgggtattctcctcctagtcttgcatctacacactgtctgactttatcctcactgagtcttggtgtagcccaagtaaccaggctctgctgcccacgtggtagtgtatgatcaacaggcttccttccagtcaaaagttccagaaggacaacaccaaagctgtatacatcactcttggcattcaattggccagtcattgcatattctggtgcatgata

SEQ ID NO: 209978 - DNA, 454 bp, Glycine max
ctttatcctacgcgctcctccctacttatcctgcgcatatttcgccgtcttctcgccgagatcttgaactatctcctccgtgtcctcactttctcaactacacaatattcttattgcattccatcggaaagaatcatgagttgcttccgctgtcgagaggaagatgactaccagaggactgctgcaagcggaggacagcatgtggtaaaaaactaaacaggatatgatggaaacagtcgtgcatccgaaactgcaaagcaggggactcaagctgttaaaagttcagcccattgaagttcctgaattacaagtggatgaactctgagaaatcaccgatggctctggagaatgtactatgataggagaaggatcctatggaagagtatagtatggcgctcttaacagtggacaggcagcggcattcacgaaactagatgccagtaaacagcctgat

SEQ ID NO: 209979 - DNA, 475 bp, Glycine max
gtaatgtaaacactgggatatataaacatgttcaagcaaatttggatccgattctgaagcagtcactttcttatatgttacgtgcacacttatgcacatactcattgatacagatataaatatagacaaagatcaatatggagtttgaccagcaggcccatgtcttgcattcaataaaggttgaagagctcagactacaatgctcatgtttggtctgaaatcagcttcatattgcacgcacagggcaacaacagcggccatcttatcaacagctttgggtggatattctcctgctagtcttgcatctacgcactgtctgactctatcctcactgagtcttggagtagcccaagtaaccaagctgtgctgcccacgtggaaatgtatgatcaacaggcttccttacaggcaaaagctccagaaggacaacaccaaagctgtatacatcactcttggcattcaattggccagtcatt

SEQ ID NO: 209980 - DNA, 440 bp, Glycine max
ctttatcctacgcgctcctccctacttatcctgcgcatattcagtcgtcttctcgccgagatcttgaactatcacctccgtgtcctcactttctcaagtacacaatactcttattgcattccatcggaaagagtcatgagttgctgccgctgtcgagaggaagatgactaccagaggactgctgcaagcggaggacagcatgtggtgaaaaactaaacaggatatgatggaaacagtcgtgcatccgaaactgcaaagccggggactcaagctggataaagttcatcccattgaagttcctgaattacaggtggatgaactctgagaaatcaccgatggctctggataaagtactatgataggagagggatcctatggactagtatattatggcgatcttaactgtggacaggctgcggcaatcacgaaattagatgcca

SEQ ID NO: 209981 - DNA, 334 bp, Glycine max
ccttgactctggcggtcatcgttacttatcctggacgaagcagatgaccttgaacatcttgacctgaactaccaactctgttgcatagcagctctaagaaaacatcaatatcatcgccggccatagacagcacaggttagtagtagacgctgtccaacgtgcggtaacgttcagcggactgcaacttgaggactaccgcacaggagatgcctacagcatacggagtgtgattaccatgtgagctatcactacatcaaagtataggcacgcacaacttagatatgaacccgactggccagaatatactcgtaaatgatgatcgctgagacaccgt

SEQ ID NO: 209982 - DNA, 513 bp, Glycine max
  unsure (1)..(513): unsure at all n locations
gggttttagggcattttttcgcaaccagaaaacccccaattctctttccaaggcttcgtcaattctccttccaaagcttccaaatgcttcgctccaatggctttaggctccttcgatcgctgcccgaaaaactcctccgccacgccaacgaacccatatatgatggagtgtgccaaaggggttataggacattgagttctggtctttgtaatccatccagagttattgggaatttttctccaaatgttggaaatggtgttaatttgaagaacttgttgctttttggagccgcggatacatattgggggacatctagatccgttcatgggtcagcatcattggcaagggactattacgaagtgcttggtgtgagtaagaatgctagttcttctgaaataaagaaagcatactatgggcttgcaaagaagctccatccagacacaaacaaagatgatcctaagggctgaaagaagtttcaagaagtttcaatggcatatganggtttgaaggatg

SEQ ID NO: 209983 - DNA, 467 bp, Glycine max
ggcatcattggcatgcaacacgtttattgttagcagcacgttaagatcagttgttactcgtgcggaaccacctaaacctggtcctcttttcgatcttagttcattcaatcgccacagctttccggcaggcttcactttcggggcatcatcttccgcgtaccagtttgaaggtgcggcaaaagaatatggtagaggaccaagtatatgggatactttcatcaatcaacatccaggtaagatagcagatggaacgaatggagatcgcgcacttgaccaatatcaccgctacaaggaagacgttcagatcatgaaaggtatgaatttggatgcatataggttctctatctcttggtcaagaatcctcccaaatggaaaacttagtggaggtataaatcgagaaggaataaattattacaacaatctcatccatgaattgcagactaaaggtttaaaaccttttgtgaccc

SEQ ID NO: 209984 - DNA, 374 bp, Glycine max
ggggaaaaatcccaacctttaataattcataggtaaatttattaccttggtaaaagttaccccattcaaagcagtccattttggaaaaatttccggaacccttttgcagaaagttttggaaatcgggtcaaattatttttgggatccccaaaaatcaatcccaatcgggggttataacccttactccattcaaaggagtccagccgggacccgacaaaaaatccctttacttttacgccatcccttattggataatcaacattcaattgatgaccattatggtaatcaattctggaaaaacccctaagagattccccaggggatagtggtggaacctctaaatcatttattccacttttcgggttttaaaacca

SEQ ID NO: 209985 - DNA, 512 bp, Glycine max
cgttcgagcagctggggcaacacctgaggtgagggatggcatgcgctttattgaagtagacctggtagaaccagaaaagcaagttgttgcattagcagatgcatatttcttccctcctttccaaccatcactgctccctaggacaaaaggtggacctgtgattccaactaaacttcctccaaggaaagcaagactagttgtttacaataaaaagtcgaatgagacaagcacatggattgttgaacttagagaagttcatgcaacaactcgaggtggacaccataggggcaaagtgatttcatctacagttgttcctgatgttcagcctccaatggatgctgtggagtatgctgagtgtgaagctgttgtaaaggactttcctccctttcgtgaagcaatgaagaagagagggattgaggatatggatctcgtgatggtagatccctggtgtgctggatatcacagtgaagctgatgctcctagccggagatcttgctaaccactaatctttt

SEQ ID NO: 209986 - DNA, 478 bp, Glycine max
aagttaccaagcattaccatgcaacaaacgtacatacaagttatacagtacaaattacagtaataggcgtttcttaaatatccagccaggttgaaaccagcacaaacagttgtattgaatattttatttaataatttgaacataaccacgtagagaggcagatcctcctcattttttatcctttcaaagcttggcaattagcccattctgaataggcttggctggcaggccattctctttgtcatccaaatcactttggtttggtggaacatcaacagcaggcgagcaattgaaaaacccatgcggcataagcatgaaaccaatgcgttccacgggcataacaggccagtcttccaatctaggaatgtgtgtcactccaaatacgtaccaaagaactatatcagcttcctccagtgatcgattttgcttaacccaagtagccaaaccctcttcaacacgtggattttgattagggaac

SEQ ID NO: 209987 - DNA, 573 bp, Glycine max
ctcgagccgaatcggctcgagggcggctttggtgccgagtgattcccacgcgccgcatgcaaatcggaagctgaagattggcgtggttctgtccggtggccaggctcccggcggtcacaatgttatttctggaatcttcgattacctgcaagaccttgcagaaggaagcacattgtatggtttcaggggtggtccagctggcatcatgaagtgcaaatacgttgaacttacctcagactatatttatccttacagaaatcagggctggttttgacatgattcgcagtgggagggacaagattgaaactccagagcagtttaaacaagctgaagaaacagtgcagaagctaaacttggacggccttgttgttattggtggagatgactcaaacacaaatgcatgcctccttgctgagcatttcaggagtaaaaatatgaaactcgtgtgactgggtgccctaaaccattgatggtgatttgaaatgcaagaagttccacaagtttgggtttgatcagcatgcagatatatgcagaatgattggcatgttatgatagatgctcgataactggaaa

SEQ ID NO: 209988 - DNA, 552 bp, Glycine max
gaaacaggaccatttggttttccatatcttatgcaaacacaatccaccttaaaattttctcactcaggtactcatgtctcaacctcctatttacatcactattaccgtacctaaatgacgagacgattaaacattgaactaaaagatcatggaacgacatattcccaaaacataaatataagtcgatgatgttgataaagcataaactattctctagcaaagttccaaagtgaaaaacacaatcacttgactaatctccggtctattatatttgtagtagttcccaaaaaacatgaattgccaccatcaaaaaggcttcagaatgtcttaagcttgtgcaccaagctccaagagtaaagtgtgattaattgcatcagatcctgggccagtgaattgaattggacctggactaatgtagcaattttagggcccactcatccctcaaggaggcaaactttttgaagggtgccccttcaagctccaccattgccttcttgatcacaggcttgaatttaccatgtctcctcttcacgtccatcaatgaagtgagtg

SEQ ID NO: 209989 - DNA, 576 bp, Glycine max
  unsure (1)..(576): unsure at all n locations
ctgagatggcaaagaatgtggggattctcgctatcgacatctacttccctcccacctgtattcagcaggaattgctggaggctcatgatggtgccagtaaagggaaatatactattggacttggtcaagattgcatggcgttttgtacagaagtagaagatgtcatctcgatgagtttgacagtagtttcttcccttcttgaaaagtatgcgattgatcctaaacaaattggtcgtctggaagtaggcagtgagactgtgattgacaaaagcaaatccatcaaaactttcatcatgcaaatctttgagaaatatggaaataccgatattgagggcgttgattcaactaatgcatgctatggaggaactgctgctttgttcaattgtgtcaattgggtggagagcagctcatgggatggacgctatggacttgttgtctgcactgacagtgctgtctatgctgaaggacctgctcggcctactggtggagccgctgctgttgccatgctaattggtcctgatgctcccatttcttttgaaagcaaattgangggaagtcatatggctcatgcctatg

SEQ ID NO: 209990 - DNA, 540 bp, Glycine max
ctttatcctacgccctcctccctacttatcctgcgcatatttcgccgttttctcgccgagatcttgaactatctcctccgtgatctcactttctcaactacacaatattcttattgaattccagcggaaagaatcatgagttgcttcggctgttgtgaggaagatgactaccagaagactgctgatagtggacgacagcatgtggtaaaaaactcaacaggaaatgatggaaacagtcgtgcatccgaaactgcaaagcaggggactcaagctgttaaaattcagcccattgaagctcctgaattacacgcggatgaactcagagaaatcaccgatggctttggagaaagttctttgattggagagggatcctatggaagagtatattatggtgttcttaaaagtgggcaagctgcggcaatcaagaaattagatgccagtcaacagcctgatgacgaatttttagcccaggtttcaatggcttcacggctgaagcatgacaattaggttcaattgcttggatattgcattgatggaaac

SEQ ID NO: 209991 - DNA, 544 bp, Glycine max
  unsure (1)..(544): unsure at all n locations
cggagtggaatcccgagaaggacttgctcgccatggtgactgacgattctaagatcttgctccatcgtttcaattggcaacgcttgtggaccattactccaggaagatgcataacatctttgtgttggcgtcctgatggaaaagcaattgctgttgggcttgatgacgggacattgtcactgcatgatgttgagaatggaaagctattaagaagcttaaaatcacattgcgctgccattatatgtctcaactgggaggaggagagtcagctaattacagatgactttggtcacacttccaaatatgaagatagaacctctcgtttctttcctcctgctccaagagttcctcggatgcctggattggtatctggggataatggcttcatggatgatagcgaagattcatttcaggagctgtcaaattcttctcaccaacgattcaacatcctatgcagtgcagataaagatggaaacatttgttttagtatatttggcatcttccctatagggaaagtntacatacacaaccttacttttcctac

SEQ ID NO: 209992 - DNA, 523 bp, Glycine max
  unsure (1)..(523): unsure at all n locations
acctcaaacaattagcaaattattattaatgggtactaaactccagtactttcggtcttttactctgtttgatcttttttacttttttgggcttaactgattacttctatcttaggaaaaataattaaattaattacgtgttcaagtgaacactaataagggatatggacattctacaacaatgtgtttcaaggaccattatgaaaatggcaaatgattacaacccctcaaccacagccaaaacaaaagcaaaaaatgaaaaataaattaaatagcaaactattctacatccgagacctcatcttcatcttcctccaaaatgtagactagagcacgctttgttgcagcaaatacacaagccacgcctcttgatgcactaactgccaagggagcaattacagaatgacgaatggtgcgagatttctcatccccaatattcaggtaagcgacagaatcctttagttctggtaacctncaaacatctatacaagcagatcttgacatagagacatatggcagatca

SEQ ID NO: 209993 - DNA, 262 bp, Glycine max
ttttgttttttttttgcttctagaactttcatactacagtattaaaaaaggctgctgggggcggcatggctctgtatgccccatccaagcctggaaaagccgtgaagctgggcccatcagccgcccaaacctgtatggtgaccatgaggaagaccgaaaccaagcaggcctccttcggtagcgcttagttctttcaataccgcgtcaagcactctggcccattctctggcgtgcccccaggctacctcactggcgagtctcc

SEQ ID NO: 209994 - DNA, 372 bp, Glycine max
  unsure (1)..(372): unsure at all n locations
tgccatagatgcgnatagatncttacgaaataagtcctcggaagcacccgctcactagccggggatcgcgcttgagttggatgattgttccttttattttgacgacccggagggatgggatgtcctggggggcccggattcacctcttgcttttggtcaatccaaaaccaagtttcaaatggaacccaacaccggagcgacattttatgatgatgctggggtggatgaagccaagccagactttatggaggttgtggagtttctaatcaatcctgcaaggctcactaccggataaagctcgcataccgagaggacatgtcctagcagttactccaagaactgtaaagacactgccagccaacgctattgatg

SEQ ID NO: 209995 - DNA, 465 bp, Glycine max
gtttttgttgctgagtgtgcgttaaactgtgtaagagagttatagcagcaggtggaggagctcctgcacctacgatcgatgatccacaaccttatcctccgacggatcagttaccgaatgcttcttactgcattacgagtcctcctccatggcctgacgccatacttattggttctcaacattatctggtgatgctcggaacaactgtgcttattcccactgctcttgttccccagatgggatgtgtcaatgaggagaaggcacaagttatacagactctactttttgtaactggaatgaacacattgctgcgaactctgcttggaactcgattgcctgcagtaattggagggtcttatacttacgttgctacaacaatatctattattcattatggtcgattcagtgctgagccagatcctatagagcatttccagaggataatgcggtcaagccaaagtgctc

SEQ ID NO: 209996 - DNA, 509 bp, Glycine max
gctgggtggactgaaatcggtggagaacgcgcacgatgattcggtgtgggcggtcacctgggtacccgcaaccgccaaccgaccaccgctcctcctaaccggttccctcgacgagaccgtcaggctctggcgctccgacgacctcgttttggaccgcaccaacaccggccactgcctcggcgtcgcctccgtcgccgcccaccccctcggctctgtcgccgcctcctcctccctcgacagcttcatccgcgtcttcgatgtcgattccaacgccaccatcgccaccctcgaggctcctccctctgaagtttggcaaatgcgcttcgatcccaagggtgccattctagcagttgctggcggaggtagtgcatctgtcaagctttgggacacttcctcatgggaacttgttgccactctgtcaattcctcgtccagaaggacagaagcccacagacaaaagtggcagcaagaaatttgtgctatcagttgcatggagtcctgatgggaaac

SEQ ID NO: 209997 - DNA, 524 bp, Glycine max
acagcatgtacatccatgcattttcttcaattcaaaatcaatttgtagacaaaagagtaaataacattccacaaagagtacaaatacagcacacaatatctaaatcaggaataatcatacagtgatatgctcttgtcatctgatacactggcaagtcgaccacctcgcacatcactccctccaggtggtctaaatgcgactccccatacctggtctgaatgattgctcattgtctgcacagatgccctcatgttaagatcccatagccttacagatctatcacttgaacctgtagcaatggctgccccatctgggctcacgtccacacacagtacccaactagcatgacctgacatggtcccaattaaagcttttccctcagcatcatacatgttggacgtttccatcatccgaagctgtaaacagcagccttggatcataaggagaataaacaagagatcgcccaggcatgaagtgaccttccaggtgatgcaaaaatttggcgcggggcacatcaaaaactg

SEQ ID NO: 209998 - DNA, 487 bp, Glycine max
agagtaaccaaaaggagagtgcaataactcgttgtacattcctagtgtgtgggagagacatggctaagatgtgtgttttggtgttggttcttgctctggctgtggccacaagtgccagaaacgttcccaaccccaaggatgctggtcttaaggaccagaagaacttcatcagctatggtggagttggtggttattccgggattgggaacaatggactgccttttggaggagctggtgccggaataggtggtggttttggcggaggtggtggacttggtggtggcctcggcggtcctaccggtgggatcggagggtttggcggtaccggtagcggtgtcggtggcggtattggtggcggcgttggaactggcgttggtggtggcagcggtgttcttcctttcccttgaaatgatgaacatgcatgcatgcatgcatatatgctccgtcacgtttctttgattacactagtctttatttttcggtcggg

SEQ ID NO: 209999 - DNA, 435 bp, Glycine max
cttagctgaaccctcacctcaatcttgcgtgctagctagctttattccaattcctacagaaccaaattattctgctagctagctagtacgtcaaataaaataaaataatcaaatatggcattcagcgggacccaacagaaatgcaaggcttgcgacaaaactgttcactttgtcgaaggtttatctgccgatggagctgcttatcacaagaactgcttcagatgcagccattgcaatggccttcttgcgataagcaattactcatccaccgaaggagttttgtactgcaaggtgcactttgagcagcttttcaaggaaactggaacctaccccaagaaatcccagtcgtctggaaagcctccactcgagctgaatagagcaccaagcaagctttctgccttcttctctgggactcaagagaaatgttcaaaatgc

SEQ ID NO: 210000 - DNA, 358 bp, Glycine max
gagtacttgttttgggatgcttttcatcctactgaagctggcaatgttgttgtggctcagagagcttacagtgctcaatctgcatcagatgcttaccctgttgatatccaacgcttagctcagatatgatctctgaacaatcaacatgttctagtgggtagtggctattaagctctgccacaaccatatttaatgttcttcgaatgtgctactccttttaaggcataagagtcttaagttttctctctttctcttacatattcatatatgctaaatgttcatgggttcacaagtacaggtgtaatttgtggtaaagttttggaagattgcttatttaattatagtgaataatagtatg

SEQ ID NO: 210001 - DNA, 535 bp, Glycine max
gtgcattgaattggtgctgcatttactcaacgaattgaacaaggtggcatgatgcgatgagttggtgttctatgagggtattctcagtgtaacactctgaatttgaagcaaaatgttcagtccaagcatggattctgcaagggatgcgagtggtgtggcagggaccgtgctcattcccatgcggtttgtgtggccatacggaggaagaagtgtgtatctaagtggttctttcacacggtggtctgaacttctacaaatgtcgccagtggaaggttgcccaactgtgtttcaagttattcatagcttgatccctggtcatcatcagtacaagttttttgttgatggagaatggcggcatgatgaccatcaaccttgtgtatctggagaatatgggatagttaacactgttttattggctactgatcctaatattgtacctgttttaactccagaaatagtttctggatctaacatggatgtggacaatgaggcttttcgatgcatggtcccgatgacagacagtacattaaataat

SEQ ID NO: 210002 - DNA, 470 bp, Glycine max
ttgtgtttatttttttcttcctttttctctttttataatatcagcccccaaactcccttgtgtacagtgatcgatctcaagaagaaagactcaaaaaatggaggggaatctagagaagaagttgctgagcaaagaggaagtgtcagaagaagataatttatcattggtgaagagggtgtgggaagagagcaaagagatgtggatagtggcagcaccagccatattcacaaggtttacgacctttggcatcaatgttataagccaagcttttattggtcatattggttcaagagaactcgctgcctatgctcttgtattcactgtcatcatacgtttcgcaatggtattctgttaggaatgtcaagtgcgttatcaacactttgtggacaagcatacggtgcaaaagaatatgacatgatgggagtgtatcttcaaagatcatcgataggttttgttcttaactgcactct

SEQ ID NO: 210003 - DNA, 577 bp, Glycine max
  unsure (1)..(577): unsure at all n locations
agcaactacttatataattttattaatttaagaaatatttgagagagaatatactgataggatggtactatagtataataactatcaagcaatcccctgaatgtataacgtacaatagccaaacaaacaatgatgatattgataaataggagtctgaaactaattatctgatgtacttgtttcaggaacaagtccaccttataccacttactaatacgattacgggctatagttacctgctcatcccaattagttttgtaggtgattatagttaggactatagtttgaactagtgtcccaaacaacattccaatccaaatacccttgacttccaagtgaataatgttaccaagtactattccaactggaatacctatgaggtaataacaccctatgttcacatacgctacagtgctctgccaccctgctccaacagccacccctgttgaaatcatacaatttcatgactctcagactccccaattgacaaattaattntggctttatcatgcataaacaattgggttcaaatcttaaacatattcattaaaccaagacaccaaaagtatatagcata

SEQ ID NO: 210004 - DNA, 377 bp, Glycine max
caaacatggcaatgaagaagttcttgtgggttgttctgtccctttctttggtccttggagtggccaatagctttgattttcacgacaaggatttggagtccgaggaaagcctgtgggacttgtacgagagatggaggagtcaccacacggtttcgcgaagccttggtgacaagcacaagcggtttaacgtgttcaaagcgaatgtgatgcatgtccataacaccaacaaaatggataagccttacaagctgaaactaaacaagtttgctgacatgaccaaccatgaattcaggagtacctatgctggctcaaaggttaatcaccatagaatgttcagagacatgccacgtgggaacgggacctttatgtatgagaag

SEQ ID NO: 210005 - DNA, 567 bp, Glycine max
gtaataagcataaatatattgatggatacactggcattgaatctgagatactaatagaaaacaacaaccaaagctaattagagtatgattttgtgggaagcattcaaacttcaaagttcatctttaggagatgatgaaggtcctgttggattattggaggagtttttgattgcgtaggaagccaacatagctatgccacatagtccctgctttttagatatgttcctttgcattctgatgtaaccctgttctccccattctggtccccaagagttcctcactatccagtaactagtcccatcaacagttgctccataccccacaatcgccacaccatgatttagctccgtgctacaatcaccagtaaatactccctcggagtagaactggaaatcagatcccccggcatcaatggctacagaaacaggttggttggcaacagctttgagcaatgcattttcatcgttaccaggtacattctcatggccatcaattgatacagctaggtcatttgccttggatgcatcacatgttccatcttgagctgtgtcagggtaatagctttct

SEQ ID NO: 210006 - DNA, 551 bp, Glycine max
gacgcagcaagatctattcaatgccatgggatcgatgtattctgcaatcctcttcattggtataacaaatggcacagctgtccagcctgttgtttccgtggaaagatttgtttcttatagagaaagagctgcagggatgtattcagctttatcatttgcatttgctcaggttgtgattgagttcccttatgtgttcgcacaggctattatatactcttcaatattctattccatggcttcctttgtctggactttcgataggttcatttggtacttattcttcatgtattttacgatgttatattttaccttctatggaatgatgacaacggctgtcacaccaaatcataacgttgctgccatcattgctgctccattttatatgctgtggaaccttttcagtggttttatgattcctcacaaggtatggaaaccgatacttcattggtactcaattgataattttttgtcattgactgcattcatccatttgctcccaatagacaataacttcttgactatcttgatgtcaaaagtgtatcatcgggtat

SEQ ID NO: 210007 - DNA, 594 bp, Glycine max
atattacttattgaatattattcactttcaccaaaatgtgtcattaccaaccagtaatctgatttcatgtctaacagaaaccctataaaccaatagtacgtcactttacaacaatttgtccctgaatttttgtaaaccaaaaataatttggataatgtattcttattagtttacaaaccctaaaagcacactagtgctatgctataatcatatcgctatacagatgtcacgcttatttttatgaggtatcgaagatctaacatacaatttggttacaatgtctctagtggctagcaagtctcatcccatcatctcctttggaaattgaaggatttaattgcaaaggcaaatataattgcaaaaaatatgcagaagccagccaccataacagcagtaacgcacaagaaatcatgcctgtacccaaacacgtgtttgagtacctctcttatagtcatcgagtttccattagagagcttcactaaatgagtttcaccaccatactgtgaagttaggagaccatacagactccaggctacaggtttcgcccagtaataccatcttcaccaaatagggattctctgagaattaaagaag

SEQ ID NO: 210008 - DNA, 524 bp, Glycine max
actcgttatccctctttctttcctcttccaaactcaacttggaattctccaatttccaaacaaagcttttctatcaacatatcgttctcgtaactctgctcaaccactagtccacttcagcgacgcaagacgaataacattacataatcgaatttacattcgacacttaaaacgccgatccgtacatttctctagctgtgtcgttttgactgatcaatgaatggtattccgagacacgagcgccgatgggcgtccgacagcgttccgggaaaagcgaccgtcagcgccggaacttcgccgggaactgagtccaactccgccgcggaggagtttgtggaggtgactctcgatcttcaagacgatgacaccatcgttctccggagcgtcgagccagcctccgtcattaacatcgacgacagcgtcgcaggcagcggaaaccaaactccggcgtcggtttcgaggtctccgacgatccgtcggagctcgtcgagaggattccggcagttctcgcaggagctgaaaag

SEQ ID NO: 210009 - DNA, 517 bp, Glycine max
atcatggtggccgtaacccgcctcgcgaagcgcgcgtcaaccttctcaccccagatgaggaggtgcctgagctcctccgaagtcaaatcccacgcgccgtcgcacgacgccgcgtccttccgcccgtttccgcggcgcgaagatctgagcatgcggtgcgtgcagtgggcgttcctcggctgccccggcgtcggaaaaggaacgtacgctagtcgcctgtccaacctcctcggcgtccctcacatcgccaccggcgatctcgttcgcgacgaactcgcctcctctgaccccctttcttcccaggttctcttcttcttcctcttcactttgaattaactagattaatttttgtaacgcaaatttggtcaaggttattgaaatttctgcgtacggcgcagcgcttagacagaaaaatgggatgataattattattttaaaaaatataaaaagttgtcatctaatcacaaaccgttaccataagttgttcgtacaaatgttctgacacttgatcccttac

SEQ ID NO: 210010 - DNA, 525 bp, Glycine max
  unsure (1)..(525): unsure at all n locations
gtcctgacactgacggcattggctgggtagaggaaccatacatatgcacagccccaataaagtacaagtatgccaactactctaaccgaaactatgcaaagaccgggaaagctattttgaagttccagttgatcaatcaacgtgcagatttctcatttgcactattttcaggtggattatccgatcctagacttgtggcaatttcgaattccatatcatttgcaaatcctaaagcacctgtgtatccgcgccttgctctaggaaaatcttgggatgaaatgacagttacatggacaagtggatatgacataaatgaagctgtgccttttgttgagtggggaccaaagggaggaaagaaaacacgatctcatgctggaacattgacatttaaccgaaacagcatgtgtggtgaacctgcacgaactgttggttggcgtgaccctggttttatacacacaagtttcttaaaagaactgtggccaaattttaggtacacttacangttgtggcatatgctgtctaacg

SEQ ID NO: 210011 - DNA, 542 bp, Glycine max
ggacaataatttattttatttcaagtccatatcgggtctacacatagacacaacataactcatgttgctagagtagttttctcacaaccatcgtgcacacaggccaaaacatctctgtagtctcttgaaatgggtaaaggagtcgtagacctctccatcactacttttcttgtactcaaacaagagatatgaatgattgaaagcagtcaatttgccaaacccatagtcaacgtccctataaagactccaaatagggggtgatggtgtgaagtctgacaggtgacttcccccttcaccaacaaccacatgaattgttccattcacagtgccagagtagtgatgcttttcttcattcacacattgattctgataaatggggcatactctttcatagttatggacatgaccataaaatccaatgtctactttgtacttttgccaaagcttctgcaaactttcccttcccatgggctcttcaaatgaaccctccatgccataccaaagattagaggagtagccaaggggacgatgagctgaaaaga

SEQ ID NO: 210012 - DNA, 518 bp, Glycine max
cattattctcgaattagggttttccactgatctccgagcacacaccactactctgttcctcagattcaacaccaccttgcgtggcgccaatgggaaaagccttcgacatcggagccgttccgttcaacgccgacgggtggggtccgccggacaacgcgacctcaggcagcaacaacaacaacctccctctgaacgtccccttcgcccccttctcccgctccgacaaattgggccgcatcgccgactggacccgcaacttcaacaatccgacccgctccaagaaccccgccgatgccgtcttcgacttcgccaacgacgactccttccccgcctccgccgacgacgacgcctccttccgcctcgtcgacggaaagcccccgccgcgccccaaattcggccccaagtggcgcttccagcagcagcgccagctccctcagcggcgcgacgaggaaagtcgaggccaagaagcgcgagcaggagaaggaacgagcccgcagagaccgtctctaccacatgaa

SEQ ID NO: 210013 - DNA, 396 bp, Glycine max
ctcaaacaagaagaggatcaggatctggacgaaggtgcatggaatattgcaatggcaggtggtacatgccttggtttagttgcccgtactgttggagatgatattgtgccgctggtaatgcccttcattgaggagaatatcacaaaaccagattggaggcaaagggaggcagcctcttatgcttttggatctatcttggaggggccttcacctgacaaattagctcctcttgttaaccatgccttaccatttatgcttagtgctttagtgaaggacccaaacaaccatgtgaaagacaccactgcttggactttgggacgaatgttcgaatttcttcacagttcaattgttggtacaccaatcattaatgaggggaaattgccaacagattattac

SEQ ID NO: 210014 - DNA, 575 bp, Glycine max
  unsure (1)..(575): unsure at all n locations
agctgatcaagataagatcatttctgcaattaaagaagcaggaaatgttaagaagttctatccatctgagtttggaaatgatgtggaccggactcatgcagttgaaccagccaagtctgcatttgcaacaaaggccaaagttcgccgagctattgaggctgaaggaattcccttcacttatgtgtcaagcaacttctttgctggttacttcctgcccaacttgtcacagcctggagccacagctgcccccagagacagagttattatcctaggagatggaaaccccaaagctgtttttaacaaggaagaggatattggaacttatacaatcaattctgtggatgatccaagaaccttgaacaaaattctctacattagaccaccagcttaataccttgtcgtttaatggagcttgttactctctgggagggaaagattggtaaaactcttgaaagaatctatgttccagaagaacaactcctgaagcanattgaagagtccgcaccacccgtgaatgtgatcctgtcaattaaccactcctcttatgtaaaaggggatcatactaactttgaaat

SEQ ID NO: 210015 - DNA, 561 bp, Glycine max
gcatgtaataaaggtatcatagcatatagcatagcataggtatttcatacattgttcttttgaggagcacatgcagcaattcagtcttactacatgattctctttatttagaaaacaaagttttaccaattaaaccaacttaatcagctaggctttgcaccttagacaaactgattaaggtactcatccacagtgatgtatttcacatcaggatatagagctgaagcttccactccaaaagaagactcaatttcaaagttagtatgatccccctttacataagaagagtggttaattgacaggatcacattcacgggtggtgcggactcttcaatttgcttcaggagttgttcttctggaacatagattctttcaagagttttaccaatctttccctcccagagagtaacaagctcattaaacgacaaggtattagctggtggtctaatgtagagaattttgttcaaggttcttggatcatccacagaattgatcgataagttccaatatcctcttccttgtaaaaacagctttggggtttccatctcctaggataataac

SEQ ID NO: 210016 - DNA, 558 bp, Glycine max
  unsure (1)..(558): unsure at all n locations
aaagaaaactagtaatatggcttcaagaactatatgttttaccattcaagtgactcttgtagtagcttttctaacaacaaaggttgttttatctgatgacactgtgccaattcccgcgaacaaagcacaattaggtgaatggtataatactaatgtggggcctttagatcaaagaaagagcaccgtggacccagcattggtgactgctgaagaaggcgctaaggttgtaaaggtgatgcaagatggcagtggggaattcaagaccatcactgatgccattaaaagtatacctagtgggaacactaagcgtgtaattatttacattggagctggaaattataatgagaaaatcaaaattgagaagacaaagccttttgtcaccttgtatggngtaccagagaaaatgccaaacttgacttttgggggcactgcacaacaatatggcactggtgatagtgctacattgattgttgaatcagattattttgtggcagctaacatcatgatctcgaacactgcaccgagacctgatccaaatacgccaggaggtcaagcagt

SEQ ID NO: 210017 - DNA, 613 bp, Glycine max
ccacaatacaaatcatctatttcatataaaattaaataaattaaaatacatttcccattttcatgaatttatagggacatatattgactacattatgtccttttaaaagcttgaagctagaacaataataaatttccaaaatatttttaacaaaggtgttatcatagtgcacatgaacaccaaaactcacttaatcaaaatttacaaggatctcacttaattttaaaatgccaagactaaagcaaataaattacaagacaccaaaactcaacaactcgagcaatctagtattgaattggaataccattttctaattcaccatccactaaaacatggggtgcattattcctcaagccagacaaaaatgtggtaattaattaaaccttgggagttggaggaggaagtagccatttggagccttcaatcatcgcaagtgttatgtaaggtttaacctccgtttcacttagttgcttagttatagtagcacgccctttggggtctgcaccaggtcccgagttctgatactctccaaaacgaacagttttgtcatgttcagggtgactggtgttactccaccctaatttatttacaatgtcactcatgctgctgtatg

SEQ ID NO: 210018 - DNA, 426 bp, Glycine max
cagatacaagagtttgtttgtactcgctttttggctgagtttcccgtttttgacaaggttgatgtgaatggtgacaaggctgctccactgtacaaatatctaaaatcaagcaaaggtggactccttggggatggcatcaaatggaacgtctccaagttccttgatgataaagaggggaatgatgctgatcgctatgcacccacaacttcttctctgagcattgataaagacttgctgacattgctggatgcatgacattatgaatgtttggagttgccaataaataaactatgactaagaaatgctctgctgatgctgctgcaatttcctgtgtgccttatatgtaccgaaacaggtgctcttgtatctctgacattagattcataaccatgagactgtgtacttattattgtgtgaatgtaaagt

SEQ ID NO: 210019 - DNA, 438 bp, Glycine max
aaaggaagcttaattttacattcacacaataataagttcacaatctcatgggtatgaatctaatgtcaaagctacaagagcaactgtttcggtacatataaggcacacaggaaattgcagcagcatctgcagtacatttcttattcatagtttatttattggcaactccatacattcataacttcatgcatccaacaacttcagcaagtccttctcaatgctcagaggagaagttgtgggtgcatagcgatcaacaacattcccctctttatcaacaaggaacttggcgaagttccatttgatgccatccccaaggagtccacctttgcttgattttagatatttgtacagtggagcagccttgtcaccattcacatgaaccttgtcaaaaacgggaaactcagccttgaagcgagtacaaacaaactcttgtatctg

SEQ ID NO: 210020 - DNA, 374 bp, Glycine max
gggtcaaccgtgacgccacaatcgctcttgcgcgtttcaatcgccttcgacttctttgcaacgggatcaggtgctcgtccttcacgatggcgggaactgaagcaaaaaaaactgaatccaaaaaacctgccgctaagcaatccggtgggtaagaagaaggaggtgaagaaggagactggcttatgtctcacgcatcggaaggcggagaacttctgagagtggtattccgaggttgttgttaatgccgaaatgattgaatactatgatatttccggatgctatattctgaggccttggtcaatggcaatatgggagatcatgcaagagtttttcgatccagagagattatataacctgttggagatcatctaaaa

SEQ ID NO: 210021 - DNA, 340 bp, Glycine max
ctggatcgaaaaactcttgcatgatctcccatattgccattgaccaaggcctcagaatatagcaaccggaaatatcatagtattcaatcatttcggcattaacaacaacctcggaatacccactctccgaagttctccgccttccgatgcgtgagacctaagccagtctccttcttcacctccttcttcttcccaccggattgcttagcggcaggttttttggattcagttttttttgcttcagttcccgccatcgtgaaggacgagcacctgatcccgttgcaaagaagtcgaaggcgattgaaacgcgcaagagcgattgtggcgtcacggttgaccc

SEQ ID NO: 210022 - DNA, 449 bp, Glycine max
atcatggtggccgtaacccgcctcgcgaagcgcgcgtcaaccttctcaccccagatgaggaggtgcctgagctcctccgaagtcaaatcccacgcgccgtcgcacgacgccgcgtccttccgcccgtttccgcggcgcgaagatctgagcatgcggtgcgtgcagtgggcgttcctcggctgccccggcgtcggaaaaggaacgtacgctagtcgcctgtccaacctcctcggcgtccctcacatcgccaccggcgatctcgttcgcgacgaactcgcctcctctgaccccctttcttcccaggttctcttcttcttcctcttcactttgaattaactagattaatttttgtaacgcaaatttggtcaaggttattgaaatttctgcgtacggcgcagcgcttagacagaaaaatgggatgataattattattttaaaaaatattaaaa

SEQ ID NO: 210023 - DNA, 575 bp, Glycine max
acacgtaacatgtattgggttgttatttcttatgagcaataactccttcatatacaaattacatgacaaacgattatgattttggatgcttaaataatccttatataaattatcaagggcatggctataggtaacgtacgtgggactatcatgacagcaatggaactatatatatttgttaatttatacaacataacgacgaagataatccaaccgtgctggatgcttaagcttcatgagagccttgacttcatgcttccgaaccatttccctagaaatattcaagttcccagcgatttctcccaatgtcctgtcacccttgccatcaagtccatatctctgtctgatcactaggctctcctttggcttcaaggaatcaagcacatcatcaagagcaagtcttagaacagcaagttgcctcctattatcaccattaacaccatcaacatcagtaatcccattaatatactccttttgtgtggatatatgtcttgaatgaagggataaaatgggttttgatgccttcattacttcataatatctatcaggtgagatcccaatctttctactaactc

SEQ ID NO: 210024 - DNA, 457 bp, Glycine max
gtaaattaactatgaagcctaccctactattatccctttccttcctgcctctctttgctttcctggctctttcagaagatgttgaacaagttgtggacataagtggcaaccccattttcccaggtggcacatattacattatgccatcaacttgtggcgctgccggtggtggattgaaactacgccggacaggaaactcaaactgcccagttactgctttgcaagattactcaaaaatcttccgtggcacaccagtcaaattcagcatacctgggataagccctggaatcatctttacaggtactccacttgaaatcgagttcgcagagaaaccttattgtgctgaatcctccaaatgggtggcgcttgtggacaatgaaatccaaaggcatgtgtgggtataggtggtcctgaaagtcatcctggtcacatacatttagtggcacatttagcattc

SEQ ID NO: 210025 - DNA, 494 bp, Glycine max
gcgattcattcgtcctacaggattgcggttcactaaagctcatgtcactcacccagaacttaaatgcacattcaatctagaattaattggagtgaagaaaaaccccaatggccctatgtacacctctcttggtgtcattaccaggggaactataattgaggtgaatgtcagtgaacttggtcttgtcacacctgctgggaaagttgtgtggggtaaatacgctcaggtcacaaataacccagaaaatgatggttgtataaatgctgctctgcttgtttaaggtcatagcaaccatcagggttccagcttgatttcaaaggcagaggtcaagtccctctcctatgatttttgtggtcttgaaccccaatcttcaagggagaatcttacaaactttgttggtaccagagagaagattgtctgagaaaatagtgaagcatttttgctttcttgtttggatagtcaatgcaattatctgatctagcacttaacattta

SEQ ID NO: 210026 - DNA, 484 bp, Glycine max
  unsure (1)..(484): unsure at all n locations
ataacacaaggcagaaagcaagctcatcctagagttttaaaaatggcagcagcctcctccatggctctctcttccccatccttggctggcaaggccgtgaagctgggcccatcagcccccgaagtcgggagggtcagcatgaggaagaccgtcaccaagcaggcctcctccggaagcccatggtacggcccagaccgcgtcaagtacttgggcccattctctggcgagcccccgtcctacctcactggcgagttcccaggtgactacggctgggacactgctgggctttcggccgacccagaaaccttcgccagaaaccgtgagctcgaagtgatccactccaggtgggccatgctcggggccttgggctgcgtcttccccgaactgttgtcccgcaacggggtcaagtttggagaagctgtggggntcaagggcggtcccagatcttcagcgaggtggggctgactacctgggcaacccaagc

SEQ ID NO: 210027 - DNA, 342 bp, Glycine max
tttacctattttctgtatttttttttttgtttgtttttttatttttttattttttatggggggtggaaaaaagcaggtaacacataattggatggggaggcacatgatacgtctgtttttctgaaacaccttggtgtaaattatatttttcgcaaaccgaacttcaaatactttaaagagccaccaagactcctttcttttgatgcccaattcccggggaccaaacttgtggcttatgaccacacattgtggctgaatgggcccgcaaggggaagggcatggtttctccaatgggcccttgccggcgtcaatggggcgtacaaagaccccatacacagggaa

SEQ ID NO: 210028 - DNA, 354 bp, Glycine max
ttggaggattgttccttctctcgagacgatccggagggatgggaggtcctggtgggcccggatttcctcttgcttttggtcaatccaaagccaagtttcaaatggaaccgaacaccggagtgacatttgatgatgttgctggggtggatgaagccaagcaggactttatggaggttgtggagtttctaaagaagcctgagaggttcactgctgttggggctcgcataccgaaaggagttcttcttgttggtcctccaggaactgggaagacactgttagccaaggctattgctggtgaagctggtgttccatttttctcaatatcaagttctgaagtttgtgagatgtttgttg

SEQ ID NO: 210029 - DNA, 561 bp, Glycine max
ggattttgcgtgttacaagccagagccagagtgcacttgcacgagggagattttcatgaacaggtctgtggaaactggtgtgttttcagaggagaacttggcctttcagaagaagatacttgagaggtctggtttggggcaaaagacttacttgcccccagcaatattgagtgtcccttcaaacccttgtatggctgaagcaaggaaagaagctgagcaagtgatgtttggagccattgaccagcttctggagaaaactggggtcaaggctaaggatattgggattttggtagtgaattgcagcttgttcaatcccacaccttctctctctgcaatgattgtgaaccactacaagctaagagggaatatccaaagttataatcttggtggcatgggttgcagtgctggactaatctctatagaccttgccaaacagctcctccaggttcatccaaactcttatgccttagtggtgagcatggagaacatcactctcaactggtattttggcaacaacagatcaatgctagtctcaaattgtctattcagaatgggtggagc

SEQ ID NO: 210030 - DNA, 329 bp, Glycine max
atgaaaaatcgtgtaataaatgttctcattggacaataattggatgcacactcttacaacttgaacacactagcagaagatcaaatcagctgggagtaatcttcctcttctaaattttgcacaccttcctaagattaaccatgaaaaccttaatttaaattcctaatgcaagaggttttaacttaggaaccaatggttgccactttgggcacatgaacaggaaactcgtgaatctcatccatccaaggatttttctcctttgctggattaatggtcctcaatgcacgccacacagcactggtggacttggacccttgacccaatggcat

SEQ ID NO: 210031 - DNA, 509 bp, Glycine max
  unsure (1)..(509): unsure at all n locations
agaaaatggcaagaatatcaaattggtctcttgtcttcctcctcatctctacactactgcacatagagcccagcctctcaagcccaagcccaagcccaagcccaagcccgttcataaaatcctcctgcagcagcacccagtacccagccctctgcgtctcatccctctccgtctacgcctccagcatccaacaggaccctcaccaactggttcagacagcactctccctctccctgaaccgcacccaagccaccaaaaccttcgtggctaactgcaacaaattcagaggcctgaaacccagagagcacgctgcactcaaggactgcgccgaggaaatcagcgacagcgttgaccgcctcagccggtcgctgaaggagctcaagctatgtaaggttacagggtgaggacttcacgtggcacattagcaacgtggagacatgggtcagttctgctttgaccgatgagagcactngcggcgatggattctncgggaggcgctngatgggaag

SEQ ID NO: 210032 - DNA, 590 bp, Glycine max
agaaaaacacaacgttttatttcacatttaagaagcatgagaagatccatgtatctataaagactcacatatataataattacatagagcacataaaagaagaaaagtaaagcattaagcaaccaagatcattggtccccaactagtgttgtgcagcatagtggttaataagcgagagagcattgctagtaacctgagcaacattgagcatcctagccctaatagagtccttgatcttcccattcagcgccttcccggagaatccatcgccgcaagtgctctcatcggtcaaagcagaactgacccatgtctccacgttgctaatgtgccacgtgaagtcctcacccttaaccttacatagcttgagctccttcagcgaccggctgaagcggtcaacgctgtcgctgatttcctcggcgcagtccttgagtgcagcgtgctctctgggtttcaggcctctgaatttgttgcagttagccacgaaggttttggtggcttgggtgcggttcagggagagggagagtgctgtctgaaccagatggtgaggctcctgttggatgctggaggcgtagacggagagggatgagacg

SEQ ID NO: 210033 - DNA, 493 bp, Glycine max
ccttcctctccttcttttctcttctttcttcttcttccatctctttttttctgcttaaggtctacaaaagttctcttcttcttctcctcctattgaactttggtcatcacacgagaaaacccacgtctggatcttctggtgtaaaggcccattagaagcctcttagaaattttcaaattgagttggtgtatagtgttgaagggggtgaaatttggagcccagtttgttacttcatttgaaaggtcatagtttgaaccctctttttctggagatttacctgggaaaagatgatgatgtttgaagatatgggattctgtggcgatttggatatgttatgtggttctcttggggatggggatattgctgtgagacaaactgaaccggatcctgtagttgaggatgactacagtgatgaagaaattgatgtggattttcctctgctgtagctaatggatccatggtgatcaacgattgcagtgagtatgatgttgat

SEQ ID NO: 210034 - DNA, 496 bp, Glycine max
tttctttttttttttttttttttttttttttctttttttttttttttatttttttttttttttcaggggttcctttttttttacattcatttctttaatactcgctttccacctcttacacattaccagtaccttaacaaaaaccaaacaatattttgctttcccaaaaaccgcaccctgggccaaaaactaaaccaaacccttgaccacaacagaaaccccccctgttgcggattttctgccccaaccccccctgtacccaccccgggcaaaaaaaggggcccccttccatccggcaacgccaaaatcaaacaaccaaagggcccccccttcacctacggaaaaaagaaagaaacaacctgcaccttcaagggcccccttggaacaatgcccacttgacgccccaaaaagcacccagaaaaacctataccgcgcctgcaacgacaaacccctgtaaaaaaccaaaacccccctcttgactcaaaaaaaaccccca

SEQ ID NO: 210035 - DNA, 489 bp, Glycine max
attataggatgaacacatcatcctcaagtgctttcaaaaggccaattaacccatttggaagtattggaatgataaatgtcacacatggtcttcacccggctaatatactctcaaaattattgcatttcctacaggaactattcttcattagcgcttatttgaggcttccacagttcattagtattgccgttgacatataattgacctcaaaaactcactgagcagttgctatagaaaacccaaggcctgagggacagaatcaactgacaccataaacccactttcctgcattgctggcgaaactaaccaactcctctggcttaaaccacaagtcaatctcatcctcggcagtctcaggaccgttactcccatgaatgatatgactttcgacaacaacggcaagaacacccctaagggttctaggctctgaattctgaggatctgaggctccaattagcttttgggccattggaaataactccttgacct

SEQ ID NO: 210036 - DNA, 553 bp, Glycine max
gtaaagattaactattatcacgaacgaaaccattaatagaaacaaaaatgaaatggtgttagtatcaccattttgttcgtctctgaagacaacatatatagaacatatatagatgcccttaatgaatcgaatgaatctttcaaaatcgcaaattagatgtttgtgaattaattacatatgaaaaataatgaagctataatctcccattatttctgaatcacagacccatatccaatctcagttcagcctgaaagttaatctctgatcatcatgaatgacagtatttcaccacaaaatcccggtgatgaaactcatgtgcccctagatttcagacaaatctaagcgatagtcccagtaattttacgcagatgacacagcttcaatggcgctgcctaggggccatgctgcctcaaccagggcatcgtcgtatttaactttcttcaccaatgtaatctcttgccatggatatataccaaacccatcaacgagtagtgtatactggtatataagatccatgcaaagatagggaaggttccccttatcaacacgagga

SEQ ID NO: 210037 - DNA, 489 bp, Glycine max
atgctttgaagtctcccacaggagatgaagcatacaatgaaaatggtttagtgcctcgaacaatacgtttgctcaaggataagtacccagaccttgttatctatacagatgttgcattagatccttattcatcagatgggcatgatggcatagttagagaagatggagttattatgaatgatgagacagttcatcagctatgtaaacaagctgtagcccaggcccaagctggagcagatgttgtcagtcctagtgatatgatggatggtcgggtaggagcactgcgtgcagctctggatgctgaaggctttcagcatgtttctataatgtcctatacagcaaagtatgcaagttctttttatggtccatttagagaggcactagactcaaacccccggtttggagacaagaaaacttatcagatgaacccagctaattacagagaggctctgactgagatgcgggaggatgaatctgaggagctgacat

SEQ ID NO: 210038 - DNA, 570 bp, Glycine max
cagcaccaacagagttacagtacgaaatattctgcaggtgagtgcacactttcattcatacaatgggttgacaatccacacgtaaagttacaattaacaccaaaaacaacggccaagtctttttctattatgtccttaaatatattaaatcaaacgaggccataatattttattatgaatgtctctctatacacaaacctccatgtccctcttaaacaatttacaataaccaaaatccagcagatactggtattataaactcttcaaccttctacatgaacaacgccctacataatcagagaacttcacctcttctctccacacaaacatctggcagcttgcagagcagaatatgtgaggatgatatcagcaccggcccttcggaggcacatcagtgactccatcataaccttttcttcgtctatcattttgagagcaccggcagcctttatcattgcatattcaccagaaacctggtatgctgcaattggcaaaggagaattatccctgagcagccttatgatatccaagtaaggaagaccaggcttcaccaagagaatgtcagctcct

SEQ ID NO: 210039 - DNA, 486 bp, Glycine max
atgctttgaagtctcccacaggagatgaagcatacaatgaaaatggtttagtgcctcgaacaatacgtttgctcaaggataagtacccagaccttgttatctatacagatgttgcattagatccttattcatcagatgggcatgatggcatagttagagaagatggagttattatgaatgatgagacagttcatcagctatgtaaacaagctgtagcccaggcccaagctggagcagatgttgtcagtcctagtgatatgatggatggtcgggtaggagcactgcgtgcagctctggatgctgaaggctttcagcatgtttctataatgtcctatacagcatagtatgcaagttctttttatggtccatttagagaggcactagactcaaacccccggtttggagacaagaaaacttatcagatgaacccagctaattacagagaggctctgactgagatgcgggaggatgaatcttgaggagctg

SEQ ID NO: 210040 - DNA, 520 bp, Glycine max
gttcaattatagcttctcatggaagccctccgcttcacgcaaaaatgtagtcaagaagaacagcttcatatcaagacagacatcgaatgaaggacaaagtttccttccaaaagaagaggaaatgaaatgggtgttccagaaatttgacaccaacaaagatggcaaggtttctcttgaagagtacaaggctgctgcaagggccttggatagggccattggggaagctgaagcagtgaaagcgtttagggtcatggacactgatgaagacggcttcattgacttcaaagagttcatgaagatgttcaatgaagagggtaggataaaagaaactgagatcaagaatgcttttcaagtgtttgattcgaacggcgatgggaagattagtgctgaggagttgtcccaagttctcaaaaggttaggagagagttgcagccttagtgcctgtaaaaaaatggtcaaaggagtggatgggaatggagatggttttattgacttgaatgagtttacgaggatgatgatg

SEQ ID NO: 210041 - DNA, 416 bp, Glycine max
gtcttctgcagaaatttgcgccatcgtcgagagaagcgtgagagacttctcgtttatgatgagagctaagatagtttagttgtcaagtcataaatcagtatcatcactttaaatttcattagaagctgtcaaaatgtcacggaagggtttgatggagcaagacctgagtaagttggatgtaacaaagttgcatccactttctccagaagtcatatctcggcaggctactattaatatcggcactataggtcacgtggcccatggcaagtcaacagttgtgaaagcaatatcaggtgtccagactgtgcgtttcaaaaatgagttggagcgtaacattacaatcaagcttggctatgcaaatgcaaaaatatacaagtgtgaagatgaacgatgtccaaggcctatgtgctacaagg

SEQ ID NO: 210042 - DNA, 498 bp, Glycine max
  unsure (1)..(498): unsure at all n locations
cttagctgaaccctcaccttaatcttgcgtgctagctagctttatgccaattcctacagaaccaaattattgtgctagctagctagtacgtgaaataatataaaataatgaaatatggcattcagcgggacccaacagaaatgcagggctggcgacagaactgttcactttgtcgaaggattatctgccgatggagctgcttatcacaagaactgcttcagatgcagacattgcaatggccttcttgcgataagcacttactcatccaccgaaggagttttgtactgcaaggtgcactttgagcagcttttcaaggaaactggaacctaccccaagaaatcccagtcgtctggaaagcctcctctcgagctgaatagagcaccaagcaagctttctgccttcttctctgggactcaagagaaatgttcaaaatgcacgaaaaccgtatatccattggagaagttgaccgtggaaggcgagttntaccacagatcatgc

SEQ ID NO: 210043 - DNA, 542 bp, Glycine max
ctcacactttcaaccccatccaatcctcacatgcatgctgtctctgccaaagtgccaagtcacataacatttccattgttaccattctttctttccatcacaaccacttattaagcctctgatcctcactttctctcacacaaaaacacactcaccatggatcatcgcaaaccattgctacccacttgctctgatgctggtccaaatccacacactcgcaaggaccttcttctagttatttgcggcttgctattactctcttcccttgttgcctttggagggtacagggcctccaacgcgccgcatgccgacgtggcatcggcaacatcgaacgatgagcaacgtagtccgacatcggtgccttctccgaaatggtacccggattcgcgaggtgtttcttcccgggtgtcagagaagtcatcaagcatgttggttgcggctaaagatggagcttcgaggcatttccatgggacaacagcatgttgtcctgcagagaactgcttttcatttccaccagagaaaactggatgaacgatcccatg

SEQ ID NO: 210044 - DNA, 425 bp, Glycine max
ccatatgtaaatatggttagcctaaaatgggataacattaacatcaaatttctttgaacagattcttttgaaagcatcatttcccatgatatgataaaattcccaccaaaatttttgataaacattactgggcaaaactgaaggaatgcgctttgagcaagaaccataaccttatgtcggttattcaggggaggacattaccactggtaagtccaaattgccaacccaagatgtattccaatcctttgggactatagctcttctatctccaattcaaatttttaactcttctgaccaggggggaatgggcgtttaaatgcaaaattcatttgccaaacttttagggaggctgtcacaggggcctaggtagcattgatgaacaagaacaacctagcagctccatagattgccttcgttggataaac

SEQ ID NO: 210045 - DNA, 588 bp, Glycine max
aaagattaactatgatcacgaacgaaaccattaatagaaacaaaaatgaaatggtgttagtatcaccattttgttcgtctctgaagacaacatatatagaacatatatagatgcccttaatgaatcgaatgaatctttccaaaatcgcaaattagatgtttgtgaattaattacatatgaaaaataatgaagctataatctcccattatttctgaatcacagacccatatccaatctcagttcagcctgaaagttaatctctgatcatcatgaatgacagtatttcaccacaaaatcccggtgatgaaactcatgtgcccctagatttcagacaaatctaagcgatagtcccagtaattttacgcagatgacacagcttcaatggcgctgcctaggggccatgctgcctcaaccagggcatcgtcgtatttaactttcttcaccaatgtaatctcttgccatggatatataccaaacccatcaacgagtagtgtatactggtatataagatccatgcaaagatagggaaagttcccctcatcaacacgaggaatagtggatttggcattctcaagttctgttggcatg

SEQ ID NO: 210046 - DNA, 492 bp, Glycine max
atgctttgaagtctaccacaggagatgaagcatacaatgaaaatggtttagcgcctcgaacaatacgtctgctcaaggataagtacccagaccttgctatctatactgatgttgcattagatccttattcatcagatgggcatgatggcatagctagagaagatggagttcttatgaatgatgagacagttcatcagctatgtaaacaagctgtagcccacgcccaagctggtgcatatgttgctagacctagcgatatgatggatggtcccgtaggagcactgggtgcagctttggatgctgaaggctctgagcatgtctgtattatgtactatacagcaaagtatgccagttctttttatggtccatttagagaggcactagactcaaacccccggtttggagacatgaaaacttatcatatgaacccagctaattacacagaggctcttactgagatgcgtgaagacgaatctgaaggagctgacattc

SEQ ID NO: 210047 - DNA, 487 bp, Glycine max
cccaaaaaaaacaagcagatatataaattaatcaaatactacttcgtgtgggggtgggaaaatgggccactctgaggaaaacagtgatgttgctgccaggcagaaggcaatcgatgattggcttcctgtcactggttcccgaaatgccaaatggtggtcttcagccttccacaatctcacagccatggttggtgcaggtgtcctcagccttccatttgccatgtcaaatatgggctggggccccggtgctaccgtgcttatcttgtcatgggttatcaccctctacaccctatggcaaatggttgagatgcacgaaatggtgccagggaaaagatttgataggtaccatgagttgggccagcatgccttcggagacaagctaggtctctggattgtggttccccaacaagttgttgttgaagttggcacgtgcattgtctatatggttactggtggcaagtcattgaagaaagttcatgataccctt

SEQ ID NO: 210048 - DNA, 420 bp, Glycine max
tttatttttttcccttctttttattttcgctttaaccttctgtttttttttgctttggggtttgggtttcattttgaatttaatatgtactcttccttcttttatactacttgttctttcggccgcctacttggcgcgaatatcttaagcaagcggtgcgtgcactgggcgctcctcggctgccccggcgtctgaaaaggaacgtacgctagtcgcctgtccaacctaaaaggcgtacctcacatcgccaccggcgatctttttcgcgacgaactagccttctctgaccccctcttttccaagttctctccttcttcctcttcactttgaattaactagatcaattctcgtaacgcaaatgggggcggggacattgaaagtcctgcgtacggtgcagcgcgaagacagaaaaatgggggg

SEQ ID NO: 210049 - DNA, 463 bp, Glycine max
aatcacttcatccttgggcaataaaaagctgattggatcatttgatctaaaaaagcttcaaccatcatattgttaattacttccaattaatatgggctgtgctatcattaaccttctcctaataatttttatatatgaagccagcgccgacacacaaactgcaacagaaccagaagtggtcagaacttcacaagacttccactactgctgtgattataagcaggctagaggaaactacgcagccaacagcccctatcagaccaacctcaacacccttttgtccactctcacttccaatacagatattgactacggtttctacaatttcacaaccggcgaaaaccccgacaaagtgtacgccattgtgctgtgcagaggagatattaatccagatgaatgccgtaactgcctcaaactttccagagccaatctcacagagctctgtccagttcagaaggatgca

SEQ ID NO: 210050 - DNA, 436 bp, Glycine max
atttctcttcagcttctgggttctccattttccttcgtcttctgcatctgcattccgtagattcagttctcgtcggaaaatggacgttcgccgaagacccattcctccctccggcgatcgccgacaaacccagaagctgaagaacaccgccaccaccgattcgcagactcttctgcctctctacctcaccaacgccctcttcttcgcggtgttcttctccgtggcctacttcctcctccaccgctggcgcgagaagatccgcaccgtcactcccctccacgccgtcacccccgccgagaccgccgccatcgtctccctcgtcgcctccgccgtctatctcctcggcttcttcggcgtcgcctcccgcgcctccctcgacgagctctccgacgacgagatcatcctcaaggaagactcccgcgccccgggcccgtgc

SEQ ID NO: 210051 - DNA, 579 bp, Glycine max
ggaaaacaaagagaaactctaatcccaaaagtgtggctcctgttgacctccaccctctaattcaagtacctctgtacaatctccataagagaaaatgcctcacacgaagcagatattcaatgaatgccaacccaccccaaggcttctggggagctggatttgcccatggaagatgccaaccatcactttatcttttacccccaccatcatcaataccaatttttttctcgttatttatgtctttatctgatggtttgcttattagaatattagtctctgacacaagtttaagtgtactgtggccagttcattggacaattgtagatatatccctgctagatctgttgtatttcatgtggctcttaacaagttgtccagctgcaatagcagacatgagcgatagctccccggcgaggactgaaccggctacaatggtggccagtagcctagaatttgcacccggagattctttgttggcacccttgacaccaagtaaattaagacatgctgactgagatgcgagttgtgtgccacctccacagtaccaaccttaatggagggcatggtcacggaaacatg

SEQ ID NO: 210052 - DNA, 555 bp, Glycine max
  unsure (1)..(555): unsure at all n locations
ccttattcttcttaaccatgatcatatgcaagtctattctctgatggacatcagttgggatacatttccatatgctggaacaacaacaacatgtgaatctttatacatgggagttccatgtgtcactatggctggatcagtacatgcacacaacgttggtgttagtcttcttagcaaagttggactggagcatttgattgccagaaatgaagatgaatatgttgaattggctcagcagttggcctctgacatttccgcactacaaaatttgagaatgagtctgcgaaatctcatgtccaagtcccctctctgtgatggtgcaaaatttatcctaggtttggagtcaacatacagaaaaatgtggcaccggtattgtagaggagatgttccatctttaaaacgcttggaattgttacangaagttgctactggtgacctgtcaaataagaattctgagccaacaaggattgcatactcagnggaggacagntctgggtctgtcaaggcaatggatataatacaattcctgcatcaaagcttaacatacacactcgc

SEQ ID NO: 210053 - DNA, 532 bp, Glycine max
  unsure (1)..(532): unsure at all n locations
gatgaaattgatgctacaatcaacagatgtcatgcctttaaactttggtttcactggaaaagggaatagtgccaaacctgatgaactgcatgaaataatcagggctggagctatgggactgaagctgcatgaggactggggaactacaccggctgcaatagacagttgtttgacagttgcagaccaatatgatatccaggttaacatacatactgacaccttaaacgaatctggatttgttgaacatacaattgctgcatttaaaggaagaactattcatacttaccacagtgaaggagctggtggtggccatgctccagatatcataaaagtatgtggtgagaagaatgtgctaccctcatcaacaaatcccacacgtgcttatacacataataccatagatgagcatctcgacatgttgatggtctgccatcatcttaataagaatattccagaagatgtagcttttgctgcatcaagaataagagctgaaacaatngctgctgaagatattttacatgacaagggggca

SEQ ID NO: 210054 - DNA, 144 bp, Glycine max
ttttttttttttttttttttttttttttttttttttttttttttttttttttttttttttttgggggcaccagaaaacaattcttctttttgggtatccaaaaattgaaaaaatatgggcatgctctgttaacgggttttgccc

SEQ ID NO: 210055 - DNA, 422 bp, Glycine max
ctctggttgattcggatctagagtcttcagtttctcctcgttgttcttcgctttcctgttttcaatttcgattctttcgttaatttaataagatgtttgggagggcaccgaagaagagcgataatacgaggtactacgaaatcctcggcgtctccaagaacgcttcgcaggatgatctgaagaaggcttacaagaaagccgccattaagaatcaccccgacaagggcggtgatcccgagaagtttaaagagctggcgcaagcttatgaggttctgagtgaccctgagaagcgtgagatatatgatcagtatggtgaagatgcgcttaaggaaggaatgggtggtggcggtggccatgatccatttgatatcttttcatctttctttggcggtgggagtccctttggatcaggtggaagtagt

SEQ ID NO: 210056 - DNA, 483 bp, Glycine max
aaaaagaacaacgaaatttagaaaagtttttaggatgccaaaacggaagttaccccttggacaataataaaaacccagggtgaacccctgtccaatttttcacaatcatttcataaaaccctacttatttttaagccccaccctacagttatggaacatcaacagttttatcatcatatcatcattttcatcaattcggaatttagcttccacacaaaggcatttcgggggggccccctgtaccctttgggccccaccaggcatggcatcatcctcaaaatatgcctcctgagcttggtgggggttcctccaagactcctcccccatgttgacatcatggaggggaatttcctcacattcatccagctccatgtttggcaattgggaaaaaggctttgggggcaaaacagcctccaagggcttaacttgacccgggtttaaagaatctggaaaccccacagggaagcgaatgtaaaagttccc

SEQ ID NO: 210057 - DNA, 504 bp, Glycine max
aatcacttcatccttgggcaataaaaagctgattggatcatttgatctaaaaaagcttcaaccatcatattgttaattacttccaattaatatgggctgtgctatcattaaccttctcctaataatttttatatatgaagccagcgccgacacacaaactgcaacagaaccagaagtggtcagaacttcacaagacttccactactgctgtgattataagcaggctagaggaaactacgcagccaacagcccctatcagaccaacctcaacacccttttgtccactctcacttccaatacagatattgactacggtttctacaatttcacaaccggcgaaaaccccgacaaagtgtacgccattgggctgtgcagaggagatattaatccagatgaatgccgtaactgcctcaaactttccagagccaatctcacagagctctgtccagttcagaaggatgcaattgggtggtacgaggacgacaaatgcatgttgcgctactc

SEQ ID NO: 210058 - DNA, 401 bp, Glycine max
tttcagaagcctctttgggaatcaaatccgaagcatgatgcattgtgcgagcattgtctcggctccgtcctacgcgttcccttttctctctggctccgcttccactactccaactgcgatctcgctcactaagcgcagttggaagccacctccgagcatggcaaaaggcccagtcagagccaccgtttctatagagaaagagaccccggaggccaatcgtcccgaaacgtttctcagaggagtggacgaggcccagtcttccacttcggttcgggcccgcttcgagaagatgataagggaggcccaggacaccgtgtgcagtgccctcgaggccgctgatggtggggcccagttcaaggaggacgtttggtccaagcccggtggcggcggtggcattagca

SEQ ID NO: 210059 - DNA, 368 bp, Glycine max
ggcaaactataggatcttacatatagcaatggctcaaggatttttcagtcaaaagttttatatcaccttcaacagaattaccaatttactagcctgaggtgttgtgcaatactggcattaaagaaggctgccttctgttttcttacatgggattgaggagttacttgatcaaagaaccatggttgccattaggtatactacaaacccagcctgaacatttgtaattttctgcattttcacgctttacgcggatgactctagcaaaatacgtgatttacaatccacctaatccaacaagctagcattctgactcatcattacaggcacttgatatacccccgacacagaaactacgccccttattattg

SEQ ID NO: 210060 - DNA, 474 bp, Glycine max
atttctcttcagcttctgggttctccattttccttcgtcttctgcatctgcattccgtagattcagttctcgtcggaaaatggacgttcgccgaagacccattcctccctccggcgatcgccgacaaacccagaagctgaagaacaccgccaccaccgattcgcagactcttctgcctctctacctcaccaacgccctcttcttcgcggtgttcttctccgtggcctacttcctcctccaccgctggcgcgagaagatccgcaccgccactcccctccacgccgtcacccccgccgagaccgccgccatcgtctccctcgtcgcctccgccgtctatctcctcggcttcttcggcgtcgcctcccgcgcctccctcgacgagctctccgacgacgagatcatcctcaaggaagactcccgcgccccgggcccgtgcgccgcggcgctgtcggactcctgctcactccccacaac

SEQ ID NO: 210061 - DNA, 514 bp, Glycine max
ggaaaacaattttaaactctaatcccaaaagtgtggctcctgttgggctccaccctctaattcaagtacctctgtacaatctccataagagaaaatgcctcacacgaagcagatattcaatgaatgcccaccaaaccccacgcttctggggagctggatttgcccatggaagatgccaaccatcactttatcttttacccccaccatcatcaataccaatttttttctcgttatttatgtctttatctgatggtttgcttattagaatattagtctctgacacaagtttaagtgtactgtggccagttcattggacaattgtagatatatccctgctagatctgctgtatttcatgtggctcttaaccaagtgtccagctgcaatagcagaccatgagcgatagctccccgcgaggactgaaccggctacaatggtggccagtagcctagaatttgcacccggagattctttgatggcacccttgacaccaagtaaattaaaacctgctgactg

SEQ ID NO: 210062 - DNA, 514 bp, Glycine max
atggacggtaccaaaagcacagaatcaagtgaattttcaagtcctctgcttcccgcagaagcacaagggtatcgttgcaacaatggtgttgactgtgaaagaaacttggtcggtaccagctattcttattcttaccacccttgttgctgtctctggttcttacgttttcgggtctgctgtgggatattcatctcctgctcagactggaatcatggatgatctaaatcttggtgtggccaagtattcactttttggatcaatactgacaattggagcaatgattggagccattataagtggtagaatagcggattatgcaggtcgacgaactgctatgggcttctctgaagtattctgcatattgggatggcttgtcatagcattctcaaaggttggttggtggctttatattggaagattgttggtgggatatgggatgggccttctatcctatgtggtacccgtttatatagctgaaatacacccaagaatcttcgagggggattcaccacag

SEQ ID NO: 210063 - DNA, 613 bp, Glycine max
gttcaaacttccccttccaatttaatttatttgtagtagcaagttttaagtacatcatggaactgatattgaaatgctcttgaatgagggagagggaccataatgatcaaatctaggagcacaggttcaacccaacacaaaatctttgcatcataaacgtgatcaagcttgtttcataaaatctttaatttaattcataatctataatctggcacttaggaaattgtttctggattaattatgcatgcaattttgctactgggtcatgccaaattcatgtctttgttgaatatggattcagagatatatgcttgaacttcttctagagttctcccttgtctctggtactagttttgccacgaatagaatggtgaagccacatatgatggagaatatgaagaaagttcccgctgaactccaactcatgaggaagttaaaagcgtatgatacaatccaagaacacaaccagctagccaaattcacaagacttccagccgagcccttcacattaatgggaaaaatctcagacattataaccaaggggattccccccatgccaagcaagaatgatcctgtatatgccaatacaccaacatgcgtgagaatggaactt

SEQ ID NO: 210064 - DNA, 505 bp, Glycine max
ctcaccacttctattccattctcactcaatggaccctcccacatcctacatttcctccgatgagctccgcaagcacaacacgcgccacgacgcctggatctccatccacggcaaggtctacgacgtctcctcctggctccaccgccaccccggcggccccctccccctcctcagcctcgccggcaccgacgccactgacgccttcctcgcattgcaccccccgaactccgcctccctccttctccccggcttcgccaccccccacctactctcggaccactccgtctcccccgcctcctccgactaccgcaagctcttctccgacctctcctctctcaacctcttcaaccgcaagggccacaccacttccatgctcctctcccttatactcgtccttttccctctctccctctgtggagtcctgctctctgacagcacgtgcgtgcacgtgctgtccggagcattagtaggcttcctctggattcagagcggctggataggccac

SEQ ID NO: 210065 - DNA, 560 bp, Glycine max
ctccgattcctgagttgcgttggtcttggtggagttacaaactcagcagcagaagaagaagctcctcaattgtttaacctcaaattcgattcgaactatgtaaacgccactttcgtgtcgggtttgttgtctctgctttggtgcttggcgctgctactgttcctcagttcggatctcccaagcatgaatctcagcaacggaaagggatccatgtcaacgcttactgcaagcgtcgttatgaaatccggcgacgccgtctccgaccagtttccggcgggtctacgggttctcgtggtggacgatgaccccacgtgtctcatgattcttgagaagatgctccggacgtgcctctacgaagttaccaaatgcaatcgagcagaaactgctctctcactgcttagagagaacaaaaatgggtttgacattgttataagcgatgtgcatatgccggacatggatggatttaaacttttggagcacattgggttagagatggaccttcctgttatcatgatgtctgcggatgatggtcaacgtgttgttatgaagggcgcgactca

SEQ ID NO: 210066 - DNA, 423 bp, Glycine max
ccggctaccatgtctatgtctctttcttagtgcctgcctgccagaagttaaaatggccgaagaaactttcctattcacatctgaatcagtgaacgaggggcaccctgacaagctctgtgaccagatctcctatgctgagctccatgcatgcttgtagctcgaccctgacatgaagggcgcctgctaaacctgcaccacgaccaacatggggatggttctaggagagatcacaacccaggccagcgtggactatgagaagattgcgcgctacacatgccggaacattggctttgtctactgatgatgatggccatgactctgacaactgcaggggcctggtcagcattgatcaaccgagcgctgatactgctcaaggtgggcacggccacctcacctagaagcctgaagagattggagctggtg

SEQ ID NO: 210067 - DNA, 390 bp, Glycine max
ttcttcttcttcttcggtgagagttagagagagagagagagagagagaaggctctttttttcttttttgttggtttctcttgtttttttttgtaggtactgaggaagaaagaccaaaactttatccgcttgcttcacttagctcaagagcgtacaattcaggcaaaggccttgaagtcggagtgtgtgttaaggatttcttaggagttgcttctgtcttgactgaagaaatggaggtatatggcaaatctatggttgcaggtcctgcaaatgttatttttctgtcaagtattttgggccaagaaggtccagttcccggtcacaaatgcgactggaaatgtcaaaatgaacatgtttgtggaaacatgtatcgctgcaagctaactgggct

SEQ ID NO: 210068 - DNA, 557 bp, Glycine max
  unsure (1)..(557): unsure at all n locations
gtgcgtgcgattcttctgatattccaaggcgacgcaccgacaccggacccatctccggcgacatctcaccgatctccggcgaatccccggtccccactttcttccctcgaaatgaatcccgagtatgattatctgttcaagctccttcttattggagactctggtgttggtaaatcatgccttcttctgagatttgctgatgattcgtacatcgagagctacataagcaccattggagttgattttaaaatacgtactgttgagcaggatggaaagaccattaaactacagatctgggacacagccgggcaagaacgatttaggacaatcaccagtagctactatcgtggggcccatgggatcattattgtttatgatgtgacagatgaagagagcttcaataatgtgaagcagtggctcagtgaaattgatcgctatgcaagtgataatgttaacaagcttttggttggacacaagtgtgatctggaagcanatagagctgtgtcatatgaaacagctaaagcattcgcagatgaaataggcataccctttatgga

SEQ ID NO: 210069 - DNA, 542 bp, Glycine max
aaaatcaaaagagtctctcggagagggaagaaggttgttgatgaaagtgaagaaaaggagttaaagggcgattgggtggtcagaaaccagaacaagaacaagaaacctaaacgattgaatcttgatcagagaatttcattaaagaataacataagtggggacgaagtcattccaactcgaaagaaaagaaatgttgggaacaaaattgagaagattgaagaacttattcgggaatattcagtatcaactgattttgtcagtatggattggaaaagaatgagaatacctcccgttctttcttcttcagagcatgcttggttgttcaaattgatgcaacctatgaaggcactgcttcaagtgaaagaagatttacagcaggagttgacaagagaacctgcagatggtgaactagctgatgcaacatacatgagcattacacaagtaaggaaagcaatagatgttggtcaagctgcaagaaataaactcataaagcacaatctccggcttgttttgttcgtgatcaacaatatatttacagattt

SEQ ID NO: 210070 - DNA, 554 bp, Glycine max
  unsure (1)..(554): unsure at all n locations
actatgtaacaagcataagcgcttatatactttgtgcaatgtcaagtatatcatatacaaattacatgagtatgattatgatagacggtatttaaatgaccagtaatacaaatcatcagtatactatataactgggtaaggtgtttatatacattagtcgtttatacaacataacggcgaagataatccaatctagctgaatgcttgagcttcataagagccttgacttcgtgctttctaaccatttccctagatatattcaagttcccagcaatttctcccaatgttctgtcacccttgccatcaagtccaaatctctgtctgatcaccaagctctccttcggcttcagggaatcaagcacatcatcaagagcaagccttagtagagcaggttgtttcctattatcaccattaacaccatcatcatcaacgatcccattaatgaactcctcttgcgtggttgtatgtctcgagttcagagaaagaatggattttgatgccttaattacgtcatggtatctttcaggggatatatgaactctntctattatttc

SEQ ID NO: 210071 - DNA, 549 bp, Glycine max
  unsure (1)..(549): unsure at all n locations
catatccccccctagctacagagcagccaaaggggaggaataataataagcctatattctaaggccggaaaaataaaaaaggaataacaaaaatgtctggaaaggtaattatctcggctgtttctctcatcctggtggttggagtggccataggtgtggtggtggccgtcaacaagaagggcgaggatcccacacttcaatctcaacaaaaatcagtaggggttatctgccaaaacactgatgaccagaagctctgccacgaaaccctaagctccgtgaagggcatggacaccgctgatccaaaggcttacatcgccaaggcggtgaaagccaccatggacagcgtgaccagggccttcaacatgagtgataggctcagtaccgagtacggaggcaacgataacggaaccaagatggcccttgatgattgcanggacctcttgcaatccgctatcgagagcctccaactcagcattgacatggttcacaacaacaacttgcaggccgtgcataaccaacaggctgacttcaagaactggctcagcgctg

SEQ ID NO: 210072 - DNA, 485 bp, Glycine max
  unsure (1)..(485): unsure at all n locations
aatcaaagcaattttaaaaattttcattaaaaatatttccggtagacctccaaagataaatacaaagaataacaaattgtctacggactatgaccctcatcatcacactctctaacagtactcaattgatgatgcatggatatgtgtttgtgtaaattcaattaagccttcatgaagctaagtgcgtgaggaacacggagagctttcaaccagtcgcttccaccgttggctccagcctgtaggaactgggcaggggtgaattgggtagcttcttcgcggctaataagaccacggtaacccttccacttgatccttccgttaacgttagcaccaggtccatcgttgttgtattcagcatagtacaaggtgtcttcgaagtgttcaccggcccatgggcaccattctttcggggtgaaggagtcacccactgtggattccatcacacccgtcttgagaatngcttccatggccttccaagtatgact

SEQ ID NO: 210073 - DNA, 704 bp, Glycine max
  unsure (1)..(704): unsure at all n locations
tgtagtcgacgtggtggattagtatcatcatcggaattaattttcccgggatcgacgacgcctcactangtgcgagcggctcgctcctttattttcttttattttattcttttttttacatcatttacacaagatttccatactaataattatgatagttcttgtgtgttctctcaccggttttgtggacattgcgggataactttttaacacacacaaacacatagtggggcattacgatatgacacctcacatacatatgggttacagggaaaactttttaataccttactattacattgactagacaccttaatactgtagtatgtcacatatggtctataacgcttatatctcttccatgccctcagttgcctgacttcatccacaacacagaccttgtaatcaagtgaaagtcgtttcatcgaataccatcacctttccacagacaggacagttgtcacttctctccatccactcataaatgcaaccaaggtgaaaatgatgagagcattttgtcattatctttggattctctttagtgtattcttcaagacaagttggacagacatcctcctcctctgatgatgcatagacaagaccaactccagttgaatattctgttgattgaagtcttagtgaggacttagaacggtattcctttgatccagcttcacaggcactttccttccatttgtctcctg

SEQ ID NO: 210074 - DNA, 387 bp, Glycine max
ccgactcatttcatctctctatccactgccatatcgaaccaaagacggatggagctgcgtcgaaggcaccgtaagatgcatcagctatggaattggcatccaatctcggtggcaagaaagacaaagccgaagttctctctggcgttcataagtatgagaagtatcatgtcagctatggcggtcaagaggacgagagaaaagctaattataccgatatggataatgaatactatgatcttgataccaggtgttatgagtgtggctggggggaatctttccattttgcacccagatggaaaggagaatctcttggagagagcatcagaggacgtgaacacttccttgctctcacaacttggactgaagccagggcaaaatgttctggat

SEQ ID NO: 210075 - DNA, 414 bp, Glycine max
aagacaaaaacagcaattccttgggaacaaagggaaagggcctttcggaattagggaaacccaaatacgggggggctctgcttgatctaaccacactggcaaatgaaacggttgaaacctacactatacgacgaaccctcaagaatcactagggacactgggccaaaaccaatcttagctcgtgattcacccgatcacaatatccgcaactgatgacaacagctccctatatggtcaaccaatttaattccaggacgaatcaagcttccgggccaagaagacttacattggtgcgaaaatatatgcattcactgcgtaaacgaggccagctgcaggctattataggaaagacttgaacccttagactaccctttggagccaggccaacatacttcagaacctggaccatgtttt

SEQ ID NO: 210076 - DNA, 331 bp, Glycine max
gcacaaaacggagagcacatagctgcatttattttaaaacctgtccaaggtgaagctggggtgatattccctccaaatggttatttaaaagctgatagagatcttagctccaaatatactgtcttgatgattgctgatgaaactcatactgtgttagctagaacgccaatgatgctagcttgtgagtgggatgaagaacacccagaagttctgatactacggaaagcattgtgtggaggaggtattccctctcgtgcattgcttgcatacaaagatgcaatgccttgcatactacctgtacagaatggaagtaccttagatggaaatacga

SEQ ID NO: 210077 - DNA, 352 bp, Glycine max
gcgccctttgatgctacatttcaactagattttttgcttttttactttggggacaccggaaaaggggaccgggggcacgctgaagaactgcatgaaataatcagggttggagctatgggactgaagctgcatgaggactggggaactacacccggctgcaggatactagtgttcgacagttgcagacctacatgatatccaggttaacatacatactgactccttagacgaatctggatttgttgaacatacaattgctgcatttaaaggaagaactattcatactgaccacagagaaagagctggtggtggccatgctccagatatcataaaagtatgtggagagaagaat

SEQ ID NO: 210078 - DNA, 398 bp, Glycine max
cccaattcttccccctccacccacccagcatatctctctattcctatttattagcacccctcacattaccttgtgtcaccaactactttgactcctttaccataccattacaataattatcaaacctaaccagtaaaaatggtgaccgtggaggaaatccgcaacgctcagcgttcccatggacccgccaccatcttggccttcggcaccgccacgccgtccaactgcgtctcccaagccgattaccctgactactacttccgcattaccaacagcgaacacatgactgatctcaaagaaaagttcaagcgcatgtgtgaaaagtccatgataaagaagcgatacatgcacctgacggaggagtttctgaagagaacccgaacatgtgcgagtacatg

SEQ ID NO: 210079 - DNA, 555 bp, Glycine max
  unsure (1)..(555): unsure at all n locations
caataacaaacacacgatcttgttcatattaaattattcttgtacaacattatgctacgataaatccacaagtgaaactagtaataataacaaactttccctggtatttccgagggttccttattgatcactcttaaattcactagtcaccgcatcagcatgatttatccctccaagggaacactgtgaagaacaacggtctcaacggttagacccggcccgaatccgaatagcaccccccactctaacccttctccagtggtactcttcccttcctccttagacttcttcctcatttcatccagaatgaacaaaacacacgcgcttgacatgtttccgtactcactcagcacatgccgggtggactggagtttctccggcttgagccggagcttctcctcgacttgatcgaggatcgcgggaccaccgggatgtgcgatccagaagatagagttccagtcgctgatcccgatgggctcaaaagcttcaacangactcttctcaatgttcttcgagatgatcccgggcacatctttcaagaggtggaacgtgagt

SEQ ID NO: 210080 - DNA, 474 bp, Glycine max
aaaatcaaaagagtctctcggagagggaagaaggttgttgatgaaagtgaagaaaaggagttaaagggcgattgggtggtcagaaaccagaacaagaacaagaaacctaaacgattgaatcttgatcagagaatttcattaaagaataacaaaagtggggacgaagtcattccaactcgaaagaaaagaaatgttgggaacaaaattgagaagattgaagaacttattcgggaatattcagtatcaactgattttgtcagtatggattggaaaagaatgagaatacctcccgttctttcttcttcagagcatgcttggttggtcaaattgatgcaacctatgaaggcactgcttcaagtgaaagaagatttacagcaggagttgacatgagaacctgcagatggtgaactagctgatgcaacaaacatgagcattacacatgtaaggaaaagcatagatggttggtcaagctgc

SEQ ID NO: 210081 - DNA, 615 bp, Glycine max
  unsure (1)..(615): unsure at all n locations
actatgtaacaagcataagcgcttatatactttgtgcaatgtcaagtatatcatatacaaattacatgagtatgattatgatagacggtatttaaatgaccagtaatacaaatcatcagtatactatataactgggtaaggtgtttatatacattagtcgtttatacaacataacggcgaagataatccaatctagctgaatgcttgagcttcataagagccttgacttcgtgctttctaaccatttccctagatatattcaagttcccagcaatttctcccaatgttctgtcacccttgccatcaagtccaaatctctgtctgatcaccaagctctccttcggcttcagggaatcaagcacatcatcaagagcaagccttagtagagcaggttgtttcctattatcaccattaacaccatcatcatcaacgatcccattaatgaactcctcttgtgtggctgtatgtctcgagttcagagaaagaatggattttgatgccttaattacgtcatggtatctctcaggggatatatgaactctttctattatttcttgctctgttggtgacctctngagctcaaatgttaactcagttttagctttctgaatttct

SEQ ID NO: 210082 - DNA, 546 bp, Glycine max
agaagatggtgtccttgaagcttcagaagcgcctcgccgctagcgtcctaaagtgcggcaagggcaaggtctggcttgatccaaatgaagtcaatgaaatctccatggccaattctcgacaaaacataaggaagttggttaaggatgggtttattatcaggaagccgactaagattcactctcgctcccgtgctcgtcgaatgaaggaggccaagagaaaggggcgtcactctggttatggtaagcgtaagggtacaagggaggcaaggcttcccaccaaaatcctttggatgaggaggatgcgtgtcctcaggcgcttgcttcgcaagtacagggaatcaaagaagattgacaagcacatgtaccatgacatgtacatgaaggtgaaaggttatgttttcaagaacaagagagtcttgatggagagcatacacaagtccaaggctgagaaggcaagagaaaagacattgtctgaccagtttgaggcgaagcgtgccaagaacaaggctagcagggagaggaaacaatgctcgagggaggagcgct

SEQ ID NO: 210083 - DNA, 575 bp, Glycine max
gacaaataaatcttatttttccattgataataccatggaaaatttcatcagtaatgcatatcataaaaaaaatatccgataaattctatgttagctatataaatgacaaacataggcagagtaactaaaagactaaaaccaacagaaagagacgtgacaaaaattacttgagcacggtaactgaagatgcccacatagataaagagccgccatccaccaaatctctgatcacacactcacttcttggatttcttcagtgcttgagctggctgggatgctgctgcaggtgtagtagtttgtgctgctgatggcctctctcctggaccttgggccaagcgctcctccctccgagcatttttcctctccctgctagccttgttcttggcacgcttcgcctcaaactggtcagacaatgtcttttctcttgccttctcagccttggacttgtgtatgctctccatcaagactctcttgttcttgaaaacattacctttcaccttcatgtacatgtcatggtacatgtgcttgtcaatcttctttgattccctgtacttgcgaagcaagcgcctgaggac

SEQ ID NO: 210084 - DNA, 547 bp, Glycine max
catatccccccctagctacagagcagccaaaggggaggaataataataagcctatattctaaggccggaaaaataaaaaaggaataacaaaaatgtctggaaaggtaattatctcggctgtttctctcatcctggtggttggagtggccatatgtgtggtggtggccgtcaacaagaagggcgaggatcccacacttcaatctcaacaaaaatcagtaggggttatctgccaaaacactgatgaccagaagctctgccacgaaaccctaagctccgtgaagggcatggacaccgctgatccaaaggcttacatcgccaaggcggtgaaagccaccatggacagcgtgaccagggccttcaacatgagtgataggctcagtaccgagtacggaggcaacgataacggaaccaagatggcccttgatgattgcaaggacctcttgcaatccgctatcgagagcctccaactcagcattgacatggttcacaacatcatcttgcaggccgtgcataacccacaggctgacttcaagaactggctcagcgc

SEQ ID NO: 210085 - DNA, 491 bp, Glycine max
aatcaaagcaattttaaaaattttcattaaaaatatttccggtagacctccaaagataaatacaaagaataacaaattgtctacggactatgaccctcatcatcacactctctaacagtactcaattgatgatgcatggatatgtgtttgtgtaatttcaattaagccttcatgaagctaagtgcgtgaggaacacggagagctttcaaccagtcgcttccaccgttggctccagcctgtaggaactgggcaggggtgaattgggtagcttcttcgcggctaataagaccacggtaacccttccacttgatccttccgttaacgttagcaccaggtccatcgttgttgtattcagcatagtacaaggtgtcttcgaagtgttcaccggcccatgggcaccatccttcggggtgaaggaagtcacccacggtggattccatcacaaccgtccttgagaattgcttccatgggctttcaaggtatgacttcac

SEQ ID NO: 210086 - DNA, 630 bp, Glycine max
catcattacaaagtttccatctaaaattagatattctttgtttcttcacggttttggacatgcggaaatttttaaacacaaaaacaagtgggattagaatgaactcacaacaatggttaaggaaacttttcatacttactatacatgacagacacttaatatgtagtattcacaatgtctataagcttatattcttccatgcctcagttgctgacttcatccacaacacagaccttgtaatcaagtgaaagtcgtttcatcgaataccatcacctttccacagacaggacagttgtcacttctctccatccactcataaatgcaaccaaggtgaaaatgatgagagcattttgtcattatctttggattctctttagagtattcttcaagacaagttggacagacatcctcctcctctgatgatgcatagacaagaccaactccagttgaatattttgttgattgaagtcttagtgaggacttaaaacggtattcctttgatccagcttcacaggcactttccttccattggtctcctgaatttaaggattctggatccacatctgcattacttttaaaggttctgttcctcatttgaatgacttgaacccttttaacgccttgaaacta

SEQ ID NO: 210087 - DNA, 541 bp, Glycine max
ccaaaaccatgaaacattttcttctctttctcatcacattctccttcctctgccaaacacacctactcatacttctctctgccacaacaaccctgcccctccaactcgttgctctcctctccataaaatcatccctcctagaccctctcaataacctccatgactgggacccctccccctcccccaccttgtccaactccaatccccaacaccccatatggtgttcctggagagccatcacatgccaccccaaaacatcacaaatcaccaccctagacctctcccacctcaatctctccggcactatctgcccccaaatccgccacctttccaccttaaaccaccttaacctcagtggaaatgacttcaccgggagtttccaatacgccattttcgaactaacagaactgagaacactagacatcagccacaactccttcaattcaacctttccaccgggtatatcataactcagattcctcaggcacttcaacgcctacagcaacagcttcaccggacctctccccaagagttaaccacc

SEQ ID NO: 210088 - DNA, 414 bp, Glycine max
acaacatcaacccaatttgctatttttttgcgtattcctaaccttacatcaagaattgaggaacatgacaattatggtcctgcaacatccataaccaccatgtggcatacaatcaggatgcaaacttattacctgcacttgaatactattgaacataatgggttttctgtcattgaagaaccacctttgtcatattcaccacaggaatgtggacttggacacctgacactatacagtatgttactgagagagaagatattttcaacggatacgtgttatcgcaaatcaaatgatctatcaaggatgacatctaaataactaaagaaatggggatcacgaaaggggatcaaactaaaggatcttgatatccaagaggaagagattgatatctgtgtacatcttcatgccaaaact

SEQ ID NO: 210089 - DNA, 379 bp, Glycine max
ccagaaaattatcatgaatttcagaaaacgccagggatgcgactaaaaaaaaaaagctacaaccaacaactcgcaaatagaaccacgaaattatagctaattagctaattatccattaaacactgtcagagcaatccgaaaggaaaaaaagagaaaaaacatagccaactccgttccgcatgatataaaagtttaatcaacctcctccattttgctgccctgaggatcagtttcagcctcctcctccagtgggggcatataagcatcagcttcagctgcatcctcggcgatgctcagtccaagcttcaacattgtggggatcctgtttccaaaagtgttgggttcgtcaaggctgaaaccacaagtgagaagagcagtc

SEQ ID NO: 210090 - DNA, 587 bp, Glycine max
tacaaaacggaaagacaatctggtgaaacagaaagaagcactagtggcagtcatgccacaactagtgaacctgggaaatctgggcataattctttgacacagcaagagaagaaacctattaggccgttgtccccctggattactgatatattgttggcttcaccagttggtattagaagtgactatttccgatggtgcagtggtgttatgggtaaatatgctgcaggagaactgaagcctccatcaaccgcttcttcccgtggttctgggaagcatcctcaacttgtgccttcaactccaagatgggctgttgccaatggtgctggtgttatattgagtgtttgtgatgatgaagttgctcgcaatgagactactactttaacagcagctgctgtccctgcacttttgcttcctcctccaacgacagctttggatgagcatcttgttgctggattaccagctctggaaccatatgctcgtttatttcatagatattatgcaattgctactccaagtgctacacaaagacttcttcttggacttctagaagcacccccatcgtgggcttcagatgcacttgatgctgt

SEQ ID NO: 210091 - DNA, 568 bp, Glycine max
gtgtcgcagcaaaaccaaaccacatattaacttgtttgctctaagtcatggctctgatcttgcacgcaaccaaagcaaacaagaatgctttcaagactctgattgcggcagagtacagtggcgtccaagtggaattggcccctaatttcgagatgggtgtctctaatagaactcctgaattccttaaaatgaatcccataggaaaggttcctgtcttggaaacgcccgatggtccagtctttgagagcaatgccattgctcgttacgttgctcgactcaagggtgacaacgctttgttctcatcttctgccattgataatgcccacattgaccagtggattgacttttcatccttggagatcgatgctaatattatgaaattatacctaccaagacttggatttgccccataccttcctccagttgaggagggtgcaaattctgcattgaagagagcatttgaggccttgaacactcatcttgcttccaatacatacctggttggccattctgttacccttgctgatatcataacgacgtgcaacttgtatttaggattcagccagct

SEQ ID NO: 210092 - DNA, 494 bp, Glycine max
  unsure (1)..(494): unsure at all n locations
atgcgtggattgagtcanatacggaaaacggggtaccgggccccccctctaggccagctgactagtactccgccgcccttttttttctttatccttttttttttttttttaacgagangggccaacactgagcctagggttgatattaaatgcaaccagacttgattaccaatcattaaccgagctgactcctcaatattatgctatgcacaattaacacatggttgccgccactaatcaggtgattaacatgacattattttaatgtgtgtttttgcacatgatcaatctgtttacttgaacagaaatcgtactgctaaggccatattggaccttgttcactctgctgagaataactcattatgctatgatcatcttgcattcaagacatttggggtgaatggatatggaattgattccatggctagtttttttctggattatggctttacacaaagggaagagttgaggtttccaatcaaaatgttgagggc

SEQ ID NO: 210093 - DNA, 401 bp, Glycine max
tgccctttttttttttttttttttttttttttttttaatcaataagaagataattcttcataattaatcagccgaaaaaaatcaatcattaaggggctcactattgcaacatttcagtcacaacttcatcaaccaatgaattaaatattcggtccacaacctcagatccgaggtcagaagcatcaacctaatactctaaccatcttgtatataggcagctcatgtccttgaccacaagctcatctaccatagagtctcccattccactccaatctgagatctccttgcacacatctgacgacaaccatgcttggctttgcaccatctcaaaccctcggatccacatttaagatcctagccctacataacgcctgcatgtcaaatgcagacattcactcaca

SEQ ID NO: 210094 - DNA, 585 bp, Glycine max
  unsure (1)..(585): unsure at all n locations
ttctgcttctgcgtctttaatctaagcaaaacgacaacgtgtcattacttgcaacgcgaatccccaaatgcaaacataattcatttacatctttctttcttctttctgcaaatacttccatttcctgatttcctcaaaacaacaacacgtttaattttcatctccttccttttctatcctattcctctccctattattattattgttacatctttttcttcttcctctgatacaaagacaccatgagaggacaggaagatcagcaatctagggttttctgtgagctctcggctctggtcttcaaccttctccggtcaccgtcgatcgtgccggagcctccggcgaggcgttcgccggcgggggcgcagattactccggcggggttcgcgtcgctactgctagggatttcggtggcgctgatgctgtgtggatcggtgactttcttcatcgggttcatgctgatgccgtgggttctcggattggttatggtgttttacgtcgctggcgtcgtttcctctctctccgttctcgggcgttctattctctgttacgctacgccacgtaaggatcntcctggctaaatgg

SEQ ID NO: 210095 - DNA, 599 bp, Glycine max
  unsure (1)..(599): unsure at all n locations
ttctgcttctgcgtctttaatctaagcaaaacgacaacgtgtcattacttgcaacgcgaatccccaaatgcaaacataattcatttacatctttctttcttctttctgcaaatacttccatttcctgatttcctcaaaacaacaacacgtttaattttcatctccttccttttctatcctattcctctccctattattattattgttacatctttttcttcttcctctgatacaaagacaccatgagaggacaggaagatcagcaatctagggttttctgtgagctctcggctctggtcttcaaccttctccggtcaccgtcgatcgtgccggagcctccggcgaggcgttcgccggcgggggcgcagattactccggcggggttcgcgtcgctactgctagggatttcggtggcgctgatgctgtgtggatcggtgactttcttcatcgggttcatgctgatgccgtgggttctcggattggttatggtgttttacgtcgctggcgtcgtttcctctctctccngttctcggcgttctattctctgttacgctacgccacgtaaggatctccctggctaaattgggcaaatctaccgt

SEQ ID NO: 210096 - DNA, 447 bp, Glycine max
atctattatcattccaattcattttattgaggtagtgatattatattcaaatgaaataaaaagatattaaaagatactaattataagaatttgaaagtgaaattataaagttattaaatgattaagcaatttttttctacctgtacctgtaaaaaaaagagtcccatttgttcttgaatagcttccttcaaaaggacttctgcttccccagggaatgtctaggaagaagatatgatttctttgaattgaggtttattcgcgtataagtaagcacgtaactcaacaagaaatttccttacctgtccaatttctaatgaatcaagataaccattcattccattataaatagttattatatgttcttccacgcgaagacgagctgattgggattgtttaagcaactcgagcaaacgttgaccttttgctaattgattttgagtcgcttta

SEQ ID NO: 210097 - DNA, 546 bp, Glycine max
gaaagaacaaaccaagtccaaggaagggactgatgcaacaaagcaaaggcaatcccgggagcaggcaaggaggaaaaagatgtcaagagctcaagatggaatactgaagtacatgctgaaaatgatggaggtttgcaaggcacaagggtttgtttatgggataattcctgagaaggggaagccagtgactggagcatcaaacaatcttcgtgaatggtggaaggacaaggtcaggttctatcgaaatggtcctgctgccatagtgaaatatcaagctgataatgcaatccctggaaagaatgatggatgcaattccattggtccaactccacacaccttgcaagagttacaggatacaaccttgggttctctcttgtcagcacttatgcagcactgtgatccccctcagaggagattcccattagagaagggtgttcctccaccatggtggccaactgggaatgaagaatggtggcctcaaattggtctacctaaagatcaaagccctccatcttacaagaaaccacatgacctaaagaaggcatg

SEQ ID NO: 210098 - DNA, 428 bp, Glycine max
cttccccgtgaaagagcaagccaagtttacattccagggacaggtttttttcttcgttcaattttaacaacaaatggcaccacaaaataaaacttaaggcattaatgatgtttatggataaaccttctttttagtgcctccagaggtcagcataaaacgcaaagcaaccagtctggcacgtgcattggcatttacatgtttgaagcgttcaaggccattaccttacattgttcattcaatgcaagaagttgagcctctttcttgtcaagcagtgcattcaacctgacattctcttccataagtttgtgaacttcagcctctttctgcattttctcaccctctaattgagtagtctttgcaactagcttttcaaacagcctctcaatagtttgaaattgcttatctgaataaagcaaggtttctcttac

SEQ ID NO: 210099 - DNA, 342 bp, Glycine max
acagagcaaccacaactttttattgtacggcgggaaggcatattttttaaaaatcaagaaagtggtacaacgaatttgatttattttgatgatgaataaaccacaaggagaaaagaaaaataggtgtgaggtctcagcgcctgcactcaacaggaatgccttgtgggaatcgcttaagatcgttgcagtagttatagatcatgaagtacttatgaacccatctcagtttttttctgccataggcatcaagctcgttgctctgccattcagcatcaaataaggaattgtcggaaaactctgtggctttgaaattgcggtagtaggctgtaaagggtgccttgg

SEQ ID NO: 210100 - DNA, 435 bp, Glycine max
tcctatagtattttttttttacacagcaaccacaactttttattgtccggccagaaggggtattccttaaaaatcatgagcagtggtacaacgaacaggattgtatatagaacctaaataaaccacaaggcgaagagaaaaataggtctgaggtctcagcgcctgcactcaacaggagtgccttgtgggaatcgcttaagatcgtatgcggtagatatagagcatgaagtccttatgaacccatctcaggttttttctgccataggcataaagctcgttgctttgccacgcagactccaagaaggaatgttcgcacaagctctggggtataaaaatgcggtagtgaggatgtaaagggtgccttggaccaatcagctttgaccaaaccacctgtggcggcccagtcattaccgtttcacaggctagaatagaatc

SEQ ID NO: 210101 - DNA, 306 bp, Glycine max
ttttgtgttttttttttattttttttgtttattttttattgagtgtttaattgaattacttttttaattattaattatatacatattatttaatattttaaagattaattttatagtataataaagcataaaggcattcactctagtatctgcagcggtacattattccaccaaaaaataaggggggcaactaaaaacatacataggaagtatatataattatttctttataaaatatttttaaaaactaagagtatgatataaaatgaaaatatgatattcttctacttttaaaactttttttaa

SEQ ID NO: 210102 - DNA, 558 bp, Glycine max
gagaaaagtccaggtgaaacagagagttctggttcaatttcatctctttcagaaagattctctgatgaacaggtatatccaacccaagctggtttttctcctgaagtcacgtctaaggctgcaccgaatgaagaagttagtacccccaaaaaaagtaaagaagaagatacagatgtgaaaattattacagacaaattagctactgctctgctgacaattagtgcaaaagaagacttagtaaagcagcattctaaagttgcagaagaagctgtctcaggctgggagaaggctgaaaatgaagtgtcatctttaaaacaaaagcttgatgctgaaaggaagaagaactcaattctcgaagaccgagttggtcatcttgatggggcactcaaagagtgtatgaggcagcttcgacaagctagagaagtgcaagagcaaaagattgttgaggctgttgtgaatagttctcgtgactgggaatccaaaaaatctgaacttgagaggaaagttgctgaacttgaggctcaacttcaacagttaaagcagatgctgctgcatcaa

SEQ ID NO: 210103 - DNA, 543 bp, Glycine max
aaagatgtttggaatcatcggaggaaacaagggtcacaagataaaggggaacttggtgattatgcgaaagaatgtgttggatatcaacagcattaccagtgttaagggtgtcatcggaaccggcattaacatcattggaggagtcgtcgacaccgttactgctttggcgtcccacatctccatccagctcattagtgccaccaaggctgatggacatgggaaaggaaaagttggaaaggctacaaatttaagaggacaagtgtcgttaccaaccttgggagctggcgaagatgcatacgatgttcattttgaatgggacagtgacttcggaattcccggtgcattttacattaagaacttcatgcaagttgagttctatctcaagtctctaactctcgaagacattccaaaccacggaaccattcacttcgtatgcaactcctgggtttacaactcaaaatcctaccattctgatcgcattttctttgccaacaatacatatcttccaagcgagacaccggctccacttgtcaagtacagaga

SEQ ID NO: 210104 - DNA, 204 bp, Glycine max
atgcccttttgttgtttgttttttttgtatgcaaacaggatttcttgattaacacttaacaggagacacgagaacattcaagtgccccaaatacataacttaaccatacatagggtgatgacggaaccatattccttatattcactttgatcgaaaaccagggaaaaggctggagcaaccatagagcccctaaatggagatact

SEQ ID NO: 210105 - DNA, 533 bp, Glycine max
gaaagaacaaaccaagtccaaggaagggactgatgcaacaaagcaaaggcaatcccgggagcaggcaaggaggaaaaagatgtcaagagctcaagatggaatactgaagtacatgctgaaaatgatggaggtttgcaaggcacaagggtttgtttatgggataattcctgagaaggggaagccagtgactggagcatcagacaatcttcgtgaatggtggaaggacaaggtcaggttcgatcgaaatggtcctgctgccatagtgaagtatcaagctgataatgcaatccctggaaagaatgatggatgcaattccattggtccaactccacacaccttgcaagagttacaggatacaaccttgggttctctcttgtcagcacttatgcagcactgtgatccccctcagaggagattcccattagagaagggtgttcctccaccatggtggccaactgggaatgaagaatggtggcctcaaattggtctacctaaagatcaaagccctccaccttacaagataccacatgacc

SEQ ID NO: 210106 - DNA, 234 bp, Glycine max
tgccctttctttttttttgttttaatcagacagcttgggttctcatgtcgaggttgaacgtacttagacaactgctattctcatacattgcaaccagtgggaggatacccgagactatattacaacaacagagccatatttataatgcgcatacataggtgacttcgagtacacaaaaaagggtgacttctaaaaatgacaatatttcagcacagtgcacatgaattcgagggc

SEQ ID NO: 210107 - DNA, 550 bp, Glycine max
  unsure (1)..(550): unsure at all n locations
ggcaaccgatgcctccgccaccgttcccatccctgacgtcatgaaggcctctatccggcccgacatcgtcaatttcgtacactcgaacatctccaagaacagccgccagccatacgccgtcagtcgtcgcgctggtcaccagacctccgccgaatcctggggtaccggccgagccgtctcccgtatcccccgtgttcccggcggcggaacccaccgcgccggccaaggagcctttggaaacatgtgccgcggcggacgcatgttcgccccgaccaagatctggcgccgctggcataggaagatcaacgtgaaccagaagcgctacgccgtcgtctccgccattgctgcctccgccattccttccctcgtcctcgcccgcggccaccgcatcgagtctgtcccggagctcccccttgtcgtcagcgactccgccgaaggagtcgagaagacaaaagaagcgatcaaagtcctcaagcagatcggagcattcccggacgccgaanaggctaaagacagccgcagcattcgtcccggcaagggaaaaatgcgt

SEQ ID NO: 210108 - DNA, 601 bp, Glycine max
  unsure (1)..(601): unsure at all n locations
cacggtcttcgcggtttcatcggccctagacatgtcgataatctcgtacgacaacgcgcacgccgccacgtcgcgcagcgacgaggagctgatgtccatgtacgagcagtggctagtaaagcacggcaaggtgtacaacgcgctcggagagaaggagaagaggttccagatcttcaaggacaacctgcgattcatcgacgaccacaactcccaagaggaccgaacctacaagctcggactgaaccggttcgcggatctcaccaacgaggagtacagggccaagtacttgggaaccaagatcgatcccaaccggaggctcggcaagaccccgagcaaccgatacgcgccacgtgtcggcgacaaactacctgaatcggttgattggaggaaggaaggtgctgttcctccagtcaaagaccaaggaggctgtgggagctgttgggcattctcagcaatcggtgcagtggaaggaataaataagatagtgacaggtgaactgatttcgttatcagaacaagaattggtggattgtgatacaggatataacgaaggatgncatggagggactatggactatgcatttgagttcattatcaacaat

SEQ ID NO: 210109 - DNA, 560 bp, Glycine max
tttctctacttctttccctttccccaacccctcatacgttactctttaaatacgcacgacatcttcacgtgcctctcggttcttcagtccaaacaatggccatggttgagctctggtggattacgtgctttctctaactactgttttccacacttaacgaaccagaacacagtgagaaagacataatggcggtggagtacacatgctgctcaacggccttcttcgttcacatactggtcatcgtgctgctcgtgcttttcgcgggcctcatgtcgggcctcaccttgggcctcatgtcgctcagcctcgttgatcttgaagttcttgctaagtctggtactcctcaggatcgtaaacacgctgagaagatattaccagttgtcaaaaaccaacatttattgctatgtactctgctaatttgcaatgctgcagccatggagacacttcctatttttcttgatggccttgttactgcatggggcgctatcctaatttctgtgacattaattcttttgtttggtgagattataccccaatcagtttgttctcggtatggtttg

SEQ ID NO: 210110 - DNA, 551 bp, Glycine max
  unsure (1)..(551): unsure at all n locations
tttaccttcatctttctctcagcttcaccttcaccttcaccttccgaattgtatcaaacctcaaaaaatggatcatcaaaacaaacacgtagcagtctttgctttcccctttggcagccaccttatgcctctcttaaaccttgtcctcaaactagctcattcccttccaaactgttcattctctttcattggcacacacaaatccaatgcaatccttttcccaaaaccccacatcccaaataacatcaaggcctatagcataagtgatggaatcccagagggtcacgtcctaggcaaaaacccaactgaaaaattgaatctttttctccaaactggtcctgagaaccttcacaaaggtatagaattagcggaagcagagacaaagaagagagtcacatgcatcattgcagatgctttagtaacctcttctctcctagtggctcagaccctcaatgttccttggattgcactttggcttcccaattcatgctcactctctctctatntctacactgactngattcgccagcactgtgcaagccgtgctggga

SEQ ID NO: 210111 - DNA, 509 bp, Glycine max
  unsure (1)..(509): unsure at all n locations
aaaatgaaaacccaaagtgcttctctcctctgtctttttctctctcttgctatccttgtggctagtggcactgctgcaagtgcaactccaactccaccatgtttcaacattcaacagaagcctttttccttccacttttctctttggaattggttcttctgcttaccaggcagaaggagcagcaagtgtagatgggagaggaccaagcatatgggacacctacactagacagcatactgaaaagatttgggatcatagcaccggtgacatgggagctgatttttatcatcgatacaagggtgacataaaaatagcgaaagaaattgggctggactctttcagattctctatctcatggtcaagaatattcccaaagggcaagggagcagttaacccccttggggttaaattctacaacaatgtcatcgatgagatcctagcanatggtttaaaaccttttgtcactctttttcattgggactttccacaagctcttgaagatgagtatg

SEQ ID NO: 210112 - DNA, 412 bp, Glycine max
  unsure (1)..(412): unsure at all n locations
gacatgccatttggcattatttatttgataatacgatctcttgatgacattcatcacaggtgatatacaatgaaatctagggaaacaaacaagaaaaacactagacatgtcaatggaacactaaagtcagatcacttgagatggaacttttgcaaccaaacagctgagaacttggggtatctcttcaagctggtcttgttatccacatatatgagcccgaatcaaactgggtaaccagcatgccattcaaaactgtgcgaaaaagaccatgcataatagcccttcaaatttacaccttgcttgatcgcttgaagatagaatttaagatggccatcatggtatctaatccttatactatccttgcgggcttcatagactggnattgagtcattacttgattgagccatgccat

SEQ ID NO: 210113 - DNA, 585 bp, Glycine max
ataatgtcccctcaaaattaagtgtgaactactcaaaggcttcaaaaacaaactatggtgatatttatagaacttaatgataaattttgtacaccacaaaaagcataacagtatatttaatttaatcacaaagaatacttctaccctttaacatactcaccttggatggatggaatggggattgtttctaatgtgtttatagggatgcctatttatatagattagattttatccatcataaaaataaaaactgattccataatatcaggatgtaaatatactttcaacaactttataattaaaactgaaatcgtgttaataacttggaatcgtgagaaaaattaggaccactttcatttgatttcaaaatcaaaactaacacttaaaggatacaaatgaaaaggaattttgaatagaaatataccattttgaaatcaatacgacttacaacgagacacccaaggatttttaagcaatgctagaagaaatatcaaaagatacttttgtttcccactaattagtttaaaacttacttgcatagtttatgattaatactgtgactatttttactcatgtctacaggca

SEQ ID NO: 210114 - DNA, 565 bp, Glycine max
ataatgtcccctcaaaattaagtgtgaactactcaaaggcttcaaaaacaaactattttgatatttatagaacttaatgataaattttgtacaccacaaaaagcataacagtatatttaatttaatcacaaagaatacttctaccctttaacatactcaccttggatggatggaatggggattgtttctaatgtgtttatagggatgcctatttatatagattagattttatccatcataaaaataaaaactgattccataatatcaggatgtaaatatactttcaacaactttataattaaaactgaaatcgtgttaataacttggaatcgtgagaaaaattaggaccactttcatttgatttcaaaatcaaaactaacacttaaaggatacaaatgaaaaggaattttgaatagaaatataccattttgaaatcaatacgacttacaacgagacacccagggatttttaagcaatgctagaagaaatatcagaagatacttttgtttcccactaattagtttaaaacttacttgcatagtttatgattaatactgtgactatt

SEQ ID NO: 210115 - DNA, 560 bp, Glycine max
  unsure (1)..(560): unsure at all n locations
caaagcacaagtcatggaaagaataatggttggaagtgcaacaaaggttgctttcaccctcttggccactttcgccattgtcattccatgccttgaggctggcattgctgagtttgacgattttctcaaagcccaagctgatgaagcccataaaattgctcttgattcctatgtcccagagccccacgatgtcgcccatgaactcaatttccatgttcatatggcactggaaaactccacaaggagggaactaaggcagaggaaacttagaggaggaggcaaatgtcaagcctccaaccccattgacgcttgctggagatgcaataaagactgggccaatgaccggttcaggctagccaagtgcggcaaagggttcggaagacgggccaccggcgggctcggtggtcccatctatgtcgtcaccgataattccgatgacgacatggtgaaccctaagccgggaactatccgtcacgctgtcacccaaaaaggccccttgtggatcatctttcgacacagcatgatcatcagttngaggcaagagctgatgatttcctccg

SEQ ID NO: 210116 - DNA, 554 bp, Glycine max
caaagcacaagtcatggaaagaataatggttggaagtgcaacaaaggttgctttcaccctcttggccactttcgccattgtcattccatgccttgaggctggcattgctgagtttgacgattttctcaaagcccaagctgatgaagcccataaaattgctcttgattcctatgtcccagagccccacgatgtcgcccatgaactcaatttccatgttcatatggcactggaaaactccacaaggagggaactaaggcagaggaaacttagaggaggaggcaaatgtcaagcctccaaccccattgacgcttgctggagatgcaataaagactgggccaatgaccggttcaggctagccaagtgcggcaaagggttcggaagacgggccaccggcgggctcggtggtcccatctatgtcgtcaccgataattccgatgacgacatggtgaaccctaagccgggaactatccgtcacgctgtcacccaaaaaggccccttgtggatcatcttcggacacagcatgatcatcagtttgaggcaagagctgatgattt

SEQ ID NO: 210117 - DNA, 607 bp, Glycine max
  unsure (1)..(607): unsure at all n locations
ttaagatcaaaggacttccttatttggaggctcatgcagaaccttacatgaggaatttagtaacacgcgatgttgtttccggtccattgataacgttttctggcatcgaaaaggttgcaaatatattgcaagctttgaatactactggacataatgggtttcctgtcattgatgaaccacctttctcagattcaccagagttatgtggacttgtactgaggtctcatttactagtgttactgaaggagaagattttttcaagggataggggttttgcaaatcaaaggatcttccaaagaatttctactttggattttggaaaggcgggatcaggaaaggggatcaaactagaggatcttgatatccaagaggaagagatggatatgtatgttgatctccatcccataactaatgcatctccttacactgtggttgagacaatgtcactagccaaagctgctattcttttccgacaacatggactcaggcacatgtgtgttgttccaaagagccaagggagacctncagttgttgggattctaacacgccatgattttatgccagagcantgtttgggacttcaccctgatatcatgcctcacaaatg

SEQ ID NO: 210118 - DNA, 614 bp, Glycine max
  unsure (1)..(614): unsure at all n locations
gaacgatgctgggacaattgtgaatgaacttgaagttcagcatcctgctgccaaggtgtttggttttggctgggaaggctcaacaagaggagattggggatggagctaatttaactatttcatttgctggggaactcctgcagggtgctgaggaacttatcaggatgggtttgcatccgagcgagatcatcagtggatacactaaagcgatcaacaagactgttcaaatattggatgaactggttgagaatggttcagagagtatggatgttcgtgataaggaacaggttgtttctagaatgaaagcagctgttgccagcaagcaatttggccaagaagataccttatgttcgcttgttgctgatgcatgcatccaagtgtgtcccaaaaaccctgcaaactttaatgtggacaacgttcgtgttgcaaagctcttgggagggggcttgcataacagtactgtcgttcgaggattggttctgaaaagtgacgctgtcgggattataaagcaagcagaaaaggcgaaggttgctgtgtttgctggtggtgttgatacatctngcactgagactaaaggaactgtcctcatacatacagctgagcagctagaaaat

SEQ ID NO: 210119 - DNA, 619 bp, Glycine max
  unsure (1)..(619): unsure at all n locations
gaacaacagcaacctctctgccttccaaacccacattctggaatttggttccaatgagacaatcttcttctccggggcacttggccttagccttagacaatccacgtagaacacttcacgtgtcttgtggctccacatcaccacatgcttcccagagatcatcaattcaggggggtgaagcttttttcaggggtgtgttggaaagtatgcaatctgtttacttgaacagaaatcgtactgctaaggccatattggaccttgttcactctgctgagaataactcattatgctatgatcatcttgcattcaggacatttggggtgaatggttatggaattgattccatggctagtttttttctggattatggctatacacaaagggaagagttgaggtttccagccaaaaagttgagggctttgtggttttctcctcctgctgattcactggctagcaatggcagtggcattaatgggcctttgccaagaatatttatatcagagctactggtagatcaaatgagtccacanactcagganataattaaaaaatacaccgaatcatctgtggatgggaacaagtatgcagcacttgcaagttcccttgacattaacatggg

SEQ ID NO: 210120 - DNA, 578 bp, Glycine max
  unsure (1)..(578): unsure at all n locations
cttgttctcttcttcttcaacacaactagtcataatccagctcatctctctctccctggctctttgttctctctttctctttctccaaaatggctctaaactacccttttttaacctacttcatactactgctagtaaccataacccgtttgatattcactgtgggaaaaactgagcaatggaaagctccgattctaccagagcttgacattgataacatatcccacaaactccatgatgaccctgaaaccattcaaatggcttcaagggactatggccatttaacgcatgaattcccattagctgtgtttcgtccatcttctatagatgacatagtcaccttgataaaatcttcgtacaatagctttgccccttttgacatagctgcgaggggccaaggccactccactcatggacaagccatgnctcgtgatgggattgtggtggacatggccagcctaagaaaacaaagaaatggggttgcgattagtgtctctaaggaccctntgatgggtcactatgctgatgtnggaggggaacaaactctgatgatgtgctacatgccacactgatatgga

SEQ ID NO: 210121 - DNA, 578 bp, Glycine max
  unsure (1)..(578): unsure at all n locations
cttgttctcttcttcttcaacacaactagtcataatccagctcatctctctctccctgtctctttgttctctctttctctttctccaaaatggctctaaactacccttttttaacctacttcatactactgctagtaaccataacccgtttgatattcactgtgggaaaaactgagcaatggaaagctccgattctaccagagcttgacattgataacatatcccacaaactccatgatgaccctgaaaccattcaaatggcttcaagggactatggccatttaacgcatgaattcccattagctgtgtttcgtccatcttctatagatgacatagtcaccttgataaaatcttcgtacaatagctttgccccttttgacatagctgcgaggggccaaggccactccactcatggacaagccatggctcgtgatgggattgtggtggacatggccagcctaagaaaacaaagaaatggggttgcgattagtgtctctaaggaccctntgatgggtcactatgctgatgttggaggggaacaactctggatgatgtgctacatgccacacttgaatatg

SEQ ID NO: 210122 - DNA, 573 bp, Glycine max
  unsure (1)..(573): unsure at all n locations
cttcatactcactagtcactatagctcacccttgaagaagtgcaatttcatcctctgactcttccaaatcatggctagctcactgcttgtcatgaaggttacaagctgcatggttgcggtgttgatggttagttttggacacataattcccttggcagaagctgaaattccatgtggcagggtgcaaatcacagtggctccatgcatagggtacctaaggggtcctggtggaggtgtccctgcagcatgctgcaatggggttaggagcataaacaaggaagccaaaaccaccccagatcgtcaaggggtgtgtaggtgcctcaaaaccactgctttgagcttgcctggactcaaccttgcaacccttgcagctctccctagcaaatgcggggtcaacttgccctacaagatatcccccaccattgattgcaacacggtaaagcactgagcagttgcacgagggtttatgcttgttgactttaacttgtttcgcagtaataatcagcaaagagagaacanagatggtttaatttcttccattgtctggatcccactaggagtatactttatact

SEQ ID NO: 210123 - DNA, 306 bp, Glycine max
  unsure (1)..(306): unsure at all n locations
attttcttcctctaaaccctaaacaactctttctcttcttccttcgctcgttgttctccctcgcgtagatcgacaatggcggagacagagacgtttgctttccaggctgagatcaaccagctcctcagtctcatcatcaacaccttctactccaacaaggagattttccttcgagaactcatcagcaacgcctccgatgcttaggacaagattcgatttgagagttagacagataagagcaagctcgatgctcagccagagttgntcattcatattattccagacaagactaacaatacactgacc

SEQ ID NO: 210124 - DNA, 395 bp, Glycine max
  unsure (1)..(395): unsure at all n locations
tggcgccggcgttggcggccacggagccgcgcttcatgccgttgagtagaggttagaaaacagccattgaggtaagtgatgtggagggagggacatgtgtgtacagtggctgagttccttccaaagctcttttagccgagtgaggtcgtatgcgtgtactaaggagcgatcatcacttgaagtcctttggcttacaggtttctgctgctggctatgacagacaaggattcgctgatcatgctaataaccttgcttcgaaaatcctgaataatttgaccaactcaatgaaagcactaggagtagacatacttactggttntggaactattctgggtcctctaaaggtgaaagttggctcttcagacaaaatagtaactgcaaaaaatatcatcatt

SEQ ID NO: 210125 - DNA, 380 bp, Glycine max
  unsure (1)..(380): unsure at all n locations
caaagggcattgatagtgaatacgtgatatctcacaagagcctatgcgagggtgggattagctagggaacccgatcgaagtctactacggcaaaacgatagcgttaagcgtcgccaacttcttcgccaccgtcacgctgcgtccctccgaccagttaatcctncaaccccaccccctccacgatctccttcatttctcatcgctccctcaataggtcaacaggttgagctcccaaggttactatggaggcgtgcgatagcttatggctatttgcaatgtcttctacgcgtattgcagagagaacgccatcgatcttggcgacgacaatttcactctctcctacgacaccaatatccctcgccaggctggtctttcgggtt

SEQ ID NO: 210126 - DNA, 403 bp, Glycine max
aacgccgaaagttcatccaatctccgaaagccttcaccggattgcaaccatgtcgaggagaaaggttagagagccaaaggaggaaaacgtgactctgggcccagctgttagagatggagaacatgttttaggagtcgctcgcatctttgcctccttcaatgacaccttcattcatgtcactgatctgtctgggagggaaacacttgtccgcatcactggcgggatgaaggttaaagctgacagagatgaatcatctccatatgctgctatgcttgctgcgcaagatgttgctgctagatgcaaggaactgggcataactgctcttcatatcaagctccgtgccacaggtggaaacaagacaaaaacaccaggtcctggtgctcaatcagctcttcgagccctt

SEQ ID NO: 210127 - DNA, 437 bp, Glycine max
  unsure (1)..(437): unsure at all n locations
gaaggcgctcttctgattctggaggcattgcgggggaaagctcacagtcggggccgccctggtttttttttttataaaaacaaaacttttttaaatttgattccccacgagacccaggacaaggggcaggggcacaataaagacaagagaacctgcaaaccgaaaaagggaaacgcacgaaagcaaacccaaacaagaacaagcaccactcaaggggcaacgaccggacgaacacaagagcaaaagcacgcacacgganagaacacacgcacggatgaggcaacaacactcacagacggggcacatccctaacaggtagctattgcaacataaaataattgcaatgctagtgcaaagagctaacttttggacccccccttcctgatggacatgacaatgggatcagaaggaaacaataaccaatccattgaaggaga

SEQ ID NO: 210128 - DNA, 500 bp, Glycine max
  unsure (1)..(500): unsure at all n locations
ttgtttttttttttttgaaactaaagactgttctaatatattagaacgccgacngagcatacaggggaaatgaagaattagaaaatctctattgaatgtgcacccacattcccttggctgcaggcaagccacggtaaacgacgaaaagcaagtagtatccaggaggagctatggcattggatggaggcgcctccactctaaccctgtaagacccttcttggccttgtacgtttaactcgtcaatcttgagaaacaaaagcctctgtcccatagagaagccatgagtagtgaagggtggagaatacatggacaccttaatgttattcttggttaactcagctccatcttccaccgagaaacttgcctcaaacaaaccaccatacgccaactttttctccgaagcattcctagacaattggtggcctatacttgacaaagttggcgtccaaattaggaggagagaaagcttcaactcttgtctcaattgggaaactatccac

SEQ ID NO: 210129 - DNA, 485 bp, Glycine max
  unsure (1)..(485): unsure at all n locations
ttgttttttttttttttcggggcaaaaatatcaaaatatatatgaccggcngccgacaaccccggggggcatggaaaaactttaacaggcggatagagcagcagccgcacgacccgttatatgatctaaatatgataatgtatcaacgggggacaaaatgaaagtccacaaaactggaagaaaaaggagtcaaactggcgatccccaaaaagagagggcacaccacgcgctcggtgggaacagcaacgaggcccggggatcttggagcgccgaggccgaacacgtcacccatgctcatgctactgggcgtcatgccatacggcaaaagccacgtgaagcagagaaggaggcgcgccaacgaaaaattgagcgcgaagagaccgaacaccatcccggggcgggacctgcgaccccacccgaagggcatgaacccgaagctgcacccttagaaatagggcacgcccggttaaagaaaccgggcgggg

SEQ ID NO: 210130 - DNA, 512 bp, Glycine max
  unsure (1)..(512): unsure at all n locations
gcaaggactggttcagaggatgccaagtgttctgattttttttcgngcatgtcctcaacaatgactacacccactggatgatgtacgcaattggtggaagctcagggccaacaattctgagccaaggaaaccgtttcatagctccgaacaacaacgccgcgaagctgatcacacacagggactatgctgaaccccaagtgtggaagaattggcagtggcaatcagaaatggacttgttcataaacggtgcacagttcatcccttcaggctcacccatcaagacgacctacaaaaagggtctcctcatgaagccaagagatggaactcatgctagtagattgacacgaaattccggtgccctaaactgcatagttggtaggccttgttagacaaattagttaacattaattgttgttgctgttggttttttttttcttcctccatttttttaaaatgttagaaagcatgcacccatgcatgcatgcacagaagattcatgtcagctaggatga

SEQ ID NO: 210131 - DNA, 559 bp, Glycine max
gcaagttccaagttccaagttcatgcacatccgatcttttcctctgagaagacgtgtcggtagctgaagcattttataagcctccactttcctgaactagttttaacatacaatctttcaagtacacctccccagcttccatttaagaatggagatcactagaataggccaatggttaagtcttctgatatgtgtactactattactgcagacagaaggggttcctgtgggaatcacttttgttgaaaatgcagtggcaaaaggggctgtttgtttggatgggagtcctccagcttaccacttccacaagggatctggagcagggattaacaactggatagttcactttgagggaggaggatggtgcaacaacgttactacttgcctttcccgtagggacactcgattaggttcatctaagaaaatggatacatcactttccttttctgggtttttcagtaacagtaaaaagttcaatccagatttctatgattggaacagaatcaaggttaggtattgtgatgggtcatcattactgggtgatgtgaaagctgtgatc

SEQ ID NO: 210132 - DNA, 553 bp, Glycine max
ggcaagaaggcaaagatgtttagattttcagctgtgaagcacaacagtggcaagtcctacaatcagttagcggaggagactggactcaccaacgtctatgttgctcagcttctcaggagacaggctcagctcaatccccaaactgcccctctacttcgggcagcgctgcccgacctgccccaagaccttgtttctgagatgatgagaccccctttgaggtcttatgaccctaatctcatccaagaccccactgtctataggttgaatgaagctgttatgcattttggggagagcatcaaagaaataatcaatgaggagtttggtgatgggatcatgtcagcaatagatttctactgctcggttgataaaattaaaggagtagatgggaaggatcgtgtggtattgacatttgatgggaaatatttgccacattcagaacagaaatctgagcacatggtttcaagaacaaggccactgggaaaacagtgagtatcttcattggaggaccaactacgcaatcttcaacaccagtctacctgcacatgaattatca

SEQ ID NO: 210133 - DNA, 544 bp, Glycine max
gtcttgttggtaaagaaagatttagaatttatgaatcgaagacgaagatggaggacgcatcagcatcaaagttcattccacaccaaatcggaggggtccaaaacgacgcgcttcgattcggtctccatggagtcaagagcgacatcgttggttctcaccctcttcaatcttcactccaatctacaaggagaatggatgaagcgatgaagaggcaatgcaaagttaacctgtacggaactgcttttcccatgaaggaggagcttgacaggcaaatcctgtccaggttccagcggcctcctggaccaattccttcttcaatgctgggtttggagactgttacaggaagtgttgatcactttggttttgaggattgtctaaatgacccccgtgagtcagagactttccggccattagacatgcatcatgggatgggaagttcgccttggtctatctaagggaccagtgtacccaagtattatataattaaaattgactgttattctagtaccagaaaacagtattttgtgatcgaagcttcttgtta

SEQ ID NO: 210134 - DNA, 560 bp, Glycine max
  unsure (1)..(560): unsure at all n locations
aaccccctcaaataaacctcatttcattgtgtgaccaaagttattattacattgcataatcaaccatgtcaatgaagttgtacgcttcccttacctttgtggtgtggcttttcatggccacatcgtccctagcccaatacgttctcgacacataccgcgaacgcgtcgacagcgatgatgagtactacatccggccagccataacggacaacggagggcgtttcacattgatcaacagaaacaggtcgtgtcctttgtacgttggtctcgaaaacaccgacacgccactaggctatcctgtgaaattcacccctttttcccgcaacaacaacgatgatgacgacgacgacataagggtgaatagggacctcacagtggcgttcgatgaagtttcacaacgtgtgtgcaatccacagaatggagagtgggtgagaacgacacgaggagtggaaggaggcttattatcactggccgagacgaaaccacgggatcatacngtaactagtatagaattgtggagacagagaatgctggtatctataacattcagtggtgcccta

SEQ ID NO: 210135 - DNA, 578 bp, Glycine max
cattgactagaaatcccatattttccccccatactaactcacccaacccctctttctaaaaggcctcaaggatacactccggacttaattacgttattttgttagggtcaccgtttcgagatattctaaacttgtactgaaaaatatggagggaaaagaagaggacgtaagagttggagccaacaggtacggagagaggcagccaatagggaccgctgctcaggctaaagactacagagagccaccgtcggcgcctctcttcgaaccgggagagttgtcatcgtggtctttctatagggctggcatagcagagtttgtggccactttcttgttcctctacatcacagtgctgactgtgatgggatgtgttcaaatctaagagcaagtgttccactgtgggtatccaaggcattgcttgggcttttgggggaatgatctttgctcttgtttatttcactgctggaatctcagggggtcatattaacccagcagtgacgtttgggctgttcttggcacgcaagctctctctgacaagggcaattttttacataatcatgcagtgcttgggagctatatgt

SEQ ID NO: 210136 - DNA, 555 bp, Glycine max
atcgaaacctgcatggttactttattaatttttccaccttctactgcactccgagtaacaactcgcactatttatgttgcggtgacaatgttaattggcatatgtgttccgttctttggctctcttcttggatttcttggaggctttgcgtttgccccgacatcatattttttgccctgtatcatatggcttaagcttaaaaagcccaagaaatttggcttgtcttggacaattaactggatctgcattattcttggggtagtgttgatgatattatctccaattggtgctctaaggaatatcatactatcggccaagaactacaagttcttctcgtagactattgatgcaatcattgatttcccaactgttttaaaagttagatgggtgaaactaaataacaagaaagcatttacatacatgctttatgcatagaatatagataatagatagcttcataggatttgtagaagtgatagacacacaactagccttgcacaaaattgaagcaactatcttgctcactatgtagaatgtagatcatttatggagaca

SEQ ID NO: 210137 - DNA, 444 bp, Glycine max
gatgaatataaaatggactaatcttcggccgtcctgtgaactctctgtgaaaaaactaccctgtgagacaaccattgcaccaattcgtcagaattatggagtttacacacagagttacaacttactacaaatggaataacttgaatcctttgtggctgatgtctttctctcacctgaaatcaacttggaatctgcatgagcttctattgaagagatactttgatcaagatggatgggaaaaactctcttcaaataactagaagtggtattggtgcttatgatgacgatggacatgccaaaaggactgggaatttgcatagtgctgtagctcatatgattactgctggtatcggctctggcgatctttctcttgcatggagcactttccaattaggatggattggagggccatttcccttgctttgttgtgcaattgtcacctat

SEQ ID NO: 210138 - DNA, 535 bp, Glycine max
  unsure (1)..(535): unsure at all n locations
atttctctgttcatatatatattgcccattgtaattgtacatggaaggaggagtacctgacgccgatatctctgccttcagagaatgcctctccctctcatggaagaatccctatgtccttcgcctcgctttctcagctggaatcggtggccttctttttggctatgacaccggagtgatatctggagctcttttgtatataagggatgaattcccagctgtagataggaagacttggcttcaggaatctatagtgagtacagcaattgctggagcaataataggtgctgcagtgggtggatggatgaacgaccgatttggaagaagaaaatcaatccttgtagctgatgtcctctttatagttgggtcagcagtaatggctgcagcacctgtccctgctgttctcatcataggtcgagtttttgttggccttggtgttggaatggcttcaatggcatctcctctctacatttctgaggcttcccccaccaaagttcggngagccctngtagctctcacagtttcctcatcactg

SEQ ID NO: 210139 - DNA, 473 bp, Glycine max
tcaaaaggttttcatccaattatcttccctttcttttcattggagtgcactttcacttgtggagctgcatcaactgcagtggaaattgtgctttgttcttgagatgtctggtgttcttctttgggtgagttgtggacccaaagagaacatcaactccttggtgagtttttcatgcaggagtagtagtggtggtgaaagaacacaaaagagattttctggaatcagttttgctagtggtacttctgctttttcaagtgcagtggcagctactgagacttcaagatcttcagaggagagggtctatgaagtggttctgaagcaagcagctttggtaaaagaacacaacaggggtacaaaaatagctctggatttggacaaagatgttgaggctgatttaacaatgtggatctgttgaatgcggcttatgatcggtgtggtgaagtttgtgctgagtatgccaagacattttactt

SEQ ID NO: 210140 - DNA, 513 bp, Glycine max
cggaggagttgaaatgaaatcatccactgtctgttgtggtttatctccgcactccgtcttcatgaatcagcatcaccaccgctccaacacaggggaaaatgagggagatccttcacgttcagggagggcaatgcgggaaccagatcggttcgaagttctgggaagtggtgtgcgacgagcacggcatagatccgacggggaagtacgtcggaaactcagatctacaactcgagcgcgtgaacgtgtactacaacgaagcttcctgcgggcggtttgtcccacgcgcagtgctgatggacctggagcccggaaccatggacagcgtgcggactgggccgtacaggcagatattccggcccgacaacttcgtgttcgggcagtccggcgcgggcaacaactgggccaaggggcactacacggagggcgccgagctcatcgactccgtccttgacgtcgtgcgcaaggaggccgagaactgcgactgcctacaggggttccaggtctgacactcgc

SEQ ID NO: 210141 - DNA, 333 bp, Glycine max
tgaaagagcagacttgaaattacccactgtccgtagccactgatctgcacactcacgtgtcaaggggcatcttcagcaccgctccaccacagatgaacatgaggtggatgctgcacgtccagggagggcaatgcggcaaccagagcagttcgaagccccggcgagtgtcgtgcgacgagcacggcatagatccgactgctcaccacgtagaatactcagatccacaactgcagggcgtaaacgtgcactacaacgagccttcctacagactgatagtcccacacgcagtgctgatagaccctaagcccggaaccatggacaggctgcggtccg

SEQ ID NO: 210142 - DNA, 471 bp, Glycine max
cttggatggaaaagtctaacaagctaaggcttctgataccgaatgcacgagatcagacaaactaggggaggctttcacaaggagtgacagtgttcaaggaactatagcatattgcatttacatcagtcatacatacgtaaaccataaggagtacagacaggaggttctacgtctacttgctacagcatagcaaaagcttacttcaccagattatctgagcattagccaatgtcgtatgacctcggatgagacatagggtgtagcaagcatactagagaagcgatgacattctgaaaacaaggatgatgcactatcggcatttcaaatagcatttgatctggtagagaatgagcaccatactgaactgtaaatgctagagatcgccttgcaccacctaaatactaaactttggaaactgcacagtcaaaacccagtgagacagctaccactcaaaatgccaacgcgaatgga

SEQ ID NO: 210143 - DNA, 491 bp, Glycine max
ctttagctcgtccgcttttctatgaacatcctccatacaaagcacaaaatccgcatactatcctgtggatctttacaacatgcacccgcgatttctacgatcccttcacatggtccattctgtgcacccttgccttaccgtaaagaaccttagcctgatatctcaacatgcgcttacgatttcgtctacaatggccgtggataccacttgctgcagaaccgactagatattaaaggactacaccgcccactgaaccgacatcggacgagctctctatcaagacgtggatgacttctaccgaccatgcgatccatataaggagaacttgcgcctgtatcgcatgcagagtgcttcatctgacgggacattatcggcataagaagttgctacatagcttccggagcctgcactcggaatcactagagctagggatggcatgaaccgctgggtctggactcctgtggcagctgcgcacagtgattcacggttgc

SEQ ID NO: 210144 - DNA, 557 bp, Glycine max
  unsure (1)..(557): unsure at all n locations
gcaccacattcacctgaggcttccaaagcattggcttcccttgcagcatccactgctgctgcttcccttggcatgtcagaaatgcttggaaaccccatcaacttcagtggtgccacaaggccagctccatctgcttctagtcctgcctnctttaagactgtggctcttttctccaaaaagaaggctacaccaacacctccaaaaaaagctgctgctgctgctcctgccaatgatgagcttgccaagtggtatggtcctgacagaaggatcttcttgcctgagggtctcttggaccgatccgaaatcccagagtacttgaccggagaagtccctggagactatggttatgacccatttggtcttagcaagaagccagaagactttgccaaatatcaggcatttgagttgattcatgccagatgggcaatgcttggtgctgctggattcatcattcctgaggccttcaacaaatatggagcanactgtggtccagaagctgtttggttcaagactggagctctgcttcttgatgggggtacgcttgactactttgggaa

SEQ ID NO: 210145 - DNA, 602 bp, Glycine max
gttaaaaatgatggggattcaagcttgaacgtctttgcgatcaaggctagtgttcaccttccttttgatcaccgtatgctggttcaaaatcttactgcacagggttttaacaatggttctgtaccagcctcagcacaagctactttcccatatttatttgcagtcagtaagttcttgcaggcaggaacttttgaccttgtgggcactattatatacgagatagatgaacatccatatcaaagcaccttttttaatggcactgttgaggttgttgaatctggtgcttttcttagcatggaatccgtttttcttgttactcttggggttgcactccttgtcctcctggggctatggattcatggccaaatacagtacctatctaagaaaacaaagagggctccaaaagttgaagttgggactaagactactgatgcttcaacagatgaatggctacagggaactgcttatactcagtctctgtcaagcaagtcaaagaagaagaagtagataaacaatttctcacgttcagccactcactagactctaccatggatatggcatacagaatcctgtaactgactagggttgagtatgagagaaca

SEQ ID NO: 210146 - DNA, 460 bp, Glycine max
cagtactgcacgcgccttacggaggcagcgcctcatcaacgcgaactcgacagaagagctggagcggggaggatgttgatgccgaagcggacggcgcgagctatactgacgcgaaacgtgtgcctggggtgaactacataggaccacccaaggctgaacccgaacaatcagatgtcacaacggagagtaagcaatgtctgacatggcttgatcaacaaccaagtagaagcgtgaggtacctgagttgtggaagccgcggatctggctcagtgtgacaactgagagaaatagcaagagggtgggagaaaagtggccacagttcatgatgggcagtgaagaggccaacacaagactacaaaacaaagcctatacacgacacaagaacagcaacaacaacaatggattccgagtagagttcatggttgccaagagggctcatcgagagaaccaatgacagggg

SEQ ID NO: 210147 - DNA, 556 bp, Glycine max
tgtatgtcaccattttactcggaggctgttcatccagactccaaagttagacagacgattcagtgcgttagttgtggttcaagcatgtggatcaatggtaacagaggagcagcctcatgccatgttaataccaatggagtactttctcatgggatatggcttgtacaagccatccaagctgagtgtcagcccaagaagccccttgagcccatcttgcatttctcccgagctttactcgccagagagtatgggtttgaaattgaaacccataaagacacgaatttctctggaaatctagaagtagatgaataaaaggctgggaaaatggtgccccttctcatctgttcatgaaagaacaagttcatgattgtatggttagtgggaatgaatgaggggatgccatgccagatcgttgtagatagggggagataaggaaataagaaatcaacaaaagaggaaagaaatgggaagcggttagtagaaatcaacatatagtgattctttcatttgtaatcaatcatagatcatagattttagtcaatgagtttcaaacctg

SEQ ID NO: 210148 - DNA, 568 bp, Glycine max
  unsure (1)..(568): unsure at all n locations
ggaagaacatggctacaggaacggatctttgttgtttcatcctcccagaagccgaacttttccctacaaggttccaagtgaagtcataccttggaaggccatggaagcaattctcaaggacggttgtgatggaatccaccgtgggtgacttccttcaccccgaaggatggtgcccatgggccggtgaacacttcgaagacaccttgtactatgctgaatacaacaacgatggacctggtgccaacgttaacggaaggatcaagtggaagggttaccgtggtcttattagccgcgaagaagctacccaattcacccctgcccagttcctacaggctggagccaacggtggaagcgactggttgaaagctctccgtgttcctcacgcacttagcttcatgaaggcttaattgaaattacacaaacacatatccatgcatcatcaattgagtactgttagagagtgtgatgatgagggtcatagtccgtagaccaattgntattctttggatttatctttggaggtctaccgganatattnttaatgaaaatttttaaaattgctttgatt

SEQ ID NO: 210149 - DNA, 596 bp, Glycine max
  unsure (1)..(596): unsure at all n locations
ctgaggagttgaaattaaattatccactgattgttgtggtttatctccgcactccgtcttcatcagtcagcatcaccaccgctccaacacaggggaaaatgagggagatccttcacgttcagggagggcaatgcgggaaccagatcggttcgaagttctgggaagtggtgtgcgacgagcacggcatagatccgacggggaagtacgtcggaaactcagatctacaactcgagcgcgtgaacgtgtactacaacgaagcttcctgcgggcggtttgtcccacgcgcagtgctgatggacctggagcccggaaccatggacagcgtgcggactgggccgtacgggcagatattccggcccgacacttcgtgttcgggcagtccggcgcgggcaacaactgggccaaggggcactacacggagggcgccgagctcatcgactccgtccttgacgtcgtgcgcaaggaggccgagaactgcgactgcctcaggggttccaggtctgccactcgctcggcggaggaaccgggctccggatggngaccgcttttgattccaagatcagagaggagtaccctgacagaatgatgctcaccct

SEQ ID NO: 210150 - DNA, 579 bp, Glycine max
  unsure (1)..(579): unsure at all n locations
gatccatgtagccgatctcacctagtgggattatgctttgttgttgttgttgtggtggtggttttgtgattattgggctgccatggatctggttggatcttctggtttgagtcctacagggtccaagtgaaggtcaaagtttcgttttttaatgggtgagtgattcagctgctgaatgagtttgaaatggtgggtcagttttagctgaaaaaaggggtgtgaggatagaaaatgaagcgcaaggtggttcagcacaagtggaagaagaagctttttgctttgatcttggtggtgttttgtttaggaagcttgttgtttatgcagacacgttaccatcatgttgcggggttggtttcattgcaacaccgttttgtttctgagcccgaggttcaagggcccaaggttgcgtttctcttcattgcacggaacaggctccctttggaaatggtttgggatgctttctttaggggaggcgatcgcaaattctcaatntttgtacactgcaggcctgggtttcttctcaacaaggcaacgactagatcaccatattttttgaatcgtcaagttaatgatagcgta

SEQ ID NO: 210151 - DNA, 515 bp, Glycine max
  unsure (1)..(515): unsure at all n locations
aaaacctatagcgaagagcgtgaaggcacctgctggcggccatgacattcaagcgcacgaacggaggtcgaaacaaacacggccgtggccatgtcaaattcatacgatgctccaactgcggcaaatgctgccccaaggacaacggncatcaagaggtttcttgtgaggaacattgctgaacaagctgcagtcagagatgtgcaggaagcctgcgtctatgaacaatacacgcttgcgaaactatatgtgaagatgcagcactgcgcttcctgtgctatccattctcatgatgtgagggttcgatcccgcactgataggaggacgcgtgagcctccacagagagttatcacgcgcatggtaacactttttatagccatctctatatagccaaatggagatgatatagagagtgacatttatgcactcagaagagtagttatggccgaatgtacagaatgtcatgccattattaggttgttgaaagatgacactgaatatgctatactctgacctta

SEQ ID NO: 210152 - DNA, 563 bp, Glycine max
  unsure (1)..(563): unsure at all n locations
ggtgaagtcaaggtttgtctcttctggtccgtcctgatcttctacgcagacacataacataacacagcgcacctcttcttcttcttctttcccttcaaatttcaacttcttcatccattttgtgctccaaacagcacaaacacttgaatcacaccgtcttcgctttctactcatctaaaagatagaggttcatgggttgctttggcttctgcaaaggagatgatagtgttacagttgctgacagaggacctttcatgcaaagcactcctactgggaaccccagttatcatggaagacacacagcagtaactgctcctcggactataaattttcaacctattgctgtcccttccatcacagtagatgaattgaagtctttgacagataattttggctcaaaatatttcattggtgagggtgcatatgggaaagtatatcaagccacattgaaaaatgggcatgcagtagtaataaaaaagttagattccagtaatcagccagagcaggaatttctttctcaggtctncatcgtatcaaggctaaagcatgataacgttgtcgag

SEQ ID NO: 210153 - DNA, 535 bp, Glycine max
attaattgcaagaacggcactttttcgcatggtgaagaccccacccgatctctacactctaggggttgcgatagaaagccatgccagagactaatatttttggcatgctgtttggccaaacactcccattccaagttcattgcgagatcttctaaagcctggccctgcaagtgttgaaatcgatgatcaccctatgcaaattgaagaaacacagtacccgaaaaccttcttctataaagaagaccttcatccaggcaaaacaatgaaagtacaattcagcaagcctccctttcaacaaccatggggtgttggtacatggttaaaggaaattaaagacactactaaagaaggatatagctttgaagagctatgcatcaagaaagaagccattgagggagaagagaagttttgtgcaaaatccttgggaacagtaattggttttgccatttcaaagctgggaaagaacattcaagtactttcaagttcctttgtcaataagcaagaccaatacactgtggaaggagtgcagaatctt

SEQ ID NO: 210154 - DNA, 556 bp, Glycine max
tgccatttcaatccccagtttcttcttcaatgccctcttacgagcagatcccaattctccttcccagtttcaaaccctaattccctcattcccatggcctcagaagagcccactgtcgcggtggaacccgctcccgaacctgccaccgtcgagcctcccccggaggagaaggaggagcccaaacctgaagccaaggctaagaaaaccaaggaacccaaacctaaaaaggtttccagaccacgcaacccttccactcatccttcctacgaggagatgattaaagacgcaattacctcgctgaaggagaaaaccggttcgagccaacacgcgattgcgaagttcatcgaggagaagcacaagcagcttccaccgaacttcaggaagcttcttctctaccatttgaagaaacttgtagccgctggaaaactcgtcaaagtcaaaggctccttcaagctcccacctacccgaccttctgcatcttcttcttcttcgccggcgaagaagaagaagcccgcacctgctaagccccaacccaagcccagcctaagcctaagcc

SEQ ID NO: 210155 - DNA, 555 bp, Glycine max
tgaggagcctgctgatctttagaatttggggcaacgacatcactagacggcggccgagcttggaaacttttgtttgaaagcacaacaacttcgaaagaacaaaggcgaacgctgaaacgcaccgggggacatcaccacttacaaaagccaaaagcggggatctgaccgaaagaacatgatccaaaaagacgtcaaataaatactattgtacagacaaagattagtttacaaaagtcaatcctgtggcgcctttgagtgagtcagatggaattgaagtgaataaaagaattaattctggtcgtaataaccaagaaaggtcttggcagcatgcaagctagggaaataagtggggtcaaggaatatcttggtgaacccattattgggctcggagctacgcaccataaccgctacaacctgcttatacgcgtagaagaacctctccatggccacctcaatgccctgcatgcgctgcaaaacatgaacctaccctctctatgtctccgagtaaaccttgctggtgcggcgtcataatcgcggggccacccttggggtcca

SEQ ID NO: 210156 - DNA, 521 bp, Glycine max
cttggatggaaaattccaacaagctatgggtactgctaccgaatgcaggatattagataaactagaggatgcatttacaaggagtgacaatgttcaaggaactttatcatattgcatttacatctctcattcctttgcaaaccttacggagtacagactggaggttctccgtctccttgttacagtatttcaaaagcttgcttcaccagattatctgagcatttgccaatgtcttatgttctcggatgagtcagagggtgttgcaagcatactagagaagcttttacattctgaaaacaaagatgatgcactttcggcatttcaaatagcttttgatctggtagagaatgagcaccaagcttttcttctaaatgatagagatcgccttgcaccacctaagtctcagcctttggaaactgcacagccaaaacccattgagacagcttctactcaaaatgctagtgcgaatggacaggatgatgttcagatgaccgatgatgattctgatcctatggtcaatg

SEQ ID NO: 210157 - DNA, 541 bp, Glycine max
  unsure (1)..(541): unsure at all n locations
gtgaagggcccagacggccaccgtctaggtcagggtcagggttttaattttcgccacacaacagcaacagacactacctcactgcttccgtttacggatttcaatcgcttcgactcgcagctcccatggcaaaagctacttccggaaccgtcaatcctcacagccgtaccggagttcggattgtcgtcgccggagaccagggcaccggaaaatctagcctcatcatcacggccgccgccgaaaactttccggtgaatgtaccaccggtgttgcctgccacgcggttgcctgaagatctgtatccggatcgcgtgcctatcaccatcatcgacacctcttcccgtgctgaggatagtgataaagttgctgaagaattgcagagggctgacacagttgtccttacctatgcatgtgatcggcctgagacacttgaaaatcttagtatattttggctttcacatcttcgcaaactagaggtgaaagttccagttatagtagttggctggaagcttgatttgagagatgagaatcagcangtgag

SEQ ID NO: 210158 - DNA, 612 bp, Glycine max
  unsure (1)..(612): unsure at all n locations
ganaactaggactcctgctattatgacgaacttgcaggcatacagaccctactaaactgcggtcgaccttttttttttttttttttataaaccatgacataccatataccacttataaaaacaatatattcatggggatcattcgttcggatttcatagagacatactagccaaacactaactaaaataaaaaagcaaatctaaagagaaaaatctacaaaccaataactagagaacatctaaacttattcatcttcactacttaacctaagaagaagccataattatctaacatcacggatggtgaaatattattctctaaacacaggttcaattcaaacttaatcaacccttctggggaggactcgccttgtcccaaaacttcaagtgcacagctctttcctccagcatttgctcaacttcttccattggaactcccttggttactggcacgaaaatgagaacgaagaagatgccaatgagagcaacagatccaaacaacatgaatgtccatgctgtcccaatagccacagtcaaagtcaagaaagactgggaaacaatgacgtttgaaacccatcaagttgtaaaagcaattcctccacataccccacg

SEQ ID NO: 210159 - DNA, 469 bp, Glycine max
  unsure (1)..(469): unsure at all n locations
gattagttaacaagttcccattttagggtttttctctctctgnctctctgactcttgtcttctgcacacaaccacatgccctggggggaaatccccaataatggacgaaggtgagggaggcgatcccatggatcagttccaccgtaacgaggctatatccgctgtagctgacgacggtttcttgggcgaggaggacgacgattacgaggatctttacaacgatgttaatgtcggcgaagggtttcttcaatcgttgcggaagaacgaggattcnggggtttcggaacgacgtcgtcgaggacaaaaagcccgtgcagcagcctgatcaagatcccgttgtcggggtttcgatacccggtgtcagtggtggccgtggaagtggaattgtggaaagcaaggtttctgggaatgttgatgggttacagaatcaagggtttagaaggggttattctggtggaggaggtggatc

SEQ ID NO: 210160 - DNA, 483 bp, Glycine max
ctctagcttgtccgcttttctatgaacatcctctctacaaccgacaacctccgactacatctcttgacagctttttaacgtgcacccgcgatttctacgatccgttcccatggtgcattctgtgcacccttgccgtaccgtaaagaaccctacgctgatatcacaattaggctcacgatttctcctacaacggaaagggctagcacttgctgcagcggcgactagatctgcaaggactacaccgcccactgaaccgacctcggacgcgctccctatcaagacgtggatgacttctaccgaccctgcgatccatatgaggcgaactggcgcctatatggacatgccagagcatcatcggacgggacatgaccggcataagaagtggctacatagcttccggaacctgcacgcggaatcactagagctaaggatggcatgaaccgcagggactggctttctgaggcaggtgcacacagtgcttca

SEQ ID NO: 210161 - DNA, 525 bp, Glycine max
acatttttaatctcatcccctttttgctcttactctctctctcagggcatcagatgagaagattaggatcggcatcaacgggtttggaaggattggccgtttggtggccagggttgcccttcaaaggaatgatgttgaacttgttgctgtcaacgatcctgtcatcaccactgattacatgacatacatgttcaagtacgacaccgttcatggccagtggaagcattttgatgtgaaggtgaaggactctaagacccttctctttggtgagaagcccgtcaccgtttttggaatcaggaaccctgaagaaattccatggggtgaggttggtgctgattatgttgttgagtcaactggtgtattcactgacaaggacaaggctgctgcttacttgaaaggtggtgccaagaaggttgtcatctctgccccaagcaaagatgcacccatgtttgttgttggtgttaacgagaaggagtacaagccagagcttgacattgtttgcaatgctagctgcactaccaattg

SEQ ID NO: 210162 - DNA, 553 bp, Glycine max
agaaaaaataatggcaattggctttcagtcttctctcacactcttctctctattttcggttccctgactcacttttgcttttgcccctatccttcccagatttccttcttcagcagttagtgcagagctgaagcaacgctcacattcttccccaaaatgggctttacagaacaaaattcttcacccagatactggatcacttcaatttcaatccccaaagcaatcacacttttcaacaaaggtatctcatcaacgataccttttggggtggtgccaagaacaatgctccaatctttgtctacactggcaatgaagggaacatagaatggttcacacaaaacacgggctttatgttcgaaaatgctccttcttttcaagcccttttggttttcatcgagcatagattttatggaaaatcaataccatttgggggaaacaagacggttgcatatgcaaatactagcacacttgggtatctcagctcaacacaggcattagctgattatgccgctctcatcattgatctgaagaagaatttgtcagccactgattc

SEQ ID NO: 210163 - DNA, 564 bp, Glycine max
gaattcgtaattatattattacacacatactcatatagtagaggaataaaacaaaggctctcatatcaaagcatacacagctagctattcacaatggccctgcgggttcatttctcaatagtttccatagcggttttggctctatgcacttctgcagattacttttcggctaattttagctatgctggtccaaatggacctgagtactggggaagcttgagtccatcttatgcagcatgctcacatgggaaatctcagagtcctgtggaacttatgaagactgatattgtcatcaacatgcagtcgaagaatctaaacagaaactaccttcctaccaatgccacacttgttgacaacatattcaacattggggtgcactttgaaggaaaagtaggggatattaatataaatggaaaaaattactccttaaaacaattgcactggcattctccatcagagcacatggcatatggtcgtatacatgacgcggagctccatctagtccaactgaccgaagatgatttacagcatagcagttgtggcagtgctctacaaattgggtga

SEQ ID NO: 210164 - DNA, 585 bp, Glycine max
gctatcgtgggtaattgattcatttaagaatttgcacgcatacagacctcactagaactccggtcgagctttgtttttttttttttaattacagatagcctcctttatcgataataaaaatgtcatgttcacaggggagacatttataatcctttatcaggttgcctacccttacactttggaacctttcaaatcatcaatcacagcttgttttttgatgatgcaacaatcgaacccatactttgatggtttgagatctcaaaccacaaagccatgagtgcaagtgacacatctcgttcaataaaaactagataactaataaagtatagtttgtagtaataaataaataagcatactcttttaaatgaatctatacgtctggacgctcattctgatcaaaaatacgattatggcaagttaggtcgcaagggtaggcacaatctatctcacggaagggccttcgatcataaaaccaatcacccactgcctttgcaattgatgtcttggccaccactggggagtcatttctcagccatgtctcttgaattccaaattggcaatgtgcatagcaaccatctataaaat

SEQ ID NO: 210165 - DNA, 611 bp, Glycine max
tggtgtatctaattcgatgaccctatgccgcgtacgtagctcggattcgtcagtacaaactcagtttccaattcaccatattacattttttgatctagattggcaaacaaagatggttcactccaacatcatgcctccaatgtcccccaaactctctctcccggatcataacattccaatcccaactttgcaactcccccttcgccaaaacgacatcaccgcagcgtcgtctcctatctgcgctgcatacgacaactaccttcgtctccctgagctcagagccctctgggcctccaaggacttccccaattgggccaacgagcccatcttaaagcccgccttacacgccctcgaaatcaccttccgcttactcgcaaccgttttctccgacccgagaccgtacatcaacaaacgcgagtggacccgacgcgtcgagtctctcgccacggcccaaatccagatcatagccatgttatgcgaagacgaagaagaaaaccccgagacacgtggcaaggcacccgtgactgacattaacggctttaccggtcaaagcagaagctacagcgaggaaagcctgctcccgcgcctcgccacgtggcagaaatccaagg

SEQ ID NO: 210166 - DNA, 499 bp, Glycine max
ggttgatggagagagttgaagagaaagatgctcttggagcgagtgtgctgcacggtggtatgatgagaacgattgacgaggagcagcgagtgtatagggacgggggaatcgtggttgaacatgataaaatcaaagcaatcggacaatctgctgatatccttgcggagttttctgatgtcgccgacagtattgttgatctgagcggacatatcttactcccaggatttattaacacccacgttcatagctcccaacaaatggccagaggcatagcagacgatgtggatttaatgacctggctgcatgagcgcatctggccttacgaatcgaacatgagcgaacaggattcgtacctctctactttgctttgtgggattgaactcattcactccggtgtaacctgttttgcggaagctgggggccagcatgtttctgggatggctagagcagttggcttactgggtttgcgagcttgcttaacccaatcaaccatggactc

SEQ ID NO: 210167 - DNA, 591 bp, Glycine max
taaaattaagccaacagtgttttttggatttttgggacaaggaagaacttttactaaagaagtgattgaggcaatggcttctattaacaagagacctattattctttctctttccaaccctacgtcacagtcagaatgcactgctgaagaagcttacaagtggagccagggacgtgccatttttgcaagtgggagtccatttccccctgttgagtacgagggcaaagtgtttgtgcctggccaggccaataatgcatacatattccctggatttggtctcggtttaataatgtctgggaccattcgagtgcatgatgacctgcttctggctgcctctgaggctttggctgcacaagtgagccaagagaactttgataagggactcatatacccaccattcaccaacatcagaaagatttcagcacacatagctgccaatgttgctgctaaggcttatgaacttggcttggccactcgccttcctcaacctaaagatttagtgaagtttgcagagagctgtatgtataccccagcctacagaagctaccgatgaaaagtgataataataaataggcgcctttttctttttca

SEQ ID NO: 210168 - DNA, 530 bp, Glycine max
tggtcggctggttatgtaccgactttcctcccatgctcgtccactctcaagacctttctccctctcttcgctccttctctcacaggcccatttctagaaccaccttctctctctatcctctccttttgaagccctccaaatggctccacatagagcccaaatccaggacttgccatgccctcgtcgccgctttgtctgcagaggtccaagtgcccgaaactttcgacgacacggaggaggacgacggtgctgatggctccaccgccaccaacaccgtccccaccaccaagcctaagaaaggcaaggccgcattgcctctcaagagggacaggacgagatctaagaggttcttggaaattcaacaattgagggagcgtaagatagagtatgacttgaagacagcaatatctttggttaaagaaacagctaaaccaagtttgtagaaacagtagaagcccatttccgcctcaacattgaccctaaatataacgatcaacaattaagagcaacagtaaatctgcctaagggaa

SEQ ID NO: 210169 - DNA, 531 bp, Glycine max
caaaaccctaaaccctcactttttttttgtcttccgacgagaatggccggcggcatcgacatgtccctagacgacattaagaagcgttcagccgccgccggggcttctcgccgccgattcacggttgttcacaacccggccagaacgactccgtacccgattccgcaggtaaggcaacagagcatggttgcattatttccagaaatggttttggaggagacaggcgcggctaagattgaaagtggcaccaagctctatttatctaacttggatcatggagttaccaacgatgatatcaagctgctgctctcggaagagggtgaattgaaaagctacactattcattatgatcagaggggaagatcaaagggaactgcacaagttgtgttcgtgaggcattctgatgctttattagccatcaagaaatacaacaatatgaggcttgatggaaagccattgcacattgagctcgttggaacaagtttggctactcctgctgacgctcctctctgtcaaaataacttgatggga

SEQ ID NO: 210170 - DNA, 463 bp, Glycine max
agaataatggtggtagtgctacgacgaactcgacggcatacgcctcattaaactcgggtcgagctttgactagaaatcttatatttgaacgatactctaactaactaaaccaactattctaagcggccggatggattctcttgggacttaaatgcgacatgtcgatagggtcaccggttcaagatagtccaaacctgggctgaaaaatatggacggtaatgaagaggacgtaagagcagtagccaacaggtacagcgagaggcagccagtaccagaccgctgcataggctgctgactacagagagccaacgtcgacgcctatcgtctaaccaggagagttggcacagcggtctctacataaggctggcatatcagagtccgtggccactttctagcccctgtacatcacagggccgactgcgacgggatgtggcaaatctaagagcaaagagtaccactgtgg

SEQ ID NO: 210171 - DNA, 528 bp, Glycine max
attctttgaagggtgaaaaaccttgatcatgaattgtatcattaatcttcaaccatggccacacccttggcctaccaagagcaccttccggcggcacccagttggctgaacaaaggtgacaacgcatggcagttaacagcagccaccctcgttggtcttcaaagcatgccgggtctcgtgatcctctacgcaagcatagtgaagaagaaatgggcagtgaattcagctttcatggctctctatgcctttgcagcagttctaatatgttgggtgcttgtgtgttaccgcatggcctttggagaagaacttttacccttctggggtaagggtgctccagcactaggccagaagttcctcacaaaacgagccgtagtcaatgaaaccatccaccactttcataatggcactgttgaatcccctccagaagaacccttttaccctatggcctcacttgtgtatttccaattcacttttgctgctattacccttattttgttggctggctctgtccttcgccgaatgaacatc

SEQ ID NO: 210172 - DNA, 578 bp, Glycine max
gtttagtactcaatgtcggtcatccttaccctgatgagcctcatactttatatactgtcagtctgggctcttgtagtatccatatcagcagacacatcatccatttcacaatcccaatccctcagccttggaagaaccatcgtttgtacacatgagcctcagaacctggattcttcaatcattgaaatccacacagacgctacctcgggatttggttcacgaatattccgtctcaaaacattgttcgggtcgcagactgtggcaacccaattaacgactcctttgccatcttgagcctaaacagctctggccatttggaccttacacacaacaacactgttgcttgctccacatgttctctaagagaaacacagaatgcagtggcctagctcttggattctgggcaatccgtgataacggacgaaaacgaagtgattcaagaggcatatctgcggcacagttttgattatccttctagtacaaggttatcaggaatgaagattggatggcacctcataagagatctcagtattcaccctacagcttgtaagagtgatgatgatccaaccgcgggagac

SEQ ID NO: 210173 - DNA, 549 bp, Glycine max
gaaaggagagggtccagcggtgttgttcctcctcggcttccctgagctctggtactcatggcgccaccagattctctctctcagctccctcggctaccgcgccgtcgctcccgatctccgtggctacggtgacaccgaggcaccaccttcaatagacagctacacttgctttcacatagtgggtgatctcgttgcgcttatagactctctgggtgtccaacaagtgttccttgtggctcatgactggggagccctcatgggttggtatctgtgcatgtttcgccctgagaaggtgaaggcctacgtctgcctcagtgtccctttcatccccagaaaccccaacgtcagaaccgtagatggcttgcgtgctatgtatggagaagactattacatctccagatttcagaaaccaggggaaatggaggctcagatggctgaagttggcactgagtatgttctcaaaaacctccttacaactcgcaaaactggtcctccgacctttcccaagggagagtacggaactggattaatctcaatatgaccgatatc

SEQ ID NO: 210174 - DNA, 577 bp, Glycine max
gtggctgcttgtgtggaaacgaaggctaccataatcaacccttctcaaacatttcttgatttgttggagaagggttgttgtggctgctcgcgtggaaacgaaggctaccactgcccttctcaaacaaatcaagaaatgtctcagtctcagaaacattgtgacagcctcagcctcaccaactacactgatttggacacgtcatcatcggacgacattgatcagaatagcactggcggcggactcaaggacaatgactccatggagaagaggagaaagagggtgagtggaagaagttggaaggtgaagataaaggacttcattgactcacagatgaggaagctggtggagaagcatgaggagtggttggataaactcacaaagacactggaacagaaggagacggagagggtgttaagagaagaagagtggaagagacacgaagctgcaaggttggagagggaacacacattttggtgccaagagaaagcatggattgcagcaagggatgctgctctatggaggctttgcacaaattaaccgggaacgggatcatatagagtactcattctactgatgg

SEQ ID NO: 210175 - DNA, 435 bp, Glycine max
tgtacacacgaatgattgatgcatatgacgaagtatgcacgcatacggccgcatagaactcgggtcgagctaccacattcaccgttaggctcccaaagccctgctcgacccgtgcagcatccactgctgcagcgtgggtagacatgtcacaaatgctgggaaacccgatcaccgcagtggcgccacaaggccaactccatctgctacgagtcctgcctccttcaagactgtggctcttgcctccaaagcgaacgctacaccaacacctacaaaaaaagctgctgctgctgctcctgccaatgacgagcttgccaagtggtatggccctgacagaaagatctacttgcctgagggtcactaggaccgatccgaaaccccagagtacttgaccggagaagtccctggagactatggttatgacccattcggtcttag

SEQ ID NO: 210176 - DNA, 548 bp, Glycine max
cattgactagaaatcccatattatcccaccatcctaactcacccaacccctctttctaaaaggcctgaaggattcactccggacttaattacgttattttgatagggtcaccgtttcgagatattctaaacttgtactgacaaatacggagggaaaagattaggacgtacgagttggagccaactggtacggagagaggcagccaatacggaccgttgctcaagctaaagactacagagagccaccgtcggcgcctctcttcgaaccggtagagttgccatcgtggtctttctatagggctggcatagcatagttcgtggccactttcttgttcctctacatcacagtgctgactgtgatgggtgtgttcaaatctaagagcaagtgctccactgtgggtatccaaggcattgcttgggctactgggggaatgatctttgctctagtgtattccactgctggaatctcatggggtcatattaacccagcattgacgttcgggctgttcctgcacgcaagctttttctgacatgggcactttttacata

SEQ ID NO: 210177 - DNA, 607 bp, Glycine max
tcttcttcgtctcaaacctcttcgttcccttgattttttccatttcttccaaaatggccaaagacccagttcgcgttctcgtcactggagccgcagggcaaattggatatgctcttgtccctatgattgctaggggagtgatgctgggttcctgaccagcccgtgatcctccacatgcttgacattcctccagcagcagagtcgttgaatggggttaaaatggaattggtggatgctgcattccctcttcttaaaggtgttgttgctacaaccgatgtggttgaggcatgcactggggtcaatattgcagtgatggttggtggattccctagaaaagaaggtatggagaggaaggatgtgatgactaagaacgtctccatttacaagtcccaggcttctgcccttgaaaagcatgctgctgccaactgcaaggttcttgttgttgctaacccagcaaacaccaatgcattgatcttgaaagaatctgctccatctattcccgagaaaaacatgtcttgcgtgactagattggaccacactagggcactgggccaaatttctgagagactgaacattcaggattctgatgtaaagaatgtcattatct

SEQ ID NO: 210178 - DNA, 397 bp, Glycine max
  unsure (1)..(397): unsure at all n locations
attaaaggtttattggaaanaanccccccagagcgcacagtgggaagactcactcaagaancagcccactcccagacattcacaacaacaaacaactggaataaaaagaacatatacgaacgaaatttgtcagcgggcaaaacgagaattcacaatttcacaccatctggacccaaataccgcggcttggaacttcttgatggaccacaaacagcggatagaaacccggtggcgcaagaacagcggaagccggcgcggtaacttcaacctcgtgcgttgattctccaaccccactcaaatggggcgggttcagcaccaacagcctctgattcatggagaacgagtgcgtgttaaatggcggcgcccgcatggtaacagacaccgaatccccaaccaa

SEQ ID NO: 210179 - DNA, 451 bp, Glycine max
actggctctcactgaaacttgttcgcactctctctttgatctaactaagttatcgccatgaatcgccaccacgatcccaatcccttcgaagaagaagaagtcaatcctttttcgaatggcactactgctcctgcatcaaagtcacgtatttccaccattagcatctgagtcactgggctttgggtcaaggcatgatgctacagttgatattcctttggatactacaaatgactccaagaaaaaaggtcaagagctagcagcttgggaagcagatttaaaacggagagagaaggaaataaaaagaagagaagaggctgtttctagagctggtgttcctgttgatgataagaattggcctccatttttcccaatcattcaccatgatattgccaatgagataccagttcatgctcagaaggcttaatatttggcctttgcaagttggttagga

SEQ ID NO: 210180 - DNA, 604 bp, Glycine max
  unsure (1)..(604): unsure at all n locations
gctgtggcaagtgggtaaaactctctggtatagattatttgcctggtgatgttgtctccataggtcgctcttctggtcagaatggggaggagaagtctgtaccagcagacatgcttctattggctggaagtgtgattgtgaatgaagcttattctgacaggcgagtctactcctcaatgggagatttcaatcgcgggtagggcgatggaggagacattgtctgcaaagcgagataaaaaccatgtgttatttggtggaactaaaatattgcagcacactccagataagagttttcctctaaaaacacctgatggtggctgcttggctgttatcttgagaacggggtttgaaacaagtcaaggaaagttgatgcgaacaatcttattctctacagaaagggtgactgctaatagctgggaaagtggattcttcattntattcctggttgtatttgcccttattgctgctggctatgtgctcgttaaggcgttagaagatcccacaggagcaagtatanacttatctaagttgctcacttatggctacttctgtgatacctnctgagttaccaatgngaatatcaatagctgttaatacttctctg

SEQ ID NO: 210181 - DNA, 602 bp, Glycine max
gctagaacggggcgcaagttggtggtggtttcgtttaccccattaccattaagaaaaatattcatggaattctaaatgctgtgagttggggcgttctgtttccccttggagtgatcatagcaaggtatatgagaactttcccatctgcaaatccagcttggttctatcttcatgttggttgccaggtatctgcttacgccattggggttgctggctggggaactggcatgaaacttggaagcgaatcagcggggattcaatatagaagtcatcgctatattggaattgccctcttttgctttgcaacactacagatttttgcattgttcctgaagccagtgaaggatcacaagtataggtacatctggaacatatatcaccacagcgtcggatacagcatagttatcctgggaatcatcaacatcttcaggggctttagcatcttgcatcctgatcagaaatggaaatcaacttacactgcagttcttattgcacttggtgcagttgccttgttcttggaagtgatcacatggattgttgtgttgaagagaaagtcttacaagtgcaccataacctatgatggataccacaatggacaatct

SEQ ID NO: 210182 - DNA, 343 bp, Glycine max
ctcacaccaggcgcacgttagcacaaactatcatgtccacggcaacagcagctgccacctcgtcctttatggggactcgtctcctggaggctcactccggagcggggcgagtgcacgcccgattcggcttcggcaagaaaaaaggctcccgccccaaagaaagcctccaggggatcgggccgagacaccgacagacccctttggtatccgggcgccaaagcgcccgaatacctcgatgggagtcttgtcggagactacgggttcgatccgattgggctagggaagcccgcggagtacctgcagttcgagctggactcgctggaccagaaccttgcaaaaacgt

SEQ ID NO: 210183 - DNA, 512 bp, Glycine max
  unsure (1)..(512): unsure at all n locations
aaaatgaaagttgatcctatgcctcttgaataaggttaagttgctgaagagggaatggatgcgaaaaggtccataaaagggttctcccaagtgtttgactctgaaagctcaaccagtaagcagcagcatgggaccgagagggctcttcttgagttaattcttccttgcatagatcaaagctctgatgaatctcgtaattcctttgcaagcgatttgatcaaacaattaaattatattgagcaacaaataactttagttactcgaggaccaagtaagccaacagcaagtactcctgtgactgaaggtcagacaaataaagtaaatagccgcaaaactataagaggtggcagccctgggttagccagacgaccaacacctgcaccagattcttctccactttctcctgctgctttgcgagcatcaatatctntacgtgtgcagttactcatgagatttcttcctattctttgctcagacggggcagtcttctgcaaggagcatgagatacatgc

SEQ ID NO: 210184 - DNA, 567 bp, Glycine max
  unsure (1)..(567): unsure at all n locations
gttaaggatcaaattggaacttacttctactaccttaccaccggcttgcaacgcgcagtgggtggcttcgggggtttaaggatcttcagccgtctgttgatcccagtgccctatgctgatcccgccgatgagtactgggtgctcatcggtgactggttcggcaagagccacactgccttgaaacatacattggacagcggacgcagcattggcaggcccagtggggtccacatcaacggcaagaacggcgggctcgaggccctctacaccatggagcccggaaagacctataagtacagaatctgcaacgttgggctcaaggaagccctcaacttcaggatccagggccaccccatgaagctcgttgagaccgaaggctcccacgttgttcaaaacacctatgactccctcgacgtccacgtcggacagtgcttcaccgtcctcgttaccgccgaccaggagcccagggactacttcatggtcgcctccacgcgcttcacgaagaaggttataactgccacgcgcgtgattcgttactcgaatggcgtcnggcccgcatcccctctt

SEQ ID NO: 210185 - DNA, 606 bp, Glycine max
  unsure (1)..(606): unsure at all n locations
gctgtggcaagtgggtaaaactctctggtttagatcttttgcctggtgatgttgtctccataggtcgctcttctggtcagaatggggaggagaagtctgtaccagcagacatgcttctattggctggaagtgtgattgtgaatgaagcctattctgacaggcgagtctactcctcaatggaagatttcaatcgcgggtagggcgatggaggagacattgtctgcaaagcgagataaaaaccatgtgttatttggtggaactaaaatattgcagcacactccagataagagttttcctctaaaaacacctgatggtggctgcttggctgttatcttgagaacggggtttgaaacaagtcaaggaaagttgatgcgaacaatcttattctctacagaaagggtgactgctaatagctgggaaagtggattcttcattttattcctggttgtatttgcccttattgctgctggctatgtgcttgctaaggggttagaagatcccacaaggagcaagtataaacttatactaagttgttcacttattggtacttctgtgatacctnctgagttaccaatggaattatcaatagctggtaatacttctctg

SEQ ID NO: 210186 - DNA, 467 bp, Glycine max
  unsure (1)..(467): unsure at all n locations
tgnngnannannnaattttattgaactttatttacaacgaacagcccacgaggggaccaacggggcaacccgaagcgggacaaaacggcgcaaggaaaaaaaccgggggccaaagaaacaaaaaacggaaatgctcttcccaaggccaaaaccaaagggggaaaaaaaaaggccccaaagggggagggccaggggacacccaaaggggcacccaaaacaacccaaagagaccaggccgggaaaagccggaagggggaacacagaaccccacaaaagcccacaaagcgggacggccangccaaagaccccaggccctgggaccagggaaagagccagggccctcaaagcaacccaaagggacaaaagccccccccgggtgtttgttcttccttggggccccaggaatgctcctttggggccccccaaaggaaatacccaggaattcaatggcccaaatgggggggtgg

SEQ ID NO: 210187 - DNA, 565 bp, Glycine max
  unsure (1)..(565): unsure at all n locations
ctttcttcaacgtttccatcatacacagattccatttctctctcaagccctaatttcccctcatttccatggctcacatgaagaagcccacctggtcgtcggctggaatccccngtctcccgaaccctgtcctccgctcgatccccttcccccggaaggaagaaagggaaggaggcaccataaccctgaaagccaagggcttaagaaaaaccaaggagcccaaacctaaaaaggtttccagacctcgcaaccctcccactcatccttcctacgaagagatggttaaagatgcaattacctcgctgaaggagaaaaccggttcgagccaatacgcgattgcgaagttcatcgaggagaagcacaagcagcttccaccgaacttcaagaagcttcttctctaccatttgaagaagctcgtcgccgccggaaaactcgtcaaagtcaaaggctcgttcaagctcccacctaccagacctgctgcatcttcttcttcttcttcttcgccggcaaaagagaaaaagcccgcagctgccaagtccaagcctaagcctaagcccaagcccgc

SEQ ID NO: 210188 - DNA, 482 bp, Glycine max
gttccggccaccggtgaccggcaacacctctacttttattccggggagcccttaccataaccctaaccactaacaagctcttttcatattcatggatcctccggattctcagtcccaggaacaggaagcgcccaagaagaacggcgtcggtttttgtcattctgcgatggatcctcgcgattctttttcttttctcctctttctctcgattccctttctgcttggcttactggttctcatgttcgccgatttctccatccccaaccccatttctctcccctcacagtgcaaaatcgtctccactggtgttgatattaggtcatctaagatatgtgaacttggattgttagattataaagcacaggatgtgttccatcattttgaaagaagcaaatttcgctgccgttatgattactattgggcttcagtattcaaggtggaatataaagatcacttttctggtcagcacaagttgcatttgc

SEQ ID NO: 210189 - DNA, 365 bp, Glycine max
  unsure (1)..(365): unsure at all n locations
ggggaggaagataggaagagaaaaagaaagaggaaagggaagaaagaaggggaggaaaaggaagaagataaaaaataagaaacagacataatnnncacaaggggnngaggagatgagcgtccgaaaacccgggngagagcngatagggggcgggcgacctgggaanttttatagaggaaaaaaaaaaaattaggggagtttatggaaaaaaaaaggaaaaaaggggaaaaaaggggggagaaaaaagggagagaaaaaggggaaaaaaaaacaaaagaggaaaagaggaggagagaggaaaaaaaaaggaaaaggagaagaaaagagaaaaaaaaaaagggagagaaaaggaaaaagaggggaag

SEQ ID NO: 210190 - DNA, 575 bp, Glycine max
gagatttccgacatacctggaggatttgattcttttgagaaagcggcgaagttctgttacggcgttaacttcgagatcacggttcacaacgtggcggcgctgcactgcgccgctgtgttcctccagatgaccgacgagtattgcgaacggaaacctcgccggaaggacggaggattttctctctcaggtcggcctctccacgctccacagcgccgtcgcggttctcaaatcctgccaaaagattctccccttcgccgccgaggtcaacgtcgttgaccgctgcgttgaggtcatcagctgcaaggcttgcaacgaggcgaattttccgagccagtcgccgccgaactggtggacggaagagctcgccgtgctcgacgtggattccttcgcgaaggtgatcgccgcgatgaagcagcgtggcgcgaagtacctaaccgtcgccggagctttgattacgtacaccgaacgcgcgctgagggagctcgtaagggatcactccggcggcggaagaaggatccggtcaccggaatccggagactccgattcggagtcgaaagaagcgaacagcgcgagct

SEQ ID NO: 210191 - DNA, 649 bp, Glycine max
  unsure (1)..(649): unsure at all n locations
aatttggaaagccgtaaaggaaccttttattctgcctacttgtgccttgctattggcttccttgggctgacttggactgctgttgtggaaagaaacatacgttcaatattgtttcttgtttgtgcaattatttgtggctatatatatcaagtgtccaccatttcggttaagctaccaggggctgggagagcccttgtgctttgcagcatttgggccttttgccacttgtgccttttatttattacatggcagttcaaggttacctcagctacctaattagaatgtcttataatatttgatttttcatggttttgatatggaatgatttggacagtgtgatgaaccatttccccttaagtggaacggttctttcagcatcaattcttgttggcttcacaacatctcttatcttgttttgcagtcatttccatcaggtggaaggagacaaggaggttgggaaaatgtcacctttggtacctgcactttctttaaattgaacttttttctaatccatgttaatgatgtgaatctacctatgttacttattntccatttctctttcangttagacttggcacttaaaaaggtgcanaggtagtgaaaggggcagtctttatgctctatgcttctttgggtgctttggtctaat

SEQ ID NO: 210192 - DNA, 467 bp, Glycine max
  unsure (1)..(467): unsure at all n locations
cctctctctctccctgtctttctctccttatccgctcttatgcttcaccctttcatagatctgcctgaaaaaaacccctcaattccaaacccttgcgatccgatccaggtcaattaatttctctctctctctctctctctctagaatggttttcccaacgcgcagatctagcgtgcccgatctttcccggagcccgatgcctncgaaatcgaccacttcgaccggttaccggactcgctcctccttttggttttcaacaagatcggcgacgtcaaagccctaggccgctgctgcgtcgtctcgcgccgcttccactccctcgtcccgcaggtcgaaaaccgtcgtcgtccgcgtcgactgcgtcatcttcgacgacgactcctcttcctacgncgccgncttcgacaagtcccgcggccccttctggaacctnctccgnctcgtcttcggcggaatcgtgaaaccca

SEQ ID NO: 210193 - DNA, 650 bp, Glycine max
  unsure (1)..(650): unsure at all n locations
cttcttgggagtgattatactgaaggtgtatgtttttttggcattgttaatgctattgaggttgtgaatgcattccctgaggaagatggcctcctgaaattccggcaatgggttgagtcaccggatcccaccatccttggaaggttggaatgcaaatagtggttcaaattccagaaagaaaggggtcaaaaattgaagaaaagatgaattcctcaagttgcaatgttaaagagtctgcggtgatgcaaaacatctgccatgctcaggagcaaaatgagttgtcagattacatccaagaaataaaacaaactttcttcaataagcatagaaatgttagcaagaattggcacattccttcttcttttccaagtgatactgttatatctgcttactattctccccatgttgataaatccactgagccattcacatggggaaagccagatcatcttgttcttcgaaaattgtgctgggagaaatttgggtggactggccagaaagcagatgaatngatcctaccagtcttaaggagtataaccagcgtgagactcaattgcggttggaagcattttacaattttaatgacagatttgcacaaaatcgtagtaaaagaattaagaaagcgggtaaaaggaatcactggtaagcag

SEQ ID NO: 210194 - DNA, 615 bp, Glycine max
  unsure (1)..(615): unsure at all n locations
ctcgagccgattcggctcgaggggggtagttgattctctcattcacctcccatcatcattataatcattcattccaacctacccttattcttcttcttcaatttcacacccatcatggaccgttttccgatcctctttctcgtcggcacccttcatcaccctcgcctccggtgcccgccacgatattctccggttaccctccgaagcttccaggttcttcaaagcacctgctaatgccgatcaaaacgatgagggcaccaggtgggccgttttagttgccggttccaatggctactggaattacaggcaccagtctgatgtttgccatgcatatcaactactgaggaaaggtggtgtgaaagaggaaaatattgctgtatttatgtatgatgacattgctttcaatgaagagaacccacggcctggagtcattattaacagtccacacggaaatgatgtttacaagggagttcctaaggattacgttggtgaagatgttactgttgacaacttttttgctgctatactnggaaataagtcagctcttactggtggcaatggggaagctgtggatagtggccccaatgatcatatatntatatactactctgatca

SEQ ID NO: 210195 - DNA, 622 bp, Glycine max
ttacagagcaaaaagctgattgatgttgattctttcaagaagctcttgaaaggcctgacagaaaaggtgtggtggcagcaggatgcagcatcagcagtggccagcacagtaacacaatgcaaactgggtaatggaaaaagacgcttccaagggtgacacgtggttactgttcgtgggtcctgacagaattggcaagaagaaaatggcagcagctctttctgagctggcatctgggtccaacccaataataatacccctggcgcaacgccgtggggatgcaggagactctgatgcccctcatctccgtggaaaaacagcacttgatcgaatagcagaggccataagaaggaacccactttctgtcattgtgcttgaggacattgatgaagccaacatccttcttcgtgggagcataagaagagccatggaacaaggccggttcccggattcccacggccgtgaaatcagtcttggaaatgtcatgtttatcctcactgctaattggttgccggaggacttcaggtgcctctcaacgagtctctactggatgaagaaaagctttgaaaattagcccaaagagggtggcaattacgcatatcagcaggtaagagagcatcaaaac

SEQ ID NO: 210196 - DNA, 350 bp, Glycine max
  unsure (1)..(350): unsure at all n locations
ggggnntaaaggaaaccatgacattctgtaacngctctcggaagaaaaatncccggacgacgaccccacaagccggcggccgccctnaaaaanaaaanaaaaaattaaaacacctattaaaagaaaacaaaacacaaaagccaccataaaagaaaaaaaaaacccgccaaaaccccccaacaccaaaaaaaaaaaaaaaaaaaaaccaaaaaaggggaaaaaacaaaaaaaacaacaaaaaacgaaacacaaaaaccaaaacacccaagacaccaacaaaaaagcgcaaaaacaaaaacaaaaacaccaaaaaaaaaaaacacaagaacgaaaaaanacacaaaaaaaca

SEQ ID NO: 210197 - DNA, 615 bp, Glycine max
  unsure (1)..(615): unsure at all n locations
ggcaatcacaaagcttctgaacaacaacagtaccctatgtttgccacttaggggaacaatcacagcatctggtgatcttgttcctttgtcctacattgctggtttgctaactggtagaccaaactccaaggctgttggacccttcggtgagattctgaatgccaaagaagccctttgaatgggccaacatcggtgctgagttctttgagttgcaacctaaggaaggccttgcccttgtgaatggcactgctgttggttctggcttggcctcaattgttctatttgaagccaacatcattgctgtcttgtctgaagttatttcagcaatttttgctgaagttatgcaaggaaagcctgaattcactgaccatttgactcataaactaaagcaccaccctggtcagattgaagctgctgctattatggaacacattttggaaggaagctcttacgtgaaagctgctaagaagttgcatgagattgatccttttacaaagcctanacaggaccgttatgctcttatgacttcaccacaatggcttggtcctctgattgaagtgattagattctctaccaagtcaattgagagggagattaactcagtcaatgacaacc

SEQ ID NO: 210198 - DNA, 547 bp, Glycine max
caaaatttagaaacaaaaacatgttggtgatggtgttcggtccaacctatggagcccccaagagggtgctggtgtgtctgattgagaaggaaattgagtttgaaacagtacatattgatctcttcaagggagagaataagggacccttgagttcctaaagctgcagccatttggatcactttctgttattcaagatggtgattatactctctatgaatctcgtgcaataatcagatactttgcagagaagtataaagaccaagggacagacttgttgggaaagacaatagaagaaaaaggtctagtggaacaatggcttgaagtagaagctcataactttcacccaccactctacaatttggttattaatgttctgtttgccccattaacgggtgctccttctgaccaaaaagtgatagaagagagtgataaaaagattgagaaggtgctggatgtttatgaggagaggctgtcaaagagcaagtacttggctggtgactttttcaggcttgctgatcttagccaccttccatttggtcactatttg

SEQ ID NO: 210199 - DNA, 593 bp, Glycine max
  unsure (1)..(593): unsure at all n locations
ctcattttcaagctgtttggtgtaaagatgtgacatgtgcttggttgtgttcaagtgaagcagtcaactgttgccgtcaaggaatgtttcgggaagtacgatgatgttcttcaacctggttgccattttgtgccatggggtcttggcttgcgatgtggctggtgtcctttctacgcgtgtcatgcagctaagtcttcgttgcgaaactaagacaaaggacaatgtgtttgttaatgtggttgcctcaatccaatatcgagcattggcagaaaaggcatcagatgcttactacaaactcaccaataccaaagcacagatacaatcctatgtctttgatgttatcagagctactgttccaaagatggaacttgatgctgtttttgagcagaagaacacaattgcaaaagcagtggacgaagaacttgggaaggctatgtcagcatatgggtacgagatagttcagactcttattgtggatattgtgccggatgagcatgtgaagaaagccatgaatgagattaatgctgctgcaagattganggtggctacaaacgacatagctgaagcatagaaaataatgcagataaagcgag

SEQ ID NO: 210200 - DNA, 531 bp, Glycine max
attataattctcatttttttatattttttctaggatggtcctatatatccagatcaaatggatcttaacatacagatatgaacaaatctaatttaagaaatccaatcacgtctcacttttttcttaattaccaattggcactttcatgaaaaaaattaacaatcaagagagaaaacgtaattacttcaaaaaaatttaaaattctttttgacaaagcttggaattgactaaggaaagcaaatctaggaaatggagaaccttctctttctgggcttggtcaagtccacaggggcatcgtcgatgtgtgacgtgtccttagacccattcttgaacgggttcaacttgctcagtttcttggacatggacgagaagaacgtgggctttttagtgggcccaatattctccctcccagacgacgacgttccgtgaacattcttctgcaaatcggaaatgaacattttcattttatcagctccgaccgcagctcctcgttctccctcaccaaggacacgtcagcttgcagctgttttt

SEQ ID NO: 210201 - DNA, 410 bp, Glycine max
attcaacttaagagatcaatatggccacttttaccaagcctccttctaatatatgtttcctccttctgttgcttctagcacacttccatttgggccaaagccaagttgagttgaattactactctaaaagctgcccaaaagctgaagaagatatccaggaacaagtcacacaactatacaacaagcatggaaacactgccgtttcgtgggtcagaaatctcttccacgattgcgtggttaagtcatgcgatgcatcactactgttagcgacggtgagcgatgtagtgtcggagcaggcgtcggatagaagttttgggatgagaaacttcaagtacgtaaacaccatcaaagcagcggttgagaaagaatgccccttgacggtttcatgcgctgacattgttgctctttct

SEQ ID NO: 210202 - DNA, 542 bp, Glycine max
gaaccataggtgtagtagtatgtggtttgttgtgtttggtggagaagaataagcacataagtgctttagggaagagttctgggacaagtgaggataaggatgagtcagaggaagtgcttcaggccacaattgagaagagtaagaaggttcttgctttgcaaagggaattgcttcaacagatttctgaaagaaggaaactggtttcttcaataaatagtgaaagcactcctgaaatagaaggagacagcatttcttatgagcacagtgacgaatccttgtcaagtgactcaattccgcagaaaggttcagccaaaagaggcagtgctgttgagaacgaaaatggtgttcttgtttcaagcaattatgtccaatctattgagaaggaaataccagatgtctcatttgtaggcattgatctcggtttggacaaaggtgaagaggaagatgataatctgtctcctgttgaaaaggcttcacctaggctatattttgatgaacagttgaatagcaggagatatgagacaataacacctgataccctg

SEQ ID NO: 210203 - DNA, 626 bp, Glycine max
  unsure (1)..(626): unsure at all n locations
ggttcaggcnnncnnnaggggnnnnnggggggncggaagatgtactgaaactgaanntncgtgnnnggttngnngcgcncactcgncggcggccgcccttnnnnnnttnttttggccantnnngtttctnnctttattttatntattgctggattggggttttagctcccttggtntgtgcccgacctgacatatataacaagtgtattattacataatccttagtttaggggcaaaaatgttcctccaggacctgcaacatgaaggttttaacaacttgaccaagtcctttccctgcacagaccttgatatcactcagcatgagagcactccatattgatcagtctgcttaggtagagtagaagccaagaatttaccattggtacttagcagcaacaagaacctcctcatactgctgagcagcattgtcccaactaagatcctgcgtcatccctcgccgttggagcccttcccagctctgcttatactgcctgaaggtcaacaagcagttccctaatgcatttattaacttgttaagtttctgcactgtcaaatgtccacccaaggcccgactcttcaaatggattaaaaggcttcactgtatccctcaatccaccgacagcatg

SEQ ID NO: 210204 - DNA, 534 bp, Glycine max
  unsure (1)..(534): unsure at all n locations
ccttctcctccctctttccccatctcacatgatcgcgatgcacctctagggtttctccctctccctggttcgaaatttcgattcccgtacatgccatcggtggaggaagaagatgtatagcaatttcaaggagcaagcgatagaatacgtgaagcaggccgtgcaggaagacaatgccggaaactacgcgaaagcgttccctctctacatgaacgccttggagtacttcaagacgcatctcaagtacgaaaagaaccctaagatcaaggaagccatcacgcagaagttcaccgagtacctgcgccgggccgaggagattcgggccgtgctcgacgacggcggccccggtccggcctccaacggggacgcggctgtggctgcaaggcccaaaaccaagccaaaggacggtgaaggcggtggcgacggcgaggaccccgagcaggccaagctccgggccgggctcaactcggccatcataagggagaagcccaacgtgaagtggaacgacgtcgcanggttggagagcgccaaaca

SEQ ID NO: 210205 - DNA, 500 bp, Glycine max
acatcacatccatcctccaggacccctcctgaacctgactgcatccattcccatttgcggtttcgtatgcatgttcccaccgtgtaaaaaacctatcatagcgacaaaacggcgtcatgcttgggaagtagcatgcaaaggctaccctagagataggagggacattccgatcggacttggaggactctatggtgctacaacaagtctgacatgtgacaacactggtactgcatatggcgctgcattgacgcctgcagatccaactaactgcgttcaaccggacccagaaaaagacccttgttgcccaccaccccccttcaaagactactagctccctgcacaccatgacaagacattaccggtccgaattagaccagatgatcattcgggcactgatgattacatagccatgtacgaggcagccgtgaggcgcatgcaagaccttgcagctgatgatactcgcagtgtcatgcaacaggccaatgttcaccgtgcctact

SEQ ID NO: 210206 - DNA, 521 bp, Glycine max
ctctgggtgggtaaagatggaagtgttccagtagagtcttatgcttgtttctggcggcatttttgtggtttaatgctcaacatgcttttgtaagttgtgctttgacatttgagttgcaaagcaaaattgctaaagccaaccaagagggaccttacctaggtttaatcataccaaattcttttgaactagaccctcttcttcagaatcctggctacacagctagtgacaccatcatagacttcgctggaaggagatttcgctttggagccattggtgacaagcctgttatactggtcatgacaggattgagcgtgataaatgcagctataacgactcagcttctgctgagtttattcacggtagaaggagtggtgcattacggcattgctggaaatgcaaacccgttcttgcatattggagatgtagctattccccaatactgggctcatctagcactatggagctggcagaggtatgggctagggcctgatgacacattacccttggaagacaatggagac

SEQ ID NO: 210207 - DNA, 350 bp, Glycine max
gacgcacacgagagtcggcagcacctccttctgcgacgattgctctctctctgtcgcgctttgatcaccgacttaggcggaaactaaagactaggcaaaggggtgaagccaacagctgaagagctgcgtcgcatcatgggctagtagcataatacccggaatatgtctgtcactgctcatggtgatcacggaaaaccaaccctgactgacactgtgcgtggctgctgctgggattattgctaaggaagttgcaggggacggccgaatgactgatacccgtacagatgaacctgcacgaggtattacaatcaggtgtactggtatctcactctactctgaaatgactgatg

SEQ ID NO: 210208 - DNA, 479 bp, Glycine max
aagaattaagatttttctaattattaataaattatatggatatggatatatatacagatagatattctatatcttttatcttaattaatatttgacccctccttataatgtgttatagttttctttatttttaggaacttatccattccttttttaatgtgcccgacaatccgaaaaaattctgggggaggggtcatttcgtttttgatctagaataaatagagcttcaagaaatgagagaattaagaatacccacgagaaacactaatccaatccataatgatgtaccggaaaatacaacatttttgttattcgaccaaccttcaggagaagcaaatacaacaggtacactaatcaataaaataaatgaaatagcaattaatgcaaaaacagctaattggaaagcaatagtcatgtttctaatcctccaatttaccaacaaaagaactttacccatttgatcccccaaccccttgatc

SEQ ID NO: 210209 - DNA, 575 bp, Glycine max
cagagacgtgaaaatcccttggatgatcgtcacaaagcttctgttggttcatctactgatgtaaagccattgttatcttctctagggaaatcttcagtactaacacctaccgatgcttctagtaccaataagttacatagcacagttagcacttcgtcaatgctatcttcatcttctcctggttttgttcgtccttcccgtggaactacttctgctaggtttggatctgccttgaacattgaaactttggttgctgctgctgagaaaagagaaattcctattgaggctccggggtcagaggttcaggacaaaatattatttattattaataatgtttcggctgctaatgttgaagctaaagcaaaagagttcactgaaattttgaaagagcagtactatccttggtttgcacagtatatggttatgaaaagagcaagcattgagccaaatttccatgacttgtacttgaaattcctggataaagctaattcaaaggctttgaacaaagagattgtccaggcaacttatgaaaattgcaaggttctcctatgatcagagctcatataatcaagttc

SEQ ID NO: 210210 - DNA, 533 bp, Glycine max
cgtgtccaaagctttacctcaataagttattttgaggtcaagcagatgataaacaaaagatctaggcatgcctcatcttcaaaagttacaaatttaaatgaagtgcttatatctcttattagtactattgtatgtcgaattggcttggggagaaggtatgaagaggagggatctgaaggtagcagattccataagttgctcaatgagtgtgaagctatgttgggtaacttctttgtttcagattatattcctttcatgggttggatcgataaactcaggggactggatgcacgtatcgaacgcaatttcaaggagatggataagttctaccaagaagccattgatgaacacatgaattctacgagaaagactccagaagaagaggattcagtcgatgtcttacttgaactgaaagagaacaacacgtgttccatagatctcaccaatgattacatcatagcagtgctcttgaacttactctgaggagctacaggttcaactgaagtcacaacaatctgggccatgactgaact

SEQ ID NO: 210211 - DNA, 590 bp, Glycine max
ggcactataatatgaaccgcatcaggtccgtgtggtcaagcatctggcatgttctctctgatttctttgtaactattggctgtttggcaaacctttcaattgcaatttttgcaatggattccttgcgtcagttatcaatgaaatttctggagcgggaagagctggccaattataattttcaaaatgaatttatgaagccttttgttattgttatgcgaaagagtaatgctgttgaaattagagaactaattatcagatgtgtctctcaaatggttctgtctcgtgtcaacaatgtcaaatcaggatggaagagtatgttcatgacctgatttcaggtattcacaacagcagcttatgatgaccacaaaaacgttgtactcttggcttttgaaattatggagaagattattcgagattactttccatacatcactgagactgaaaccacaaccttcacagactgtgtgaattgcctaattgcattcaccaatagtagattcaataaagagattagcctaaatgccattgcttttcttcggctctgtgctacagaactagctgcaagagaccttggctcatcatcaagaaat

SEQ ID NO: 210212 - DNA, 507 bp, Glycine max
gctccaaatccacgcacttttaaggaccttgttctaatgatttgcggtttgtttttgctctcttcccttgttgcctttggagggtacagggcctccaacgcgccacatgctgacgtgtcatcgccagcatcgaacgatgaacaacctaatcccacatcggtgccttctccgaaatggtacccggtttcacggggtgtttcttctggggtgtcggagaagtcatcaagcatgttgtttgcggttaaagatggagcttcggaagcatttccttgggacaatagcatgctgtcgtggcagagaactgcttttcatttccaaccagagaaaaactggatgaacgatcctaacggtcctatgtactacaagggatggtatcacttcttctaccaatacaacccgaacggtgcagtttggggtgacatagtttggggacacgcaatgtcaagggacatgatccactggcttcaccttccactagcaatggtggctgatcaatggtatgacatg

SEQ ID NO: 210213 - DNA, 608 bp, Glycine max
  unsure (1)..(608): unsure at all n locations
aggtttagtntnntcnnnaggggnnnnncgggnnnncggtcaaagaaaactaanagaanncncntnnngggtagncgcgctactcgtcggcggccgcccttttttttttttttttgngggaatggtttttgatctagaacccataactttatgtgtgggtatgggaaggtaaacaattgatgagtacaaattgccaccccaagatgttttccgatcctttgggactacaagtcttttatatccaatttaattatttattttaattcttctgatcagggtggaatgggcgtataaatgcagaattcatttgccaaacattgagtgaggctgtcacagtggcctcagtagcattgttgaacaagaacaacctagcagctccatagattgcctttgttggataaacccgagatgtcacaaccgtccttccaccttgagcaaagctttcaacaatagaatggtccaccagtatccgcaaggaaaacttttcatctttaagtactggaacagcgctgccaacgatttgcttgcgaacatcatttgcctgagaagaccttgattgatcagcgcaaaaggaagtcttaagatttccattgctcccttaatgacat

SEQ ID NO: 210214 - DNA, 411 bp, Glycine max
  unsure (1)..(411): unsure at all n locations
gccgcngcntgttttgctttccttgcngcngcctcttgggcgggggctcgggcngctgcntccatttctttactcgacttcttcttctttgtngaagcccctttcttggggcgctctttcccctcncccgtnggtgtntcctcctcccccttttcggggcctgtggccnnntcgggccccttgtttgggtcngacctgttgggttggtcttgngattctttcccctccttggaagctttatccttctttttcttcttctgggaagttttggattctgcagggacattttctttcttttctccatctccatcagtctcaacacctgtcttatcctgagcaccttgagactcatctggaccatctttacttggtttgggcgccaccccaaaatcagctagaagagcctcaagc

SEQ ID NO: 210215 - DNA, 509 bp, Glycine max
  unsure (1)..(509): unsure at all n locations
gtgaatttaattgtagnctattttttatttattattaattaatggcagtgacaaactgaagcatttgtcgtcaaagaagcaaaacgagatagcaagtttggagaaagagatagagtcactgatctgggagttggtggaggaacgcaagagggagtgctcagggacatcctcatcagagaaggatttgatgcagttgctgttggaagcagcaatgactgatcagagtctggggaaggacttctccaagcgtttcattgtggataactgcaaaaacatttactttgctggccatgaaaccacagctgttgcagcctcttggtgtctgatgcttcttgctttgcaccctgaatggcagacccgtataaggactgaggtggctgaactttgccccaatggtgtaccagatgcagattctgtccctctgttgaaaacggtggctatggtgattaaagaagtgctacgtttatacccaccagcagcctttgtttcaagggaggcatatgaagata

SEQ ID NO: 210216 - DNA, 518 bp, Glycine max
aaagaagatttttttttttaacctaaacaatagttttatgggtacaatacacatacaaacatatgcaaaaatctttgtgtcataagaaaaactaaatgcttgcacgttaatgaaaataaaagttgaattatttgtgtcattagctatgagccgatcaaatctcctgaatgagaatatgtacaccatgtcccggttctacaatcattctatatgccggagaatgcctataactaggagacaaagagaagctaaacttggagatgataagtgctagcacaaccttcaattgaaccattgcaaagttctttcccaagcacaagcgagtacccaatccaaatggcacataagcatgtggaaacctgcaagccttggagacaccctcgctaaacctttctggtttaaactcatttgcatctggtccccaaatttcaggatctctatgcagtgttgggatcagagtccataaacaaacgcctttaggaacattgaggtttccaatttggatatcttcatatgcc

SEQ ID NO: 210217 - DNA, 377 bp, Glycine max
gtaatttttggtgggcaagatgctaattggactctcttgaatgatctgcatattcttgacttggaaaccatgacatgggacgaaattgatgctgttggggtgccaccttctccaaggtccgatcatactgctgctgtacatgtggaccgatacttacttatctttggtgggggttcgcatgcaacatgctacaatgatttacatgttcttgatttgcaaactatggaatggtctcgccccacgcagctaggagaaataccatcaccacgtgctggacatgctggtgtgacagtaggggagaactggttcattgttggtggtggcgacaataagagtggggtctctgagacggctgtactgaatatgtctacactgac

SEQ ID NO: 210218 - DNA, 461 bp, Glycine max
  unsure (1)..(461): unsure at all n locations
tttnttttttttttttttttttttttttttttttttttttttttttttttttttttttggttttggtttttttttttttttctttttttccccctcctttttttcttcttttttctttggacaaacaaaccccccctgttcagggggggcccccccccaaaaaaaaaaaaaacattcccccccaagaggccccccccctttcccccccccaaaagggggggcccccccccctcccccccccaggccccttttttcgggggggggaaaaccctcggccccaacagacgccacattttttcccccccaaaaaaaaaaccccggttctcccccccccaatttggggaaaaaaaagggggggagggacccccaaaacagggccccccggttttctcacaaaaggggccccccctttttctttttccgggggggggggggggtcccgggaaccccccccccccccc

SEQ ID NO: 210219 - DNA, 515 bp, Glycine max
cgagaacaaaaaaaaaaacgtgatcttctcttctcttcgaataaaccacaaaaccaacaggcgagaagaggagtgagagaagatggggttgtcgttcacgaagctgttcagcatgttgcttgcgaagaatgaaatgaggattctgatggtaggtctcgatgctgctggtaagacatccatcttgtacaagctcatgcttggagaaatcgtcaccaccatccccaccatcggatttaatgttgagactgtggagtacaagaacatcagcttcactgtgtgggatgctggtggtcaggacaagatccgtcctctgtggaggcattatttgcagaacactcatggtctcatttttgtggttgatcgctatgattgggatcgagtggttgaggcaagggatgagttgcacatgatgctggatgatgatgaacttatagatgctgttttgcttgactttgccaactagctagatcttcctaatgcagtgaatgctgcactagttactgtcaagcttggac

SEQ ID NO: 210220 - DNA, 479 bp, Glycine max
  unsure (1)..(479): unsure at all n locations
tttntttttttttttttttttttttttttttttttttttttttttttttggggcgnggggcccgggggaaccctccggggttcccttttcttnnttgggccctgggggggggttctggggctgggccccggtctttnnttttcgggggggncnttncttggggggttttggtgtcccccgggggggccctgcttctctttcttcttgccgcggggcggggggggggggctttttccctggcccgggccggtttgccccccggggggggttggggggtgcgttttctgcccgggccggtgttggnggtggggtttttctggcgccccccgctggggctccccccctggggngcgccggggccccgggtttctggtggggcccccccgctcttgccctgggtgtnggnnnccttggggttccccggggccccccccccgtcggtgggggcccccttgtgggctgctttgggtggggctttg

SEQ ID NO: 210221 - DNA, 505 bp, Glycine max
gctaccaccaccaatctattgcgcctcaaaaaacaactccctcacgattaacaaactcgtgcattccaccaatcccaaggcacaacagcaacaatgtcagcaaccttaacatgtaaactaggagacaacaacctaagcttaaacgataaaaacgaccaacccccttcacctcctcagcccctacaaaaatgccctgccaatatggtttcgatggtggtctcagagctaagaattcaacgaggaatagcccttccaatggtggccatgaatttggcttggtttgccaagacagccatcacaacagcatttttaggccgtcttggggagcttagtttatcaggtggagctctcggcttcacttttgctaatgtcactggcttctctgtcctcaatggtctatgtggtgccatggaacctatatgtggacaggctcatggtgccaaaaacttcaggctccttcacaagacccttctcatggcaatctcgttggtgctattggtatcac

SEQ ID NO: 210222 - DNA, 547 bp, Glycine max
gaagaagataagcgatgtttgggttatcctgaagaaaggcctctttgttgggaggatcaggaagaagaagaagatggttgagcttcgcagcagcagcagcagcaacaaccactaccaatggtggggccatggaggagttgctttcacagctccaatctcatgtccagaaggctcttgctggtggaggacccgaggcagtgaagaggaacacgagtaggaacaagtttctgccccgtgaaagaatcgatcgcctccttgatcccggttcttccttcctcgagctttcacagcttgcaggacattacttgtatgaagaacctttgccttctggaggggttgttactgggataggtcctgtgcatgggagactgtgtatgtttgtggcgaatgatcccactgttaagggaggtacttattatcccattactgttaagaagcacctcaaggcacaggagattgctgctcagtgcaaattgccctgcatatatcttgtcgacagtggaggagcttttcttcccagcaagccgaaatgtttcggacagagaga

SEQ ID NO: 210223 - DNA, 593 bp, Glycine max
ggctgctgggactggactcttagcagtgattctggatggagatgtgtacaagtactatgctgatggagaatggaagaaacctgcttctgggaaaagtgttgccatcatcaaccccactaccagaaagactcaatacaaagttcaagcttgttcacaagaggaggttaacactggtcatggacttggcaaaatctgcccaaaagtgatgggcaaagaccccactatggaaacgttctgaacttcttcacaaggcagctgctatccttaaagagcacaaagcaccaattgcagagtgcctggtgaaagaaatagcagagccagccaaagatgctgttacagaggctgtaagatctggggatctggtttcttatactgctgaagaaggcgtaaggattctgggagagggaaagctcttggtgtcggatagctttcctggaaatgaaaggacgaaatattgcctcacattcaagattccacttggagtgattctagccattccaccttttatctatcccgtcaatcttgctgtttccaaaattgctcctgcgctgattgctgggaactacattgtgctcaagcctcaactcagggag

SEQ ID NO: 210224 - DNA, 572 bp, Glycine max
  unsure (1)..(572): unsure at all n locations
gaagaagataagcgatgtttgggttatccggaagaaaggcctctttgttgggaggatcaggaagaagaagaagatggttgagcttcgcagcagcagcagcagcaacaaccactaccaatggtggggccatggaggagttgctttcacagctccaatctcatgtccagaaggctcttgctggtggaggacccgaggcagtgaagaggaacacgagtaggaacaagtttctgccccgtgaaagaatcgatcgcctccttgatcccggttcttccttcctcgagctttcacagcttgcaggacattacttgtatgaagaacctttgccttctggaggggttgttactgggataggtcctgtgcatgggagactgtgtatgtttgtggcgaatgatcccactgttaagggaggtacttattatcccattactgttaagaagcacctcatggcacaggagattgctgctcagtgcaaattgccctgcatatatcttgtcgacagtggaggagcttttcttnccagcaagccgaagtgtttccggacagagagaancttggcagaatattctacaatc

SEQ ID NO: 210225 - DNA, 488 bp, Glycine max
acatctggcacattccttttcttttaatatatcagaaggcacatgacgcaatgtttaaagtgctgaaccttcatggtgtaactaaagagcctaatttagaggaatggacttgcacagctgaatctagtgatttgctatatgaaccagttcgtatagcctcagaggggaaatatacgtgcctttcagattgctacctctccgttctaaaggccttactgcatgcttatgttgattgtcaaaagaaacttggtgtggactggattccagcttgcaaccttgaaagtgcaactgcgaaagagaatactgatgctcctaaggcagcatggaagttattaaagggtgcagatggcgttcttgttcctggagggtctggagatagaggagtgcatggaaaaattatcgcaaccaaatatgcccgcgaaaacaggattccataccttgtcgtttgccttggaatgcagattgctgtcatagagtttgcacgatct

SEQ ID NO: 210226 - DNA, 488 bp, Glycine max
acatctggcacattcctttgtttttaatatatcagaaggcacatgaagcaatgtttaaagtgctgaaccttcatggtgtaactaaagagcctaatttagaggaatggacttgcacagctgaatctagtgatttgcttcatgaaccagttcgtatagccttagaggggaaatatacgtgcctttcagattcctacctctccgttctaaaggccttactgcatgcttatgttgattgccaaaagaaacttgttgtggactggattccagctagcaaccttgaaagtgcaactgcgaaagagaatcctgatgcttctaaggcagcatggaagttattaaagggtgcagatggcgttcttgttcctggagggtttggagatagaggagtgcaaggaaaaattattgcagacaaatatgcccgcgaaaacaggattccattccttggcgtttgtcttggaatgcagattgctgacatagagtttgcacgatct

SEQ ID NO: 210227 - DNA, 555 bp, Glycine max
gttcaagaatgctgatcaccaatctgtggtgatctcaaaccatagccgtttgtccatagccacttttcaaaacccagcaccaaatgcaactgtttaccctctgaagataagagaaggagagaagcctgtgatggaggaaccaatcacttttgctgaaatgtacaggaggaagatgagcaaggacattgagattgcaaggatgaagaagctggctaaggaaaagcatttgcaggaccttgagaatgaaaagcatttgcaagaacttgatcagaaggcaaaacttgaggccaagcctttgaaggagattcttgcttaattaataataattacatatgtatcatttgcatgcccccttggtgtttttagtattttttaagggccatgaattaataatagtccttacctttgtgcttttgtacgtcttatgatttatcctttgtggggatatcatgtgttgtgttcagttgcctatgtcttattagctagctggctcatctatgtataccttatatttgcctctattataaatgaaaataagtggcactgtctttattt

SEQ ID NO: 210228 - DNA, 629 bp, Glycine max
  unsure (1)..(629): unsure at all n locations
tgaaatactatggccagtagtcaactcgatgacaacatgacggttacgcgcccccttccttagcctggaaatcgggtcgagtgacattgcatacacgtcttcaaaaacatatgcgatggcggtgcctaccctgaagaccggacgctctgtatcggaacttgttcgcatcgacgctatgcgcataaacggatctggcatagctgcagccactcactctcgcgggctgcacgtgcacacgcttccagaactggaggacgactatggcgctctggagccagccttcaccggcgaaaccatgcagctgctgcacgagaagcaccaccagactgacagtcaccaacttcagcagggccctcgagcagatacaagacgcacgctccaggaaagattcctgcgtcatcaatgagctccagggcgccatcgagttcagcggcagaggtgacgtgagccattgtattatccggaaaagtctagctcctgttcgagaaggaggtggagaaccacccatagggtcactgggatgggccattgacacacatcacggctcttttgaagcattagcacanaaagttaacgcagaaggtgctggactacaggggtctggatgggtgttgcttgcactggacaag

SEQ ID NO: 210229 - DNA, 592 bp, Glycine max
  unsure (1)..(592): unsure at all n locations
agtcttagtccccnnnnaggggnnnnnnggtttncctgcacaagaaactaaagtatnnccngtnngnggtangccctnnccngncggnggncgnccttttttttttttttttttgtccccgatttgcngcttttcnnngctcgnggntcttcggggcgncggcgtgnntttgttngtgttttttctcccctcccctcncntctttttnttccccctctcttcccgggctgcnnntctgtcntctcnggagctntntccngtngccctttcngcctnngagctctctttctcatccccttcnctggcgtgtttccnntttntncctttccccgtgttcttcngatngtctggtcttccattcttgtgctgtnngtngtncgcttgctcccnnncntctntnccnngcnttggggcccaatttggtcccttagtaaccagcgggtcctggttggcagtggtttcaactacaagcctcttcaactctttgtccagaccaagccacacccatccagacccctgtagtgcagcaccttctgcattaactttttggactaatgcttcaaaagagccaaaatgtgtgtcaatggcccat

SEQ ID NO: 210230 - DNA, 504 bp, Glycine max
ggagtcacagtattcaagatgcggaatcatcagacaaaggggtttcctctgttggacaagtgatagctcttttcctaagatcaaacctcacgatatctgcaacaaataatggaaattctggagttgtttcggatgagcaacatgaaggggaaatagattatgttggggtgctaaatcgagtccttccaaatgacattcggattatgggctggtgtcctgctcctgttgatttccatgcaaggttcagctgtttaagcagggagtataaatatttcttttggaaagaaaacttgaacatcccggccatagaagttgctggaaacaaacttgtaggagaacatgactttagaaacttctgtacaatggatgcagcaaatgtgcacaactataggcggtgcatcacattgtttgagatttcttctacagatgtgacgcacaatgatgatcaactttgggtgattaaaataagaagtaacgcttttctatggcatcaggttcgctgca

SEQ ID NO: 210231 - DNA, 441 bp, Glycine max
tgcggttttcgaatctttcaagatcttgccagaacccttcaaaaccctctcttctctctttcttcgatcgcttcgcctgatattcttttcggctgagatcaagcaaaaatgagcgtggttggatccgactttggtaatgagagctgcattgttgctgtcgcaagacacagggggattgacgttgtgctcaacgatgagtcacagcgtgaaacacctgcaattgtatgctttggtgacaaacagcggctccttgggacagccggggctgcttctactatgatgaacccaaagaattccatctcacagataacgagggtacctggcctacaatctgcggatccggaattgcagcaagatatcaagacgttcccctttgtggacactgtaggacctgatggacaatccttaattcatgcacggcacttgggtgaatctaggaca

SEQ ID NO: 210232 - DNA, 492 bp, Glycine max
cttcgtctcaaatctcttcgggctcttgaatcgttccatttcttccaaaatggccaaagacccagttcgcgttctcgtcactggagctgcagggcaaatcgggtatgcatcttgtccctatgactgctaggggagcgacgttgggtcctgaccagcccgtgatcctccacatgcttgacattactccggcagcagagtcattgaatggggttaaaatggaattggtggatgctgcattccctcttcttaaaggcgttgttgccacaactgatgtggttgaggcatgcactggggtcaatatggccgtgatggttggtggcttaccaagaaaagaaggtatggaaaggaaggaagtgatgactaagaacggttccatttacaagtaccaagctattgcccttgaaaagcatgctgctgccaactgcaaggatctggctgctgctaacccagcagacaccaatgcattgatcttgaaagaatttgctccatcta

SEQ ID NO: 210233 - DNA, 500 bp, Glycine max
gtgtcatatctaggctattaagagacgctggaatttatgctaatcttgaagacatgcactcactacactgatttgaatagtgtaatttccgtgtccatgtacatttctataatatatttagaagaaaacaaaaattggaagaaggataaaacataatattaataagaagcaaggagctgggggaacttcatgagactaagattccctcacatctttgttctcattattatggggttgccacattttcctttgcctgtggagcaatttcttctccatcacttccaggttcactgccaggaactcccaggcttagcagcacttcctcccacttcttagcaggccccttccaggaaagatcttgagccatgcagttctttattatttctgtaaaagctggagttccatagactgcaagggcccttttgacagtctttgctatagcatccacatcagctggatccacagcatcacattcaacactgaaggcacccatctgaaat

SEQ ID NO: 210234 - DNA, 486 bp, Glycine max
aaagaaagaagttctaaggaagagggttgttgcagaatacaaggtgctagttgtctattggcaattacaacatcagcgatccaaccttagtattcttcaacccagagagatttgtaatactaaattacaacaactgaaacgatggcaggaggagcttatgtagattcaggaaatgcaaagcaatttgatgggaaggtcacggcattcgtattggttacatgctttgtggcagccatgggaggcttactcttcggttatgatcttggaataaccggaggagtgacttctatggaaccatttctgatcaaattctttcccggggtttataaacaaatgcaagatgatgttggccatataagccaatattgcaaatttgacaacgagctccttacactggttacctcttacttgtatgttgctgcattagtagcttctttctttgctctcaccactacaaggatgatgggacgcaaggcctccatgttc

SEQ ID NO: 210235 - DNA, 457 bp, Glycine max
gtgcagtgatgagcagtgccaaaacacctagataatggcaaccatgctcacactctacattgacaaagatctaggctaaggcttggattacaaacacgagggcttgcttcgccaaagagtcatgcagatcaggcttcagcactggaaccacgctgcaacattcactggctatcatcaatcatctgtggagcctactcatgaccaaatagactatgagcacactggatcactcgcgagacagagaccttacgctatgaacacgaacgtagttcagtcaatgcaaaggcaacagataacagcagatgcatctatggataaacccgaccaaggacttgcgcacatactgcgttcaatggaatacagcaagcatgatattctctgctgacgggtccccaataagggagatcaagaatctgggaacataatgggtaccaatgccaaagagccaatccatgag

SEQ ID NO: 210236 - DNA, 502 bp, Glycine max
  unsure (1)..(502): unsure at all n locations
gttgntgaggtgtttcatttgttaaactaacaacaacacaaggccatcatcatggcagctgcttccccaatggcaagccaactcaagtccaccttcactaggactcttgtagctcccaagggcctctctgcctcttcaccacttcacctcgtgccttctagaaggcaatttagcttcactgttaaggccatccaatcagagaagccaacctatcaagtgattcagccaatcaacggtgacccattcattggaagcctggaaaccccagttacatccagccctttgatcgcatggtacttgtccaacctgcccgcatacagaaccgcagtgagcccactactaagagggatcgaggtgggcctggcccacggataccttctggtgggcccattcgtgaaggccgggcctcttaggaacaccgagatcgcccggcaagcgggctctctggccgcccgtgggcttgtggtgatcctcagcctttgcctcacaatctatgggattt

SEQ ID NO: 210237 - DNA, 419 bp, Glycine max
aaaaaagggggagagtgggagagaggaatgaacattatcccatggcgggaggcacacaaaacatcatttacacccatctttatgggacaaatagtccattcatggggaaggaataagaaaaagtaaagaaagctaggaagcacatccatcattggatggagtatggaagggccaagacgtagagggggaagggggcccaaataacacccgaaatgcccccgaaaaaaaagcccccggggaactgggcccacccatcaacagtttggagctgatcgggctcctttttgcggcccgtcaagggcagcgacggagcaggggagggggctccttcgttgagggaggaaaccccataaattgggaggcaaaggctgaggatcaccacaagcccaccggcggccaaagagcccgcttgcccggcg

SEQ ID NO: 210238 - DNA, 408 bp, Glycine max
  unsure (1)..(408): unsure at all n locations
agccnttcggcnntccncnnaggggnnnnnnagtggnnnncccggcatatgaaccattannagtatnncncatnnnngggtagnnccgnctcccagncggcggccgccctttttttttttttttttttttttttttttttttttttttttttttttttttttttttggggttttgggttttttttttttctttttttctccttcttcccttttttctttttttttctctttttttttccctnttcctcccccccccccccccctggctttntgccttgggtgctctttctcgccccctgccccccttgggggggggccccccccttggtgtggggccctcccccccccggcccccccgcccggggccccttgtgccttctttttcctcgtcccccccccttttcccct

SEQ ID NO: 210239 - DNA, 460 bp, Glycine max
ctggggatgtagactttgttttttagtgttgtgggagagaccctcttttggtgtttggtgagggagagtatggtgtcactgacatgttttatgctgcagccaggggcaagaactgtgaggtctttaagctcctgcttcattctgctctttcaagaaaggagtgccttggtggcagtgaagcagaattggaagagaagttggatgaaggttctaaggttttcaagagggatgtgatgaatagggccattcatgctgctgccagaggagggaattgggaaatactgaagcagattctaggaagtgtttctgtttctcaggttttgtcttatagagatgccctaggatgtactgtcttgcatgcagcagctgcaagaggccacgttgaggtggtgagaaatctaattgaatcctatgatatcatcaactcagctaatgctcaaggcaatacagcattacatgt

SEQ ID NO: 210240 - DNA, 533 bp, Glycine max
cgtgtccaaagctttacctcaataagtcattttgaggtcaagcagatgataaaaaaaatatctaggcatgcctcatcttcaaaagttacaaatttaaatgaagtgcttatatctcttattagtactattgtatgtagaattgttttggggagaaggtatgaagaggagggatctgaaggtagcagattccataagttgttcaatgagcgcgaagctatgttgggtaacttctttgtttcagattatattcctttcatgggttggattgataaactcaggggactggatgcacgtcttgaacgcaatttcaaggagatggataagttctaccaagaagccattgatgaacacatgaattctaagaaaaagactccagaggaagaggatttagttgatgtcttacttcaactgacagagaacatcacgttttccatagatctcaccaatgataacatcaaagcagtgctcttgaacttacttgtaggagctacaggtacaactgaagtcacaaccatctgggccatgactgaact

SEQ ID NO: 210241 - DNA, 423 bp, Glycine max
  unsure (1)..(423): unsure at all n locations
tttntttttttttttttagtttaagatttgcagccatacaatgctcgaggggggtcaggggaactacataaaagggttagcggcattgaccacatcagatcacatcattggagtccacatctctcacggtgctgcaagggtgtcatgtcaagagctatatcaaggagcacatgcagactaagagctctctttctcatacactacactggcatagggccaattaacaacatttccaaaggttcgtcagatagtctggtctaacattcttggactgggggaggacgcatgctcccaaacatgcaataccaagcaatggaaccaaagtcggtccctgaggaaccagcggggcctggaaggcgggggatagaactacaagcctgttcagcggtttggacaaacgaagccacaccgatccagacccct

SEQ ID NO: 210242 - DNA, 519 bp, Glycine max
gagcgagcgagcgagcagtatcaaatgtggatctgggattgggaaggcgagggattgcgctgcgtctcttcctcttctctttcgattcatccctcattcataatcttccaatccaacaacctcagcctcacactcacacatacacacatatgaacgcgtatcgtccctcccatgacttcaaagcgcatcctcaaggagctcaaggactcgcagaaagacccaccaacttcttgctgcgctgttccagtcgctgaggacatgtcccattggcaagcaacgattatgggtcctgctgatagtccttatgctggaggtgtattcctagtcactattcactttcctccggattatcctttcgaacctgccatggttgactttaggaccaaggcgtttcatccgaacatcaacagcaatggtagcattagtcttgctatccttaaagagcattggagccctgcactcaccatctatgacgcactgctttctataggctcattgctgactgatccaaatcctgat

SEQ ID NO: 210243 - DNA, 539 bp, Glycine max
  unsure (1)..(539): unsure at all n locations
tttnttttttttttttttttttatagttttaattttgatcaatcttcacatggcatctgatcaaaatttgttattgtatattaaaaattccgattaatgtaacagtgaaaattgagtcgaccatgatgaccgtggaatctagattatataataatttcttccggagaggctttaatgaggctctcatgcagccatggcttcctcgtcatcgatctcgttctcgccttcttcgctggcggcggcgtcttgatactgttgatactctgccaccaagtcattcatgttgctctcagcctcggtaaactccatctcatccattccctcggcagtgtaccaatgcaagaaggcttttctcttgaacatgacagtgaactgctcggagacgcggcgaaacatctcctgaatggaggtggagttccccatgaaggtggaggacatggagaggcccgtgggagggatgtcacagacgctggacttgacgttgttggggatccactccacgaagtaggaggagttcttgttctgcacgttgatcatct

SEQ ID NO: 210244 - DNA, 413 bp, Glycine max
  unsure (1)..(413): unsure at all n locations
atagaagagtgttccagngaattccacattataagcaaatgaaatagccagaatatcgggcaaatccaaataatgctgcattgtcacatagtctacataacctgggaaactaacagcaatcaaatatgttcgccatttggaattggaatttgaatacaaatacagtgcatcaataatataaccctatgtacacagccaatatctgactgaaatttgatacagaatagtatcaatttgtatcataataaaatggcacagagaaatttatgtgaaggtaaaggggaagtgtatcagctggtgttataattcttcggctttcatttacttcatcattggctccttcctgcacgttcacatttcctttatctgcttaagcactgctgaccttgtttttacgcccaaaggtccaatgg

SEQ ID NO: 210245 - DNA, 555 bp, Glycine max
  unsure (1)..(555): unsure at all n locations
cttccaaatgatgcacttcttatttataaaaatttaggttaaatttaaaaggataaaaagaagagagggaaagagagaggaacaaggggtcttggggcagggtctagtgcttataaatactctggcattagccactagctttcacaaactgaggcacacaaaaaaatgggttcttcttcttccatatggaccgtgtgtttgattttggcatcactggcctctgcagcactctgtgccaaccctcgtagaccagtggatgtacaatttggccgaaactacgtgcccacatgggcctttgatcacatcaaatacttcaatggaggttctgacattcagcttcatcttgacaagtacactggtactggcttccagtccaaagggtcatacttgtttggtcacttcagcatgtacataaagatggttcctggagattcagctggcacagtcactgctttctatatatcttcccaaaatgcggagcacgacgagatagactctgagttcttggggaacagaacaggacaaccttacattntgcaaacaaatgttttcaca

SEQ ID NO: 210246 - DNA, 577 bp, Glycine max
gagagagagagagagggagagatcactgctcctgaactataagctatatagcacttggataatcttacaacaatggaggggaccagcagccaaagcacgtgtgccttcatccctagcacaatcgagacaccaagtccaagcatccctgagatatcatcatgatcttaccctggctctcttgcaagaattgcacaaagttaccctaacggcttttccagaaaggtgttagcggagattatagggacattttagttggtgtttgtgggaagtggttctgctgggctaagcaagattgatgagaggatggtgtcaaagcttggagcatcacttgcaggaggactcatagtgacggtcatgatatactcaattggacacatatcaggggcacacatgaattccgaggattctcttgctatcaccgccggcaggcatcttgcttggccacagttcccattttatatagcagctcaactcactggtgccatttctgcttcatacacattgcgagagctgctacgaccatcacatgagattggaggagcatcacctgctggatcacacattcaagctctaatca

SEQ ID NO: 210247 - DNA, 531 bp, Glycine max
cccaacacaagtaacgaagaagtcatttgtatctcgcaagtttcgatccccagaaggaaaataattatgcacgaaattagagaccctgcaattcggctcttcggtcagaagatcccttttcctgaagatgttgacaaagaagaagagagtgctgaggatagagaacaagagatggaagaacatgaagacgaacgatacaaggatactagagatgaaaatgttactaatgaagagctagaagctgatcctcctctagatgctgaagagactaagatttcaggcacattccatgaggctatcgtgaaccccaaaacaccttccatagaagaagagacagccaaatcaaacggtggcatatcatagaaggaacaaggcgatgcagtcaactcacaagagaaaaccctgaagaagcctgataaagtgctaccatgcccccggtggcaaagcatggacacttaattctgttactacaacaactacaatgtcaaccagccgcgttatttctgctaagcctgtctaagatactggact

SEQ ID NO: 210248 - DNA, 539 bp, Glycine max
cttcaaaacactcataacttatagcacaatgcttagctcatccttgagttaaaaaatggcagcagcttcttccatggctctctcatccccatccttggctggcaaggccgtgaagctgggcccatcagccccagaagtgggaagggtgagcatgaggaagaccgtcaccaagcaggtctcctcaggaagcccatggtacggcccagaccgagtcaagtacttgggcccattctctggcgagcccccgtcctacctaaccggtgagttcccaggcgactacggctgggacactgctgggctttccgcagacccagaaaccttcgccaagaaccgtgaactcgaagtgatccactccaggtgggccatgctcggagccttgggctgcgtcttcccggagttgctgtcccgcaacggagtgaagttcggagaagccgtgtggttcaaggccgggtcccagatcttcagcgagggtgggctcgactacttgggcaacccaagcctgatccacgcccagagcatcctcgtcatctgggccacac

SEQ ID NO: 210249 - DNA, 540 bp, Glycine max
  unsure (1)..(540): unsure at all n locations
tttntttttttttttttttttttggaattagcattttacaataagtgggattcggatacgcaagagaattcacattatctgaagtactccaccaaacacaaatctaaaaactctcaaaaggcatttcggtctttgacgctcactttccggggacgaagatgggggcataggcccaggcgttgttgttgacagggtcagcaaggtgatcggcgaggttctccaatggaccctttccggggacaatggcctgaacaaagaagccaaacatagagaacatggccaatcgtccgttcttgagttccttcaccttaagctcagcaaaagcctctgggtcatcagcaaggcccaatgggtcgaagctgccacctgggtagattgggtcagtgacctcaccgagggggccaccagcaatacgggaaccttcaacggcacccattaggataacttgcgtggcccagatggcgaggatgctcggggcgtggatcaggcttgggttgcccaagtagcccagcccaccctcgctgaagatctgggacccgg

SEQ ID NO: 210250 - DNA, 488 bp, Glycine max
aaaaaaactagtaaaggttgttttagtattggagagaggacatagttgtcgacaaacacaaacagtgtagcttagcaaatctgtgtttgttgtgagcgacgactcttgtgcgagtgaaagcagcagcaataatgttgacgacgatgaatcttcctctgcacacttcggtttgggtaaagtcccggcggagttggtgttgctacgcctcactttcgcagcccgataggaaagagatccgtctcggtttgcccagcaaaggtcgcatgtccgctgacaccctccaacttctccagaattgtcaattgtcagtgaagcaggtcaatcctcgacagtatgttgctgaaattcctcagctatccaacctcgacgtttggtttcagaggcccaaagacatagtaagaaaattgttatctggagatcttgaccttggtattgtgggactcgatactttcagtgaacatggccagggtaatgatgatcttatcatt

SEQ ID NO: 210251 - DNA, 508 bp, Glycine max
caacttaaatagcaatccccgcggaaaggaccaggaacatagtcacttctctagcgattaccagtgttatgaagagaacgaaaggaaaaagatacaggctttctacaaaaatttcaatctataaagcgatgtggaaataggagttcctctatgaataatgagctaaaaatgcaatttcagttatctacgtcctccattttggtgtacttggcttttgcagctttcaccatagatttaatgctcatctacttcgacagtatctgaaaaacgaaacatcccctaatgactccattgattgatcataaatggctatagcccaagtttagataggagctgacgccatcttggagtttcttcatcaaaaatataggtcaagggtgatataagaactccactgcctccaatcgctctcagttgttgtatagacttgtatagtgccttctgaggcacacatatgactatggcataatagtctgctgttaccttcccatcacgcttgcagaaaaca

SEQ ID NO: 210252 - DNA, 488 bp, Glycine max
ggcattggaagaagattcttttatgcctttattgcatcattatgatgggccaaagtttcgtcttgagctgtcagttccagagactctggatctgttggacctatgtgaacaagctggttcagcagcataagcaagaatcgcacaaggaatgaatgtgcaaaataggtagtaggttttggtgtgccagctgtgtggttttggcagattttccgtgaagcgtaagcttggaaagtggatcatcatcttcttggggaagtaaagggagcgtgttgagagtgagagaccctttgttggtgaataaaaatggttgtggtatctatccccttaaaggtgctttgtagcatttgcatgaacatttaatacctttgtatgattaagtaaaagtacagacttggtatgcaatcaaagagactactgtttgtactgctaaaacatgaatctgttgaaccaagaaaaaaattgaagtcaaaagcttcatgtattactaa

SEQ ID NO: 210253 - DNA, 470 bp, Glycine max
ctatgtaattcatgaagcttttgacttcaattggtttcttggttcaacagattcatgttttagcagtacaaacagtagtctctttgattgcataccaagtctgtacttttacttaatcatacaaaggtattaaatgttcatgcaaatgctacaaagcacctttaaggggatagataccacaaccatttttattcaccaacaaagggtctctcactctcaacacgctccctttacttccccaagaagatgatgatccactttccaagcttacgcttcacggaaaatctgccaaaaccacacagctggcacaccaaaacctactacctattttgcacattcattccttgtgcgaatcttgcttatgctgctgaaccagcttgttcacataggtccaacagatccagagtctctggaactgacagctcaagacgaaactttggcccatcataatgatgcaatactggcctgaa

SEQ ID NO: 210254 - DNA, 505 bp, Glycine max
ggctgttgcgagctataagctagatcctcctgaggagaatatgaagacgtccgctcggggggatgctgcaggcgttctggcggcatggccatgccatggcgcaggctaccaaaggttccctctgcgaatgaaaactggctatggtgagcgttcttcggaggtaaaatgcgcatgtttaaggcttgctgcggaagcacacaacatccgagcctttaaaaccattcctgaagagggcgtagaaccaacccaggactacattaacggcgaacaatttagatcagactctaaaacagctaaccaacaagctatcttttatgctagtgaacgcgaagtccatcacaacgacatatgtatatgcggcatagataacaccgcactctctaatatcccatactatgaaaaacatggatatggggcggaggaatttaatgaaaccttatatgacgaatgggttaacaagggcgacgcaccggcattgccagagactcttaaaaactacaacaag

SEQ ID NO: 210255 - DNA, 631 bp, Glycine max
  unsure (1)..(631): unsure at all n locations
nggaggggagggttggagcttgnagtatnctnattnngggttaaanccagctaccagtcggcggccgccctttttttttttttttaaattcaaaacctatagttttattaattagcagatgttctcatcgttaaaggtcaacatcttatagactacttataccaccaatctactttcaaaatactgagacatctaaaggccacacatgcaaagagttggagaatcatggtggcttctacaaacttgcgaaagagttcgccacatcaatcacaaagcgatatttcacatcagctttgctaagcctttccatggctgtgttgatctgatccatcttaatcagctcaatatctgcagttatgttgtgctttgcgcagaaatcaagcatttcctgagtttctttgatccctccaaagttgctcccccctataagtttccgtcctgcaactaatggaaagataggaagctcaaggggcttgttaggcaaccctacagtaactagcttcccattcagcttcagcagaccaagcagtggaatcagggaatgaacagcagaaattgtgtctatgatatagtccatggttcccaaagccaccttcatttttgcagggtctgatgaaacaaggaaagaatc

SEQ ID NO: 210256 - DNA, 571 bp, Glycine max
gagcgagcgagcgagcagtttcaaatagaggatttgggattgggaaggcgagggattgcgctgcgtctcttcctcttctctttcgattcatccctcattcataatcttccaatccaacaacctcagcctcacactcacacatacacacatctgaacgcgtatcgtccctcccatggcttcaaagcgcatcctcaaggagctcaaggacttgcagaaagacccaccaacttcttgcagcgctggtccagtagctgaggacatgttccattggcaagcaacgattatgggtcctgctgatagtccttatgctggaggtgtattcctagtcactattcactttcctccggattatcctttcaaacctcccaaggttgcctttaggactaaagcgtttcatccgaacatcaacagcaatggtagcatttgtcttgatatccttaaggagcagtggagccctgcactcaccatctctaaggtactgctgtctatctgctcattgctgactgatccaaatcctgatgatccacttgatcctgatatcgctcacatgtaccaaactgaccgggccaag

SEQ ID NO: 210257 - DNA, 495 bp, Glycine max
cgcggcgtcacccaccgagacctcatgccggagaatctcctcttagaccaaaacgaagacctcaaagtctccgacttcggactctccacgctgccggagcatcgccgcgccgacggcatgctcgtaaccccgtgtgggacccctgcttacgttgcacccgaggtcttaaagaaaaaaggttacgacggttcaaaggccgatttatggccctgtggggtaatcctcttcgctttgctttgtggctatttacccttacaaggtgagaacgttatgagaatttaccgaagggctttcagagctgaatatgaattcccagaatggatttctccgcagggcaggaatcttatttcgaatctcctcgatgctgatcctggcaagaggtattccattcctgatataacgagggacccttggtttcaagttgggttcatgaagcccttcgcgttttctattaaggaggcttacgttgtagacaacattgatttcgacgatgtg

SEQ ID NO: 210258 - DNA, 549 bp, Glycine max
cttctcattaacacactacgcgtgctagaacctctgctctcctcttgcttttgatagagaagaatgaagcgagaagatgtcagacgcgttctgcagcgactgcaagaggcagacggaggtggtgtttgaccactctgccggcgacacggtgtgctcggagtgcggcctcgtactggagtcccactctatcgacgagacctctgagtggcgtaccttcgccaacgagtccggtgacaacgatcccaatcgtgtcggcgggccctccaaccccctcctcaccgacggcggcctctccaccgtcatcgccaagcccaacggcggcggaggtggcggcgagttcctctactccttcctcggtcgctggcagaaccgcggctccaaccctgatcgcgccctcatcatcgacttcaagaccatcgccaccatgtccgacaggttgggactcgttgcgaccatcaaggatcgggcaaatgagatatataagagggttgaagatcaaaagtctagtagaggaagaaatcaagatgctttattggctgcttgtctcta

SEQ ID NO: 210259 - DNA, 360 bp, Glycine max
ctatatcgatgatgctctcaacatcttatctatatttgcctttatcctgccgaccggcgcctacatgaggagtgagacatgatgctgttgatcgttaccaccctgttcaacacagttgttcgcgatgaatgaactgacgcacctgctggtgggactcaaagctgctggatctacttccatcgtgtcccatctcatccttggcctgattgcacacaacgtacccaccatcacatacaatggttcgactgacgactgcaatatcatcttccaatctgtgtgcaatggagggggactggacaagagcccagctctgaggtggcatcatttccataacgctcagggtcatatttccgtgattga

SEQ ID NO: 210260 - DNA, 502 bp, Glycine max
gatagctagaagcaataagatgaaaattaaagcgctcgattcgtttgctgctacagatgtggtcgcatatgaatgccatggctcatactaccagaagttccctctccaaatgaacactgggttcggcgggcaatacaacaatgaggtggcatgagccagttggaggctaggcgcggaagcaaacaacgtagtcaagcggctaactggtcctgcaacttgcggagagtacatcactgactacggtccaggagaccaatgtagactagattccaaaacagttaaccaacaagcttatttactatgctaaattcctcaaactcaccaacaaagatgtctttgtctcggacgtagacgacactactctatgtaatctccagtatttagctaaccatggattaggagtggaaccacacaatacgacggcgttcaagaactgggttcttgatggcgaagcattcgcactgccagagactcttaagatgtacaacaactgttggctctc

SEQ ID NO: 210261 - DNA, 397 bp, Glycine max
gtagagtggtgagcatgccaaaatcctcgcgaagggcaacctcactgactctcgagaccgacaaagtctgaggctccgactatgattccgaacacaagggcttgccctgcaaaggtgacctacacctcaagctccttcctggtgaccacggtaccgcattcactggctatcatcaagcttctgtgcagactactcatgaccatataggctaagagcacacgtgagactagctaggcgacacatacgtctctacaccccaagcaggttcttcgttggaccggcaacccagaacaaccattacatctatggttctagcccaccatggacatcgacacatactccgtacaatggactactgcaatcatactattctctgcggacggtacccctatatggg

SEQ ID NO: 210262 - DNA, 523 bp, Glycine max
ggtagaccaaggtaggttatttgccatggtcattggtggtgaagtggaagagaccgtgagagagttgaggcaatacttcaaaactggaaaaaccaagagtgtgacatggaggaaaaaccagctcacagctctcttagaccttgttcatgagaatgaagatgctatatttaaggccctccatcaagatcttgggaagcaccctgttgaggcttaccgtgatgaggttggaggggtagaaaaatccgccagcaatgctttgagctgcgttgagaaatggatggcccctaaaaagagtgatatcccttttcttttcttcccagctaaaggagaagtgttgtcagaaccacttggtgtggttctcatattttcttcttggaacttcccaatcatactgacattggatccaataattggggcaatatctgctggaaatgttgtagtcataaaaccttcagagcaatctccagcaagctcttcttttcttgccactaccatttctcgctacttggactctaatgccatc

SEQ ID NO: 210263 - DNA, 510 bp, Glycine max
  unsure (1)..(510): unsure at all n locations
tttnttttttttttttttgaattaattttttacgtttgtaggcactttattcatgggggggccacacgggtggacaaatgcaggtgaaagcgaagttaaaaatgtttgacattgtctggtctgttggacattagaagtaaaaacatcctattactagcaagaaaaataagagatacaaaggttcgtttattacaacgccaagttaaagttcaccacatgtgcaacttctgcaaataaggaccctttctcctattttcctacaactcatattcagtcacaataaagcttaattcttttttaatcaacgtgtatttgaggaatagatgaacactgtgctgaggtatttatctacttggatcttttcaagcccagcatgtgcagtaatagtccaaagtagttcagcctgtatgccaatctgataaactcgagcttgaacttactccaaggagggtaccttggctcaatttaaggaacagctttctatgcattacagctttttcatggctgaaa

SEQ ID NO: 210264 - DNA, 489 bp, Glycine max
gcattccaatcgctcccaaatattttttttatttgttcataactcaataattctcatcatgggctccttgattgttccaggtgaacatgatcacaaactaaagcttgtttctcttccctttgtatcaaccagtcacctcattcccgtagtagacatagctaggctctttgccattcatggtgttgatgtcaccataatcaccaccacagccactgccgccattttccaaagctctatcgatcgcgaccgtgaccgcggccacgctattagaacccacgttgtcaagttcccatgtgaacaagttgggttgccagaaggagtagagagcttcaactccaacactcctcgggatttggtccacaaaatctaccagggactcaccattctccaagaccaataccaacaactcttccatgacttgcagcctgatttcttgttcaccgacatgttctacccctggactgtggatgctgctgctaagttgggaat

SEQ ID NO: 210265 - DNA, 435 bp, Glycine max
atgatacgtgggctccggggggctgttgatgtaagaaaaataaccaatttgacccttagtccaagtattatatttggatatttattaaaatcaccttttgggggagaagggtggattgttagtgtggacgatttggaagatataattggggggcatgtatggttgggttacatttgtatacttggtggaatctgtcatatgttaaccaatccttttgcatgggctctgcgtgcacttgtatggcctggagaagctctcttatcttatagtataggtgctttatctgtccgtggttatattgcttggagctaagactggttaaattataccgcttatcctagtgagttgtacaggcccactgggccaaaagctcttcaagcttaagcattcacttttatagttagagaccaacgtcttggggctaatgtaggatct

SEQ ID NO: 210266 - DNA, 345 bp, Glycine max
ggaaaaaaaagttttccctaaaaccaaaacgtcttttacaagggaaaaaccgccctggtggattaacaagggggtttaaaaggccctaaccaacaggggtgggtggcctcccccgaactacccagccaaaaagactttgggcaaggggcaattaaaccccccccgaaaccctgcttttttccccggggttggggcctccacaagatcttggccccgattcaaaaagtttttcaatttttggggcccattttatgaaaccccgggtccaaaaattggccctaggattcttaatccgctcaataaaagtaatggggggccccccggggggggggcgggtaacaattg

SEQ ID NO: 210267 - DNA, 536 bp, Glycine max
atcttcttatagcttcatcccaatatgctcttttccttctaaatttgattccttagttcagcattctattattatatatggcttcttcaccttcctcagaaaacaaaaacctagagggagtagctggtggtgccggagagaaacccattccacttggtgagaacgttctgcagaagcatgctgcattctttgacttgaataaagatggtgtcatctacccatgggagacttttaaagggttgcgtgaaatcgggactggggttttgctgtccgttggaggtgctattttcatcaatgcgtttctcagtcagagtactcgtcccggaaagtttccatctatactttttccaattgaaattaaaaatatccaacgcggcatacacggcagtgacactggagtctacgatactgaaggaagggttgtaccttcaaaatttgaagaaatttttaacaagcatgcacatacacatgcaaatgctttgacatatgatgagttaacggagactgataagggcaatagagagcctaaagatttc

SEQ ID NO: 210268 - DNA, 529 bp, Glycine max
agcattgctgaagcgtctccataatcctactcgatggccgagcgagccctgttgaccagggaaaccctagccaccgtgctccgcaacgactcgaaggccataatcggagctggaatagctgcatatactcattctcgggggttgcacgtgtacacgctccccgatctggattacgactatggcgctctggagccatccatcatcggtgaaatcatgcagctgcaccaccagaagcaccaccagacttacatcaccaacttcaacaagggcctcgagcagctccaagacgccgtcgccaagaaagattcctccgacgtcgttaagctccagggcgccatcgagttcaacggcggaggtcacgtcaaccattctattttctggaaaaatctagctcctgttcgcgaaggaggtggtgaaccacccaagggttcactgggatgggccattgacacacattctggctcttttgaagcattagtgcacaaagttaatgcagaatgtgctgcactacaggagtctggatgggtgt

SEQ ID NO: 210269 - DNA, 562 bp, Glycine max
ctggggatgtagactttgttcttgagttgttggggagagaccctcttttggtgtttggtgagggagagtatggtgtcactgacatgttttatgctgcagccaggggcatgaactgcgaggtctttaagctcctgcttcattctgctctttcaagaaaggagtgccttggtggcagtgaagcagaattggaagagaagttggatgaaggttctaaggttttcaagagggatgtgatgaatagggccattcatgctgctgccagaggagggaattgggaaatactgaagcagattctaggaagtgtttctgtttctcaggttttgtcttatagagatgccctaggatgtactgtcttgcatgcagcagctgcaagaggccaggttgaggtggtgagaaatctaattgaatcctatgatatcatcaactcagctaatgctcaaagcaatacagcattacatgtggcctcttacaaagttacttacccgtggtagagattctggttggagcatctgccttgttagcaacgttaaccaatcactatggagatacttttcttcacatg

SEQ ID NO: 210270 - DNA, 402 bp, Glycine max
  unsure (1)..(402): unsure at all n locations
tttntttttttttttttggttcatatttttgtatattgctgatttcattctggctttgggtgtaaagattcgtaatacacaagcctgctccagaagtagcaggaagtttggacaaaagattcaaaaaggaaaagtcatacacaaagtgtgcaaaatatatttcaaaagaaatacaaaatctttaatcacattcgcagggtggagagaattctaggacagcctcagtgccatttcatgaagaagagctcgcttttgagaagcattaattacattatgtgtttcagcattctcaagcacttcagcaattattgcagatgcagggccaaggggttcctcagccaccctcttcaacatgaaagcctggccatgatgggttatgttaattgtgcagggttgctgaaa

SEQ ID NO: 210271 - DNA, 563 bp, Glycine max
caatactacaacttctgaatcacttattagaattgaattatcttcaaaatgagagaaatccttcatgttcaagctggtcaatgtggcaaccaaattggaggcaagttttgggaggtgatgtgtgatgaacatgggattgatgccactggaaattacgtaggcaattcccatcttcaacttgagagggttaacgtgtactacaatgaagcaagtggaggacgctatgttcctcgagctgtgcttatggaccttgaaccagggaccatggatagcttgcgttctggtccttttggaaaaatattcagacctgataatttcgtgttcggccaaaatggagctggtaacaactgggctaaagggcattatactgagggagctgagcttattgattctggtcttgatgttgttcgaaaagaagctgagaactgtgactgcttgcaggggttccaaatttgtcactcactgggaggaggaactgggtctggaatgggtaccttgcttatctcaaagatcagagaagagtatccggataggatgatgttgacattctcagtgttcccgtc

SEQ ID NO: 210272 - DNA, 500 bp, Glycine max
cacctttctcctaaaacatctccaagttgttctacttcttctattacaacaacgtcgggcaagaccatgaccatggtcatggtcacgatcctgctcctgttcacggtcttcgcggtttcatcggccctagacatgtcgatcatctcgtacgacaacgcccacgccgccacgttgcgcagcgactaggagctgatgtccatgtacgagcagcggctcgtaaagcacggctcggtgtacaacgcgctcggagagaaggagaagaggttccagatcttcaaggactacctgcgattcatcgacgaccacaactcccaagaggaccgaacctacaagctcggactgaaccggttcgcggatctgaccaacgaggagtacagggccaagtacttgggaaccatgatcgatccctaccggaggctcggcatgaccccgatcaaccgatactcgccacgtgtcggcgacatactacctgaatcggctgattggatgaggaaggtgct

SEQ ID NO: 210273 - DNA, 509 bp, Glycine max
  unsure (1)..(509): unsure at all n locations
cttcttctcctccggacactatcaagagctttaagctagagcgatacaacagctacatcaggagactcaacagcaccaaactcctcaacgcctcctccaaactcctcttccgtgccactatcttagtcgcactcatcctcgtcttcctcttcaccttcaactaccctcccctcgccccagacttcacctcccaccgccacctccactcccactcccacttcctctcctcctcctcctccttcgcctcctgggagaagcaggtccgccactcctccacccctcgccgccccaacggcctcaccgtcctcgtcaccggcgccgctggcttcgtcggcagccactgctcccttgccctcaaaaaacgcggcgacggcgttctcgggctcgacaacttcaacagctactacgatccctccctgaaacgctcccgtcaggcaatgctctggaaacaccaggttttcatcgtgaaggtgaccttaacgacacccncttgcttgagaagctcttcg

SEQ ID NO: 210274 - DNA, 492 bp, Glycine max
  unsure (1)..(492): unsure at all n locations
tttnttttttttttttttttttttttttttttttttttttttttaatngaaatatttgggtttctggggttcttggaaaaacaaaaacaagggcctggggggggaggataattaaggcttgggtacctacctaggggattattcattggcaaggggatattccttttttagcctttgctgggggccggaataaccgagggaccacttgacgaacttcctgagaccgggggcgaaatcgggggggggattggaaaaaaaatccctgtaggccaagctgacattggcgtgtgggaagggaacctccccgtttgatggcatcttaatgacgggcttcttggccttggggcttagcagaccttccagaatggacaccaagggcccaaccggcaccggtgaagtgttccccagattggatactctgagctgggcggggcccttcttcttgccgccgctcccggagcttttttgggcggggtccagggctcccaggca

SEQ ID NO: 210275 - DNA, 494 bp, Glycine max
gagccacattttgtccctggtttactctttatgagtctttcataggacagttaattaaaattatagcctgaaataagggttcactagcaatggcctcaacctcttctgctctcactatatcctcttcttccacccttcatgattgcaaggctccaagacagtcaccagctgcttcaccacaatgtgtgagccttccctctccccttttgcactctcagaactgttcatggaagaccactgcttattgtcgcagtattgctcgaaatgttatggcaatggccacaggagaggcaccagctgaagctgccccgactgaggtgccagagattgtcaagactcttcaagaaacttgggacaaagttgatgataagtatgcagtgagttcactggccctggttggtgtggttgcattgtggggctcagttgggttgatctcaacaattgataggcttcctttgattcctgggattcttgagattgtaggcattggatac

SEQ ID NO: 210276 - DNA, 461 bp, Glycine max
caaacttcaatttcattgtattcagctcaatgaactcaattgggttttgttatccttgtaatcaatcactacacagataatggaggaaatgagtttgtcttaaaagtggatcaatatatataaaaagatacaattttttcagaacttattccattacttgggataaagtatggtcagaagcttatggcaacaaaatgaagcatggggacatcttcaacaggaagctgcaagatatgacactttcatgtcaacagcatctcagcatttcctaacactttcagttgctccccagtatttcgttgtatgtttcttttactttccgtaccaaagcttccctgtctggcttgaaaactatgttcttatatacaaaccacccagtgtatccaatgcctacaatctcaagaatcccaggaatcaaaggaagcctatcaattgctgagatcaacccaactgagccccac

SEQ ID NO: 210277 - DNA, 579 bp, Glycine max
atcttcttatagcttcatcccaaatttctcttttccttctaaatttgattccttagttcagcattctattattatatatggcttcttcaccttcctcagaaaacaaaaacctagagggagtagctggtggtgccggagagaaacccattccacttggtgagaacgttctgcagaagcatgctgcattctttgacttgaataaagatggtgtcatctacccatgggagacttttaaagggttgcgtgaaatcgggactggggttttgctgtccgttggaggtgctattttcatcaatgtgtttctcagtcagagtactcgtcccggaaagtttccatctatactttttccaattgaaattaaaaatatccaacgcggcaaacacggcagtgacactggagtctacgatactgaaggaaggtttgtaccttcaaaatttgaagaaatttttaacaagcatgcacatacacatccaaatgctttgacatatgatgagttaacggagatgataaaggcaaatagagagcctaaagatttctcaggaaggattggtagtgtggttggatggaaaattctttaca

SEQ ID NO: 210278 - DNA, 644 bp, Glycine max
  unsure (1)..(644): unsure at all n locations
aggggggaggacgggaatcgngngtatactcattnnnggtaagggcgactacccgtcggcggccgccctttttttttttttttagtggtaggagctatttttttattacaaaatgataagaccgagggtttttattattattttttgtttgttttatattttaaggcaacaagcaaagctctccaatctgcaagtgggaacatgaattatgccactcttccattgatgtcaatcaatgagattcaggtgctttctgctggaacaggaacctgactcaaaacatgaccaaagtttctgtttaagggttttggcctccattcggtcctgcccctcacaatctcagcaccatcatcaagtcgaagcaagtgcttgcactcaaaaaatccatcatctgctaagtttccaacatcagcaccggagagatcagagagggaatctagcacactgttcctgccacactccctcctgtactccaatgtcatggcacatagctcatggctctccaaaagtggctgcggagcactctccagaatccacccaacatacttcacattgttaacatgctgattcacatctagatcatgccatctgggacttaaaccagtgcgaatgaaattagctgaatcatcaagtttggttagttt

SEQ ID NO: 210279 - DNA, 534 bp, Glycine max
agaggttggggtgatactgctgaactggtattggaaatgatgcatctgctactggatattcttcaggctcctgatccttctacgctagagacttttcttgggagagtgccaatggtattcaatgttgctatattatctcctcatggctactttggacaagccaatgtcttgggtttgcctgacactggtgggcaggttgtttatatactagatcaagtgcgtgcccttgaaaatgagatgctccttcggatcaagaaacaaggacttgatttcactccaagaattctaattgttaccaggttaatacctgatgcaaaggggacaacatgcaaccagcggctagaaagagtcagtggtactgaccatactcatattttgcgagttccattcagatcagagtcaggaactcttcgtaaatggatctcaaggcttgatgtgtggccttatctagagacttatgcagaggatgttgcaagtgaaattgctgctgagttacaagggtatgctgatttcatcattggaaacttcagtgat

SEQ ID NO: 210280 - DNA, 480 bp, Glycine max
  unsure (1)..(480): unsure at all n locations
tttntttnnnnnnnggctgtttgatattcacatattttagggcagaataaatgttgaaatttacattctaaatacaccatattttgtgttttgaatgtcacggttcaaggaggcagagatggatagaccaatgacttttcttgtatccgctggatcaatgattccatcatcccaaagcctagctgttgagtaataaggacttgcttctctctcataagcctccactactttccctttaaacttatcctcttcttccttgctccactgaattccttgccttttcttgttgcctttctctatttgggccagcacaccagcagcctgagcaccacccatcacagaaattctagcattaggccaaaggaacaagaaattgggactataggcacgaccgcacattgcatagnttcctgcaccaaagcttcctccaaccattatagtgactttaggtacctttgcacaagaaacagccatcaccat

SEQ ID NO: 210281 - DNA, 510 bp, Glycine max
taatggttggcactaatgtggagtatatgtcagagtatattcctcgggaaccaagagagccttctggttctggagccgatcaagaaactacaaataaagatgttaataagatgctaagacgcctagctcagaatcgagaggctgcccggaaaagtaggctgcggaaaaaggcttatgttaaacaattagaatcaagccgtttgaagctcatgcaattggagctggaaattgggaaagcaagaaagcagggtctgtatatgggcactgcattagatgccggctatataggatcaacatcagaaacaataaatccagggattgctgcttttgaaattgaatatggacaatgggttgaagagcaagaaaggcggaatgaagaacttagacatgcatttcaaacacaagcacctggtgtacagctcaacgtagtggttcagagtgtcttaaatcattactcaaatcttttcagaatgaaagcagaagctgtaaaggctgatgtcctctatttac

SEQ ID NO: 210282 - DNA, 569 bp, Glycine max
caacttctccatgttatggttgaacctgatacctttcctcatgcttagccaatgcttctccataactgcctttccagcgtcgaacatctgaaggatccatgttatgaaaacccggcaaaaccaacagtccttttttcccattggcacagtcaaggataggttgcaagttcatctaagcaaaatgaggaagaagcatagtttatagagagcacaaatgcacaatgatggtaatcttggactcttgaattgcgttcacaagtgttggtgttatctcctctcctcttttaagcttctcatgatcaatgaaagtgtggattcccctgtcactaagagctttgtagagattaccaaaaaaaccaaggcgggtgtctgagcctctaaagctgaggaacacatcgttggtgaatgcatctgaacttgatcgcaaagccatgagaatacaggtagctttgacgtgctggagacttgcccgcatagcttggtatgaactggtgttctacatttggagctatttcaatctcactttttatatgaaactcacaggccttattgatgggttgactctctga

SEQ ID NO: 210283 - DNA, 546 bp, Glycine max
  unsure (1)..(546): unsure at all n locations
attctccttcgattcaattcaattccttatcttccccgttttcttgctcttcttgttccagttcttgaactcacccagctagctgaattccgaaaaagcccttttcttgtcccgaaatgccgaaccccttttcttccgcttagccaccaccaacccgccgtcgatccccgtttaagatgatcgtccgcacctacggccgccgcaaaggaaccctctcgggaacgtattcgggctcgtcctctctaaacgacgacgtttcggagccattcagggattccttatctcaggagattgacgaccctctctgcggcttcgcgttctcctcccaggactcgtcctcgcagcattggtccttcttcgattcggagatcggcgacttcggaaacggcaccggcgcatgcggagcaagggagtcgaagagggcgaatcgggcgccggcggaggggattccggcgacgtcgacgctgatggaggcgcangagttcggagagatgatggagcacgttgacgaggtcaatttcgctctcgacggtctccgcaagggtc

SEQ ID NO: 210284 - DNA, 486 bp, Glycine max
ttttttttttttttttttttttttttctatttttttttttttttttttatttttttttgggttttgttttttttttttttctttttatcccctttccctttttttttttaaaaaaaaaaaaaaacacaccttaattgtattaaaccataccacgaagccgtaaaaaaaggttctttccccaaaaaaaaaaataaaaaaaaaaaaaaaaaaaaaccgggggctctctttccggaaaattttcgggggcccttacctaaagaccccttttttttcccaagggccccaagtttccaaaggaactcccaccccacccgggggaaaaaccacaaaacttatgttcccccccaaaaatttatactggggggccccccccaaaaaaaaacaaaaggggttaaaattccccccaaaaaacaccccaaaaacaaaaaacgcccccttttttgaacgggccccacaaaagggtcccccctcccccccccccccact

SEQ ID NO: 210285 - DNA, 598 bp, Glycine max
  unsure (1)..(598): unsure at all n locations
ngtgggaggctttggacttgnagtatncncatnnngggtaagaggcgactaccagtcggcggccgccctttttttttttttttagtggtaggagctatttttttattacaaaatgataagaccgagggttttggttattattttttgtttgttttatattttaaggcaacaagcaaagctctccaatctgcaagtgggaacatgaattatgccactcttccattgatgtcaatcaatgagattcaggtgctttctgctggaacaggaacctgactcaaaacatgaccaaagtttctgtttaagggttttggcctccattcggtcctgcccctcacaatctcagcaccatcatcaagtcgaagcaagtgcttgcactcaaaaaatccatcatctgctaagtttccaacatcagcaccggagagatcagagagggaatctagcacactgttcctgccacactccctcctgtactccaatgtcatggcacatagctcatggctcttcaaaagtggctgcggagcactctccagaatccaccccacatacttcacattgttaacatgcntgattcacatctagatcatgcccatttggggac

SEQ ID NO: 210286 - DNA, 456 bp, Glycine max
ctcagagtgtgctgcttcagtgtcctgatcaaagatggcaacattgactgcttcaagtaacttagtctctagaaattctcatgtccatcatggaccaacaactgcttcatatgagtctaaagcagtagcaatgggacttagatctctaaagcagacaaatactcatagtggacttagaatttttaacccggtggatgagctacttaacagaaccccaattaaaaccaatgcaatgcaagctatgaggaagggacctcaaggcaagaatgcctggcctaaaggtataatcacatgtggcatgactttcataattataggaacggaggtggctccatggtgcaaaactggcgggttaggagatgttcttggaggtctaccaccagcattggcaggtttcgggcatcgagtaatgactattgtgccacgctatgaccagttcaaagatgcatgggatac

SEQ ID NO: 210287 - DNA, 423 bp, Glycine max
ccctaatcaatttttcattatttcttgtgatacataggaatgcaacctctttttttttttcttcttccattttcactccttatatatcattggcattctttattcaactttgggcagcctcaggcttgcgatcatcatcagcatgtggaacaatctttgaccaaaaccaatgtgatctccagactgtatgcatttcttcaatggggatgttctttgtctgaggcaacaacatggcaatgaagatggtcatgatgagtacaaatgccgcaaagaagaagaaaaggccaaacttcaagtcgcaaagcatgactaggaaaacttgagcaatcgcaaaagtgaacagcatgtttacggcaacattgatggctggacctgctgaacgaacctcaagagggcatatttcactaggcaccaaccacccta

SEQ ID NO: 210288 - DNA, 518 bp, Glycine max
cactcttccttaaataccatcattcatcatcacacacatagtagctaatagctatactctctctagagtaattgcggaatcagctagaattttctaataatggccaaagacgttgagcaggttacagagcaaggtgaatactccgcgaaggattaccatgacccacctgcggcgccgttgatcgacccagatgagctcactaagtggtccttgtacagagccgccatagctgagttcatagcaacactccttttcctttacatgaccgtgttgaccattattggctacaagagacagagtgacaccaaaatccccggtaacaccgagtgcgacggcgttggcattttgggcatcgcttgggccttcggtggcatgatcttcatccttgtatactgcaccgccggcatctctgggggacacatcaaccctgcggtgacattcgggttgctcctgggacgcaaggcgtctctggtgatggcgttgctgtacatgatagcacagtgcgccggtgcaatctg

SEQ ID NO: 210289 - DNA, 484 bp, Glycine max
  unsure (1)..(484): unsure at all n locations
ttnntttttttttttgctgtttgatatttacatattttagggcagaataaaggttgaaatttacattctaaatacaccatattttgggttttgaatgtcacggttcaaggaggcagagatggatagaccaatgacttttcttgtatccgctggatcaatgattccatcatcccaaagcctagctgttgagtaataaggacttgcttctctctcataagcctccactactttccctttaaacttatcctcttcttccttgctccactgaattccttgccttttcttgttgcctttctctatttgggccagcacaccagcagcctgagcaccacccatcacagaaattctagcattaggccaaaggaacaagaaattgggactataggcacgaccgcacattgcatagtttcctgcaccaaagcttcctccaaccattatagtgactttaggtacctttgcacaagaaacagccatcaccattttt

SEQ ID NO: 210290 - DNA, 313 bp, Glycine max
gaagggtttgtaagagaacgaaatatgatgctcaagatgagtggtagggtttctgggacggtgaagtggttcatcgatcagaaggggtttggattcataacccctgtcgatggcagcgaggaactcttcgttcaccaatctcagatcaaatctgacggtttccgaagcctagctgaaggagagtccgttgatttcgctattgaatctgaatctgacggacgcgccaaggctgtagatgtcactggccccgacggcgcctgcttccagggaaccagactcggcggtaatggtggccgaagctatggcaacggac

SEQ ID NO: 210291 - DNA, 459 bp, Glycine max
gacattcaatgtaattggaacacaatgatattccttaatgataaggcacaagataaaattcagtttcatatcatcctaaatacgagtacaacaagtagtcacatatgaagtagctatgcgacatatcaatcaaactcgttattcatctctgtgattcccagctgcaaaagacaatgcaatgctgaactcacacggttgtacgttcactatgatttatggaacatgctatataatgatgttcccccatgcatgtgtgtattacactactagcccatagtataggaagggctgggtaagttgatcacagtcgttttgaccttggtcatcatgtttatgctgttggtaatcccttgagatccaatgccactgtcctttataccctgaaagggaaaatgatctggcccacgagctggggcagaatttatctgaactgtcccgtttccattgcatcactgatca

SEQ ID NO: 210292 - DNA, 612 bp, Glycine max
  unsure (1)..(612): unsure at all n locations
gtttgttgtgagctataagctagttctccgtgaggagaatatgaagttgtttgttttctttgttgctgcagtagttttggtagcatggccatgccatggcgcaggctaccaaaggttccctctccgaatgaaaactggctatggtgagcgttcttcggaggtaaaatgcgcaagttttaggcttgctgtggaagcacacaacatccgagcctttaaaaccattcctgaagagtgcgttgaaccaacaaaggactacattaatggcgaacaatttagatcagactctaaaacagttaaccaacaagctttcttttatgctagtgaacgcgaagtccatcacaacgacatatttatattcggcatagataacaccgtactctctaatatcccatactatgaaaaacatggatatggggtggaggaatttaatgaaaccttatatgatgaatgggttaacaagggcgacgcaccggcattgccagagactcttaaaaattacaacaagctgttgtctcttggcttcagattgtattctngtcaggaagatatcttgacataatggccgtatcagaagcatacctaaagaaggcttgctttcacacatgggagcag

SEQ ID NO: 210293 - DNA, 598 bp, Glycine max
agcaaagggaaaagcaaacagagtgctctatcgaagatagaagaagagatggctaaatctccagaaactgaacttcccgtcgaagctttcggttgggctgcttcagacacttctggcacccttgcaccttttcatttctccagaagagaaaatggcgttgatgacgtcactctcaagattctcttctgcggggtttgccactcggatctccacactctcaaaaacgactggggtttcaccacttaccctgtcgttcctgggcatgaaattgttggtgttgtgacaaaagttggcaacaatgtgaaaaacttcaaagtgggtgataaagtcggagttggtgtgatagcggagtcttgcaaggaatgtgaaagttgccaacaagatctggagagttactgtccccgccctgtttttacctataactctccttattatgatgggacacgaaccaaaggtggttattctaacatcatggttgtgcaccagcgttatgtgctccgatttcctgagaacttgcctcttgatgctggtgctcctctgctgtgtgctgggataactgtgtatagcccgatgaaatattatgggatgacagagcccg

SEQ ID NO: 210294 - DNA, 491 bp, Glycine max
atatccccccctagctacagagcagcttaaggggtggaataataataagcctatattggaaggccggaaaaataaaaaaggaataacaaaaatgtctggaaaggtaattatctcggctgtttctctcatcctggtggttggagtggccataggtgtggtggtggccgtcaacaagaagggcgaggatcccacacttcaatctcaacaaaaatcagtaggggttatctgccaaaacactgatgaccagaagctctgccacgaaaccctaagctccgtgaagggcatggacaccgctgatccaaaggcttacatcgccaaggcggtgaaagccaccatggacagcgtgaccagggccttcaacatgagtgataggctcagtaccgagtacggaggcaacgataaccgaaccaagatggcccttgatgattgcaaggacctcttgcaatccgctatcgagagcctccaactcagcattgacattggttcacaac

SEQ ID NO: 210295 - DNA, 551 bp, Glycine max
  unsure (1)..(551): unsure at all n locations
gggtccgaactgagagncnaatnagggtagaccagatcacccgtcggcggccgcccttttttttttttttttttttttttttttttttttttttttttttggaagggataagaggggaattgggaaattattattttgacaagatcagcttttattaaacatgtttctgggaaaggaagttctaatagatgacagggttagactttaagcatcagatgccccctacaagactcctcaatgactgtatgcgcaatcatattaatcagtttgttgttccgttttctagggggggcaattcaacatcttggatagcttcaagcttagctcttccaccatacatttttgggagaactttttcaccaacctttcttacaaactcccttgtctcatcctcattggatacaattacaatcttttctaatgtagccttctttaggaagcgagaaactagtttccaaacactcacaaaaaaccatggcatgtgtaacatatagcattttgctaaacgttctgggtagtaagcctgtaaaaatggaaaacctgtgattaac

SEQ ID NO: 210296 - DNA, 445 bp, Glycine max
ggaaatgaaaggaaattttcaaaaatttaaaaaaaaaaaaaaaaaaaaaaaaaaaaaaggaagggcggccgctcgcgatctaaaactagcggctcgaggaagatctccattctctttatcacaatcttttcttgtggttttcttggaaatgttgtttcaaatgctagtcctcttccatatgaagctatttttaactttggtgactctataagtgatactggaaatgctgctcataaccacccacctatgcctggcaatagtccttatggttcaacatactttaaacatccttctggacgtatgtcaaatggacgactaatcatagattttatagccgaggcatatgggatgccaatgttgccagcctatttgaatctcaccaaaggacaagacattaagaaaggagtgaattttgcatacgctggttcaactgcacttgataagg

SEQ ID NO: 210297 - DNA, 485 bp, Glycine max
  unsure (1)..(485): unsure at all n locations
tncnntnnnnnnnnnnntttaacnctttccatttgaggatatattattttaggtacttgacacttaacacaatacacatgcatatatagagcaacacatttcaaggaaacattctccaaaccatactgatctcccaaaataaactggaagatgattaacttaaagacacacatatatatataagccaaaagcatatatatatataagacaagtggaaggaatacgctcataattggttgctcatgcttcagccaaagagatggtggagcttctttccatgagcttcctcatcttgctcctttgcttcctttttctcatgaagctcatggaaggcaaacccaccagatcccactgcagctggtgctgcaacctcctcttctatcttgtgcctgtgagcatgctctgggtcattctctgccttgcgcttctcatgcaagggcgtaagcagcagcagatgcagcacctaactcaccaaggtgctcaag

SEQ ID NO: 210298 - DNA, 557 bp, Glycine max
  unsure (1)..(557): unsure at all n locations
gacaaaatgaaagtccatttggtccttttcttgctcctaattcttgtcagcttcactagcaatgttaacactctctcaaccaattccaaatccaactcttcaattcctcaattaacccaacagaaaaggcctgacaatgagacaatatatagagtatcaaagcagctatgttggggttgcattgcagagtcactggagtttgttcaggcacaacttggtgagagcagccaagtgggaactcccactgatgtgggacttccagctggagcaatacgcgaggtggtgggctggtcaaaggaaagcagattgcaagctcgaacattctttcccagaagatggtttcaagcttggagagaacatttattgnggtagtggctcggcgtggacgccaagtgatgctgtaagagcatgggctgatgaagagaaatactacacctacgccactaatacttgtgtgccaggtcagatgtgtggccattacactcagatagtgtggaagagcacctgaagaaatggatgtgctcgggtgcatgtgacgatgaagatgtgttcatgac

SEQ ID NO: 210299 - DNA, 463 bp, Glycine max
  unsure (1)..(463): unsure at all n locations
tnnnnnnnnnnnnnnnttttggggtttgataaatattttatttcactttgtatgagggctcaaagtttaacctcaggcaacagatctctaactactgataccctttaattactttttggtacttttatttattgacccaagtactaactaattattaaagccaatcccgtaattatcccacttcccacaagtatttacatatacactcgcacatactcactcataaggactgagaaactaattcacactcacataagctagcactattgtagtattatctaataccactagagtttcaatttcgctacatgaattaatgcacacatagtttataacaatttaatagggtcgctctccgacataattgcccacgggatcataattacaagtcatgaacacatcttcatcgtcacatgcaacccgagcacatccaattcttcaggtgctcttccacactatctga

SEQ ID NO: 210300 - DNA, 611 bp, Glycine max
  unsure (1)..(611): unsure at all n locations
tggattgaaagtttagtatanctattaccgggtagaccagcatactcgtcggcggccgcccttttttttttttttttgaaaacaacatatatatgttttcccatatttataagcacaatggtgttttgttgtaaggtccatataagggctaacaaagtgtagtaatgtgacaaatatttgaattctgttatgcttatctgaggaaaacaaaatgacagtaactataagaggacttgcagtgatttgaaacacaatattatataaaattaatcgcgtttgattggagtagcttgaactcgaagaggctgaaccttctttaatgttatcgcatattgctcctccatgttcatgtgttctggaattaacccatcagctagcttccattcaaagttgtgtacaagggatgctactattaaatgcattgtcctgtgagctaatggcaatcctgggcatatccttttaccagctccaaagggtatgagcttaaaatcgtgacctttaaaatcaatctcacatttcaaaaatctttcgggcataaaaattgntggattctcccaaatggttggatctcgtcccatggcccacacattgaccaagatttgtgcattttt

SEQ ID NO: 210301 - DNA, 260 bp, Glycine max
aatataaaaatataagaaaaaaataaacaaaaaggagcaagtggaaaacaaaaaaaagaaaaacccccaaaaacaaaaaacaaaaaaaaaacaaaaaaaaaaaacaagagaaaaagaaaaaataactctccaaaaaagaaaaacctaagataagaaaaaaaaaagaagctacaaccaaaaaaccacaacaaggacaaacaggagcaaaaccctaatagaaaaacaccagacacaacaaaacgattccacaaaaagaaaaa

SEQ ID NO: 210302 - DNA, 440 bp, Glycine max
ggcatatcaaccgcgttaactatatgttgcgttctgtatatgcttgtagcagcagttattgttggcttagtaccatattatgagttgaaccctgataccccaatctcctcagcattttctagctatgggatgcaatgggcagtgtaaggtatataataacaactggagctgttactgctctttttgccagtttgctgggttctgtgcttcctcagccacgcgtctttatggcaatggctagggatggtttattgcctcatttcttctcagacatccataaaggcacacagattcctttgaaaagcactattgcactgggtgtctttgcagctactcttgcattcttttgggacgtttctcaattacagggatggttaggtgtgggaacactgcttgcatttaccactgttgcagtttcagttttgataatcagatatgtg

SEQ ID NO: 210303 - DNA, 537 bp, Glycine max
  unsure (1)..(537): unsure at all n locations
nnnnnnnnnnnnnnaatattccngngttcatgttgnttagtatttcgtgagtatgttgactatacatggttaatgcctcatagggagaagtttgtaaaaggatggactcatccggttatggccacttgtttaaataaacaaataaataatcatagtaatcatccgtctgatagcggaaagaaagcattggtttagaataggatatttacaaattggtgtaagccatgtaatgtaatatgtcacaattatgtaacaaatggatatagacctgaagtgtggtaactttggtagctgccgtgcaaatactaggcaagatgacttgcttgagatcgatggatttcatcagcatatgctgagggaacatagattgcatgcaacagtgagctgtgagtgcggccatagaacaagtatacaagttctcctatcaacatccataccgaaactcgcagccatgtagcaactccaagatcgattagtaagtagggtgtttataagaatacatgcagcaggtaaagaatggaacaaatgggcaggcaa

SEQ ID NO: 210304 - DNA, 513 bp, Glycine max
  unsure (1)..(513): unsure at all n locations
cagctcactaacaccagctactactttttccccccaccccccactctctcacaaaatgtgccagggcctctccgccccatcgccgccgtgttcggcgcttctctccttcacgctcctcctcctcctcctctcggtggtgggcccggtttcggcatggcggccttggccccagagcaacaaaatgaacatcagcgattatgccttcggggactccaagaaatacgaggggtcctcggagttcgtgaagctgaggtaccacatgggaccggtcctgactaccaacatcaccgtccacaccatctggtacggcaagtgggagcggagccagaagaagatcatccgcgagttcataaattcaatctccgccgcgaactcgccgcacccctccgtggccggatggtggcgcaccgtgcagctctacacggaccaaaccggcgccaacatttncaaatcggttcgactcggcgaggagaagaacgaccggttctattcccacggcanatcactgacccg

SEQ ID NO: 210305 - DNA, 409 bp, Glycine max
atcaataactttaaaattacattatttgcattagggaacaaggttaactaacttaacaaaattaccagactcccacagaagcacaagaccaaacccaagaaagaaagaaaaatctagcacattgactgaggagatgatcagtgatcaagcgcattaggtccagtacagtaattgagaacgtgactccacagccactgaacaaggaatttccgtctgatcccattcatgttataggtggcgccatctcgagcgtcgaaaacctgaccggtgtaggatccaccgccaccggtgccgtaaatcccctcacagagatcggcaatctcgacggggaaagaggggtcctgacccgcataccaagcattcgccaacgggttcgttgccagttcagccatctcgtgtccaatcacac

SEQ ID NO: 210306 - DNA, 578 bp, Glycine max
  unsure (1)..(578): unsure at all n locations
cgcagtcgtttgattgtgaagtgagttccgattgagcacgtcttggaggcaacgacgtctacggcagctcctcgttggtggttaagtcgcttgtcctttcagtccctcgatgagtccgccaacccctaaaaagcacttcttagttctccctctcccactaaaaaccatagtaatctagataataattaacatcagccctcactccttcgcacaccaaacccttccttcctatctctcactaatctaatggaatccgcagcactgtcgcgcataggcctggcgggcctggcggtgatgggccaaaacctagccctaaacatcgcagaaaaggggttcccgatctccgtgtacaaccgcacggcctccaaagtggaccagaccgtagtatcgtgcccgcaacgagggctccctccctctcacgggccaatacacccctcgcgacttcgttctctccctccagcgccccagatccgtcatcatcctcgtcaagccggctccccagtcgaccacaccatcgncgncctcttcgaccacctngaccccggcgactgcatcatcgacggcggcaacgagtggta

SEQ ID NO: 210307 - DNA, 488 bp, Glycine max
  unsure (1)..(488): unsure at all n locations
ttttatttttttttttttttttttttttggaagccaaatgacatgccttgggtttatggagattaaaaacagttatagcaagaaaacaatagctgctctctccctaccaaagatcctcaaagaaacaaacaattacaactcaaatgctgcactgcaatgcacgaccattaaacaaacaaccaaaacccaaaatcaatcaattgagtgcaccaactccagccccactattgcgagcgagtttcgtccactcggtatgaaaagccccagggcgatcaaccctctcgtaagtatgcgccccaaacaagtccctctgagcctggacaaggtttgccggaagtcttgccctccgataggtatcaaagtaagcaagactggcacacattccgggagtactaatcccagccgaaaccgtcaaccccacaaccctnctccacgcagcctgtctctgcaccatttcccttgaaactccgggtccacaatcaaactcg

SEQ ID NO: 210308 - DNA, 542 bp, Glycine max
gattccacaacagtgggagggagattcaaaaagagagagtggaaaagatggcgcggttgatcacagtggtgtggtgcgcggtggcggtgctattatgcgccgcggccggtgcgtcgtgggtggaggaggcggcgaacccgatacgaatggtgtctggcgtggaggcggaggtggttcgggtgatcggggagtgccggcgtgcgttgaagtttgctaggttcgtgagcaggttcgggaagagttaccaaagcgaggaagagatgaaggagaggtacgagatattctcgcagaatctcaggttcatccgctcccacaacaagaagcgtttgccctatactctctctgttaatcattttgctgattggacttgggaggagttcaaaagacacagactaggagctgcccaaaattgctctgccactcttaacggcaaccacaagctcaccgatgctgttcttcctccaacgaaagactggagaaagaaggtatagtgagttcagtaaagatcaggcagtgcggatcatgctggacattcgcacact

SEQ ID NO: 210309 - DNA, 474 bp, Glycine max
gctatcttataactgatattgggagcgggagcatcaatacaatacaatatgtaactatgaactatcaatatatgatcgttattatgtctgtgatacacacaattaaggccataatatacttatgtgatttacaacaacttctagcttattttatacatcatgccaacccaactaggagcaattttcatcatacaattacacttatctttaatcatcattcatcaatactggcatcagcaatacgctctaaactctgaagcatgacaaggtggtagtcaccagggaccatattgttatgcaatttatgccacaattggataagatgcacaagttgcaacaccacacatgttcttccccaattccatcttgaagtagccattttcaccccagctttctccccatgaaatttttatgagccaatatgggacaccattttcaactccatatccaacagcaagaacgggatggttcaca

SEQ ID NO: 210310 - DNA, 519 bp, Glycine max
aagcccttccagcacaaccaaagggataaatgaatgaaattctaacccatcgataattaaatttgatgggaattatgatgtagcacaaaatgtctcaccattaaaatcaaaataacaagtcgaagttttaagtaacttaggacagaacttaaaaaaaaaaaactaggtaaaatgagagtagataacttggtacattatgtcacttagcacttaacctcctttaaggcatatgcaaagtataagaatgttggatcagcagcaccatccttgtagtatgcaaagaccaagcaagcatcatcattcatgctctccccaacaaaaaactggaaatccttaatcttagagagcaggtatttagttgctccctcaatgtgcttcttaaacaactcttgtttctctgcatcgagcttgggagtcaaattcttgataaacctcttcatgaaggtaacaaactgtttcttatcaaaagcgggttgctcctgaagtctgaatgtatcaacaatgtcaacaaccttaaca

SEQ ID NO: 210311 - DNA, 414 bp, Glycine max
tttggtttttttttttttatataaattttaacaaaaaacaataacaaaagggggacgggggccgctcttaatctagaactcccccctcgcggaagatctccattctctttatcacaatcttttcttgtggttatcttggaaatgttgtttcaaatgctagtcctcttccatatgaagctatttttaactttggtgactctataagtgatactggaaatgctggtcataaccacccacctatgcctggcaacagtccttatggttcaacatactttacacatccttctggacgttatgaaactggacgactaatcatagattttatagccgaggcatatgggacgccaattttgccagcctattagaatttcaccacaggacatgacattaagaatggagtgaattttgcatacc

SEQ ID NO: 210312 - DNA, 621 bp, Glycine max
  unsure (1)..(621): unsure at all n locations
tggccccggcttcccaccccagccaacaaaaagaatgggaaagggcctcagctcgagctnngtanancnaatnnnanggatagacccgcaaaaccatcggcggncgcccttttttttttttttttcatacagctgttgaagtttcgccgtaaaactaagcaaaaaagggaagtacaagtaatttcacaaagtatcttatcatcgccaccaaaaaagcaagcgcaggggacttcttaattcccagctatcataaaaatttaacagactccgactaatctagagctcatcgtgagaatcgtcctcgtcttcttcgcctgatgcaccaccaccgcctggggctcctccagatctctgatacacagcactaatgattgggttgcaaacggcttcaacctccttcagcttctcttcataatcttctttctccatactctggttgtcatccagccattccagtgcttctttcacagcagtctcaattttctccttttcatcagactccaacttgtcagcgagcttgtccttgacactgatctggttcttcatgttgtatacataggtttcaagactgttgcgagcatcgatcctctccttcaccttcttgtcttcctctgcaaactc

SEQ ID NO: 210313 - DNA, 199 bp, Glycine max
gtatataaaatttaaacaaaaaactaaacaaaagagagaaaggggaaaacaaaaaaacgaaaaaaccccaaaaccaaaaaaaaaaaaaaaaacaaaaaaaccaaaaaaaagaagaagacaaaacgacactcaaaaaaagaacaaccttaaggaaaaaaaaaaaaagatgcaacaagaaaaaacacacaccaaggccaaa

SEQ ID NO: 210314 - DNA, 461 bp, Glycine max
gtgacacagaaattaagctagagcttcatagtttcttcttcttttctcaccttccttctctcccttcagacaaagggacaaaaaatcagtgtgtgagagagagagagagaaattccaaaaccatgtcccacagtcatctaagtttcgcctttgggattctaggtaacattgcctccttcgtgtgctttctggcaccactaccaacattttatagagtttgtaagaagaaatcaaccgaagggttccaatcaattccatatgtggctgcactcttcagtgcaatgctttggatcttttatgcctatgtgaagaccggagaaacgcttcttatcaccatcaatgcattcggttgcgtgattgagacaatttaccttgccgtatttatcacttactgcccgaagaaagctaggatgtcgacattgaggatgattgttttgttaaattttgggggattttgcaca

SEQ ID NO: 210315 - DNA, 460 bp, Glycine max
ctcgagccgtcgttgactttttcggttagggtgagaaggcgcttaccgggttttcttcaatcggtgaaccttaagtacgtgaaattgggttaccattatctgataaaccatggcatatacttgttcaccataccggttcttctcgtggtgtttagtgctgaggttggaagcctcagcaaagaggacctatggaagaagctttgggaagacgcgcgttacgaccttgctacggttcttgcttcctttggggtcttcgttttcaccttgtctgtctacttcatgtcgaggccacgtcccatttacctcattgattttgcatgttataaacccgatgatgaactcaaggtgtcaagggagcagttgatggaggtagcaagaaaatcaggcaagttcgacgaggcgagtctggagttccagaagaagatgctgatgtccttcggaatcggcgacgagacctaca

SEQ ID NO: 210316 - DNA, 566 bp, Glycine max
tccttttttttttttttttttttttaaatttggatgtatccatatgcctaatgaggaattgaaagtgtagaatttcaagccaggaataattaaatgagaaagaaacagaaaacagatgtaacatttttgaagaccaaattagtactacccttattgatcctaaccataccctcactgataataagattcataacactagtgccgtcaaattctgcttcagttgttgagaggtgcaggatatctgttgatgcaatcaagccaagggttcctagaaggcttggtgactcggcgcatggcgcgccaaaccacactgttgcacttgaagccagagccaaatgcgagttgccaaacacggtctcctcttctaacactctcttttgcttccatgtaagccaactcataccaaatgctgctgctagaggtgttgccaaagcgatgcagcgtcattctagacgcttcgatgttcttgtcactcagttccaagttcctttgaagctcatcaagaatggtcttgcttgcagcatgcacacaaaagtgctcaaaagctagtttgtagtcaggaatgt

SEQ ID NO: 210317 - DNA, 298 bp, Glycine max
cagaaaccaattacaaattacactctttgccttttacgttcaacttaaccttttctgctcataatcgtaacaacttgctagaagaagataaagaaagagaaaaagtgtgtgtgtgtgagagagagcaatggctggctcgtgggcacgccgttctctgattgatctggctatcatttccttcggatgtttatttgcaatttccattgctaaggaggaagccacaaaattggggacggtcatagggatcgatcttggaacgacctatttatgcgttggtgtttacaagaacgggcatgtt

SEQ ID NO: 210318 - DNA, 299 bp, Glycine max
acattcagctttagaagccccgacgaaaacctaagcgaaaaagggaagcacaagtaaccccacaaagaatcttatcatcgccaccaaaaaagcaagcgcaggggacccctaaattcccagctatcataaaaatttaacagactccgactaatctagagctcatcgcgagaatcgccctcgtcttcttcgcctgatgcaccaccaccgcctggggctcctccagatctctgatacacagcactaatgatggggttgcaaacggcttcaaccaccttcagctcctcttcataatcgtcttt

SEQ ID NO: 210319 - DNA, 443 bp, Glycine max
agggtcgtgaagaaccccaaaagattctttcgtttcactgcaaatctctccaagaggggcgaagctgctgctatgcgtcgtaccaatcaggagaagatcagggttgcagttttggtttccaaagcagcacttcaatttatcctaggtgtgcaactaagcgattacaaagtgccagaggaagttgaagatgcaggttttgaaatctgcggcgatgaattggggtctattgttgaaggccatgatgtaaagaagttcagacatcatggtggggttaatggcattgctgagaagctttctacatcaaccactgaggggcttaacaatgataccgagttactgaataggagacagcagatatatggaatcaacaaattcactgaaagtgcagctacaagtttctgggtttttgtttgggaagcctttcaagacatgactctgatgat

SEQ ID NO: 210320 - DNA, 137 bp, Glycine max
gacaaatttgcccccgatgcaaacagtaaggttttgccagcatctgccatccctgagggctggatgggattggatattggtccagattctgttaaatcattcagtgaagcattggatactacccaaaccatcatatg

SEQ ID NO: 210321 - DNA, 440 bp, Glycine max
  unsure (1)..(440): unsure at all n locations
caaaaacacagagattagaattcattttagaagtttatcaaggcaaagaagaataatggaagtatgaaaatggcaagccaaaaatgtatggaaatggaaggagaaatcaagagcttaatgaaggtatggatttcaatcctagcctccctatgttactgttatttcatatcatcaagggtacccaaaggcttgttgaggtttttgaccctctccccagtgttgtacctattcaccatcctacctcttcaactcaccactgtcctcccaacaggtgtcactgccttcttcatcacttggctcaccaacttcaaactcctcctcttcactttntgattgggccctctcacaccaaactcaaactcccttcttcacttcctctcttttgcatgcctcccaattagactaacccccttaaattcaaatcaaaatcaaaatcaaaa

SEQ ID NO: 210322 - DNA, 364 bp, Glycine max
attttgaccattatggttgtaatattagtctttatctttattatccagggtcctggtggtgttactgtgaagaagaccggtgcggccttgatcattggcatttatgatgaaccaatgactccaggtcaatgcaacatggtagttgaaaggcttggcgattatctcattgatcagggtctctaatctttgctttatgtcttgttatcgtgcatatttcattggcttctgtacaagtttttgcatcgacctggactggaatgctttgattgcagtgtaataatcttgttgtgagtatgaaaagtcacgggatctgcgtgtagtgagaaagtgtttgatgcttgagaaatgatgactataatctcta

SEQ ID NO: 210323 - DNA, 360 bp, Glycine max
aaaaaaaaccccccctttcaaagaaaagaataacaaattagagccgaccatcgaactccagatcgccccgaaaaactacgatccacagaaggacaagcgtctcagtggctctgacaagctgccccacatccctcgccccaagatcccaatttgcatgcttggcgaagctcagcatgtcccaagaggcaagagaagataggactggactggatggaaaaggaagccctgaagaagctaaacaaaaatcaaaaaccggagaaaaaactaactttaaagccccatgccatggtaacaactgaaacagtttttaaacacaatggtggaattcccgggactgatgggaacaaagaaaaagcccat

SEQ ID NO: 210324 - DNA, 456 bp, Glycine max
  unsure (1)..(456): unsure at all n locations
caaaatacttaatagcatggcgatttatttatttaaaacttctaccccaagcacacgcgatggagccgtagacagtcaagtaaaatccaatccacgaaatcatttgatctatggacagcatcgttgtggtaaaggccgtaatgccagaggaatcattaccgcagggcatagagggggaggtcataagcgtctataccgtaaaattgattttcgacggaatgaaaaaaacatatatggtagaatcgtaaccatagaatatgaccctaatcgaaatgcatacatttgtctcatacactatggggatggtgagaaaaaaatatattttacaccccagaggggctataattggagataccattgnttctggtacaagaagttcctataaaaatgggaaatgccctacctttgaccgatatgcccttaagcacggcaatacataacatagaaatcacactc

SEQ ID NO: 210325 - DNA, 436 bp, Glycine max
atcatgataaaaattcacagcggatttggatcaattttaaatgcttttgttctatttctcattggaatcaatatagtgattaaccatctaaattacaatttcaacaattcttccttcatgtaatgaaaatttcatttcaaatgcagcgtgaggagctcgggattatcaattaattgcttccactcgttgcaaaatcttgcaacggttgctccgtccaagactctgtgatctgcaccaatattaacattcacgagggatgcaggatacacatttccattatcagcaaaccgtggaactttctgaattctaccaacggcaataatggagacttcaggcagattgataaggggggaaccaaactttccacctattgctccaatgttgcttaaagtgatagtaccaccacacatatcctcagaagttaacttgctatttg

SEQ ID NO: 210326 - DNA, 353 bp, Glycine max
cactcataacacaaagcacaaagcatagctcattcttgagttaaaaaatggcagcagcttcttccatggctctctcatccccatccttggctggcaaggccgtgaagctgggcccatcagccccagaagtgggaagggtgagcatgaggaagaccgtcaccaagcaggtctcctcaggaagcccatggtacgggccagaccgagtcaagtacttgggcccattctctggcgagcccccgtcctacctaaccggtgagttcccaggcgactacggctgggacactgctgggctttccgcagacccagaaaccttcgccaagaaccgtgaactcgaagtgatccactccaagtgg

SEQ ID NO: 210327 - DNA, 373 bp, Glycine max
aaagcatgtaacaccaagcaggatacggacgcacaaggggattcacattatcagaagtactccaccaaacacaaatctaaaaactctcaaaagtcatttcgttctttgacgcacacttaccggggacgaagatggtggcataggcccaggcgttgcagctgacaggggcagcaaggtgatcggcgaggttctccaatggaccctatccggtgacaatggcctgaacaaagacgccaaacatagagaacatggccaatcgaccgttcttgagttccttcaccttaagctaaacaaaagcctgtgggtcatcagcaaggcccaacgggtcgaaactgccacctgggaagagaggggcagtgacctcaccgagggg

SEQ ID NO: 210328 - DNA, 489 bp, Glycine max
  unsure (1)..(489): unsure at all n locations
cgacaacgctatcaaaaaccactggtactccaccttgaagcgcaagtgctcttcaacgatgatcgacgacaacacccaaccgctgaaaagatccgtgagtgccggcgcggctattccagtctctactggactctacatgaacccgcccacaccgggtagtccctccggatccgatgtgagcgagttcagcttaccgggnggannnnnannnnnngngnnnnnnnnnnnnnnnnnnnactggcaaggttataccacccgtagaaaccacgttgtccttcaatgacccttcaactttactttctctatcactccccggtgttggagttggtgactcatccgaagtctccaatcggacaactgagccgattcattgtacaccgtcaatgccacatcggtcgaatactatgcctttgctgccaatgatgacgttcggttttagcgacggtgatggcgccgtttaattgtagcgcatagattcggtcggtgatg

SEQ ID NO: 210329 - DNA, 363 bp, Glycine max
ctgatgcatatgatgactttgctgttgaaagatataactatgagcagacagagccagcaacatataacaatgctcctcttattggtattctggcaagactaggtggaggtcatggtggctataaccagcttcttccagttgttgttccagctcctaagcctgctgttaccaagcctcaaccaacccccagtcccaagacaactccttctccagcttcatggtcaggcccaatttccattgaacagaaaaggaccacctcatgggttgccaatggaaaaacttattacagatactcaacagtcgtgactaacaaatctaacaagagtctcaattctctcaatctttcaatatccaagctttatg

SEQ ID NO: 210330 - DNA, 259 bp, Glycine max
  unsure (1)..(259): unsure at all n locations
ctggtgcatggtgcgaccacactgtttaaggtttccagggagcacagaggcaggggcagggctgggaggtcataggctgcaatattgtacagatctaccagttactgggatgagtacgtttggggaggggccccggnggttcttttgttacggaagaacattgtaccttaaatttgctacggcttctgagctggtcaagcatgctggagccttctggggaggccctgattattgagaactcagacgggataacaagacg

SEQ ID NO: 210331 - DNA, 312 bp, Glycine max
  unsure (1)..(312): unsure at all n locations
acatacatcatcaactgatatataattctagatttcttgcagtctattattagagagaagaattgagttggaagaacccagaaaaagaaacaaaaaataaataaaacgatgtggtggccattcancacaaatggaacttttgggntttcatcatattctactgccgaggaagttactcatggaatcgatggaagtggtctcactgctattgttacaggagcatctagtggtcttggtgctgagactgctcgtgtccttgctttgggtggtgtccatgtgattatgggggtgatagatatgattggtgcaaaa

SEQ ID NO: 210332 - DNA, 610 bp, Glycine max
tcctttttttttttttttctcttaaaaattttaacttcatatagattaacttaataacaggcacaatatgatcattggcatttttattctctaatacagtattccatttacattgacaattatcattatgcattttacttagtcaaatttatgctaaaatcccacaacttcttggccaaattcatgtcccttccatgtgagtatacttctgcaagattattatcttcaaaatacttgccgctgattccactcacttgtgggtgcaaggctacataacatgttgttgatgctccttgctgcacattttttgccatatatcccaatatcttctcgagtccaaatagccatgctattttgtgtaaaccatttaataaaccactatgaatgtgaatattggtggaaacagtggctcctggatgaacagaattagcagtaatatctattccatcttccttgagacgtcttgcgagttcattggcatgtaaaatgttagcaagctttgattggccatatgcacaccaattgttgtaacttgattggtcgttaattttgtcaaaaatgattccttcacgatacgtgaatcgataaccattgaggagacattaataat

SEQ ID NO: 210333 - DNA, 576 bp, Glycine max
  unsure (1)..(576): unsure at all n locations
gttcaaagatccatgtgttgctgctttattttgatgtcacaaaagaccggaactgggctcgaggcattagaagtcccaaattccccggcgttccctatactttcttctcacagaggcaaggatgtaaggtatctctgtaccaagatgctcatgtacctgataattttgtacctaacatacctcttgctggaggcaagaattatgaggctcataggtgttgggaggatatatttgatgcaatcactaatgctagacacttcatatacattactggttggtctgtttatactgaaatttccttggtgagggattctaggaggccaaagcctgggggagaccaaacacttggtgagcttctcaagaaaaggcaaatgatggggttaaggtattgatgcttggttgggatgatagacatcagttgggttgttgaaaaaagatggactaatggctactcacgatgaagaaactgcacagttctttgagggcctgaggtgcatngtgttttatgcccccgcaatcctgatgatggtggtagcattgctcaggatttacaaatntctaccatgttactcatca

SEQ ID NO: 210334 - DNA, 598 bp, Glycine max
tccttttttttttttttttttttttggggtagaatttgaaacattgattagaaaccagtgggagccggacccaccaacaacatcagataactaaaatctgtcactgaaatcttcagaaaaatagcagaaaaaacatcttcacaagacatcacagactatattaagattattactaagtagtaatgaaaacacagattaggatgtaagcaataacaagtttgtaacaaagtacaaaatcaaattaagtagtgagaataggggggaggtagtcagctttgccaccaagaatgcgagccttggtgtcgggaaagaattcaaatcctggcagctcggtgacatcttcttcactggcaaccccgatggggtagcggagaaggtgaccgggaaggtcatgctcaagtgactcggtagaatacagatcccaacatttgtcagcaacttggttcaccttgttaatgcattcatcactttctggctggaggaaagagtcatgaagcatgccaaggtgctcataccacaatgacatgcggaaaccgtgaatttgaccacgtgctggctgcctggtagccaaatgatagggctgataagcacccatggg

SEQ ID NO: 210335 - DNA, 469 bp, Glycine max
  unsure (1)..(469): unsure at all n locations
gggtgcggtgctgggaatatggcgtttgcgatttagggttccgttagtgttgaaactgaacaatattgatgttaccatggtctacccggagccttggtgtatgccacgactttttacggctggtatagctgaattctatgagggatattacgcaaataagggtgtaaatatcattaaaggaactgttgctgttggattcacttctaattctgatggagaggtaaaagaagtcaaactaaaggatggcagggtcctggaagctgatattgttgttgttggtgttggaggaaggcctcaaacagtcttagtcaaaggcangtntgaagaggagaagggtggaatcaagaccgatgctttcttcaaaactaatctctccgatgtatatgctggtgggggatggtgctactttccctttgaaatatacgggtgaatgagaagaagtgacatgttgatcattctcgcaaatcgc

SEQ ID NO: 210336 - DNA, 386 bp, Glycine max
  unsure (1)..(386): unsure at all n locations
aaggacttcaacagggccacagcaattgcatcctgagttctacagatgggtttggttgtaggattggcacttgcattcattcttggaacaggattgcactttggtgctaaaatatttacacaagatgctaatgtcctccacctcattcaaattgggatcccgtttattgcagtcactcaacccctgaattctttagcatttgtatttgatggtgtcaactttggggcatctgattttgcatattcagccttctccatggttgtggtggcaattcttagcatcatttctctgcttattttgtcatccgctggtggtttcattggaatttgggttgctttgaccatctnatatgggtcttaaggcatttgctggcttcttgagaattg

SEQ ID NO: 210337 - DNA, 343 bp, Glycine max
agatcatcgatacgctggtgggcctttccctgttggacgaggtgatgaagatcacgccggttcagaagcagacccgggccgggcagagaacccgtttcaaggccttcgtggtcgtcggcgacaacaacggccacgtgggtctaggcgtgaagtgcagcaaggaagtggccaccgcaattcgtggcgcgattattctcgcgaagctttcggttattcccgtgaggaggggttactgggggaacaagattgggaagccccacaccgttccgtgcaaggttaccgggaagtgtgggtccgttaccgttaggatggttcccgcgcctaagggttccggtattgtggc

SEQ ID NO: 210338 - DNA, 347 bp, Glycine max
gcagcacagattagggaaaacggctttgccgccgtagaagaaaacaaccatggtgcgcgtctccttttacaggaactatgggaagacattcaagaagccgcgtcgtccgtacgagaaggagcgtctcgacgcggagttgaagctggttggtgagtacgggcttcggtgcaagagagagctgtggagggtgcagtacgcgctcagccgcatacgcaacaacgcgcggaaccttctcaccctcgacgagaagaacccgcgccggatcttcgagggagaggcgctgctccgaaggatgttccgttacggtctcctcgatgagacacagaacaagcttgattacgttctcg

SEQ ID NO: 210339 - DNA, 305 bp, Glycine max
tcctttttttttttttttaattaaaagttttaatactttaaaatatctaagtggacaaagggataatgtcactcaatattatctcaaacaaggaacggaaggatgaaaatgtataacaataaaaaaacaataaactaggtacgcaaagtaaaaggtggcataaggtctaatagcactagaaaaagacatgattaaaagtttaatcctcggcttcctcatctccatctccacctgcggccttcttagcagcagccctttgggttcttctcttcactcttccagggcgaccaccaccaaggggactt

SEQ ID NO: 210340 - DNA, 372 bp, Glycine max
ttcagattcagttcctctttgcttttttctccattcaaaacaacagaaccaaactcggaaccaaactcagaaccaaactcgccaaaactagggttttgcattgatggcactgtgcaaccgcgtcagatcgggaatctctctcttcaccaaatccacgttccttacttgccagcgatccagtctccaacgatccctcgttgcccctttcatttccctcgcctccagaaattacgccaacgtgccggggcaaaaggaaaccaaagttaaggtccctctggctttgtttggaggatcaggaaactatgcctctgctttgtatattgcatctgtgaaagccaatgcaatggaaaaggttgagactgagcttctgca

SEQ ID NO: 210341 - DNA, 538 bp, Glycine max
tccttttttttttttttttggaaagaggtttctattatttgcaaaatgatggcattccatgccataaaaatctacatccacacaatttataatgaacaagaatgtaatacttctttctttaaaccatgataacacagattgtcaggagagattatagtcttctagatgttggcaatggacacgggctctcggaggatcctctccatctgttgtgccctggtcttaattgacatgtcaaagaccttctggctaaattcaagcacaagcccaccaagtatgcttggatcaatcttctgttcaagatgaaccttcgttccagaacctattatttcctgaagagtctccttcaatgccttttcctcttcagggggaagaggaacaacagtggtcacagtcgcttgcacttctcccttatatgccattgacaactgtgcaaatctctttgcaatggtgtctatgtttttaagccttccattctcagcaacaataacaaggaagttctttgtaacatccgaaaacttggctttcccacaaatat

SEQ ID NO: 210342 - DNA, 430 bp, Glycine max
ttcagatgcatcacctttttgcttttttctccaaacaaaacaacagaaccgaactcggaaccaaactcagaaccaaactcgccaaaactagggttttgcattgatggcactgtgcaaccgggtcagatcgggaatctctctcttaaccaaatccacgttccttacttgccagcgatccagtctccaacgatccctcgatgcccctttcatttccctcgcctgcagaaattacgccaacgtgccggggcaaaaggaaaccaaagttaaggtccctctggctttgtttggaggttcaggaaactatgcctctgctttgtatagtgcatctgtgaaagccaatgcagtggaaaaggttgagactgagcttctgcaatttgttgaggcagtgaagaatagtcccatatagtcacagcatataagggacttgtct

SEQ ID NO: 210343 - DNA, 492 bp, Glycine max
ggtaagaggtttcttttttttgcaaaatgatggcattccatgccataagaatctacatccacacaatttataatgaacaagaatgtaatacttctttctttaaaccatgataacacagattgtcaggagagattatagtcttctagatgttggcaatggacacgggctctcggaggatcctctccatctgttgtgccctggtcttaattgacatgtcaaagaccttctggctaaattcaagcacaagcccaccaagtatgcttggatcaatcttctgttcaagatgaaccttcgctccagaacctattatttcctgaagagtctccttcaatgccttttgctcttcaaggggaagaggaacaacagtggtcacagtcgcttgcacttctaccttatatgccattgacaactgtgcaaatctttttgcaatggggtctatgcttttaagccttccattctcagcaacaattacaagggaagttctttggaaca

SEQ ID NO: 210344 - DNA, 416 bp, Glycine max
atgtctgtcagattctatcgggaaatcatttggaatatatttcccggctactcgtcggcggccgcccttttttttttttttttttttttttttttttttttttttttttttttttagctgaaataggcatattcataaattttacacaaagggttgtcatcatggccccttacaacaacaaagtactacatctaactattctttaaaaatctaacacgatgattcaaaggaccccctgttgtcagcaggagaacttaaattctctcttgcacaacaaccaagccccctaaaccaaaacaattcccacctaaacacaaactttaaaacatggtagacaattaattagcttctatattacataatcagaccttgaaatattggcccccatggaaaaactaggcatcttatccaattta

SEQ ID NO: 210345 - DNA, 526 bp, Glycine max
caaattatgttcctgatttccttaattctcaagagtcgggaggcagcaatagaaggcaaatgtttcctaaaaactcaactgtaaaaccagtaaaaatgtaacaaggaattttcatcctcaatgaccaatagaatttttgaaaaagaaaatcacatttcttcaacaaacgacagtcataactcttcctcgtagtagccatctagttccttggtttattgatacaatagctgaatagcaatggatttccttgtagcaggccatactagattattaagaccaaagttaagaatcagcgccagtgagtgctatcaattcaacctgcaaacttggtttatatctgattcaatgtttagcattgaccatgtttctgatgacatattgtaagatgcctccatggttgaagtaagctagttcaacctctgtatcaaatctcagtgtagatacaaatgatttcccggcatctgtcaccactgtgacatcttggccgggtcgtatttcattcacattgcttggtagatcaatggtg

SEQ ID NO: 210346 - DNA, 397 bp, Glycine max
aaacgagtgacttcatcgcatgtatcatgcgtgcataaagtacaccaagtgtccatcataaggtctagctattaccatacacgatatcaatccatgacaatttcatagcccaacatcaacgacttatacttcagaactcagcctaaaagatctttgtttagctccacattcaacacctaccacctatttacattctacaactgaatgcagctcaactgctatcactcagaattatacgtttgctctcgctggctcctggcatctgctatcttggattctgtacgtccaatctcctcttatcacaggagccttccttctgcctcaagacggatcggaaaagaggagagttaacatgggtctatgcatggccgtatactgatcgctaagatgaaaccct

SEQ ID NO: 210347 - DNA, 303 bp, Glycine max
agtcattgcatgtataccgcgggcataaagggctccgagcggacattattgggagcatcatttcccatgttctgatttaatcactgccaatatgatgatccacataactgggcaaaaaccaaagaatgccactctgacagacacctcgtacctcaacacatgcaatccaggggaggacattacaactgacaagtgcatacagcctacccgagatgaatttcaaatctttgtgactatagctctgccgtctgcaattcagatttttaactcttcggatcagggtggactgggcatataagtgca

SEQ ID NO: 210348 - DNA, 540 bp, Glycine max
cccgaaatttttagttctgctgaaacttttgatgaatggtctcaaatctctggtgaaaatgaccatcaggaggttgctcaacaattacacaaggtcctccgcccatttctccttcgaaggttgaagtcagatgttgagaaagggttgccaccgaaaaaggaaactattcttaaggtaggcatgtcccaaatgcataaacagtattatagagcactacttcagaaggatcttgaggttgtaaatgctggtggtgaacggaagcgcctcctgaacatagctatgcaactactcatatgttgtaatcatccatatcttttccaaggtgctgaacctggtcctcccttcactacaggagatcatctaattgaaaatgctggtacaatggctcttttggataagttacttcctaaattgaaagagcgcgattctagggtccttatattttcacagatgactaggctactagacatactcgaagattatttagtgtttcgtggatatcactattgtcgcatcgatggaaatactggttgcgatgat

SEQ ID NO: 210349 - DNA, 548 bp, Glycine max
  unsure (1)..(548): unsure at all n locations
aaaaaccttctcttttctcaattgggtttccatctttgatttgatttcattgccatggctccaaaggatcccaagcaagttgctgatgctgcttcttctggtggtgggggtggcttttttgcttctattgcttccagcttgtccaatttcggtagtgccatgtccaaatccgttaatggtttggtgggctacgaggggctggaggttgttaatccagatggaggaactgaagatgctgaagaggaagcaagaaagggacgatggaaacaagaggagcgagatagttactggaaaatgatgcaaaagtatgttggctctgatatcacatcaatggtgacacttccagttatcatttttgaaccaatgacaatgcttcagaaaatggctgagcttatggagtactcttacctgttagatatggcggacaagactgaggatccatacatgagactagtatatgcttcatcattctntatatctgtctactatgcctatcaacgaacgtggaagccattcaatccaattcttggtgagtactatgaaatggt

SEQ ID NO: 210350 - DNA, 506 bp, Glycine max
tttggactgaaagaagagcaagtacctctaattatcattcaacataatgatgggaaaaagttttttaaacccaatttggaagctgatcacattccaacctggttgaaggcatacaaggatggtcatgttgcaccatttgttaagtctgaacccattcccgagactaacgatgaacctgttaaagtggtagttggggccagtcttgaggacattgttttcaaatctgggaagaatgttctgctggagttttatgctccctggtgtggtcattgcatacagttggctccaatattggatgaagttgctatctaatatcaaaatgaacctgattgtggtattggcaaaactggatggcacttgcaaacatattccaaggggaacctttggtggtccaaggtattcctacgtggtccttaagtcagccaggggaaaggtatccacattacgacggcggtaggaccatggaagacatcttagaattcatcgaaaagaaccgggataaacct

SEQ ID NO: 210351 - DNA, 566 bp, Glycine max
cgccacacatttagtatttaatttcgtcaagatttccacgttctttgcaatagggaaagaaaaattatctccatacacattgaataatccatcataattccaaatgtccacaaataataataaataacagaccctcgaaattagctgaatttccatgatgtttatgccttgctgtcgatattcatcggttgggcatccttcgacgctggtttattactgtcaagagaatctagcttgtgcagtttgttgaacatatttccataaaattttgcctcttttttgttgtactccttcatcttttccttcaaagtcttgtactcaagcttgacatccctgttgttagggtcaatctcaagcgctttcttaatatcaaattcggccaagtctaaatcagccaactggatatatgcctgggcccttctatagagagccttcacattagtactctcaaggtccagtacctttgtgcacaatttctctgcttgtttataatcttttaatttcaacttgcatgctgcattgtctagattacaggcaaccctcaaggctttggagctcttcttctc

SEQ ID NO: 210352 - DNA, 466 bp, Glycine max
agaattgccaaatgggcttattttatcaacatataagcttacaaatttccacattttcaggaaacaaatgaaggaaattcatcccagttttgacttctgattgagtgaatccacaagacacgtatcgaagttcccaaatttacacaaattgcttggtcagatgacccaaaaccaagctataacagacccagcagctagaccaaaaactaagaataatacactcacaatccctgcagtctctgcatgctgcaacattacaattttaggaatcagaatcatcaatgcactggttaggtagccattagtaagccctaacaggcaagtcagtattgtcacgggaatctcagtccggaagaatttgggaccatgcaagcaacctaagaagagagggaaaaacaacaatcttgctatgcaaccacctatggcaacttttgcattctgtaggaagtaaactgcagtcagacac

SEQ ID NO: 210353 - DNA, 496 bp, Glycine max
gtaaaaagcaagtaacattaagttggattgggatacacaagataattcacattatctgaagtacattgcaataacatatacttcaccaaacacaaatctaaaaactctcaaaagtccacaagtcatccttttctttcatgctcacttgccggggacgaagttggtggcgtaggcccaggcattgttgttgactgggtccgcaaggtgatcagcaaggttctccaatggacccttaccggtgacaatggcctgaacaaagaacccaaacatagagaacatggccaatctcccgttcttgagttccttcaccttaagctcagcaaaagcctctgggtcatcagcaaggcccaatgggtcaaagctgccaccagggtagattgggtcagtgacctcaccgaggggcccaccagcaatacgataaccctcaacagcacccattaggataacttgggtggcccagatggcgaggatgctctgggcgtggacaaagcttggg

SEQ ID NO: 210354 - DNA, 407 bp, Glycine max
aaacgagtgacttcattgcatgtgtcatgcgtgcatcaagtccaacttgtgtccattataagttctcgttataaccatatccaaaatcaaaccattacaataacaaagaccaacatcgccggcatatacttcagaacacagccaaaaagatcttagtttagcaccaaatacaatacctaccacctattttcattctacaactgaatgcagctcagctgttatcactcagtcattataggtttgttctcgctggctttgggtttctgctcttttggcttctgttcgtccgatttcctcttatcagaggagcctcccttctggctgaggaaggatcggaaaagaggagagtcaacgtcgtaaatcattgtcgtttactgatggcaaagatgaaaccctagttctagttc

SEQ ID NO: 210355 - DNA, 496 bp, Glycine max
gttcaggagaaatgcatcatccttgctctctttgtaatccattatcttcttaattaatttcatcttttatcagataataataataatcaaaataataacaaaaaatatctaaattgtagccagatgacaacagatagttggccacaacattttacacaatacttaacatacagtgatttacaactttatttataaagagtgtaattactaattacaagatactaaaaatatttaaacaaaatccaggaagaagagattatggcatatatacggaagaagccaaatctgtcattcacagctcttgatcatttctaaacagctagacaagtccatccataatcaatttgtatttgacagaaaatgcaccataacaggtttccatgcataatcgtgtgatctcatgatttgtatcacatggaaacacttgagatcattaaagcaaaaactgtgaggaaactgatacatacaaatatgttataaagataatttcaggaaa

SEQ ID NO: 210356 - DNA, 412 bp, Glycine max
gaagaagaaagatccgtaaattaacattctctccctcccttcgctataatagcaagcttttcaagcatatttctggggtttggtcccttttccttgtttggggttttcttgggaaaaaagaagtaattaggtataataatagtataactaaagcaaaaaaaaagacagtaatatgggaaggggtagggttcagctgaagaggatagagaacaagatcaatcggcaggtaactttctccaaaaggagagctgggttactcaagaaagcacacgagatctctgtgctctgtgacgctgaggtcgctttgattgtcttctcccacaaaggaaagctctttgaatatgccaccgattcttgcatggagaagatactggaacgctatgaaaggtatgcctatgcagagagacaactt

SEQ ID NO: 210357 - DNA, 534 bp, Glycine max
aaattaattatatattgtatatactgttattagcaattagcaaacaaggacaaactcaacgcttaattagttcagatacgagacctgtctttcagcaacttaactatatatagcaaagctttcacttaagaaagcctagccttgtgaccaaattataaacttacaacacacaataaacattaacgtctgcagagtagggaaaaccacaaaacatagaggcatatataagccctcaaatatgttgtcaaatgccataccaaagctatataatatcatccacctcaaagaaagtattcaaaagcatccaaggtgacaggaatataatggttccagagtcaggtcaagttcattcctccctacttctgatgcttcctcacggtaattgccatataacgaagatgtaacataattataatatcttgttattgaaaggtcaccccatgttcaaaagtggctgcggtagcaagaaagatgcattaactccgtggtttggatgctcccattgtgcttgctgcgctgcaaccttttctttct

SEQ ID NO: 210358 - DNA, 397 bp, Glycine max
aaggagaaactgacatgataggatataattatataaaattgtacataggaagtggaaatgtgaatgtgtggcagggtgataaaaatgaaaagagaagcaacaataataaagtgaatgagaaatttaaatatcacggactaaaatatctattcactcgaaatttaaatgtcacggtctcttttgcactcaggaggagagatatgaggatagcgtttagtgtcagtgcagtagttgtagatggtgtatttctggcgcacccatctgagcctacgccactgggcggcgtcaaggtcacggaactcaggctggtcccaccacctcttgccctgcgtgtcgcagaacttggcgttcaccgaagcctcgcacccgtcgatgtgaaaccccttgtacgctgcta

SEQ ID NO: 210359 - DNA, 399 bp, Glycine max
cattgttaatttacattgaggatatataaaagctagttttaatatgcagtagtcacaatttccatcttctgttacaaccaatcacagcacaaagtctaatctcaattaacagaagatctttattctgaagtaaatgtgacagccatcaccaaatgtttcagtttctcattctgagctcatgagacaggcaaaggatgatatggaaaaggaaccaagaatagattatcttttcttatagctgtgactccaaaatcctcactcatgtccagttctccacttctcattccacttggaagcttccaatcaaagtgatacaacaacattgcaagggctagttccgcagctctcaaagcaaatgtgcttcctgcgcatatccttcttccagcaccaaagggattg

SEQ ID NO: 210360 - DNA, 294 bp, Glycine max
gtacaagaactagggcttgatccttttcatcacttaacgacaatgaacgccgacgttaactaccgggacctccgagccttgctgagacagaagggaggctaccatggcaacaggataacagacgagcaacaaccaacagagaagacacccagtgcaaaggagatcacacccataacgaccgagtgatagcagctgtgccgaatgaagacgcagaatgaaaataagtggtcggtaccgtgtctggtgctaaagtaaaagcttaacgggtgcaagatgaagcatctgcagctgatg

SEQ ID NO: 210361 - DNA, 229 bp, Glycine max
ttttttttttttttttttttttttttttttttttttttttttttttttttttggttttttttttttttgaaaaggagggaaaggttaaattatccattttataattataagggttttacaaaattttttaataggtaatttaaccctggggtaataaaatcataaaatggccttgaaatacatagggttggataaattgcaaaattggttgacagctgagaggaaccgc

SEQ ID NO: 210362 - DNA, 494 bp, Glycine max
aagccaaacctttcaaaactttattacaaacttctttattgtacatccatgtccttctcttcacggaggacagaatcataccataactttatttcaacttaaactagtattaggaattaattgaagtaaaactgtataaaaccgcaatatcaaggtgttaatattttacttattatgcaccttaatataccccacatgtgaggaattggcccctctagtaagggtttgaagatcataagctacccaacaccttgaattctccttgtggcagaaataacccacacacttgcaatccttggtgcatttgtttccacaagtactctcactcactctatcccctgtagtgtatttgctcatgtaatgctcaacttcttcaattctgtagaagtggaaatcactagcctcgcatgatgtcacagccttggcagtgcaattggtgctccaaccatgtagtccattttccaatggacaagccacacattggttatcttcac

SEQ ID NO: 210363 - DNA, 297 bp, Glycine max
gtacaagaactagggtttgatctttgtcatcacttaacgacaatgatcgacgacgttaactattctgacctccgatccttgctgagacagacgggaggctactatgatgacaggataactgacgtgcaataaccaaccgagaagacacccagtgcaagggagatcacagccataacgaccgagtgatagcaggtgctctgaatgcagtcgctgaatgaaaatgggtggttggtatcgcatctgctgctaaagcaaaagcttagcgggtgcgagatgatgcatctgcacgtgatgttc

SEQ ID NO: 210364 - DNA, 492 bp, Glycine max
ctctgaccctctccttgtggattggatcaaataccctgggaaccccgttttggtgccaccaccaggcattggggccaaggactttcgtgacccaacaacagcgtggctcacctcagaagggaagtggcgaatcaccataggttccaagctcaacaaaaccggcattgcgttggtttatgacactgaggacttcaagaactatgagctcaaggaggggctgcttcgtgctgtcgctggcaccggcatgtgggagtgtgtggacttcttccctgtgtccaagggaatggaaatggattggatacttctattaaatgggcctaaggggaagcttgtaatgaaggtaagcctgatgatgatagacatgattactattcaattgggacttatgatgagaagaatgttctgttcacaccagatgatgctaagaatgatgttggcgttggattgaagtatgactatgggatattctatgcatccaagacgttttatgat

SEQ ID NO: 210365 - DNA, 437 bp, Glycine max
atgtaaatatttttagcatagaattggataacattaacatcatatttctttgaacagattctcttgtaagcatcatttcacatgatatgataaaattacaacaaaaattctgataaacataactgggcaaaacatgaaggaatgcgctttgagcaagaaccataaccttatgtcggctattcaggggaggacattacaactgataagtacaaattgccaacccaagatgtattccaatcctttgtgactatagctcttctatcttcaattcaaatttttaactcttctgatcagggtggaatgggcgtataaatgcagaattcatttgccaaacttttagcgaggctgtcacagtggcctcggtagcattgttgaacaagaacaacctagcaggtccatagattgcctttgttggataaacccgagatgtcacaacc

SEQ ID NO: 210366 - DNA, 395 bp, Glycine max
ggggtgaacgaattttttgcaaaaaattttaagtttttcaaacagccgcgttcggacttcaaactccaaaagggctacaaatttaagagccttccagaaaaaatggctttcaaccttagataccaaataagtaaccttggattcttccaattatgggatgattaataagaaacaaatgcttcaaaaccaagcctaaatggctaatttcttgacttcctaatactcgggctcgggagcctgtttaccaccctgagaacctccggctgaggaaccgccacttgaaccacctgtaatgggccctccaatcttggagacaggtttgtttgccgcattaagctttgccttaatttcggcagccttggctcccggcattggtgttctcaaatcccataccg

SEQ ID NO: 210367 - DNA, 480 bp, Glycine max
actccaattactgattatcattgcactaaaggaactataaacaaccagatatattggtcaaaaacaagaaccacggtaacacgaaaccataaagaaactcgaactcaaaccacaacaactaaaaatacggggcataatcataaaccctaattgacgacatcaagccttagtttctccagccttcatcaccaccattaccaccacgagagtaaccacggtctgtgccaccggcataaccaccaccaccaccagcaccatagccaccggcataaccaccgtcacggctacggtatccaccaccgacaccgtcaccgtcactacgaccaccatattcaccgccaccacgattggatcctgctgctccttcggcgacgtcgacgacgacaccgcgggactgagcttcattgacagtgatattacggccgtccaagttctgtccattcatcgctccgatcgcatctttcatggactgctccgagg

SEQ ID NO: 210368 - DNA, 295 bp, Glycine max
gtacaagaaatagggtttgatccttgtcatcacttaacgacaatgaacgacgacgttaactatcctgatttccgatccttgctgagacagaagggaggctactatgatgacaggataacggacgaacaatagccaatcgagatgacacccagtgcaagggcgaacaaagccataacgaccgagtgatagcagctgcgctgaattaagttgctgaatgaaaatgggtggtaggtatcgtacctgctgctaaagtaagagcttaacaggtgcaagctgaagcatctgcatgtgatgt

SEQ ID NO: 210369 - DNA, 254 bp, Glycine max
gtacaataactaggtttggagctttgccatcacttggcgacaatgggcgcctacgttgactatgcggacttacgagccttgctgagccagtcgggaggctcctatggcgacaggatatcgtacgtgcaataatccagatgggatacgaccagttcacaggcgatcacaaccttaactaccgagtgattgcaggtgatgcgaactggagtgcagaatgaaaatgggtggtaggcatcgcacttgctgctaaagca

SEQ ID NO: 210370 - DNA, 505 bp, Glycine max
ctcaatcttgctcatgggaaagttctgccctagcttatatcctgtcgggccttctctggaacttgtgcactccgatcaatgatcttgcttgtccatattgcccttacccttgtgccaagcctccaaaaatagcctccgtagtgaaaccaccggttcacaaaccaccaaaaccatgtgcaccacccaagtcatcttcaaaacacaccccatgtacaccatacctatgttccaaaacctcctcactaccctaaaccaccatttcatacacacacaccccatgtgccaaaacctgatgcaaagcctacagtgcattcccatccacctcatgtcccaaaaccaccaattgagccagttacaccaccatatggtccaaaaccaccaattgagaaccctccctatgtcccaaaacacgctgctgagccagttacaccaccttatatccctaaaccaccagtagtgacaccaccatatgtgcctaaaccaccagtagtgccagttacaccac

SEQ ID NO: 210371 - DNA, 601 bp, Glycine max
caataccaactttgtcccttaacaagagttattattaagacattttagagtggggacttaagtaattttatccaactaaactacatcaaaactaggaaatggaaagattccttcatgaatatagcagacgcgataaaagttctatagtgcatttaagagacaaaattcaacggataaaatctcaaaagacaaattaaattacaaaccaaaaacattgaataaaaactaccaagcactcaaagtctattcatatcctaaagatttaagcagcagttgcttgttgggcggcaatccttttcctagcttcctcaatgattgatagcttaatacctttacccttgggaagagatatccacggttttgttcccttgccaatggtgaacacattgcccattcgagttgcaaattcatgcccagtagcatcctgaacatggatagtctcaaagcttcccttatgcttctctctgttcttgatcactccaacacgacccctattccttccacccgtcaccatgactacattcccaacatcaaatttgatgaaatcaacaatcttgttcttctccaaatccagcttaatggtgtcattagccctgatgag

SEQ ID NO: 210372 - DNA, 388 bp, Glycine max
gtactagaactagggtttgagccttgtcatcacttgacgacaatgatcgacgacgttgactatcctgacttccgagccttgctgagccaggagggaggctcctatgatgagaggatatcggacgagcagtagccaaccgagcagaaacccagtgcaagggagaacaaacccataacgaccgagtgatagcaggtgagctgaattccagcgctgaatgaaaatgggtggtaggtatcgtgtctggtgctaaagtaaaagcttaacgggtgcgagctgaagcatctgcacgtcatgttgggcttcgatattggaatggtgcgaatttggatatcgatataacgagcactgataatggagacatgatgagacttgttgcacgcattacaca

SEQ ID NO: 210373 - DNA, 567 bp, Glycine max
gagcaatcatttctgcctgggccatttgctgtggagatgtcttcggcagtttacaaggggtgggttttcactgatcaagcccttcctgcggatcttatcaagagaggaatggcagtggaggatccatcctctccctatggccttcgccttgtgatagatgactacccttatgctgttgatggactagagatatggagtgctatccagacatgggttaaggactacgtctccttgtactatgccacggatgatgcagttaagaaagactcagaactccaagcttggtggaaggaagctgttgagaagggtcacggtgacttgaaagacaagccatggtggcctaagttgaacactcttcaagatctgattcacatttgctgcattattatatggactgcttcagcactccatgcagctgtgaatttcggacaatacccttatggcggtttcatcctaaatcgtccaactctaaccagaagattgctcccagagccaggaaccaaagaatatggtgaacttaccagtaatcatcaaaaggcttatttgagaacaattacaggaaagact

SEQ ID NO: 210374 - DNA, 546 bp, Glycine max
gacatagagaaatttgatttgacattcatagatcagaatatcagacttacatacgggtgaacatgatacgggtgaacatgataggagcacaatactatacataaaaactgacacaacaccctattagatatgaaaaactagatagcatccaattacaaaacttaagcatacataagaaaattatgcacacataagtttgcacgtttatttgtcaatgagaggtacgttggaaggaaagaaaaccacacaccacacaccacacactctcattagatagagatgctgttgggaattcctctgaaagtaaggccttccccactggtaggaagaagcacagtgtagggcatctgcgccggtccattacggttcctaaggcttgaattcttgttcctccctgagattttgtcctcaatttccttcagcttgtttccaaacttcttaaaggcttgaattgcctttgtgtcatcagtccaatttggattgtccctctgtccaaggtagacctcatcagaagcatgccttgacaatatctctatcactgttagg

SEQ ID NO: 210375 - DNA, 565 bp, Glycine max
gaattccaacactgccccttaacaagagttattcttaagacattctagagcggggacttaagtcattgcatccaactaaactacatcaaaactaggaaacggaaagatcccttcatgaatatagcagacgcgatataagctctatagtgcacctaagagacaaccttcaacggataaaatctgaaaagacaaattaaagtacaaaccataaacactgtacacaaactaccatgcactcaaagtctatccatatgctaaagatttaagccgcagttgcttgttgggcggcaatacttttcctagcttcctcaatgattgctagcttaatacctttacccttgggaagagatatccacggctgagctcccttgccaatggtgaacacattgcccattcgagttgcaaattcatgcccagaagcattctgaacatggatagactcaaagcttcccttatgcatatatatgttcttgatcactccaacacgaccgctattccttgcagccgtcaccatgactacattcccaacatcaaatctgttgaaatcaacaatcttgttgctctc

SEQ ID NO: 210376 - DNA, 387 bp, Glycine max
gaacttcaaagcagtcaaaagggagtcacgaaagccaaaacagcacaaatacagacacttcacacacatccacgattatcagtaaggcacgtatcatatcaccctgtattaatatgccttctttttcttcacacatgctaacagctcaagtatctgtactaccgggccatcgaaacacagacacttcaaacaccaacagtaatgatggaactttgaagacacagctacaagttctactgagactgcccaaacacggaaaatcctgcatttacatcagtgtaccctccatctatcacaagattgtgaccactgacatacttggactcatcacctgccaagtatagagcagctatggccgcatcgttaggcacaagatgagcccctttt

SEQ ID NO: 210377 - DNA, 285 bp, Glycine max
gtactataactagggcttgatccttttcatcacttgacgacaatgatcgacgacgttgactatcctgatttacgatccttgctgagacagacgggaggctcctatgacgacaggataactgacgtgcaaaaaccgactgagcagacacccagtgccagggagatcacagccataacgaccgagtgataacaggtgatctgaattaagtcgttgaatgaaaatgggtggtaggtatcgtgtctgctgctaaagtaaaagctctacgggtgcgcactgaagcatctg

SEQ ID NO: 210378 - DNA, 396 bp, Glycine max
gtacaagaactagggtttgagccttttcatcactagacgacaatgatcgacgacgttgactatcctgacttacgagccttgctgagccagtcgggaggctcctatgatgacaggatatcggacgagcaataaccaagagagcagaagacgagtgcaagagagatcaaagccataacgaccgagtgatagcaggtgatgcgaatgacgtcgccgaatgaaaataggtggttggcaccgtatttggtgctaaagtaaaagcttcacggttgcgcgctgaagcatctgcacgtgatgttggactttgctattgaaatggtgcgaatatggatatcgctgtagcggagactgataacggagacatgatgagacttgatgcccgcatgacacatgcaatga

SEQ ID NO: 210379 - DNA, 573 bp, Glycine max
atcaccaaacttttcatttttttgctgttctaaacagaattccaagacaatggagtaaagatccacaccaagacatcctctcaacaaaaagacttcttattttctttacctatcaaacatgggagtagtaaaaacactagaccatatagatagataagatacggtctgatacaattcattctttagttaaagtcatctgtcttcctcacaggtcctctgggccattaatttccttgtctacaatggcaacaccgtcgggaacttccagctttacaccgggctttgatacaatgctgactttccccttgaggataacaccagctccaaaccatacatcaccagccacttttagactgtcaagctcaacgatactaggaattgacttgaagcggcccaagaagttgctaaccttcttaaattctggtcccagttcaatagaagggttttcaggattttccctagctttgttccgaatgacatatccgtcttccaagtgtagaggtcagactggacaagaagcaaatctgaagttgccttcacaggaaggaatcgtgatcgaggaacattaatccc

SEQ ID NO: 210380 - DNA, 555 bp, Glycine max
aattattaagaagtaataggattcttcctaccattaagtgtactcaaatattgctcaaagtcgaccattcatcattctggccaacagtgaattctccaaaactgagatattaaatgccgaaactgacctgcgatagacagtaaccaatatagaagccgccaacttcgcactgacagtaactaacatagaagaagcctactttgcacgtaaaagtgacttaatgatagtatcactcataccatcagcatgagcaaacatgtgaccagaaccttggagttcatgatagtgaatccatggaagcttttgcgctatgtatcgttgcaatgtaactggaaccatgagatcctgatctccatgccaaagatggacagagccttcattatttggaaatgggtctccaagatcaaggggactatattcccagttaccgaaaccaatatttaagtcgcggtggagggtttcataatcaccttgctgccttacctgtgccacataactctttctattagacatcttatgcacaagttctttgtcttgatgagaaaggttttccgg

SEQ ID NO: 210381 - DNA, 285 bp, Glycine max
gaacaataaatagggctcgatccttttcatcacttgacgacaatgaacgacgacgctgactctcctgccttacgatccttcctgagccagtcgggaggctcctatgacgacaggatatctgacgaacagaaaccgactgagtagatgccgactgctaactcgatcaaagccataatgaccgagtgataacaggtgctctgtactaagtcgttgaacgaaaatgggtggtaggtaccgtgtacgctgctaaagtacaagcttttcggttgagatctgaagcatctg

SEQ ID NO: 210382 - DNA, 282 bp, Glycine max
ggacaatgaaagtgcttggtgcctttttagctctagacgtcgacgcacgacaacgcggtggctcataccatgcgcaccatcctgggcacacctaccggatcctacctctacaagcgaaaacaggcactgaggtccactacattgatgacgactcctgcctatgtcgaaggcttgatgaccaagagatcaacggcattgactacaaaaccgttgctcataaatgcgaggtatatatcgtgaactacgtgcttggagaaccatttaggtcgaactctgaaacat

SEQ ID NO: 210383 - DNA, 493 bp, Glycine max
tttgatcgttaacaatttctcttcttatttgtttaatgtttttggtttcttaggtgaattattcaagaggacccgacaatcccacaaagcagaaagagaggttgttatgttatggcgggcaaaggtgttggttcagtggctaaggcagtagcagaatatcagtatccttggcgtgagaagttggcgaaatataaggatgagtttgctaagggtgtgtggggatactgggagctgggggcatggaagccgctgagcatcggtgctcggcatcgcgctagaattcgcaaggaagtcctccttgctggggaagattggccgtatgatcctgaaaggaaggagatgaagaccaggaggaaaggacacaaatgtgataggatatccgctgagaagcgcgcaaacactgccaagttgatggagaagatgccccagatgttgctggattacaagaagagaaggtggcagaagaagatgaaggaagaagaccagggaaaac

SEQ ID NO: 210384 - DNA, 337 bp, Glycine max
ctgtagtaaagcccttttgcccgatactcacaaggccatactctagaaaggggttattagggatcgaaaaacgtaaccaaagttaataatccatttggcccccaaaacaggtgtaacatgtcatgattaaatactacatttctcaatggcacagcttaatgctaaacctggccaaaacttgaggaggagcaaaatcaaagttttcccttgtctctctacttcatcttcttctgccaccttctgttcttgtaatccagcaacatctggggcatcttctgcatcaacttggcagtgtttgcacgcttctcagcggatatcctatcacatttgtgtcctt

SEQ ID NO: 210385 - DNA, 629 bp, Glycine max
  unsure (1)..(629): unsure at all n locations
ctcgagccgctttgaggtttcttccgttttttagagtggtgagaggatggtgggtgttatttcgttggtaacagggatggctggtcctagtgggtttggatcagcttccactgcagaacaggttactgatggaattgatgccagcaacctcactgcaattatcacaggaggagcaagtggtataggcttggagacagcaagagtgttggctcttcgaaaggtccatgtgatcattgcagttcggaacatggtgtctgcaaaggaggctaaacaacaaatactagaggagaatgagtctgcacgagtggacgtaatgaagctcgacctttgctcagtgaattctattacatcatttgtggacaacttcatagctcttgatcttcctctcaacattttaataaacaatgctggagtaatgttctgcccattcaagctctcagaggatggcattgagatgcaatttgcaacataccatcttggtcatttccacttgacaaacctgcttcttgacaaaatggcacanactgcataagccactggaatagagggcaggatcattaatctgtcatcaattgcccataactacacttattgaaggggattagatttaatagatcaatgaacgaaag

SEQ ID NO: 210386 - DNA, 464 bp, Glycine max
aagccaggaaattgcaaacaattttatttgattggaactacacaactaacttatgggtgaaacgaaacctttggtacaaaaatgcttggatgaaaagaaatgaatcacctcctgggggttcagtggggaataaaatgctgggaaacatcctgatacaacgacggattatgactttaacgggaacgggctttttattgcataacgggctggttttcataaactggtgaccacaacgaaggcttttaatttccctaaggggaaaaccacctttctgcaagggcactcaagctttcgaaattggttcgaccaaatcgttactggaatcccagagttcctttgcaagctgattgcttttggcgtgtgaacttggtttgcattgtttgcaatccacaatggacttcccagttgcacctttcacgcttgggaggagagcaacataacatggcgtggctgctccctggggg

SEQ ID NO: 210387 - DNA, 635 bp, Glycine max
  unsure (1)..(635): unsure at all n locations
cgatggaattggaagttgtcgagaactacttgaaagccgccggcgctgaactcttcgccgaaggtggccggcgaggcattcgtatcaatggctggttgatcgagactcggaggcactccatactgaactcttccacattccaagagtgggaacagaaactcgatacgtctcatttaccagaaatggtttttggggaaaacactttgattctaaaacacttgagcagtggaaccaacattcattttaatgcatttgatgctctacgtggctggaaacaggaagccttgccgccagttgaagttcctgcggcggctaaatggaaatttagaagcaagccctctcagcaagtaatactagattacgactatacatttacaacaccttattgtggaagtggcactattgagattgataaagatctgaatgagggagagacttctaaggaaaccagtgatatccattgggaagactgcaaggatcaaattgatgtagttgcacttgcatccaaggagcccatacttttctatgatgaggtggtgttatatgaggatgaactcgctgataatggagtatcacttcttactatnaaagtgagagctatgcctagctctcggttcttctgtgcgtttctggct

SEQ ID NO: 210388 - DNA, 554 bp, Glycine max
gtcgtggccgtgtcgcagcaaaaccaatccacatattaacttgtttgctctaagtcatggctctgatcttgcacgcaaccaaagcaaacaagaatgctttcaagactctgattgcggcagagtacagtggcgtccaagtggaattggcccctaatttcgagatgggtgtctctaatagaactcctgaattccttaaaatgaatcccataggaaaggttcctgtcttggaaacgcccgatggtccagtctttgagagcaatgccattgctcgttacgttgctcgactcaagggtgacaacgctttgttctcatcttctgccattgataatgcccacattgaccagtggattgacttttcatccttggagatcgatgctaatattatgaaattatacctaccaagacttggatttgccccataccttcctccagttgaggagggtgcaaattctgcattgaagagagcatgtgaggccttgaacactcatcttgcttgcaatacatacctggatggccattctgttaccctggctgatatcataacgacgtgcaac

SEQ ID NO: 210389 - DNA, 420 bp, Glycine max
tttctttttcttgttttattttatcttttctatttattaactttgttgtttttatttatggcttttgttttgtactctacctatgcaaacaagaatgctaaaaagactctgaccgcaatagagcactttggcgtccaagcggaattggcccctaataccgagatgggtgtctctaatagaacccctgaatggcttaaaacgaatgccacacgataggaaactgccctggaaacgcccgacggttcaggcggggagagcaatgccattgctcgttacgaagctcgactcatgggagacaacgcttcgccctcatggtctgccattgccaatgcccacattgaccacccgattgacttgtcatccttggagatcgacgctaggactacgaaatgatacccaccaagaactggatttgcccca

SEQ ID NO: 210390 - DNA, 561 bp, Glycine max
tcataccagagactccatctccctctcgcacgcgacgagggagtcccgcttcggaatctcaccccctctttctgctaattcgcaagatggttgctcagaaattcgttgtcgacttgaacaagccccttgtattccaggttgggtatcttggggaagcctacgatgattgggttcacgatcctatcgtaagcaaagaaggtcctcggtttttccaaagcggtttcctcgagttgttcacacgcactgcatggtgggtgattccaaccgtttgggtgccggttgcgagttggttcatttccaactctgtcaaatcaggcctcccttctcttgatgtagctctgctcgtctttctcggcatctttgtttggactttggctgaatacaccttgcaccgtttcctcttccatgttaaaaccaagagctactggggaaataccttgcattatcttctccatggctgccaccacaagcaccccatggatagctatagacttgttttcccccctgtagcagcagctatattagccctcccgatctggaacttggtgaagctgatatgca

SEQ ID NO: 210391 - DNA, 499 bp, Glycine max
gtgcacagggaggcacgctttatacaataaatttgataaatgtatcaaattttacaggatgtttgacacaagatggtggcacgttaaccctcagaaacatcaattggggagcaaaataattagacaatcaagacatgaataatgaattatcaacatatctcgtttgaagctcctgaatgaactatgcttaaccaatgaacaaatgcaaccttgacagtaacttatctacttttggcatccccctttgattgaggaggaggaaccgttccaaaaactttatcccacagtggtgatgtgatcccaaagccatagttctggagccgataatgatgattcaagtgatatttcttgagacttttgggcacatcagactttggttgaccatggtgtaagtagtaatgggtgcaatcatacatcacatagcccaacaaaatacctacaaacaccgcaggagcaactgaaggggtgcatatcagcttgaccaagttccagatcggga

SEQ ID NO: 210392 - DNA, 570 bp, Glycine max
ggttttgagaagccatctgccattcagcaaagggggatagttcccttctgcaagggacttgatgttattcagcaggctcagtctggaactgggaagacggctactttctgctctggtattctgcagcaacttgactatagcttgacgcaatgccaggccttggttttagcaccaactcgtgagcttgctcagcagattgagaaggttatgcgagcacttggagattatctaggtgtgaaggttcatgcttgtgtgggaggtaccagtgtgcgtgaagaccaacgcattctatctagcggtgttcatgttgtggttggtacccctggtcgtgtgtttgatatgctgcgcagacagtcacttctgccagatcacatcaagatgtttgtattggatgaggctgatgaaatgctttcccgaggttttaaggatcagatctacgatatatttcagctgctgccatctaagattcaagtgggagttttctctgctacaatgcctcctgaggcccttgagatcactaggaagtttatgaaccaacctgttaggatccttgtgaagcgtgatgagctc

SEQ ID NO: 210393 - DNA, 461 bp, Glycine max
aaattaaattactaagcctattaaacaaagtttaagagcggaagttcatccaatgaaacgaaaggggggggagactggttagagtgagaaacattacataacagtttccaaacgcatactaatttcatctactacgacggaggacaaaatctgatcaaaggagctcatgatcatttgaaggctgctcctcaacttgcacgttgtaaaacttctggatgtcaaacagcattttctcgtcatcctttgggacaaaattgatcgcaacacctttccttccgtacctcccactacgaccaatacggtggagatagttctcaggctgtgtagggagatcaaagcttataactagagacacttgttgcacatcaataccacgagccaaaagatcagtggttatcaagacacgggaagacccataacggaattcacgcataataatgtccctggtattctggtccatg

SEQ ID NO: 210394 - DNA, 646 bp, Glycine max
  unsure (1)..(646): unsure at all n locations
caaactcaagctagcctttgggggatatgatagagaagaagacacagtgtgagaaaaaggaaaaaatggaaggtgaagaaactgagatgaaacaacaatccaggttcaaaaggatttgtgtgttctgtggcagcagccctgggaacaagagtagctataaggacgctgctattgagcttgggaaagagttggtgtcaagaaatattgatctggtttatggaggaggaagcattggtttgatggggttggtttcccaggctgtttatgaaggaggtcgccatgtaattggagttattcccaagacactgatgccaagagagattactggagagacagtgggggaagtgatggcagtagcagacatgcatcaaagaaaagcagagatggctaagcactctgatgcctttattgccttgcccggttcgtacaacatggttccaccaatattccctcttaaaaagtcacgtatcattagacatcaattcaatattatgcactatctaatctacataaatttggcacattaaataaaaattacatcatttagatgattatgcattcttagntaaatacananaacacccatcatgcattattaaacctgttgatttaatttgatttgctcttcaaggacaatgtggtgtac

SEQ ID NO: 210395 - DNA, 607 bp, Glycine max
  unsure (1)..(607): unsure at all n locations
aggcccttgagcttttctttctttctctgctctcttttcttttaggtttccactctcacacactctccctcttctctttctctgcaataatctctcttctcttcttcactctctcaactcctgccaaacccccatttccgcagttcttaaatttggagtctgatgtctccgccattgctggttaccgaagatgaagggcagtgccatgcctcgatggtagcatctgcatcttcaccatccctgaactgtttctccctaaatgaggccggatttaaagaatgcaattacctgggattgtcagattgctcttcggtggacagttctactgtcccgaatttgtctgatgagaaaaaggagaatctgaatttgaaggctactgagttgaagctcggccttccgggatcccagtcacctgaaagggagacagaacttttctcgttgagctcaacataacttgatgagaaaccactgttccctttgcttcctacaaaggatggaatctgctcattgtcttcaaaaactgtggtcttcggcaacanaagaggttttgctgacacaatggaccctgagtttcctgggcatgcanggataaacatgatgctatcac

SEQ ID NO: 210396 - DNA, 546 bp, Glycine max
tttgtttttttttttttttttgattgcaacatacattcaacttatccaaacaaacatgttcctataaagattacaagctccacaattactaatattcaaggtagcttcataaggtattatagtagaaacaaatgtaacacaaacaaaagaccaagacactattatgatacttgtaaccatagacaacatcttgaatagcagttaaccatcaaaacccggcattcagtcatttatatcataagttctctttccacactcttcatgttccaataccaactagcacctgctcctggatttttccatggccctgggagctaagccaatggcatcagaacccttcatgattttcagtcttttgcatgtgtcaatgaacatatcccatggtacatctccgacaagcatccagtcaccatctttatcttcataagtgagtacatattctgaaccatgcaggaggtccttcagcttgctctgactcaacatttctcttcctggagctccatgggaaccacattgacctagagtgaaacagctgaacattttctc

SEQ ID NO: 210397 - DNA, 589 bp, Glycine max
  unsure (1)..(589): unsure at all n locations
ttatcaacccactcttagtactgaaatgggttctttacaagaaagaatcacttctaccaaagaggggtccataacttctattcaagcagtttatgtacccgcagacgatttaaccgatcctgcgcctgctacgacatttgcacatttagatgctactactgtactatcaagaggattagcggccaaaggtatctatccagcagtagatcctttagattcaacctcaactatgctccaacctcgaatcgttggtgaagaacattatgagactgcgcaaagagttaaacaaactttacaacgttacaaagaacttcaagacattatagctatccttggcttggacgaattatccgaagaagatcgcttaaccgtagcaagagcacgaaaaattgagcgtttcttatcacaacctttattcgtagcagaagtttttaccggttcgccggagaaatatgttagtctagcagaaacaattagagggtttaaattgattctttctggagaattagatggtcttcctgaacaagccttntatttggtaggtaatatcgatgaagctactgcgaaagctaccaacttagaaatggag

SEQ ID NO: 210398 - DNA, 365 bp, Glycine max
agttattccgatattcggacgcatcaacttgttctgaaatcacattgatagcctttactcgtgtcctagctcgtgtaagagctagatttgcctcaattgttcgtattgtgccttacggcttattcaaattaggttgtgctatttcaagagtttgctgcgcttcttggggatcaatgatactacccttttgcgtctaatttactaaaccagcgatctcagtagtgagtatcctagcaaaaccgctcatcaacaagatcgttaaccactgggcgttatgaagacctgtggcaaaaatccctattgccagcggtgctgcggcagacgcaccatctgtggttgatgagattactgcgttcgacgtggag

SEQ ID NO: 210399 - DNA, 494 bp, Glycine max
ggccccagttggaacccacttccggagtccaaaccccagagaacgtagccacaagggcaaaacccttccccccgccatggcacgcgtatcccggtcctcccccgcgcgcctcctctactccctctgctgcaccactgcactcgcggtcaccggcgtcgtccctcatcggcggcgccttccatctccggcacttttcagccgggaacgcggtgcgcacgatgccggacaaggagccgcggcggaaggagtcaatggagcggctccgcaacatcggaatctcggcgcacatcgactccgggaagacaactctgacggagcgggttctgtactacactggtcggatccacgaaatccacgaggtcaggggcagggacggcgtcggcgccaagatggactccatggacttgcagagggagaagggaatcaccattcagtctgctgccacctactgcactcggaaagactatacgattaacattattgacacgcctggt

SEQ ID NO: 210400 - DNA, 590 bp, Glycine max
ctcgagccgattaaaggtttgttccgttttccacagcgacgagagcaaggggggccctgggtccctattaacacggatggcccatcctagcgacctaagatcagctatcactgcagaacaagatactgatggaaatgatgccaacctacctaactgtaattatcacaagaggagcaagacagatacgcttggcgacagcaagagtgtaggctctccgaaaggcacatgtgatcattgcagtacggaacactggtgtctgcaaaggacgctaaacaacaaatactataggagaatgagtcagcacgagtgaacgtaatgaagctcgaccttggctcactgacatctattacagcactatgtagacaactccatgaactctcgaacgtcctctcaacaattcaaaaaacaacgccggaacaaatgacctgcccattcaagctctcagaggatagcacagaaatgcaatttgcaacaaaccatcttgatcattaacaagtgacaaacatgcctcctgacaaaatgcaacaaactgcaaaagccacaggaaaacaaggcaagatcataaatctggcatcaattgcccataactg

SEQ ID NO: 210401 - DNA, 512 bp, Glycine max
gagaagggaatcaaatttgccaaccagtaattgaacatgttatcacatacatgtctggtaggttactggatattcctttaagaaccaaatcaaattttgcattctcagaaccattgatgtattgttgtcggcagtggtgtggcggttctgttgttttatttagtgtaggtatacgccatggtttaataattaaagtctgagagctgtttgttgccaaagggattgaacgatcttaaaaccaggtttaggatttggcattccattaataatggtcccttttaactgtatggtttcacttaatgtaattgcagggtgttgtaccctttattcaaaaaaaaaaaaaaaaaaataaaaaaaaagaaaaaaaaaaaaaaaaagataaaaaaaaaaaaatataaataaaaaaagataaaacaatgaataatcaaaataaagcaaataaaaaaaaaagggggggcccccctttagggggccccatgccccggaatttaattcgggcccgtgtcctgggg

SEQ ID NO: 210402 - DNA, 518 bp, Glycine max
tttttttgtttttttttttgttttcttttttttttttattttttttttttcattttttttgggttatttgtttttttttttttatctaatttatattttgtatttttataaccattgatgaaaaaaaggggcgccacccccgcggcggtccgtagggcaaaccaccccaggaaaacgcccccctttaatagggagggcccgacagcagcccggggacaaaagagacgaaccacccttgggaccaaaaccacgataaggctttacattaaaaacggggcgggttccccgcccggaaaaacacaaagaaaccgccccccgctgggccccccattcacaaaggggggccaaaaaaacaaaaatcggggggggcccaaaaggggatcccccgcacccccccaaacaggtggggacaccccggcaaaaaacggggggggaaaaatttaccccccccgggggggccccaatcgggggtattcaccccggggagggaaaaacaagcctttttcatagggggcccc

SEQ ID NO: 210403 - DNA, 607 bp, Glycine max
  unsure (1)..(607): unsure at all n locations
ggttaaaggacttctcattgacaggaaattggaaacactagtagatgcagatttacatggtaactacaatgatgaggaggtagagcagttaatccaagtggccttactatgcacacaaggatctcctgtggaaagacctaagatgtctgaggtggtaagaatgctagaaggtgatggtttggctgagaaatgggagcaatggcagaaagacgagacgttccggcaagactttaacagcaacatacatcaccctaatgcaaattggatagtagattcaacttcccatattcaggcagatgaactatcaggtcctagatgataacattctaaggacaggtgaatacacaatactgccggctttctgttggaaagagatatacttctgatttgtgcatatgattttcgccctctctaccttttctcttgttttcatccttgtgcgcagattccatgcccattggtcagttgtgattattaaagatagataattgtaatttcttttgcgttgtcaagttgcaggatcaagtgtatgttacaacttactagcaactnttgtcattgtaggtatgaaaaattagatagagctttatggaaataaatacaattc

SEQ ID NO: 210404 - DNA, 406 bp, Glycine max
attgacttgattttgtttacactattttatgcatatttacatggtaacttcaatgatgattgaggtgagcatgtttaatcaagttggccttactatgcacacaaggatctcctgtggaaagacctaagatgtctgaggtgagaagaatgctacaaggtgatggtttggctgagaaatgggagcaatggcagaaagacgagacgttccggcaagactttaacagcaacatacatcaccctaatgcaaattggatagtagattcaacttcccatattcaggcagatgaactatcaggtcctagatgataacattctaaggacaggtgaatacacaatactgccggctttctgttggaaagagatatacttctgattagagcatatgattttcgccccctctaccttta

SEQ ID NO: 210405 - DNA, 603 bp, Glycine max
gggcttttccccttctctctcgctctctttcgctgcgtcctcggttatggcttctcgcaggctctcatcatctctgctccgaccattcctccgtccatctctgccggaatttcaagctccgacccctttccggctattctctgtcccaaacttttccactcgcgtttctccgatcgccattacaaaattacctgggactgaggtattctcacaatttgagtccggtaatggtttagcatcagtgctgagaagctctggaatgggcttgtaccagccagctggggggcttgtaccgccttttgctagcaggtttatgtcaacagaggcaacttctgttgattcttcttctcaagatagttcgatgctggagcctgaagttcctcctcgtatcaaatttaagagattagacaaaactgccaggcacattatgcagattttagacaaggaggcagtagaggaggtgagagggcaaagagagatacctgacataaagcccggttatattgtgcaactcacagtggaagtacctgaaaataaagagcgtgtctctattataaaaggcattgttatttgcaagacgtactgctggactcaatactacat

SEQ ID NO: 210406 - DNA, 392 bp, Glycine max
attacaatctcttgcgtattaccgtttcagatcatgtcaggttctatggatcgaaatctaactgcataatcttaattcttaggaggtaataaccctcattgaatcatatatgctagttgacgacacaccaaaggcaaacaaatacactgtacatactaagcttgacagatcatgaatcatcaaaaatgtcccccaagatgatgatcgatgtcaatctttaagtgggtccattccctgcctcagatcagctagttcggcccttctcactctcgttttgacaagcacctctatatactttatgtcaggtgaatacactggtaattgtgattcaatgccaacccctgcgatttacctcctaactccgaatgtcacattgagtccaacttctcggc

SEQ ID NO: 210407 - DNA, 572 bp, Glycine max
ccaatttactgctgatctttttgcaatgaaccacacagactttatcatcaccagcaccttccaagagattgctggaagcaaggacactgttggacagtatgagagtcacactgccttcacccttccaggactttaccgtgttgttcacggtattgatccatttgatccaaagttcaacattgtctctcccggtgcagacatgggtatatacttcccatacactgaaactgagcgtaggttaacagaattccactctgacattgaagagcttctttacagctcagtggagaatgaggaacacatatgcgtattgaaggaccgcaacaaaccaataatcttcaccatggcaaggcttgaccgtgtgaagaacatcacggggcttgtcgagtggtacgggaagaacgcactgcctcgcgagttggtgaacctggtggtggtggctggagacaggaggaaggagtcgaaggacttggaagagaaggccgagatgaagaagatgtatggcctcatcgagacctacaagttgaacggccaattcagatggatatcctctcagatgaaccgtgtgagga

SEQ ID NO: 210408 - DNA, 603 bp, Glycine max
ctcgagccgaatcggctcgagcggctctaggggagatagaaagagagagagaaagagagagagagaaagacccttacccttctctatcgctcgctttcctttgacgcttctgacccttgctttgtctgcgtcttccttctttctttctttctttctctgcgtgtcgtaatggctctcccagactcttcttcccgtcgcaactccctgatcccctccttcatctactcctcttcctccaaaacgctccctctccaccacatgctcaacaccgcctccgctgccgccgccgccgctccctccccgccgccggccaatctcgacgccggatcgcgtggcctcatgattccctctcccagcgagtcacgcaagatcgagttgtactcccccgccttctacgccgcctgcaccgccggtggaatcctcagctgtggcctcactcacatgaccgtcactcctcttgacctagtcaagtgtaatatgcagattgaccctgctaagtacaagagcatctcgtctggttttggagttttgcttaaggagcatggattcaggggcttttttcgtggctgggtgcctaccttgcttggtatagtgctcaggtgc

SEQ ID NO: 210409 - DNA, 491 bp, Glycine max
tctctatcttttttttttttttttgttttttggttgagatgtattgatacagatatggagagagagatattgacccttacccttctctatcgctcgctttcctttgacgcttctgacccttgctttgtctgcgtctttcttctggctttctttctatctctgagagacgcaatggctctcccagactcttctttccgtcgcaactccctgatcccctacttcatctactcctcttcctgcaaaacgctccctgtccaccacatgctcaacaccggctccgctgacgacgacgccgctccctacccgacgacggccaatctcgacgccggatcgcgtggcctcatgactccctctcccagcgagtcacgcaagatcgagttgtactgccccgccttctacgccggctgcaccgacggaggaatcctcaactgtggcctcactgacatgaccgacactcctcctgacctagtcaagtggaatatgcaaatcga

SEQ ID NO: 210410 - DNA, 572 bp, Glycine max
ctcgagccgaatcggctctagcggctctaggggagatagaaagagagagagaaagagagagagagaaagacccttacccttctctatcgctcgctttcctttgacgcttctgacccttgctttgtctgcgtcttccttctttctttctttctttctctgtgtgtcgtaatggctctcccagactcttcttcccgtcgcaactccctgatcccctccttcatctactcctcttcctccaaaacgctccctctccaccacatgctcaacaccgcctccgctgccgccgacgccgctccctccccgccgccggccaatctcgacgccggatcgcgtggcctcatgattccctctcccagcgagtcacgcacgatcgagttgtactcccccgccttctacgccgactgcaccgccggtggaatcctcagctgtggcctcactcacatgaccgtcactcctcttgacctagtcaagtgtaatatgcagattgaccctgctaagtacaagagcatctcgtctggctttggagttatgcttaaggagcacggattcacgggcttttttcgtggctgggt

SEQ ID NO: 210411 - DNA, 408 bp, Glycine max
tttctatcctttttttttttttttttttttggggagatttgatttgatatatatatggatagatatataatgacccttacccttctctatcgctcgctttcctttgacgtttgtgacccttgctgggccggcgaatgctccgggctttatgccccacccagaaagacaaaagggcccccccagacaaagggtaccgaaaaaccccctagatccaaaaatttattaactccccccccaaaaaatcgcaccctgggcaggacatgctcaacaccgcccccgcaagaagtcaaagacgctcccatcacaaaaacgggcaaacaggacccaagatcgaaaagactcttgacaccctctcccagggagccacgcaagatcgagatgaactcccccgccttctacgcgggggcc

SEQ ID NO: 210412 - DNA, 471 bp, Glycine max
ctttcctgaaagactttgacctacagataatccggttcacctgctccaaattagtccctcaagtgaaccggttcgttggttcaatcatcgccgaccaccaggccgacacaacccaaaccaaccgcgatttcgttcatgttttgctctctctccaaggtcccgataaattgtctcactccgacatgattgctgtcctctgggaaatgatatttagggggaccgacacggtggcggttttgattgagtggatactggcgaggatggtgcttcatccggaggtgcaaaggaaggtacaagaggagttggacgcggtggttaggggtggcgctttgacggaggaggtcgtggcggcgacggcgtatcttgcggcggtggtgaaagaggttctgaggctgcacccgccgggcccgcttctctcgtgggcccgcttggccatcactgatacgaccattgatgggtatcacgtgcctg

SEQ ID NO: 210413 - DNA, 505 bp, Glycine max
tcttttctgtttgactttgctttccattataacatttcaagttaataacgtagataggcttaagtatatcatcattaagtgcttaatccatgcctagggcgaactttaacaatgagtgggttagccatttcacacgagagcctgatcaccttcgatagatcaaccttggcttcatcagacggtatgccattcaaactcatgcaaaagccaagccacccagaaggttacggtgctcaaacccaaagtcttcccggtgcatgttctccgacccgaaccgaatggagcgagtctcagatccgacccgtaaacagaaaactcgttttccagacccatgaacctctcgggcttgaactcaagtgggtccagccacacctccgggtcccttgctatggcccacatattaaccatagcggtggtccctcgaggcacgtgatacccatcaatggtcgtatcagtgatggccaaacgggcccacgagagacgcgggcccggcggatgcagcctc

SEQ ID NO: 210414 - DNA, 611 bp, Glycine max
  unsure (1)..(611): unsure at all n locations
gcatttgagcggtcaaaagaaaaagcttaattggcggagaagactacggatgctgcgtgacatatgcaagggtttgatgtgcatacaccgaatgaaggttgttcaccgtgatctgaaaagtgcaaattgtctagtgaataagcattggaccgtcaaaatatgtgattttgggctttcaagaataatgacagaatctccaatgagagattcttcctcagctggaactccagaatggatggctcctgagcttattcgaaatgaaccattcacagaaaaatgtgatatctttagccttggggtgataatgtgggaactctgcaccttgaacagaccatgggacaggagtaccacctgagagggtggtttattccgttgcgcatgagggttccagattggagataccagaaggccctctaggcaggctgatttcagagtgttgggcagaatgtcatcaacggccaagctgtgaggagattctttctcgtttggtggacatcgagtactccttgtgctgaagcaatatctnttgtacatagaaaactttgggtagagttgttacattgtattatcggctgatgttgtgactatctgtgaaatttgtcttttttcgc

SEQ ID NO: 210415 - DNA, 524 bp, Glycine max
gctgaaatgattggtcctgttgattttaacaagagtgttgagtattggcagcaagacaagtggaatggctgctttcctcttaagtggcacgttgttaaggatgttcctaacaatttgttgaggcacattaccctggataacaatgagaacaaacctgtcactaacagtagggatacacaagaggtaatgttggagcctggcctgaaattaatcaaaattttcaaggaatataccagcaagacatgcattctggatgattttggcttctatgaggcccgtcagaagactattttggagaagaaagcaaagcaacaattcccaaagcaggtatgggaagggaaacctgctgatgagaagattgagataaatggggaagtcaatactcaaaaatctgaagttagctcggaagtgctcaaggagtcccttgctgaaaaggatagtgatgaccacaaagttcccgagaatggatgtgctacaaaaactggagatgccccaaagggtgctaaaccagttgttcctgagag

SEQ ID NO: 210416 - DNA, 632 bp, Glycine max
  unsure (1)..(632): unsure at all n locations
aaaactacaacctttgtcaatttctttcttgttcgactctgcttctttctccaacttcacacacacacacacacaaaaaaaaaaaaacatggcaaaggatagaacaattggtgtggctctggatttctccaaaagcagcaagaatgctctgaaatgggcacttgagaacttagccgataaaggtgacaccatttatgtcattcacattaactccaactctctagacgagtcccgcaacaagctatgggcagaatctggttctcctcttattcctttggtagagttcagagagcctgagattatgaaaaagtatgatgttcaaattgatattgaggttcttgatttgcttgacactgcttcaagacaaaaagagatccacattgttacaaaaatatactggggggatgcaagagagaaacttttggatgctattgaagatttgaagctggattcgctggttatgggaagcaggggcctcagcacaatccaaaggattatattgngaagtgctagcaactttgtgatgacccatgccttttgccctgtgactatcgtcaaggaaactagcaaggaaactagcagcagcaagtaaagatgatcaatttgggagagaacatttaatttcacatata

SEQ ID NO: 210417 - DNA, 614 bp, Glycine max
  unsure (1)..(614): unsure at all n locations
aaaactacaacctttgtcaatttcttttttgttcgactctgcttctttctccaacttcacacacacacacacacaaaaaaaaaaaaacatggcaaaggatagaacaattggtgtggctctggatttctccaaaagcagcaagaatgctctgaaatgggcacttgagaacttagccgataaaggtgacaccatttatgtcattcacattaactccaactctctagacgagtcccgcaacaagctatgggcagaatctggttctcctcttattcctttggtagagttcagagagcctgagattatgaaaaagtatgatgttcaaattgatattgaggttcttgatttgcttgacactgcttcaagacaaaaagagatccacattgttacaaaaatatactggggggatgcaagagagaaacttttggatgctattgaagatttgaagctggattcgctggttatgggaagcaggggcctcagcacaatccaaaggattatattgggaagtgtcagcaactttgtgatgacccatgcctcttgccctgtgactatcgncaaggaaactagcanggaaactagcagcagcaagtaaagatgatcaatttgggagagaa

SEQ ID NO: 210418 - DNA, 451 bp, Glycine max
gtcaacataacataaatcacagaaattcattgactacaataaaattttggaggcctgatggccttatatatggcactcaaattaaattattgcctcaataaaaaggagtgaaaactataaagtacagtaaatcataaatttatcttagacaccaaaataatacttaggaaagggaatatggcccaactagatcaggtacaatgcaagaaaaaaaataatatgtgaaatttaaatgttctctcccaaattgatcatctttacttgctgctgctagattccttgctagtttccttgacgatagtcacagggcaagaggcatgggtcatcacaaagttgcttacacttcccaatataatcctttggattgtgctgaggcccctgcttcccataaccagcgaatccagcttcaaatcttcaatagcatccaaaagtttctctcttgcatcccccc

SEQ ID NO: 210419 - DNA, 606 bp, Glycine max
gatttttaagtgacgggaacaactgaatagagaatagccagatccagacagacactgccagtgcgagaagcctatcagcaaacagagtcttcttttctttttcttttttctctacacacagtgaaggaaggaagagagtatcatccatggcggccaccagagcagtaaccattgccagcaactccacatgctctctgcttgcaaagaaaacctttgtgggtggcactgctctttccctcaacaacctcaaattttgtcgtactaggaggtcttacacctgcagagccatctacaatcccctggttgtcgtcaaggaagaaggccaacccgaaacctttgattatagagttttctttgttgacaaatctggcaagaaggtttctccctggcatgatattcccttgcggttaggtgatgatatctttaacttcattgtcgagattcctaaagaatccagtgcaaagatggaagttgccactgatgagtctttcactcccataaaacaggatacaaaaaaggggaagctccgatattatccctataatatacactggaactatggcttacttccacaaacattggaagatccatcttttgcaaactctg

SEQ ID NO: 210420 - DNA, 562 bp, Glycine max
cacatacgcaagatggatttattgaactaatgcctgaccaaatggacattgatgtcaaagatataactgggaagctcaatagaaaaattcgctacttcataaatacgaattgtagaaaatgcaagctatggcatgaacaatagacattcgcacaatacatctctacacaagtgacaacttttctgcaggaattgatctcttgataagtttattccaggactcattggtctctgcgataaccttaagcgcataatccttatttgctgccttgatgccaagtccaaatttattatcaggttttccatcaaggatcttgtagtctctaaaccagtccctaattgcaggtagagttcctggaaaatgctgtctcatcatcatcaacatcatttacaaatggcgccttcggatcatctaatgaaattgcaactattttccaatcaagttctccttcatcaatcatgggtaatgcacccaagggtttgaccttgagaaccttacctattttcctgtgagcttcaccaatctcaaccacatcaactggatcactatgtcccaatgctcc

SEQ ID NO: 210421 - DNA, 576 bp, Glycine max
ctcctaaaacatctccagtgggttcttcttcttctattacaacaacgtcgtccaagaccatgaccatggccatggccacgatcctgctcctgttcacggtcttcgcggtttcatcggccctagacatgtcgataatctcgtacgacaacgcccacgccgccacgtcgcgcagcgacgaggagctgatgtccatgtacgagcagtggctagtaaagcacggcaaggtgtacaacgcgctcggagagaaggagaagaggttccagatcttcaaggacaacctgcgattcatcgacgaccacaactcccaagaggaccgaacctacaagctcggactgaaccggttcgcggatctcaccaacgaggagtacagggccaagtacttgggaaccaagatcgatcccaaccggaggctcggcaagaccccgagcaaccgatacgcgccacgtgtcggcgacaaactacctgaatcggttgattggaggaaggaaggtgctgttcctccagtcaaagaccaaggaggctgtgggagcttgtgggcattctcagcaatcggtgcagtggaaggggataaataga

SEQ ID NO: 210422 - DNA, 541 bp, Glycine max
aacagcaatcaaatatgttcgtcatttggaattggaatttgaatacaaatacagtgcatgaataatataaccctatgtacacagccaatatctgactgaaattcgatacagaatagtatcaatttgtatcataataaaatggcacagagaaattcatgtgaaggtaacggggaagtgtatcagctggtgttttaattcttcgtctttcattgacttaatcattggctccttactgcacgttcacatttactttatctgcttaagcactgctgaccttgttcttactcccaaaggtccaatggggtttagccggagtactcctcaatgccttgactccgaatgggttgatcttgctcttgagacaagttccagcataagtgttgcagatgggatagtcgttagggcagcaactgtcctggtcatcacagcaggtagcacccttatgaggacatcaaccgcactcaaagcaagcattttcgaactcgaaaatacagccacaagtagcactatcagcacatctgcagtagttgtcacagacatt

SEQ ID NO: 210423 - DNA, 614 bp, Glycine max
  unsure (1)..(614): unsure at all n locations
atttctcatcatcacttcccacttacgctcggtaatgtctcatttctcacgcatcaacccctaataataatcccccaaacagaacctttcccacccaatccaaacacagccctaaacccccccaccatcatcatgagtgccgtgaatttgaacacatggccacgccccagcttcattttgaaccaaaccgccacaagaagatccagatcctccccaacctctcatttctttcacggcgtcaataagttaccgtcacccatttcctgcctcaccgttgccaaacgctcatttacgctctcggcggtgctgacgaaagaggacaccgtggagacggaagagaagccaccgattttcgacttcaagaactacatggtttccaaagcgagcgcggtgaacaaggccctcgacgacgccgtttcgctccgcgagccgcagaagatccacgaggcgatgcggtactcgctcctcgccggcggcaagcgcgtgaggccggttttgtgcgtggcggcctgcgagctcgtcngcggcgaggaggccacggcgatgtccgtcgacttgcgcatcgagatgatccacaccatgtcgctcattcacgatgacctnccctgcatgga

SEQ ID NO: 210424 - DNA, 524 bp, Glycine max
tatttttttatttatcacttttctatcttactcttttggttattgttttattgtttttacgcattatacctcttgattatgaattctcccaaacatgaaccttttcccacccaataccaaacacagatcctaaactccccacaccatcatcagggagcgcacgtgacattagaacacagtggccatcgctcgaacattcatctatgaagccaaacacgccacaagatagatccaggatactaccccaacactttcagtaactatcaacggcgtcaataagttacacgtcacaccattatcctgcctaacgcgttgccaaagcgctccatttacgcgggtcggcggcgctgacgataagaggacacacgtggagacggaagagaagccaccgattttcgacttcaagaactacatggtttccaaagcgagcgccgtgaacaaggccctggactactccgtttcgctccgcgagccgcagaagatccacgaggcgatgcggtactcgctcctcgccggcggcaagc

SEQ ID NO: 210425 - DNA, 577 bp, Glycine max
  unsure (1)..(577): unsure at all n locations
aagtggacgaggggcttctcaacaaccttattaaggttaacgttgttggaaccactaaggtcacgcaagctgttctgccagggatgctcaggagaaagaagggggcgattgttaacattggttctggagctgctattgttattccttctgatcctctttatgctgtttatgccgccaccaaagcgtacatcgaccagttttcgagatgtctctatgttgaatacaagaagagtgggattgacgttcagtgtcagattccattatatgtggcaaccaagatggcatcaatcaggaaatcttcattctttttccatcaacagatggctatgccaaagcaggtgtgaaatggataggctatgagcctcgttgcacaccatactggccgcatactcttctttgggctgtggcattctcattgcccgagtttgttgctgatgcttggcgcctgtggttttgcttgggtattcgaaagaagggacagcgcatagagtccatgaagaatgaataaaagatgctnggttctgatgtgtaggccaatagacgctactcatctgataatatatatgcagattgtagc

SEQ ID NO: 210426 - DNA, 567 bp, Glycine max
tttgttttctatttgaaaccgggctaagcgatatgccaatatatgatatcagctcatcacactactaaaacagtgatcagaaacacccaaaacaggtgagtgaaaagaatatgccacacaactgatactaacaaaagagtaattacagcaagatgaaaatcaggagcacatgaggtacttggaatcctcaatgagctaacaatctgcatatatattatcagatgagtagcgtctattggcctacacatcagaaccaagcatacttttattccttcttcatggactctttgcgctgtaccctctttcgaatacccaagcaaaaccacatgcgccaagcatcaacaacaaactcgggcaatgagaatgccacagaccacagaagagtatgctgccagtatggtgtgcaacgaggctcatatgctatccatttcacacctggtttggcataggcatctgttgatggaaaaagaatgaagatttcctgattgatgccatcttggttgccacatataatggaatctgacactgaatcgtaatcccactcttcctgcattcaacatagagaca

SEQ ID NO: 210427 - DNA, 622 bp, Glycine max
  unsure (1)..(622): unsure at all n locations
acgagctttccactttgattctttccttaatcgaagctgtaacgaaatctctgccacgggacagcgacaccgtacgaccttcccattgtttcctcaacgtgaacaatacaacaccacaccaccacccactaacaatacctaaagcctaacgaaccctaattcttgatcattgctcaattctttgttcccttcccatctcggagacacgaattcgccttcttcctcatttcccaaacaaatttcccctccgcactcccccaatttattctttttttcgcattttattttacccttttgaacctgtggcttcttttcgacgccccccatgtatcagaatggattagtgtaaattattggaaggtacctatataaaagcatgggcagtagtgacatggacaaaaccccgaaagaggagtctaagacacctccagctacgtcacaggagcagtcatcaacaactggcatgccaacaactaatcctgactggtctaactntcagacgtattctcctatacctncacatgggttcttggcatcaagcccccaagcccacccatatatgtggggcgtccagcatattatgcctccctatggcactccacctcatccctatgttgcaatg

SEQ ID NO: 210428 - DNA, 540 bp, Glycine max
tgctagtacattatagtcatgcatacagatataattcccgggccgatcagttactgcggccgccctttttttttttttttcggtaatcatactttttgttgctaacactaacttacgaagtagcagagaaggtctgaccaagtaagtattcacaccctacctacaatacaagttttttgccatcataaacatgactaattaggaatgagggatcatatgacataaatagatcctaatactacatatgatcacctttaatacaatttgaaccaaagctatccaaaaactagaacttgctgttgctacatggctaggttatcttcctaaaaagcaacatgcagcaggaagcaagatcctaatgaacaccatgcacaacatctgtctgaccactttgttgagtgtcattactcacatgctgatcattctggccagacctaagatcctccttcccaggggtcgtgacaccaggtatcttcccaagtctatccttgagggcagcattctcagaacgcagctgctcatactcactactgatccggc

SEQ ID NO: 210429 - DNA, 643 bp, Glycine max
acgagctttccactttgattctttccttaatcgaagctgtaacgtaatctctgtcacgggacagcgacaccgtacgaccttcccattgtttcctcaacgtgaacaatacaacaccacaccagcacccactaacaatacctaaagcctaacgaaccctaattcttgatcattgctcaattctatgttcccttcccatctcggagacacgaattcgccttcttcctcatttcccaaacaaatttcctgtgcgcactcccacaattcattctatatttcgcattgtattatacccttttgaacctgtggcttgttttcgacgccccccatgtatcagaatggattactgtcaattattgaaaggtacctatataaaagcatgggcagtagtgacatggacaataccccgaaagaggagtctaagacacctgcagctacgtcacaggagcagtcatcaacaactggcatgccaacaactaatcctgactggtctaactttcagacgcattctgctatacctccacatgggttcttggcatcaagcccccaagcccacccatatatgtggggcgtccagcatattatgcctccctatggcactccagctcatgcctatgtggcaatgtatccccatggtggcatatat

SEQ ID NO: 210430 - DNA, 528 bp, Glycine max
cggtaatcatacttcttgctgctaacactaacttacgaagtagcagagaaggtatgaccaagtcagtattcacaccctacctacaatacaagtttttcgccataataaacatgactaattaggactgagggatcatatgacataaatagatcctaatactacatatgatcacctttaatacaagtcgaaccaaagctatccaaaaactagaacttgctgctgctacatggctaggttatcttcctaaaaagcaacatgcaccaggaagcaagatcctaatgaacaccatgcacaacatctgactgaccactttgctgagcgtcattactcacatgctgatcattctggcctgacctaagatcctccttcccaggtgtcgagacaccaagtatctccccaagtctatccttgagggcagcattctcagaacgtagctgctcatactcactcctgatccggctcacttatgatcggagactggcatgatcttctctcaaagcttcagcacgctgagcttgtccatcacat

SEQ ID NO: 210431 - DNA, 561 bp, Glycine max
aggagatatggttataaacatggagtggggtaatttccgatcatcacatcttcctctaacagaatatgatctagctctggatgctcagagcttaaaccctggagaacagatttttgagaaattgatttctggcatgtatttgggggaagttgtaaggagagctttattgaagatggccgaagaagctgacttttttggcgatactgttccccccaaattgaaagttcctttcatacttaggacgcctgacatgtcagccatgcaccatgacacaagttctgatctgaaagtggttggaaacaagttaaaggatatattagagatctcaaacacatcccttaaaatgaggaagatcgttgttgaactgtgtgacattgttgctactcgcggagctcggcttgctgctgctggtattttgggcatccttaagaaaataggaagagacacagttcaggttgcggagaagcaaaagtcagtgatagcgctggatgggggttggttggacactacaccaaattagagaatgcttgagagtgcactgaaggattgctggagatgagc

SEQ ID NO: 210432 - DNA, 588 bp, Glycine max
gaaataaaaacatatttaggcttgtcaatacattaagtcctgctttattctcgttggctacattccgcaaaaggtgtctagtcactcaagatgaagtttatatctttgatattattccttaacgaaggagaaacaaacactgaaaccaaaataatgaatgcccccccagtcaccagctgcaaggcaccattgcttcaatgtgttgatctaccacctatgcaaaaaatgaaactagtattacacgtctttcccttgtttggcaataaaatttaagactcctccactcccaaatattgggagtgagaagctgccaggagggctgcaccaatgccagagccatcattagcatgctcaatgacaatggtctcagcagcctcatctcccagcaattccttcagtgcactctccaagcattctctaaatttggtgtactgttcaaacaaccccccatccaacgctatcactgacttttgcttctccccaaccttaactgcgtctcttcctaatttcttaaggatgcccaaaataccagcagcagcaagccgagctccgcgagtagcaacaatgtcacacagttcatcaacgatc

SEQ ID NO: 210433 - DNA, 693 bp, Glycine max
  unsure (1)..(693): unsure at all n locations
gtctatttgtcgttggctgagtacttcagactacgttaaaccattatgcccgcgtacgcacgctcgcattagcgctcgagcttccaccgcctcaacatcaaacacgactctcgcctcgaaggcctcatcaagatggcagatctcactattaatctggctgccatttgcactcccgcggattacaacacccgccctctcgacaccatttacagcaatttcatcgacgcgctccccgtggtgaaatactgttccgagaacaacaagcgccttatccatttctctacttgcgaagtgtacggaaagacgattggagcctttctccctaaagatagtcctcttcgtaaggatccggcatactatgttcttaaagaagacgagtctccttgcatttttggttctattgaaaaacagaggtggtcttatgcctgtgcgaaacagttgattgagaggctgatttatgctgagggtgctgaaaatggcttggagttcacaattgtgaggccttttaactggattggacctcgaatggatttcattcctggcattgatggtccaagtgagggtgttcctcgggttcttgcatgctttagcaataatcttctcagaggagagcccctcaagctgtggaccgtggccagtcccagagaacctntgtttacattaaagattgctattgaagctgctngctgatga

SEQ ID NO: 210434 - DNA, 616 bp, Glycine max
gtaaaagacgtgagtctcagccggggcatgttctgaagtcttcttctctgcttgtatgcaacggccacagccatagtcgcctgaaaccgattgttgttgcagggaaaacacagagatccgggtcgacccgttgcagatccgatccaaataagaaaagatgaatattttcaggttagccggggacatgacccatttggccagcgtcctcgtccttcttctcaagatccacaccatcaaatcctgcgccggtgtctcattgaagactcaagaactctatgcactcgtttttgcttgtcgctacctagatatctttactaattatgtatctctctataataccactatgaagttgatattcttgggaagctcattttctattgtgtggtacatgaggtaccacaaggttgttcgtagatcatatgacaaagatcaagatacctttcgccattactttcttgtattgccctgcttactattggccctattaatcaatgagaaattcacattgaaggaggtcatgtggacattttccctgtatttggaagcttgtgctatacttcctcaactagtacttttacagagaactagaaatattgacaatttgacttgacagtat

SEQ ID NO: 210435 - DNA, 479 bp, Glycine max
gcattgcgccactttctagatctaaatactttttcaagtgaaaatggcaaattacaatcacaaacaaattgatgctttttgtctataatcttcctagtcattagtacagtagtatttgaggtggcaagaacgaacaaataggcaattgtaaatcagaaaccactatgtccagacaaatttgtgaatcctctctgcttactgttaattgtccacttagacccttgttttcaagaacagaagaataaactcatgctggcaaatgaagctttttgttggccttccagctttggaaatagtaatagaagaaatcagcatagagtagtgtctgaacaaggccagaaatccatgttatccaatggacaaagtggggctcagttaagtagcgatagatccagctgagaatgtatagtcctctgtatgcaccgtggagaaagacatactgtccagtcaaattgtcaatattgctagttctctgtaaa

SEQ ID NO: 210436 - DNA, 576 bp, Glycine max
  unsure (1)..(576): unsure at all n locations
gttctagatcgcgggcggccgctcgcgatctagaactaggttcacacacacaaaagaatcagcatggctttcaatcaagagttagaagctgtaacccaagctttctcagggcatggagtggatgagaaatcattggtaacattactgggaaaatgggatcctctggagagagaatctttcaggaagaagacaccacatttgttcagtgaagatcatgaacgccattttcagaggtgggatgatcaatatgtccgtcttctcaagcatgaattcgtgcgttttaagaatgctgtggtgctttggtccatgcacccttgggaaagagatgcccgtttagtaaaagaggccctaaagaagggtccaaatgcatatggagtgctgattgaggtttcatgcactagatcctcagaagagctattgggagctaggaaggcataccattccctctttgaccactccattgaagaagatgttgcctctcacatccatggcattgaaagaacgctattggttgccctactaagtgcctatagatacgaanggacaaaggctaaagatgacactgcacaatcagaa

SEQ ID NO: 210437 - DNA, 399 bp, Glycine max
gggttggaaaaaattacctggacatttttattggattccacttttccttttttggttttgtgaccaccgtattaccggatgcagaactgtcatgccgggaaaaggatcagagacaaatcaagggaaactgggaggaaaaaattttccttttttatttgaacctccaaggtctggggctctttgaaaattctgcaattagcctcctgtaacaatcaaggctagcaagaaatgcttgggggcccctttagaaacccctctaactttctggggcaaagaaaccccattttgactttgggaccgtgcccttatggctttcatatcaatatgaaggcgagttccctcgaccctagtaagcgatttcgtaagcttcttgggcacatcaattcctaatggtgcatt

SEQ ID NO: 210438 - DNA, 400 bp, Glycine max
gtgcctgacaagatccaaacctctgcccactgaggaacctctctctctcactcttcaactactacagcttctacgccggcgtcagatctgatccctcagatcaccgctacacagaacgcgaccgcgaacctatctacgccaacacagttggcccgttacacaaccgtaacgaaacctaccgtgactacgaccttaccttttgtgaaccaggagacttgacagagatgaaggaggcgctcggagaggtgctgactggggaccgagcgggtagcgcgccatacaagctggagttccatcgcgacaaggagtcgccctccgtgtgcaacaggaagctctgcaaacaggacgtgtctcggtgcagatccgccgtgaggaaggactactactgccagatgcacta

SEQ ID NO: 210439 - DNA, 539 bp, Glycine max
ctcctagaacatctccagtgggttctttttcttctattacaacaacgtcgcccaagaccatgaccatggccatggccacgatcctgctcctgctcacggtcttcgcggtttcatcggacctagacatgtcgatgatctcgtgctacatctcccactccgacacgtcgcgcatcgacaaggagctgatgtgcatgtacgagcagcggctagtaaagcacggtatggtgtacaacgcgctcggcgagaaggagaagaggttccagatcttcaaggacaacctgcgattcatcgacgaccacaactcccaagaggaccgaacctacaagctcggactgaaccggttcgcggatctcaccaacgaggagtacagggccaagtgcttggcatccatgatcgatcccaaccggatgctcggcgagaccccgagcaaccgatacgcgccacgtgtcggcgacatactacctgaatcggttgattgcaggaaggatggcgctgttcctacagtcaaagaccaaagtggctagatgagctgttgtgca

SEQ ID NO: 210440 - DNA, 458 bp, Glycine max
aacagcaatcaaatttgtttgtcatttggaattggaatatgaatacagatacagtgcatcaataatataaccctatgtacacagccaatatgtgactgaaattcgatacagaatagtatcaatttgtatcataataaaatggctcagagaaattcatgtgaaggtaaaggggaagtgtatcagctgatgttctaattcttcatgtttcattgacttcatcattggctccgtcctgcacgttcacatttcctttatctgcttaagcactgctgaccttgtacttacacccaaaggtccaatggggtttagccggagtactcctcaacgccttcactctgaacgggatgatcttgctcttgagacacgttacagcataagtgttgcagatgggatagccgtttgggcatcaactgtagtggacctcacaggtcgtagcaccctgctaagacagcaacccc

SEQ ID NO: 210441 - DNA, 622 bp, Glycine max
  unsure (1)..(622): unsure at all n locations
cggctcgagcggctcgagcttactggttgccttgttgtgagtaagagaaaaggcttcctgcaccgagcacaccaacttgatacctctgattctttctttgcttagaattccacagaatatggagactgttcttttcaatcactccccacctttggaattcaagggtttgagcaaggaggaggaagactcattgctagggcaagtggaaatatggaggtacatgacatgcttcacggactccgtggccttgaaagctgtcatagagcttcgtatagcggacatactagaccgttatggtaaaccactatccttgtcgcaaattgtggagaacatagaagacgcaccctccccagatgcctctcttctccagagagtcctgagagtgatggtgcgcagaaagatcttcagtgcacaagaatcagagacaggagaaaccctcttcggcttgacacgagcctcgaagtggatccttcgcgacacgaaaatgaccctagcacccatgttgctgctggagaaccacccaattcacctgaaccctgcgcactacatcagtgagattattagagaaggcacaaaanatggcactgcttttctttagtgccatggacatgagcaatttgag

SEQ ID NO: 210442 - DNA, 461 bp, Glycine max
gaggaatgggaagaagagtctgaccactgtgcaagggctgaagaaggagttcagctacgagaagatcctcaaggacctcaagaaggagttctgctgcaacggaaccgtggtgcaggacaaggagcttggcaagatcatccaactccaaggcgaccagcgtaagaacgtctcccacttcctcgttcaggctggccttgtcaggaaggaccagatcaagattcatggtttttgaccaattggtcttgtttttgttagtagtaatttcaagttgttcttgagtttgtgagttttgaaagtttggattgtttttctgtttgatgagtggtgttggaataagtttggtttggtttggtttggtttgggttttccaatttttaatgattggatttcatggatgttgttagtgaacttgaattgttccaaagcaagttacagttaataaatgataattcggttttcag

SEQ ID NO: 210443 - DNA, 460 bp, Glycine max
ctgaaatccgaattatcatttattaactgtaacttgctttggaacaattcaagttcactaacaacatccatgaaatccaatcattaaaaattggaaaaccaaaccaaaccaaaccataccaaacttattccaacaccactcatcaaacagaaaaacaatccaaactttcaaaactcacaaactcaagaacaacttgaaattactactaacaaaaacaagaccaattggtcaaaaaccatgaatcttgatctggtccttcctgacaaggccagcctgaacgaggaagtgggagacgttcttacgctggtcgccttggagttggatgatcttgccaagctccttgtcctgcaccacggttccgttgcagcagaactccttcttgaggtccttgaggatcttctcgtagctgaactccttcttcagcccttgcactgtggtcagactcttcttcccattcctc

SEQ ID NO: 210444 - DNA, 538 bp, Glycine max
tttttctttttttttttcataaaatatttatcagaattaaatataaccgtactgaattacaatgacctcctaacaaaattgacacacatttgactagcccctctccctcctcaaaataacaatccaaaatccagaacaagtaactaaagcgaggggctcaacaaaatctatgtgctcaaaaatggcactcagccatctaggcgtataaggtaaaaaggcatatcatcctacatcttgactactacctgttcagccgaacttttcttcacaaatcctctggagcacaactcattcaacaactccaaagcttgctcggctaatccttcatcagcaatgccttctataagaatggcatatgtagcttcggtaggtctgcatcctttttctaccatataagccagaaaatcaattgcacgactagtctgctgagccttacaaagtcccaacatgattgcattgcaagtgacaacactgggcttaatacttaatccttccatgtcatggaaaatttttatagcctcatcaacctttccttcac

SEQ ID NO: 210445 - DNA, 637 bp, Glycine max
atttacatactcaggtgccatgtaaatggaaagttttcagagaagtcagatgtttttagttttggcgtattggttcttgaggttataagcggccagaaaaatagtggcatttggaacggagagaagaaggaggatctactaagtattgcatggcgaaactggagggaaggaacagctgcaaatattgtagatgccaccttgatcaatggttcacaaaatgaaatagtgagatgcatccacattgggttactctgtgttcaagaaaatgtagctgccagacccaccatggctttcgttgtaaccgtgtttaatagccattctcaaactctcccagtacctttagaacctgcatattatgatgatagtgcacaattaccagagtttaattccggggcaacaatcgagtatacaactagatcaacatcgggggaagaaggccaatgaggctgctgaaaagtatcacatcactgaattcctctaatacagctaatatttatgaatttcaattaattttaagatggcatatactgagttgtaacttataaatctattcattcgtagtttggtgcaaactgtttgtcctttgtgttatgtctacgggagtgctagtaagtactctttactatatttcaataaa

SEQ ID NO: 210446 - DNA, 542 bp, Glycine max
gtcatagcaacaaacaggcaactgagtttggttcaccctatttacaaacttctgtttactgactaccgtgacaccatgaatattaattcacttgcccggaaagccctggtcaatgcagatggtattatagagaaaacattctcgtggggtaggtactctatggaaatgtccgctgtcattcacaaggactgggttttcactgatcaagcattacctaatgatcttgtaaagagaggagttgctgcataaggacccatctgctccccatggagtacgacttttgattgaggactatccttatgcttctgatgggctagagatatgggatgccatcaagtcctgggtgcaagagtatgtctcactctactacaagtgatatcaggaactccaaaaagaccctgaactccatgctcggtggaaagaacttgtacaggtgggtcatggtgatttgacagaaagccatggtggcatatgatgcaaactcgtgatgagttgggtgaagcttacgctatgctcatatggattgctacaacccttcatgc

SEQ ID NO: 210447 - DNA, 531 bp, Glycine max
cacaaaaaatcatagcattgaaaaatcttaacaattttaaattaaaatgtgaaggagaattatccaaagctagtctatctagttataactcatctacataaatgttgatgccatacaacatggttgtcccttatcacataaaagccgaagagggaaaaagaacaaaagaaccggaatatccaaattttaggtagaagtaccacaacagaaaaatcttggataacaaataactcaacatctgtgtgaaagaccacacaggtgtatatacaggtgaaacagaccaaatgtcatgcgtctcaacagcacctatctacctgatagtgacaaacttgttggcgccgtgtctggcccaatgagtcttcagatcaatagggttagcaaagttataaccttcagcagcaagtttctctaaaaccttgttaaaagcaccttggctcattttccgcccagctatccttgcaccacgccttttcatgctcattgggcaaggatatattgacacatttgtggtgcaacaagccgattgccaac

SEQ ID NO: 210448 - DNA, 579 bp, Glycine max
gtagaatgcagcaccaatgaagtctcttcaaaccattatgggggtcttcctgctgatagtactctgtagcagcagcaccaatgcaggaaaagaaacaaggcacgaccatgcaaacataaagacctacataaaccacatggactagaccaccatgcccttaaccttgagcgaccacctcaactggctcgacgccttcctcaaatcagcgtagcacttcgcagagatgctgtacacttacaaacacgtgggccatggcttgtccgctagacttactcccaaggacgtagacacacttgcaaaacaacccggaatcctctccgtcatccccgaactcaaatacaaactgcacaccacaagaactcccaacttacttggacttgacaaagccaccaccttgtacccgaagctagcctctacggcttggcgtcaggtacggcgcgtggaatggccacacgagcgcgtgtggcggataacagagtgtgctggcatcgcggatgctgtactttcgacatagtcgcgggaatcgacaaggccataaaagacggcgtgaatgttctgtccatgtccataaggggaagc

SEQ ID NO: 210449 - DNA, 545 bp, Glycine max
  unsure (1)..(545): unsure at all n locations
attcacaaccgaaacagtttccatctctctcacaaaatgacaacaatatcaaattgctcccttctcttcctcttcctcttcctctccaccctccacatagcttccaccctctcaacccccaccaacttcatcaagtcctcctgcagcaccacccagtacccagccctctgcatccagtccctctccgtctacgcctccaccatccagcaagacccccacgagctcgtccagacagccctctccctctccctcaaccacaccgaggccaccaaaaccttcgtcgcaaaatgcaacaaattcagaggcctcaaaccgagagaatacgctgccttgaaggactgcgctgaagaaatcagtgacagcgtcgaccggctcagccggtcgctgaaggaactcanattgtgtaaggtgaagggtgaggacttcacgtggcacatcagcaacgttgagacgtgggtgagttcggctatgaccgatgagagcactngcggcgatgggtttcgcgggaaggcgctgaatgggaagactaaggaggcgattagggc

SEQ ID NO: 210450 - DNA, 458 bp, Glycine max
cgtccggactaaggaacattactttactgaatcaaaggtagagagaagagcaacaaagaaaatcatacaaaaacagaactcatatttcacatttgatcagaagcaacacaagatccatatctctataaaaactcacaattacatacaccacacaaaacacaaaattaaccattaaccaaccacatagaactgtttgttctttttttttttcccctcaaaggaaaaaacgaaaacaaaaaacaaaaactttcttcccaactccccctagtgttgtgcagcatactgattaataagcgagagagcattgctagtaacctgagcaacattgaccattctagccctaatcgcctccttaatcttcccattcagcgccttcccggcgaacccatcgccgcatgtgctctcatcggtcaaagccgaactcacccacgtatcaacggtgctgatgtgccacgtga

SEQ ID NO: 210451 - DNA, 585 bp, Glycine max
  unsure (1)..(585): unsure at all n locations
cgaatacccgataacatcggtaaccttacccgattagatgtactcagtttaactggtaaccggttcatcggacccgtaccgagttcaataaccaagttgactcagctcactcagctcaaactcggtaacaattttctcaccggaacagttccccaaggaattgccaagctcgttaatttaacctatttgagtctcgaaggaaaccaacttgaaggtaccataccggattttttctcttccttcacggatcttcggattcttaatttttcttacaacaaattttccgggaatatccccaactcgatttcttccctggcgccgaaactgacgtacttggagcttgggcacaactcactttccgggaaaatccctgattttctgggaaaattcaaggcgcttgacacgcttgacctgtcatggaacaagttttccggaacggtccctgcgagtttcaagaacctgacgaaaatcttcaacctgaacctctncaacaacctcctggtggacccgttccccgagatgaacgtgaaagggatagaatcgttggacttgtcgaacacagttttacctgggagcattcccagt

SEQ ID NO: 210452 - DNA, 483 bp, Glycine max
cacaaaaagagcaaattatattaattattatacccattcaacttactgttttaaagtaaatatatatagtatatattgaaagttaaaattacaatttacttattaaattacataattattggaaaacttagcagtaaaaggaaagtaagcacttgaaatcatcaacaactaagcttactacacttatgctttgttgcaaggtggcataggagaaccacagagacaattatttgcaacaaaagcacttgccggaaacttattcttgggaagctgaccactaagatggttatagctaacattgaacttctcaagcccaacaacactgtttggaaccttcctaaacacccaattacgagacagatccaataacttaatcctctgcgcaaaccttaacttgcccaaatcaaactcaaacttgttgcccgaagcccaaaaccttaccagatactcagtactatttaccaacccaattgcactccctga

SEQ ID NO: 210453 - DNA, 509 bp, Glycine max
caaacttgaagcattgcattctgctatttaattccactacgtacacgcacattctcctcaaagacaacaatggcaccaacagccaagactctgacttacctggcccaggagaaaaccctagaatcgagcttcgttcgggacgaggaggagcgtcccaaggttgcctacaacgaattcagcgacgagatcccagtgatttctcttgccggaatcgacgaggtggatggacgcagaagagagatttgtgagaagatcgtggaggcttgcgagaattggggtatattccaggttgttgatcacggtgtggatcaacaactcgtggccgagatgacccgtctcgccaaagagttctttgctttgccaccggacgagaagcttcgttttgatatgtccggcgccaaaaagggtggattcattgtcttcagccatctccaaggggaatcggtgcaagactggagagaaatagtgacatacttttcgtacccaaaaagagagagggactattcaag

SEQ ID NO: 210454 - DNA, 532 bp, Glycine max
aataaagacagcgccacttattttcatttataatagaggcaaatataaggcatacatagatgagccagctagctaataagacataggcaactgaacacaacacatgatatccccacaaaggataaaccataagacgtacaaaagcacaaaggtcaggactattattaattcatggcccttaaaaaatactaaaaacaccaagggggcatgcaaatgatacatatgtaattattattaattaagcaagaatctccttcaaaggcttggcctcaagttttgcctatcgatcaagttcttgcaaatgctttgcattctcaaggtcctgcaaatgcttgtccttagccagcttattgatccttgcaatctcaatgtccttgctcatcttcctcctgtacatttcagcaaaagtgattggttcctacatcacaggcttctctgcttgtcttatcatcagagggtaaacagttgcattaggtgctgggttttgcaaagtggctatggacaaaccgctatggtttgagttcaccaccgc

SEQ ID NO: 210455 - DNA, 562 bp, Glycine max
aaagcagagaagtgagatacactaagttatcctcataaatacactctaattaggtggcaagataagtgtctaaccttagtaacattgccacatattgtgttcattttggaattgtgccactaaaattctattcaattcatctatggctgcctcttcttatgctatgcaatcaatcctggcaaaccctttgatccgcatttccagcgggtctagggtgaaccaatttggcgttcctgctttgcacatgagaaggaatgttggcctgagagttaggtccatggctaaggaagaacaaccaagtgagcctgcaaccccagttacaccgccaccatcagtagaacccaagccacagccagtctctgctccttcaccaaaggtgagcactaagttttctgatgtgttggcattcagtgggccagcacctgagaggatcaatggaaggttggccatgattgggtttgtggctgcaatggcagtggaagtagccaaagggcaaggtgtgctagaacaaatatccaatggtggcatcccatgtttcttggggacaagtgtggtccttacc

SEQ ID NO: 210456 - DNA, 569 bp, Glycine max
atgattaacgatttaattttgatatgtagattaaataaacacacgaagtacaaataaacattggtctctctaatcacaaaggagattaagtccattgtggtgtgccttcatgactgaattataccaaagtactacccttaacatactcagtaaaagccagagcaatcaaacccaacatagcaaatctcccattccacaggtctgcatctgaggacatgaaccctttggacttagactccacgctgacaccttggaagagtggaatcaaggaagcaagggtaaggaccacacttgtccccaagaaccatgggatgccaccattggatatttgctctaacacaccttgccctttggctacttccactgccattgcagccactaacccaatcatggccaaccttccattgatcctctcaggtgctggcccactgaatgccaacacatcagaaaacttagtgctcacctttggtgaaggagcacagactggctgtggcttgagttctactgatggcggccggtgtactggggttgcaagctcacttggtagctcttcttagccatggacctac

SEQ ID NO: 210457 - DNA, 544 bp, Glycine max
  unsure (1)..(544): unsure at all n locations
gattctctattgtgcgttgccctgcttcagcttcagcttcatagggcttgttggcggtgtcagaatcagaagaacacaaagctcactgaatcgaagcccttcattttgattttcttcctcgtcactgcgcatcatgtacagagttgcagcttcatcattcagaaggcatctcaagggccatggaggtaacttgggatccattaggttttcaacttcggccgcggtagctgcaaggacttcatctggtggtttgtttagctggcttactggagagcgttctagtgctcttcctcctcttgacataccccttggtggcgttgctctcccagattcacttccagatttcgtcgaacaaagcaagaccaagatcacaacactctccaatggactcagaattgcatcagagacctcgcctaaccctgcagcttcaattgggttatatcttgactgtggttccatctatgagacgccattttcaagcggcgcttcacacttgctagagcgaatggctttcaaaagcacatcanaccgtagtcactttcgc

SEQ ID NO: 210458 - DNA, 449 bp, Glycine max
agctagtaaacacgtacagcatatcatattaatgccctgctcgacgccatgcgtctactagtcgtcgggcgcccttcgatgggctaataacaacacttatttttggagacgaaaactgaaactctatgggcacgcaaacacatcatcgaaaacagccaagctgaacgagagggccgattatgcccattgccaaacgtgacgccctagctatgccttaacaaccgcgccaggctatgaatgcccacaccgaagcgtacacgaaccataacacgggatgcctctatcacaaagactcgaacagagggactgacgtacagactcagacttgatactatgtagcaaccaaaatgggatccctaaagtcatctcaattgccgtggcatcaacacatggctattgcaaaaaccctggcatatcccatggcaatgagcctggatgcacaccatact

SEQ ID NO: 210459 - DNA, 607 bp, Glycine max
  unsure (1)..(607): unsure at all n locations
gaccgataccgtttctttcaccttcaacaagttcaacccagtccaaccaaacattatgctccaaaaagatgctagtatttcatcctctggggtgttacaactcaccaaagttggcagcaacggcgtgcccacctcgggatctctcggtcgtgccctttacgctgccccaatccagatttgggacagcgaaaccggcaaggtagccagctgggctacatcctttaaattcaacattttcgcacccaacaaatcaaactcagctgacgggcttgccttcttcttggcacccgtcgggtctcagccccaatccgacgatggatttcttggtcttttcaacagtcccttaaaggacaagtctctccaaaccgtggcgattgagttcgatactttctcgaacaaaaaatgggatcctgcaaaccgacacatcggcattgacgtgaactcgatcaagtccgtcaaaacggcatcngtggggttgtccaatggacaagtggcggagattctcgttacctataatgccgncacgagcctcttggttgcttctctgatccacccttcaaagaanacaagttacatcctctctgacacagtgaacttgaagagtaat

SEQ ID NO: 210460 - DNA, 458 bp, Glycine max
agacggagtaaaacacctattattatataatttttgtgacaaacattattagtagcaccagcctctagcaagctagggcgttattacatttttcttttgtcacatttaactacgatgtttgaagctagatggcctcattgagcacaaagcttggaagatccaaagcatcattgctgctaccatctgacaacttggaagcaaaagaccaagaaatcacatcatgggtttcaacggagccttcatgcaacccggtggtggcagagaacccaacgctcacccattcgggaagattactcttcaagttcactgtgtcagagaggatgtaacttgttttctttgaagggtggatcagagaagctacctagaggctcgtggcggcattataggtaacgagaatctacgcacttgccattggacacccccacgatgccgtttgacggactcgatcgagttcacgt

SEQ ID NO: 210461 - DNA, 418 bp, Glycine max
cgaatacccgataacatctgtcacctttcccgcttagaggtactcagtttaactggtaaccggttcatcggacccgtaccgagttcaataaccaagttgactcaactcactcaactcaaactaggtaacaattgtctcaccggaacagttccccaaggaattgccaagctcgccaatctaacctattggagtcttgaaggaaaccaactggaaggtaccataccggacttactgtcttccttcacggatcttcggattcttaattcttcttacaacaaattgtccgggaatatgctcaactcgatttcttccctggcgccgcaactgacgtacttggagctcgggcacaactcactatacgggaaaacgcctgatcctctgggaaaatgcactgcgcttgacacacttgacctgtcat

SEQ ID NO: 210462 - DNA, 554 bp, Glycine max
  unsure (1)..(554): unsure at all n locations
cacctttgttcactcttcttctcttgcggctagggttttagcgcagcttcttctagatttaaggaagatgggtaaggaaaaggttcacatcagtattgtggtcattggccatgtcgactctgggaaatccactaccactggtcacctgatttacaagcttggaggcattgacaagcgtgttattgagaggtttgagaaggaagctgctgagatgaacaagaggtctttcaagtatgcctgggtgctggacaaacttaaggctgagcgtgaaagaggaatcaccattgatattgctttgtggaagtttgaaacaacaaagtattattgcacagttattgatgcgcctggacatagggatttcattaagaatatgattactgggacatcccaagctgactgtgctgttcttatcattgattcgacactggtggttttgaagctggtatttccaaggatggacagactcgtgaacatgctctgctntcattcacccttggtgtgaaacagatgatttgctgctgtaacaaaatggatgctactacacccaagtattc

SEQ ID NO: 210463 - DNA, 503 bp, Glycine max
tttgtttttttttttcttgaacactacaaattgaaagttgacatttaataaaccaaagcaacacaacgcagcaaagtcctgaaactcgctgcgcttaacaaaaatgtgatcaggggttccgacaaacacaacacattaaaacacagatgaataaaagcaattttgccaccgtcgatcaagaacccagttctgggaacaacagttgcgagatgatggtggagacttcaaactttgtccgaaaaacaagctacctagaaaagaggacacaagagtacagaaaagaaaccaacatttattgtaaccaacatcccctgatgaaccagcccgcacgattcacttgttgttctgggcagccttggtgaccttggctccggtaggatccttcttctcaacgttcttgatgactgccacagcaacagtttgacgcatgtccctaacagcagacctaccaagtggaggatactcggagaaagtttcagcaaccatgggtttggttggaatca

SEQ ID NO: 210464 - DNA, 464 bp, Glycine max
gttactgcactgactcctgtgctcacaaatcgcatgcattgtcaaggccatgtggcggctgctctaacgagaggcggcgtggatatcactggaccttacgcgcatactattaatgattatgggacaactgacaccctgccatttgctgcaatgggatcaggtttacaggctggaatgcctgtgttcgaggctaagtacagtgaacgccaggagtagcgatgaaggcattgggctagatgatgacgcgatctgtgctggtgtatttaatgagctaggacgtgataggcatgttgatgttggcgtgattgccaagggacataacgaatatcacaggaaccaccttctaccaggtcctcgtacctatgataatccacacggcgttagatttcccaagcagacagctgttctattaacatagattacaccgtcgaaggagaaggttgaagtgattgaaggatatgcta

SEQ ID NO: 210465 - DNA, 519 bp, Glycine max
agataaggaagttcaaagagatatgaagcttgttccttataagattgtcaacaaggatggaaaaccttacatacaagtgaaaattaaggatggtgagaccaaggtgttcagccctgaggaaatcagtgccatgattctgactaagatgaaggaaactgcggaagcattccttggaaagaaaattaatgatgccgtggtcactgtcccagcttacttcaatgatgctcagaggcaggccaccaaggatgctggtgtcattgctggtctcaatgttgctagaattatcaatgaacccactgctgctgccattgcctatggattggacaagaaaggtggcgagaagaacattctagtctttgatcttggtggtgggacctttgatgtcagtatcttgacaattgataatggtgtttttgaagttcttgccacaaatggagatactcatcttggaagtgaggactttgatcagagaataatggagtacttcattaaattgatcaagataaagcatggaaagga

SEQ ID NO: 210466 - DNA, 493 bp, Glycine max
ttgattttgttttttatagaagtgaaacatgggtcattcatacagctgaagaagtttcttgggaaaactacgcacaaaagtaaagtacaggtgatttgacaaaggatcttatcatcgccaccaaaaaagcaagcgcaggggacttcttgattgccagctatcatagcaatttaacagactccgactaatctagagctcatcgtgagaatcgttctcgtcttgttggtctgatgcaccaccaccgggtggggcttctgcagatctgtgatacacagcactaatgattgggttgcaaacagtgttaacctccttgagctggtatgatcatgatctgtgtccatactctggttgtcatccaggcattccagtgcttgtctcacagcggtctgaatttgccacttgacatcagactccaactagtcagcgagcttgaccttgtcactgatctgggacgtgatgacgtatacatagagattcaagactgttgcgagca

SEQ ID NO: 210467 - DNA, 601 bp, Glycine max
  unsure (1)..(601): unsure at all n locations
cgcgtcgactgcgtcatctccgacgacgactcctcttcctccgccgccgcctccgacaagtcccgcggccccttctggaacctcctccgcctcgtcttcggcggaatcgtgaaacccatccaaaccctcggtcagttcctcggccccaaacgcccctcctactcctccgtcacgttcccttgctccaccacctcctcctccaccctcgccgtcggaaccgacgacgactccgacgccggcgtcacccaccactccccgacgcaagtcctcaaaaacttcaacgagattcgcctcctccggatcgagctccccagcggcgagctaggcatcgaagacggcgtgctcctcaaatggcgcgccgatttcggatcaactctcgacaattgcgtcatcctcggcgcctactgcgtcttccaccccaaagacaacctaaccgaccccatccacaccaccaattgcaacgcatacgacgacaacggaagcatccctgattccttctacaccaacggcggtctcaaactgcgcgttgcgtggaccatcagtttcctcatcgctgcctgcgccaggcattacttgctccaacccattatctncgagcacg

SEQ ID NO: 210468 - DNA, 522 bp, Glycine max
gaagaagtttagtgggaaggatgttgtcttgattgccacaaggaggatcgtgcgaccgccaaagaaaggctctgctgttcagcgaccccgaacccgcactttgaccgctgtccatgatgccatgctggaggatgttgtgtatcctgcagagattgttggcaaacgggccagatatagaattgatggctcaaaaataatgaaggttttcttggaccccaaggagcgcaacaacactgagtacaagctggagaccttttctggagtttacaggaagcttactggaaaagatgtagtatttgagtatccaatctcagaagcctgagatgctgctgcttggtttaatggagtattgtttttttggcagatttttctgttagaattacatatttatgttaaacaataaccaaaattttgacttctggaattttatttgatgcttcttcaccttgatgacattaaaatcaccaagggagagtattttctgtggctatacttggatttagattggttttcctttaggat

SEQ ID NO: 210469 - DNA, 514 bp, Glycine max
atcctaaaggtaaaccaatctaaatccaagtatagccacagaaaatactctcccttggtgattttaatgtcatcaaggtgaagaagcatcaaataaaattccagaagtcaaaattttggttattgtttaacataaatatgtaattctaacagaaaaatctgccaaaaaaacaatactccattaaaccaagcagcagcatctcaggcttctgagattggatactcaaatactacatcttttccagtaagcttcctgtaaactccagaaaaggtctccagcttgtactcagtgttgttgcgctccttggggtccaagaaaaccttcattatttttgagccatcaattctatatctggcccgtttgccaacaatctctgcaggatacacaacatcctccagcatggcatcatggacagcggtcaaagtgcgggttcggtgtcgctgaacagcagagcctttctttggcggtcgcacgatcctccttgtggcaatcaagacaacattcttcccactaa

SEQ ID NO: 210470 - DNA, 580 bp, Glycine max
  unsure (1)..(580): unsure at all n locations
attatattaatcttgcaattggctagttctctgtcttcaaattccaacaacaccaaacaccatgaacaaagttcacatcctggcgttcccatacccagcacagggccacatcctcccactcctcgacctcatccaccacttagccctacgaggcctaaccgtcacaatcataatcacaccaaaaaacgttcctatcttaaaccctctcttatcctcgcatccaaacacggtccaaactttagttctcccattccctccccaccctaacatccccgctggcgcagagaacgtccgtgaggtcggcaacagaggaaactaccccttcatcaacgccctctccaaactccaaccagaaattatccactggttcgcaacccacagtaaccctcctgtagcactcgtctccgatttcttcctcggttggactcagcaactcgcttcccaactcagtattcctaggatcacgttctactgctccggcgcgtccttaatcgccatcctccagcgctgctgganaaatctacacttttacaattcacagggagataataatattattaattttcccgaaattcccgga

SEQ ID NO: 210471 - DNA, 551 bp, Glycine max
taagaattaagaaaataagatgaaagactaaaaatgttttttagtcttattttttatgtaggagtttgaaagtgaaataaaattaaattaaatggacaaattttcaaagtaaatattatctttaattatttggactttagaaaaagatgggagtaataaaatgagtttaatacatgaatttttaatattttcttatacatttttagggcattatgtggtttgttaatttttttaaacagtaaccctctttttttcttagtctaaatgattttttaatttttaccaaattatattattttcattttgattatttttttcatatttctgataatttttttggttgcattttagcctttatgtttagtgatgacgttattaataaaaattaaacaaaaaacctaatatttcttaaatagggaaactaaatgtaaaattttcaaaacaagagttatttttggtcctattaaattaatattttttcatttctgatctacgtaagtttgtttttttcttttttgaaatttagtgtatgtcaattggtgcttgtttaa

SEQ ID NO: 210472 - DNA, 497 bp, Glycine max
gagagaggtaggacacatgaggaggtagtggggtgcaatgaaaaagggaagggaaggggggtgggattggaatgagtatactatacatgttgttgtggtgtggatgaagaagacacctcactgaattaaattaaccagggaaaacccactcttgctcatttgccttctctttctctaaaacaccaaacccctctatacttctttctatcaaacacagtgcgtgcttttttgttcgtgttcttgttctttcgttctcctaattgtttcagtttatgagtgaatgaaatgggggacaagcaccagcagcaccaggaagactgcagcgatttcaccttcgaggacgaatgcaccgaagattaccggcgctgcggctaccacgccgtccgaatcggcgacaccttcaacgccggtcgctacgtcgttcagagtaaactcggttgaggccatttctccactgtctggctcgcttgggacaccagacattctagatacgtggc

SEQ ID NO: 210473 - DNA, 369 bp, Glycine max
cacctctgctgttcatcatgcagcattctgaggtgatactgctatgtagcagctcaatgaggtggtccgcgagaccggtggcgcctgtaacggtccaaccaacatgcaccgtcccgtcaatagtgctactcatagcacttgacctgctcctgctcgcaccaagtacctgagtccattctcagagcagattccgtcattcgtgaccggagaattcgctggtgactacagatgggacactgctggactatacagctgacccggaaaccttagacaggaaccaggcgctggaggtgagccacagcacattgtccatgctcggtgcacttggctgtaccttgccagagatgcttgcgaataatggcctgaaat

SEQ ID NO: 210474 - DNA, 573 bp, Glycine max
gctattgattgagactgagtatgatttttgcgatgctgagattcttgttgaagacatgcgtgtgggtattcatcgctgcatattggcgtcgcgtagtctgtttttccatgagctttttaagaaagggactgatggatcaggcaaggaaggaaagccaaggtatctcatgtcagatttggtgccttatggcacagttggatatgaagctttccaagtgttcttgtactatttgtatactggaaggttaaaggcttcaccaacagaagtgacaacatgtgtcgatgaaacatgtacccatgatgcatgccggcctgctatcaattatgccttagagctgatgtatgcttctgccacttttcagatgaaagagctggttatactttgtcagcggcatctactaaattttgttgagaaggctcttgcggcagatgtcattcctattcttatggctgctttcaactgccaactagaccagcttgtctctcagtgcattcgtagagtagcaaggtctgactttgacaacacatgtttggaaaaagagcttcctcgtgaagttgtgactgaaatcaaatt

SEQ ID NO: 210475 - DNA, 389 bp, Glycine max
atttgactttaatagaagttgatacctttgaggggatgaaccgaggatttgcactctcggaggcctcttctcgttcagatgctaaggaagcctataagcgactgcagaagagagatgttgcatttggagttgatatgcctgcataggtttcctttgccgactctcttattgaactgggtgatgaaattatggcacaggttaaaactgtatttattgattcgctgcctccttcatggaatgaagattatgtccgagatcttctcatgaaatatggagagattgaaaaagtcgagcttgctaaggacatgccatctgctctgacgaagaattatggatatgttacacttagtatcacatgatgctgctgctgaatgtgctgatagcattac

SEQ ID NO: 210476 - DNA, 589 bp, Glycine max
tcgagctgatgctaaagtaataagccttggaattggtgatacaactgaacctattcctgaagtcataactgatgcaatgtcaaagagatcacatgcattgtcaactatagaaggatacagtgggtatggagctgaacaaggtgaaaagccattaagaagggcacttgcttcaacattttacagcgatcttggcatagaagaggatgatatatttgtctcagatggagcaaagtgtgatatatctcgtctccagattgtctttgggtcaaatgtaaaaatggctgtgcaagacccttcatacccggcatatgtagattcaagtgtaattatgggccagactggcctctaccagaaggatgttgagaagtttgcaaacattgaatacatgaggtgtaatccggaaaatggtttctttcctgatttatcttcaatttctcgaccagacataattgttatctgttctgcgaacaatcctactggtgttgcggcaacaagggaacaactgacccaactcgttcagtttgctaaggacaatggttctatagtaatccatgaatcagctcatgcaatgtatatttctggtgacaac

SEQ ID NO: 210477 - DNA, 563 bp, Glycine max
aacaccatggcctccccaacactaatatcccccaaatcagtcaaatcactttcacccatcaagcccaaagccaccaccaccaccaccaccatcgccgccactctcacaccatccaccaccacccaccctcgccgccgggaattgttgtccatcatcaccaccacatggttgctccctctgagcccggcactggcatcctcggacgaggaatacgtgaaggagacagaggaagtgatcaacaaagcgaggacgacaatcgtgatggacaagaatgaccccaacgtggcaaccgcggtagcggagttacgagaaacctcgaactcctgggtggcaaagtacaggagggagaaagcgcttcttggacgcgcttcctttagggacatatattccgcgctcaacgctgtgtcgggacactacattagcttcggaccaaccgctcccattcccgccaaacgaagggcaaggatcttggaggaggtcgacactgctgaaaaggcgcttctaaggggaagatgattgacggggaaaaaaggtgttctttctttttttctttgtaatgcatc

SEQ ID NO: 210478 - DNA, 473 bp, Glycine max
tctttctttttttttttttttttattttttttttgatcgattgaatttagtaataaaactggctccatcatgtccatcacggaaaacagcctccatatttgttcatgactatatgactgcatacatgcatctcttcccctgcgaatgaacggcataagcgagagcccatgacagttacctccgtgtgctacattacaaagatagcacgaataaaccccttttttccccctcaatgatattccccttagaagcgccttttcagcagtgtcgacctcctgcaagatccttgcccttagttcggcgggaatgggagcggctggtccgaagctaatggaatggcccaacacagcgttaaccgcggaatatatgtccctaatggaagcccgtcctagaaggcctatctccctgctgtactttgccacccaggatttccaggctgctcttatctccgctacccgggttgccacgttggg

SEQ ID NO: 210479 - DNA, 562 bp, Glycine max
agcaccatggccttgccaacagtaatatccccgaaatcagacaactcactctcacccatcaagccccaaggcaccaacaccaccagcaccatcgccggcactctgacaccatccaccaccacccagcctcgtcgccgggaattgctgaccatgatcaccaccacacggtcgctccctatgagcccgggactggcattctcggacgaggaatacgtgaaggagacagacgaagcgatcaacaaagcgaggacgacattcgcgatggaccagaatgaccgcaacgtggcacccgcgggagcgcagctacgagagaccttgcactcctgtgagggcccgctcaggacggagaacgcgcttattggactgcgcttgctttaaggacatatattccgcgctcaacgctgtgccgggacactacattagctctgaccaaccgcttccattcccggcaaacgataggccaggatcttgtaggaggtcgacactgctgaaaaggtgcttctaagtgatgatgattgctgcggaaatacggggcacagggagattatcttagtaatgaatc

SEQ ID NO: 210480 - DNA, 595 bp, Glycine max
  unsure (1)..(595): unsure at all n locations
cttcctcttcctcgtacacagagtttatcacaggtgagcgactgaaaggtagcaatggcgaacaggaacctggaaaagatggcatccatcgatgcacagcttaggcaattggctcctgccaaagtgagtgaggatgacaaactgattgagtatgatgctcttctgttggatcggttccttgatattcttcaagatttacatggggaggatctgaaggaaacagtccaagaagtatatgaactttcagctgagtatgaaggaaagcatgaccctaagaaactggaagaacttggaaatttgataaccagtttggatgctggggactctattcttgttgctaagtccttttcccacatgcttaatttggccaacttggctgaagaggtccagatttctcgccgccgaagaaacaagttgaagaaaggggattttgcagatgagaacaacgcaactacagaatcagacattngagaaactctcaaaaacttgtatttggcttgaagaagtctcctcaggaagtttttgatgcactgaanaaccagactgttgatctggttcttactgctcaccctactcaatcaattcgtagatcttt

SEQ ID NO: 210481 - DNA, 487 bp, Glycine max
gttaagcataatttccgtcttgaaacataacacatcaatggcatgcctcatttgcgtggtagctgactctttcagcgcagaaaggtggtgtagcataataacaaaacaaaacaaaacaaagtgcatctgagaacaaaactagagcactaactttcagcgctgcaaccatattcatgctatcttgatagtaataaaaaaaaggaaaatacaagtaataaatgactcaaacaaacttaaccagtgttctgcatgccaacagcaatacccttcatagtgagaatgagggtgtcttctaaaccaggagcatattcactagtcgggttcagatttataagttcatcagctgatttgcttgcctctgcagattcctttgatatgcgggggcgcaccttcacatcgtagttaggatcacggatacgtctcaatgtgtaagctcggacaatattgagggcggtaatgggagcatgacgaatcctgagtctttgct

SEQ ID NO: 210482 - DNA, 572 bp, Glycine max
caacagcacaaagcgggttactgtctgttcaagctaccatctctctctctctttcttagtgcctccttgccagaagttaaaatggcccaagaaactttcctattcacatctgaatcagtgaacgaggggcaccctgacaagctctgtgaccagatctccgatgctgtgctcgatgcatgcttggagcaggaccctgacagcaaggttgcctgtgaaacctgcaccaagaccaacatggtgatggttttcggagagatcacaaccaaggccaacgtggactatgagaagattgcgcgtgacacatgcaggaacattggttttgtctctgatgatgaaggtcttgatgctgacaactgcaaggtcctcgtcaacattgagcaacagagtcctgatattgctcaaggtgtgcacggccacctcacaaagaggcctgaggagattggtgctggtgaccaaggtcatatgttcggctatgccactgacgagactcccgagctcatgcccttgagccatgtccttgccacgaagctcggtgccaagctcaccgaggtttcgaagaacgggacatgccc

SEQ ID NO: 210483 - DNA, 425 bp, Glycine max
ttttcttttcattttcgttttactgtttgtttatgcttccattttttttttttttttttagtgcgttcttgccagaagttaaaatggcccaagaaactttcctattgacatctgaatcagtgaacgaggggcaccctgacaagctctgtgaccagagaaaccaagctgtgctcgatgcatgcttggagcaggaccctgacagcaaggttgcctgtgaaacctgcaccaagaccgggtggtgatggaaatcggagagatcaacaaccaagccaacgtggacttgggaaggaagcgcgtgcaaattgcggaacattggttttgcctccgatgatgttggccaagatgctgacaactgcaaggtcctccccccattgatcaacagagtcctgatctcgctcaaggtgtgcaccgccaccttacaaaga

SEQ ID NO: 210484 - DNA, 511 bp, Glycine max
  unsure (1)..(511): unsure at all n locations
ccttctttctaaactaaccaactttttttcaaacaaattcgattctttcttcatttttaacctaattttcttttcgatccaaaaaatggctctctcgcgcgttgttgctcaatcgtcgcaatcgaatcttctgaaacccctagcgtcgtacttatcactacgacgccgttcggtttcgacttcgtcagacccactcacgatagagacctcggtgcccttcacctcccacaactgcgacgcgccgtcacgcgccgtggagacctcctcggcggagctctttgcgttcttccacgacatggcgctgatgcggcggatggagatcgcggcggactcgctctacaaggcgaagctgatccgcggcttctgccacctctacgacggtcaggaggctgtcgccgtcggcatggaggccgccatcacgcgcaaggactgcgtcatcaccgnctaccgcgaccattgcaccttcctcgcccgtggcggaaccctatcgagatcttctccgagctcatgg

SEQ ID NO: 210485 - DNA, 502 bp, Glycine max
gtccccagttggaacccatttccgtagtcaaaaccccagagaacgtagccacaagggcaaaacccttccccccgccatggcacgcgtatcccggtcctcccccccgcgcctcctctactccctctgctgcaccactgcatcgcggtcaccggcgtcgtccctcatcggcggcgccttccatctccgccacttttcagccgggaacgcggcgcgcacgaagccggacaaggagccgtggtggaaggagtcaatggagcggctccgcaacatcggaatctcggcgcacatcgactccgggaagacaactctgacggagcgggttctgtactacactggtcggatccacgaaatccacgaggtcaggggcagggacggcgtcggcgccaagatggactccatggacttggagagggagaagggaatcaccattcagtctgctgccacctactgcacttggaaagattataagattaacattattgacacgcctggtcatgttgat

SEQ ID NO: 210486 - DNA, 415 bp, Glycine max
gtgttatttctgctgcacctgttacagaagcttgctttacctatactactttttgaatttctctagcatgaccaattatctagtacgaacaacgggctctttctgcaactatctctttgagcgcaacttcctgccaccaccggaacctgtactccaagcccgatagatggcctcctagtcatgctgaatgagccacatttctcgctgaagcttcacgctctctgcaacctcacggacgggctgattgcgtaacgacctgggattgcacctactccacctaaaatggaatgcttgcatgaacctgaggagtcagttcaccatcaaagggcacttgctggacttcttgtatcaaaggacttttattacctgtgtgaacctagtgactcggtgactcatgcccttggagcttgtcctg

SEQ ID NO: 210487 - DNA, 494 bp, Glycine max
cgaacccgtcgtagcagaaaaacttgtcaccatggtttcttccgacaaggatccacgagaggatgtccttcaagcctggtacatggatgatagtgatgaagatcaaagactcccccaccacaaagaacccaaggagtttgtctcgttggaccaacttgctgaacttggagtccttagctggaaactagatgctgataaccatgaaaatgatccagagctgaagaagattcgtgaagagcgtggttacacctacatggatgtttgtgaggtctgcccagaaaagttgccaaattatgaacagaaaatcaaaagcttctttgaagagcatcttcacactgatgaggagatccgcttttgtgctgctggaagtggctattttgatgttagggatcgcaatgaagcttggattcgtgtgtgggtcaagaaaggaggaatgatcatcttacctgccggaatttatcatcgctttacgctagatgaagagcactacatta

SEQ ID NO: 210488 - DNA, 554 bp, Glycine max
aaaaaaccttcacctaccactttataaaacccgtcccttctcttctcctttcccaaatcatttgatcactctgtattgtgttttgttccttccttggttcgttccctccacaaaccaaaaacccaacaaaagaacgttcatttttcattttcgtttctaataaagagcatggccggtggttctatcaagagacattctttctccgaagaggaccatggtttcgcttcttccatggagcctgggtattctgggcacaaccaccacttccatcatggtttcgtgtctaggactttgggttatggcactttctacaaccgaggtgttaggagccattcgattttctcgccgagatctgggagattttatgatgcaagattcgaagatcaccaaccccactttcttcaagcttgttctctttgcaagaagcgtctcggggataatagtgacatcttcatgtacaaaggggacacgcctttttgcagcgaagagtgtagacatgagcaaatggagagagacgaagcccaagagatgaataataacctttcttcttcgat

SEQ ID NO: 210489 - DNA, 517 bp, Glycine max
  unsure (1)..(517): unsure at all n locations
gtttcctctgatcgtgtcagaaatataaaagtttatttcctctgatcgtgtggtttctgagttctaagcactcacctctttcatacacgtttgttcgcttgttgagaagccatgggcgaggatttcgagttcccaagtgctggcaacatggaaatgcctgaggaggaagagtttgagagtccgatcctgaaggttggggaggagaaggagattgggaaaatggggctgaagaagaaattgctcaaggaaggtgaaggttgggacacccctgacagtggagaccaagttgaagtgcattatactggaaccttgcttgatggaaccaaaatntgattctagccgcgataggggcacccccttcaagttcaagctaggccaagggcaagtgataaagggatgggatgaaggtatcaaaccatgagaaaggtgagaatgcccttttcacatacccccgaattgcttatgagagttgggtctctccactatcccccaatgcaacttgagttgagtgagtgct

SEQ ID NO: 210490 - DNA, 585 bp, Glycine max
  unsure (1)..(585): unsure at all n locations
aacacaacaaaaaaagacaacccagagagcgcgtcttaataaacgctcttctctgaaaacccccatttcttttcttctttcttcttctctttcgcttcttcgatcttcgatcttcgtcgctgaaaatgagagagtgcatttcaatccacatcggccaggccgggattcaggttggaaacgcctgctgggagctttactgcctcgaacacggcattcagcctgatgggcagatgccaagtgacaagaccgttggtggaggtgatgatgctttcaacaccttcttcagtgaaactggggcaggaaagcacgtgccccgtgcgatttttgtagatcttgagcccactgtgattgatgaggttaggactgggacataccgccaactattccatcctgagcagctcattagtggaaaggaggatgcagcaaacaactttgcccgtggccactataccattggaaaggagattgttgagctntgcttggaccgcatcagaaagcttgctgacaactgcacaggtcttcaaggttttctggttttcaatgctgtgggtggcggaactggctctggactnggttccctttgct

SEQ ID NO: 210491 - DNA, 459 bp, Glycine max
gaaaataattagatgcatatatttgactttggtgttattttgggatttttgtaattaaataacacaaacactgacgttcatcacacatgtgtagggcctgtttcaacttaaaattaaaggaataacattggcccatgacgcgacaggtgcaccacctagtaatcataattttacatctttacatacaaaaaacaaagactttaaattttaaaaagaagaaaagagataaacagatcatcttaatgaaatgaaaccaaaacccacaaacattggctagatttttgtagttgttgttgaggccaacatgattaatcatgaaccgagagaacgaatcactttgactttaagggaatggccctgattaccaactgccgtttgagtgctgcaagagctgaacttgtgaatggtgccacccaaaacatccacagtttatgcgaaacaggggacttgttgaagatg

SEQ ID NO: 210492 - DNA, 590 bp, Glycine max
  unsure (1)..(590): unsure at all n locations
ctttgtatcacgaaaactatacgattcgattccttgttttcaatggacaccttcttcaattctcaatcttcttcttcttcgagaagccgctggagttacgatactctcaagaatttccgtgagatctctccgctggttcagaatcacatcaaacgggtttattttacgttatgttgcgctgtggtggctgctgctgttggagcttttcttcatgttctgtggaacattgggggttttctcaccacgttggcttccattggaagcatggtttggttgctatctacaccccctgttgaagagcaaaagaggttgtctctgttgatggcttcggccttgtttcagggcgcttccattggacctctgattgatttggctattgccattgatcctagccttattgttagtgcatttgtggcaacttctttggcttttgcttgcttctctgcggcagctntagttgcacggcgtagggagtacctctaccttggtggtttgctttcttctgggctgtccattcttatgtggttgcactntgcttcctctctctttgggggctcaatggcactcttcaagtttgagctgtactttgg

SEQ ID NO: 210493 - DNA, 552 bp, Glycine max
gttacggcactgactcttcttaagaaacacctgttcaattatcaagggcatgtctcagctgctttagctctcggcggcgttgatatcactggacctcatttgcatactatttatcctcatgggtcaactgacaccctcccatttgctacaatgggatcaggttcacttgctgcaacgtctgtatttgagtctaagtacacggaaagtttgagtcgggatgaaggcattaagctcgttgttgaggcgatatgtgctggtatatttaatgacctaggaagtggaagtaatgttgatgtttgtgcgataaccaagggacataacgaatatctcaggaaccaccttctaccagatcctcgtacctatgtcaatccaaaaggctttgatttccccaaatagacagaggtcctcttagcatagattacaccgctgaaggagaaggtggaagtgattgcaggagatgctatggaagagtaacaatcattgcaaataaatatggtgtatgagtttgagacttgattagtgcaatggctgtgatatttgatttgtactttc

SEQ ID NO: 210494 - DNA, 458 bp, Glycine max
gaaagtacaaaatcaaatatcacagccattgcactaatcaagtttcatactcatacaccaattttttttggaatgattgttactcttccatagcatttccttcaatcacttccaccttctccttcaacggtgtaatctttgttaagaggacctctgtctttttggggaaatcaaagccttttggattgacataggtacgaggatttggtagaaggtggttcctgagatattccttatgtcccttgggtatcacacaaacatcaacattacttccactttctaggtcattaaatataccagcacatatcgcctcaacaactagcttaatgcctttatccctactcaaactttccttgtacttagactcaaatacagacattgcagcaagtgaacctgatcccattgtaacaaatgggagggtgtcagttgacccatgaggataaaatagttgcaaatga

SEQ ID NO: 210495 - DNA, 607 bp, Glycine max
gctaacaagagattcaagaccggcatggctaatgaagaggaacagaaaaaccacctcttcggcatcaaagatctcggtcacaagactctccttcagagtgatgcactctatcagtatatacttgaaaccagtgtctatccaagagagcacgagtgcttgaaagagatacgcaagatgactgcaaaacacccactgaacatcatggcaacaccagcagacgaaggacaacttctgagcatgcttgttaagctcacgaattcaaagaacgccttggaaattggtgtattcactggttactctctgctctccactgccctggctcttccccttgaggaagaacctggctttggatgggaatcgcgaatactatgagttaggattgccaataattcaaaaagctggagtggctcacaagattgatttcagagaaggacctgctcttccgtttcttgacgagatgcttaaagatgaaaataaaaaggggtcgctggatttcgttttcgtggatgctgataaggacaattacttgaactaccacaagagggtactagagcttgtgaagatggaggactgatcggatacgataacaccctatgggctggatctg

SEQ ID NO: 210496 - DNA, 381 bp, Glycine max
gaagcaaaactgagatgtctatctatgaagaaaagggaactcaacaacatttatgtcttaccccgaccatattcccccaaaatatcaaacgcggtaaaaataaagcacaaggaggaacaggcttcaagggatacatgaccgtatgaagaacaacctaaatttacacttttaaggcataaaattaaatgaaccttctaatccaggaaatccaattaccatagttcctttcctgcttaagttcaaataagagaacccacaattgaaaataggacagagatatgtcaaaagggttctgggaaggcctcacttggcactcaaggttgggaaatgcccggcatcttcaatggatggagcaggtgcattgttggtggcacttccatg

SEQ ID NO: 210497 - DNA, 383 bp, Glycine max
  unsure (1)..(383): unsure at all n locations
ctcaaatctctactgagctacacganatatatgggggacttcaggaaggcctaataagaaaacaaataattccaattcatatatgaacatttttgcctccttatttcttgaaaaagtggaatggggatttttcgaggaaatcccccctcatttcctttggcttcaggataggcctaataagaaaacaaattattccaattcatatatgaacatattagccttcttatttcttgaaaatgtggaattggaattccccgaggaattccgatctcatttcctttggcttcaggataggcctaataagaaaacaaataattccaattcatatatgaacatttttgcctacttatttcttgaaaatgtggaattggaattccccgagg

SEQ ID NO: 210498 - DNA, 406 bp, Glycine max
  unsure (1)..(406): unsure at all n locations
attcattccaatgggatcagtttgtgaagagcgatggataacagttaccatcacaacggtggcattggtgatagcttcttcagcaccattattattggcggcatgcccttacacctccatcttcagcttcggtgattcacttgcagacactggcaacttgtatttcagcccctacccacccaccaaccactgccttttccctccctacggcgaaaccttctttcaccatgtcactggacgctgctccgatggccgcctcatcatcgatttcatcgctgagtcactggggattccacgggtgaagccgcatctgggaatcaagactatngggagatggagtgtggaagaaagggggacccaattttgctgttattggagccacggctttagatttcagcttctttga

SEQ ID NO: 210499 - DNA, 373 bp, Glycine max
ccgcaattgcgaaatctctggaacaattgatttcattttcggatactccaccaccttgatccaaaactcgaagatcttggtgaggaagcccatggcaaatcagcagaacatagtggtggcagatggcacagggcagaagaacatgcccacaggaatagtcctccataactgcgagatcatgccggaccctaccctcttggcagaccgcttgagcgtgaagacttacttggccaggccatggaaggcattctcaagggcagtgttcatcgagaatgttatcggggacttgattcagccagatggttatattccatggaacccaattgaaccaaacacacaggattgctacttcgctgagtttggcaacactgga

SEQ ID NO: 210500 - DNA, 468 bp, Glycine max
agcccccgtaggccggcgtttagtctgattgtatgtcagatacaggttagagcaactaccagtcggcggccgtccttttttttctttttttttttttttcttttgatttttattcatggatgcctttaacttggccagaggccctgttcattgaatcagtgaaaaccgggaaaaactcgttaaaaaaaagagagacaaagaagatctacactgcaacctttacgtcgcacggtgcaccaaacatgaaaaggggctctgccaaaatcaagaacaacccacgaaaaacatacgcttaatccaccccctcaattgtgggaccaaccccacattacaatggccgctgcaggaccctcctaaatcaagggtccacccagtataacaaccaacaccgcggcgcaccatttggtttgaagggatctccaatgctgtccaaatccttcatcttattccaaaaagctggaccctcaa

SEQ ID NO: 210501 - DNA, 512 bp, Glycine max
tgctaccttggagtttaaaatccggcagatatccattttgaagcacaacaaaaaagaaagggatatacaacacatacgacaacggatttatggctctacatgcatttcagagcaaacaaaaggtaatagactccttaagaagtgcagacattgcaactcttcatacagcttcctcttactccttccccaccaaccatataaagtggattcttgtcacattcacctactttagcccacctagggcaattctcattctcatcaacacactcttcattatccacttgcttgaatggttattcaaagtcactcacgtgaatccacttggttgcagaccacttctcgccctcaatgactggacagcttccatgcaagctcttagtatctgtacttgcattcagatggagactgaagaacaacaaggcatcacccttctgaggctttactgcatatcccttgtgagcacattcagaccaactctcatcttctggctgcaacaactttgcctcggccct

SEQ ID NO: 210502 - DNA, 575 bp, Glycine max
  unsure (1)..(575): unsure at all n locations
cttctcataagctttacttaattagcaaatccaaatatggcactttcttcttcatcatcttcaacatccatatttgctttagctttgttcactcttttgcttataggaagttcttcagctcaactctctgagaacttctatgatagtaaatgtcccaaggttttctatgccgtaaaatccgttcttcaatctgctttggctaaagaacctcgccagggagcatctatcgttcgcctcttctttcatgactgctttgtcaatggttgtgatggatcagtactacttgatggcccttcctcagagaagactgcacctcccaacaataactctttgagaggttatgaagtcattgatgccatcaagtctaaggtcgagacagtatgccccggagtggtgtcatgtgctgatattgtaaccattgctgctcgtgactctgttgcaatccttggagggccatattgaaggttaaacttggtagaagggattccacgactggattnttcaaccttgctagcagtggtgtgctcccaggacctggttcttccctcagcgacctttatcaaagatttgatgat

SEQ ID NO: 210503 - DNA, 445 bp, Glycine max
tatggattgcttcagctcttcatgctgctgttaactttggacagtatccatatggaggtttaatcctgaataggccaactattagcaggagattcatgcctgagaaagggtctcctgaatatgatgcgttagctaagaaccctgagaaggagtttttgaagactattactggcaagaaagagaccctcattgaccttacaattatagaaattttatcaaggcacgcatctgatgagttctaccttgggcagagagatggcggtgactactggacttctgatgccgggccattagaggcctttaagaggtttggaaagaatcttgaagagattgaaaagaagcttatagagaagaacaataatgagacattgagaaaccgctatgggccggctaaaatgccttacactttgctctatccttctagtgaggagggattgactttcag

SEQ ID NO: 210504 - DNA, 503 bp, Glycine max
aaagaatcccaggcgaggagaaagatggaggggaaggagcaggatgtgtcgttgggagcgaacaagttccccgagagacagccgattgggacggcggcgcagagccaagacgacggcaaggactaccaggagccggcgccggcgccgctggttgacccgacggagtttacgtcatggtcgttttacagagcagggatagcagagtttgtggccacttttctgtttctctacatcaccgtcttaaccgttatgggagtcgccggggctaagtctaagtgtagtaccgttgggattcaaggaatcgcttgggccttcggtggcatgatcttcgccctcgtttactgcaccgctggcatctcagggggacacataaacccggcggtgacatttgggctgtttttggcgaggaagttgtcgttgcccagggcgattttctacatcgtgatgcaatgcttgggtgctatttgtggcgctggcgtggtgaagggtttcgaggggaaaac

SEQ ID NO: 210505 - DNA, 421 bp, Glycine max
gaaaataaatagatgcatatatatgactctggtgttatttgggattttgcaaattaaattacacaatcacagccgtacatcacacatgagttgggcctcttccaacttaaaagcagaggataacattggcccatgacgcgacacatgcaccacctaataatcataattttacatttttacatacaaaatacaaagactttaaattttaaaaagaagaaaagagataaacagatcatcttaatgaaatgaaaccaaaacccacaaacattggcttgatttttgttgctgttgttgttcccaacttgattaagcatgaaccggttgattgaatcacttggacttgaagggaatggccctgattacgaccttgtggtagagtgcttgaagagctgcaccgattaatggtcccccccagaagatc

SEQ ID NO: 210506 - DNA, 599 bp, Glycine max
aaaccaactccttcctgcttgccccttctcagatcgccggttccggtaagtcccaaaactcgaaccctagccctaaccctaaccataaccctaaccccagctattcgaattcccctcctcttcgcgcaatcatggcgacgtctttggtgagctccgcgggtgggatgctggcgatgctgaatgagccacatctctcgctgaagcttcacgctctctccaacctcaacaacttggtcgacaccttctggccagagatctccactagtctcccaaagatagagagcctgcatgaagatgaggagtttgatcaacatcaaaggcaacttgctgcacttcttgtatcagaggtcttttattacctgggtgaacttaatgactcgttgtcttatgcccttggagctggtcctctgtttgatgtttcagaggattctgactatgcgcacactcttcttgctaaagccattgatgaatatgccagccttaagtctaaggcagcagagtcaagtgatgaatctatcatagtggacccaaggatggaagcaattgtggagaggctgatggataagtgatcgtggatggatataccaacagctatggga

SEQ ID NO: 210507 - DNA, 487 bp, Glycine max
tcgaaacaatgatttgagcggtgagattccccaaacggggtcgttttcgaaccagggccccactgcgttcctcaacaacccgaacctgtgcggatttcctttgcagaagccctgcgcaggttcggcgccgagcgaaccggggctcagccctggttctcgtggggcgcaccggcccacaaagaggctgagccccagttcgattatcttgatctcggtggcggatgccgccggggtggccttgattggacttgcggtggcttatgtttattggaagaggaagggcaagtccaatgtgtgtagttgcactttgaaagggaagtttggtggggagaggaggagttgagcttggcttgttgtgaagaggggggaaatggccacagacatggggagctaatggtagcttaagatttgaaattgagctgaaacatggagccaatgctggacttgcaaatgcatttgaacttctcagccgatcaaagacaaatat

SEQ ID NO: 210508 - DNA, 532 bp, Glycine max
agaacaagtgtgcaaaatgccaatgcaattatagtaaaaatcagaagaacaaaatccaactagtttccaagcagtgatgtcaaaaatgccaaaacagcaataataattatgatatttagaaaatagtttgactgtagaggcttatctgggcttccaccaatcgcctcatattcagcccgtatcttctgcttcataccgtcagacagttctctctttccagtggagtacttggctgctacaaacttctctgcccctgcatttggagaatcatctatcacaatgccctctggaggatcaaatttggctccaaggttgctaagttttgcatgggcttcagcataatctttaaagaatgcttcctgatcttcagcatatttctcagcatataccttgaaggatgggtcttcaaaaagagcagcatcagttggcaataccaatagatcttcatcctttttttctttgatgtccttgaagtaagagttgtcaaatttcaaccattgcactgtccaggattgtccttcgggtgctcctg

SEQ ID NO: 210509 - DNA, 500 bp, Glycine max
aaaaaatcgtagttggaggcgccgcactccactccactccaatcaatcagatactagcgatggggaggaagcgaaaggtagcaccgaaatcttctgtatccgccgagcccccgctgaagcaacaccaaccaaaacccgaaaatgccgctcaggaatacgaagaagaggtcgaagaggaagttgaggaagaagaggtagaggaagaggtcgaagaggaagaagaagaagaggaggacgaagaggacgaggaagaagaagaagaagaccaaaaagaccaataccagcaccaacaacaacagcaagacgaagacgacgacccgatctccaagcttctggaaccgttgagcaaggaccagctcctcatccttctctgcgaggcggcggccaagcaccaagacgtggctgagaggatccgaagggcggccgacgaggatccggtgcaccggaagatatttgtccacggattgggctgggacacaaccgccggaaccctaatcagt

SEQ ID NO: 210510 - DNA, 432 bp, Glycine max
  unsure (1)..(432): unsure at all n locations
ctccagtccgaagtctgcgcctttaccgagggtcgcattgaattggaagaaatcaaagaagaacgaatcaataacacgaatacctcaagtgagagggagaaatggaatcgcctccgcagctgggttcaagaggggcagaaacacttaaacatatagctcctggatcatcaatttctgttgcatatcacccatcttttggaccttatgatgacctcctctttctagagcttgatgagaaacttctcccagatgttctgaatgaaagggtggtcttgagaggacagcctgatgaagatgccgttctttgtactctatccaaaacctatgctatgaagtttgttggaacttccaattctgttctgcttgtacctncagcaaatcattcgggaatttagtgaaaatccacaaaagaatgatagtactaatgatgaa

SEQ ID NO: 210511 - DNA, 494 bp, Glycine max
gtgctgcccatctcttagatcgacttgttaaggatattgtgactgaaagtgatcagttcagtattgaagaatttataccattgttgagggagcgcatgaatgtactgaatccatatgtccgtcagtttttggtaggatggattactgtattggacagtgtcccagatattgacatgcttggttttcttcctgattttcttgatggtttgtttaatatgttgagcgattcaagtcatgaaatacgtcaacaagctgattcagctctttctgagtttcttcaagagattaagaattcaccatctgtagattatggtcgaatggctgaaatactggtacaaagggcaggttctccagatgaatttactaggttaacagctatcacatggataaatgagtttgtcaaacttggtggagatcagcttgttccatattatgctgacattcttggagcttgtttgccttgcatatctgataaagaagagaaaattagagtg

SEQ ID NO: 210512 - DNA, 561 bp, Glycine max
cctccctcaaatcccaaaccagcaaaaacctttcttcacaaaatggcctcaacaactctaacaaccctcaccctccgcacgctatcttatcctacaccctcctcttcttaccctacgcacctctccgccaaaccctcctccctccaattccccaatctctcccaccgcgccgtcaccacgcgccgcccccgtgtcgtcgtctccgccgttgaggcgccggagaaaatcaccaagctcggcgacgaaatcgccggactcacgctcgaggaggccaagaacctcgtcgacttcctccaggacaagctcggcgtctccgcggcggcgttcgcccctgtggcagtcgccgcgggtgccggcggcgctgtggcggacgcgccggcggtggttgaggagaagacggagttcgacgtggtgatcgaggaagtgccgagcaacgctcgaatcgcggtgattaaggcggtgagggcattgacgaacctagcgctgaaggaggcgaaggagttgatcgaagggttgccgaagaagttcaaggaagggatttcaaggacgaagctgaagatg

SEQ ID NO: 210513 - DNA, 471 bp, Glycine max
ttcttttttttttttttttttttctttttttttttttgttttataaaaaaaagaactcgtgtttccttattacaaaaaaaagattgaaattcctacaaaatggaaatgaaaattcaggggtctggtgaactcaacttcaaccaacaaaagaagaagcacaacatttttgctgtacctaaacagggtttaaacaaaggtaaccttggcaccagctttttcgagttgcttcttcgcattttcagcttcgttctttgaaatcccttccttgaacttttttgggaaccctttgatcaactccttcgccttctttaaggcttggtttgtcaatgccctcaccgccttaatcaccgggatttgagcgttggtcggcaccttcttgatcaccacggcgaactccgtttttttcttaaccaccggcggggcgttcagcacaaggcctccggcacccgcggtgaatgccacatgggcaaa

SEQ ID NO: 210514 - DNA, 469 bp, Glycine max
gaagcctatctccgagtgctcactacccatccatgccgaaatattccacgggcgatagtgtcagcaccgtacaagagctctctgagtccaccgctgctctctacgtagcatgaatgagctgcgctgactgcaccggatgcgcgtagaaggccgtaacacgcctccgaggcatgcgtgtagccatcgaatgcgtcctgaacgtcctagctcacatcctgttcgacccttccttcctgaacgtggagactattcacgaggcaactgaggacgctaggatcaaagtcgagtatctcacagactacgtagaatccattcaagtatgcctgatccagaccataggattgatctgcagctcctgctcgtacagtctggaatccgtactgcaagcccttgacggagtccttgaagcccgcgtgggccttgccaccgaagaggcccatgtacactacaacccaattctcctcaccac

SEQ ID NO: 210515 - DNA, 478 bp, Glycine max
gataattctgcagccgtaggtgaagacgtgggtgaggttaagtgtggcattgctgacatagaagtgaccatggtggaaagccatgcaaatctcaaaataagatccaagaagcgccccaagcagctcttgaagttggtttctggtttgcataccatgcgcctcacaatcttgcacctaaatgttactaccaccggtgaagttgttctctactctcttagtgttaaggtagaagatgattgcaagttgggatcagttgatgatatagctgcagctgtgtaccagatgctagataaaattcagcaagaggcaatgttgaattaagatcaaaccttgaccaaatatgccttgccccactttggttttaacctcatgtcaacaccttacttcatggtggggatcatgtctctcgctatttttctctataaggatgtacctaattattgcactttctgttcacttcaccctttgttaatctact

SEQ ID NO: 210516 - DNA, 509 bp, Glycine max
  unsure (1)..(509): unsure at all n locations
gttagggttgtgagtcttcctttaaaggggcatcgagactcaatctctttctctctctttctttgccctctctttctctctctagaattctcagatttgcggggcgagatgatgcagcagccaggacccggcatggcacctcccaccatgggccagcagccgccgcaacagtaccagcagcctccgccgcagcagcagcaaccctacgtcatgatgccgccgcaggcccaggccccgcaggccatgtgggccccctccgcccagcctccgcctcagcagcagcccgccagcgccgacgaggtccgaaccctctgggatcggggatctgcagtactggatggacgagaactatctctatacctgctttgctcacaccgcggaggttacatcggttaaagtaattcgaaacaagcaaactagtcaatctgaagggtattgggttatttgagtttaataagtcgtgctggagctgagagaattcttcaaacatataatggggcantaatgcc

SEQ ID NO: 210517 - DNA, 520 bp, Glycine max
tgataaggtccttcaaccctttgatgaaaacaaattcaactttaccaaagtcgggcaagaagaggtcctcttccaatttgaagctagcgaggatggacaagtccagttctttccaaatgctccagttgatgttgacaattctcccagctttgttgccatcaatgtcagtcctattgagtatgggcatgttttgctgattccgcgcatatttgagtgtttgcctcaaaggattgaccgtgagagcttcctccttgcacttcagatggcagtggaagccgataatccttattttcgattgggttacaacagcttgggtgcttttgcaactatcaaccatcttcacttccaggcttattatttggctctgcccttcccaattgagaaggcccccactaagagaattgcaagtgtaaatggtggggtgaagatatctgaactgttgaagtatccggttagaggctttgtctttgagggcggcgaaaatgctggaagatctatcaaacgttgtttcagatgcatg

SEQ ID NO: 210518 - DNA, 408 bp, Glycine max
ggaaaatagcaaggggcaaattcgtcattagatataaaaccctaatgcccctcgttcggtgcttccatttatagtctcagtcttcttctcttcttctcttcttctcttcttctcttctcttgtctcacgatctcaacggagcacctctcttcaggtcgccatctagactgcaatcatggctgatggaccacagcatccatcagttgttcagaagctagctggacagtcttacctggtgtcccaggctagccccaactttaactctgggaattattcctcgactggttcttacttcaatggaggactgcactcttctgggttggctgttgtgtcgcctggatctccagttactgtgcatgctccagcagaaaaggagtgagtggatttctagtggattttctgatgggt

SEQ ID NO: 210519 - DNA, 510 bp, Glycine max
gagcaatcaaacctagtcttaattatttcaaccggggggggttctcaaacttcaggattataagctgatggcatgaaatgaaacaaccaaaatgaaaattcttgtttccaaaactatgatttctacgtatcaaggtcctaaatttgggaaaatatcaataccaatatttctcatccaaaattattcaaatgacaagggaatcggcatgattatcccaggaaattgtcgtcatcatcttagccacctccaccagatccgtatttctttccgaacaagacaagctgcagcttgtcataaccagcaagcacaccagcacctgcaacagcacgcaatatgtttgcaccagcacctttgaagagtgacttggcaccctcatttgcgacgattgtttggaatgcatgcaaagagctcttgtacttcacagcctctccagaagtcatcatcatccttctacgaacagtgtcaatggggtaagaagccaaccagcaccaattgtgattccccatccca

SEQ ID NO: 210520 - DNA, 481 bp, Glycine max
tcctttttttttttttttttttttttttatattttttttagaagtgaaacaaggctcattgatacaggtgaagaagtttcgtcgtaaaactaagcaaaaaagtaaaggacaagttatttcacaaagtatcttatcatcggcaccaaaaaagcaagcgcaggggacttcttaattcccaggtatcataaaaatttaacagactccgactaatctagagctcatcgggagaatcgtcctcgtcttcttcgcctgatgcaccaccaccgcctggggctcctccagatctctgattcacagcactaatgattgggttgcaaacggtttcaacctccttcagcttctcttcataatcttctttctccatactctgggtgtcattcagccattccagtgcttctttcacagcagtctcaattttctccttttcattagactccaacttgtcagcgagcttgtccttgtcactgatctgggtcttcat

SEQ ID NO: 210521 - DNA, 455 bp, Glycine max
caactgtactccatatcatatcaactggagctggggaacctcgtctctactcgcgctcgtccccgccggagatccaccatggccggcaactccgccaccgccaccgccacctcctccgcattgtctcccgagaatttgaaattcaatttctcccccgataacccctcccgaatcatcctcacttcggatcaggtcaaccactgtacccaagccctcaaccttctgaaggagaagctccacgatcctcacgtgatcactcaggagttcgcacacttgcaggcgaacaggataactccgagtgagatgagaagaagatgcaccgtcgcgtatgacgccgtcaatttgagcaaaaaccgatacacggacgttttgccatttaacaagacagggttgttctcaaatcaagtactgattataggcctgaagcacaggggtatatcaatgcaagccttatc

SEQ ID NO: 210522 - DNA, 521 bp, Glycine max
gaccctactgcgtctgggcttcagtctagagctgtatgcccagttagaggttacacgagcatactcgtcggcggccgtcctttttttgacttttcaaaatgaaattttaccatttctaaccccaaccctacattaagggggtaggtgaaattgatgtgttctcgtggtctcaccgtacacgcttatgattcttgttgatgatgctggcggactcattcctgcactcaatcattcaccatggaatggcttaacgctagctgattatgtcatgccatatagcctatctattgtgggtgcttcgcttgcactcacatacaagaaactgcatcgcggagactatgcatctacgaaagcaagtcaactgactctacaacttccagagtcaggccttttcattcgcgaggtaactaccatgccctgaacgatcggacctatagcatggactcgaaacagatgagatggatggcactacctgacacaattcatgtagcgcatctggtttcctcactgcgcgcaatttg

SEQ ID NO: 210523 - DNA, 608 bp, Glycine max
ggcggctgctgctgcggctgccaccgccgctcccaagaaggcgccggctcagcagatcaagccggctcagctccctagcaagcctcttcctccggctcaggctgtgagggatgccagaaatgagtctgttcgtggaggccgtggaggtggacgaagtgggggacgtggatttggacgtggtcgtgggtttagtcgtgactcttccaatgacgagaactcattccctaccagcggagctccttataatcaggtttcttttgaaggagatgctgggaagtcttctgaaagacgcggttatggtggaccacgaggtccttaccgtggtggtggtggtcgtcgtggaggtttcagcaatggtgaaactggtgaagctgaagaaggacgacctcgaagagcatttgatcgtcgcagtgggactggacgaggaaatgaattcaacgtgaaggctcaggacgtggtaactggggagcccaaactgatgaacttgctcaggtaactgatgaagttgcgaatgaaactgaaaagaatcgggtgatgagaagcctgcagttgaaggagatgtaactgatggtaccaggacagccctactaatgaaactgaagaaaaga

SEQ ID NO: 210524 - DNA, 517 bp, Glycine max
gcttccaaaaccacattttcaggcttcttagtaattccaaaagcttgttgacgagaatggcttccggtgaaaaccagtttccccgccagaagcaagacacacagcctggcaaagagtatctcatgaatccaccaccccaatacaacagccccgattacaagccatcaaataaacttcatggaaaggtagctgtagtaactgggggtgactctggaattggacgagcagtgtgcaacttgttttcattagagggtgctactgttattttcacctacgttaaggggcaggaggagatagatgcaagggacacgcttgagattataagaaaggctaagactgaagatgccaaagatccaatggctgtagcggttgatcatttgggttatgaagagaattgcaagagagtggtggaccaggtggtcaacgcttatggcagcatccacattctggtcaacaatgcagccgtgcagtacgagagtgattcacttgaagagattgatgataaaagactcgagat

SEQ ID NO: 210525 - DNA, 478 bp, Glycine max
gaacactacaaatagaaagttgacatttaataaaccaaagcaacacaacgcagcaaagtcctgaaactcgctgcgcttaacaaaaatgtaatcaggggttccgacaaacacaacacattaaaacacagataaataaaagcaattttgccaccgtcgatcaagaacccagttctgggaacaacagttgcgagatgatggtggagacttcaaactttgtccgaaaaacaagctacctagaaaagaagacacaagagtacagaaaagaaaccaacatttattgtaaccaacatcccctgatgaaccagcccgcacgattcacttcttcttctgggcagccttggtgaccttggctccggtaggaaccttcttctcaacgttcttgatgactcccacagcaacagtttgacgcatgtccctaacagcaaacctaccaagtggaggatactcggggaaagtttcaacaccatgggtttggttg

SEQ ID NO: 210526 - DNA, 398 bp, Glycine max
gtttcctctgatcgtgtcagaaatataaaagtttatttcctctgatcgtgtggtttctgagttctaagcactcacctctttcatacacgtttgttcgcttgttgagaagccatgggcgaggatttcgagttcccaagtgctggcaacatggaaatgcctgaggaggaagagtttgagagtccgatcctgaaggttggggaggagaaggagattgggaaaatggggctgaagaagaaattgctcaaggaaggtgaaggttgggacacccctgacagtggagaccaagttgaagtgcattatactggaaccttgcttgatggaaccaaatttgattctagccgcgataggggcaccctcttcaagttcaagctaggccaaaggcaagtgataaagggatg

SEQ ID NO: 210527 - DNA, 345 bp, Glycine max
gataattctgcagccgtatgtgaatacgtgggtgaggttaagtgtggcattgctgacatagaagtgaccatggtggaaagccatgcaaatctcaaaataagatccaagaagcgccccaagcagctcttgaagttggtttctggtttgcataccatgcgcctcacaatcttgcacctaaatgttactaccaccggtgaagttgttctctactctcttagtgttaaggcagaagatgattgcaagctgggatcatttgatgatatagctgcagctgtgtaccagatgctagataaaattcagcatgaggcaatgctgaatcaagatcaaaccttgaccaaacttgcc

SEQ ID NO: 210528 - DNA, 428 bp, Glycine max
  unsure (1)..(428): unsure at all n locations
ttgatgaagatttggctgaggaacttcagaatcagatggaacaagattatgacattgggtcaacaataagagacaaaattatccctcatgctgtatcatggtttactggggaggctgttgagggagacgagtttgaagacctggaagatgatgaggatggagatgacgatgaggatgatgaagaggaggatgaggacgaagatgatgatgacggcgatgaagaggaggaagacagtaagactaaaaagaagtcatctgctgttaagaagagtggaagggcacaggctggtgatggtgagcgacctccagagtgcaagcagcagtaattgtttatttcttcggagtgtcatgtggctgatgggtgtttttgaggtcctatggtgcgcctgatnaaaagtgggttttcagtttcatgcaatttttcatgg

SEQ ID NO: 210529 - DNA, 444 bp, Glycine max
tgggcataagcatgaacttagtgacctacttggttggagttttgaatctcccttcagctgattctgccaccatagttaccaatgtcatgggaactctcaacctgcttggccttcttggtggcttcatagctgatgccaaacttggcagatacgtaactgttgccatatctgcaatcatagctgctttgggggtgtgtttgttaactgtggctacaaccattcctagcatgaggcctcctgtgtgcagcagtgtcagaaaacaacaccatgaatgcattcaggccagtggcaaacaattggctttgctatttgcggcactttacacagtagcagtgggtggtggaggaataaaatccaatgtctcaggttttggatcagatcagtttgatacaacagaccccaaggaggaaagaaggattggtgtttttcttaacaggttctact

SEQ ID NO: 210530 - DNA, 595 bp, Glycine max
tccttttttttttttttttttaacatagtttctcttttaattttattaaaatcatttttgggcaactgtattccaaagctgaatacaggattagcaagtagataaataagataaatgttgatttgtatcctttcagctaaatttctagcgtgacaagaaacacacaaagatctagaaaagacagtcgaacatttgagaactccaccattcacgcaacctgttttaatgaaaggaatatctgtcatgaaaaatctagatgaagagaaaatgatcagatgatgcggcggcacagggtaatcccatcacccacggggagctggcaaatctcgatcctcgaatcttgagccagatacttgttgagctccatcacatggccgcgaagaggcttaatgtaatccatcaatggtgcatcgggtggtgcagccacagatccagcccatagggtgttatcgtatccgatcagtcctccaatcttcacaagctctagtaccctcttgtggtagttcaagtaattgtccttatcagcatccacgaaaacgaaatccaacgacccctttttattttcatctttagcattttgtcaagaacggaagaa

SEQ ID NO: 210531 - DNA, 462 bp, Glycine max
tgggcataagcatgaacttagtgacctacttggttggagctttgaatctcccttcagctgattctgccaccatagttaccaatgtcatgggaactctcaacctgcttggccttcttggtggcttcatagctgatgccaaacttggcagatacgtaactgttgccatatctgcaatcatagctgctttgggggtgtgtatgttaactgtggctacaaccattcctagcatgaggcctcctgtgtgcagcagtgtcagaaaacaacaccatgcatgcattcaggccagtggcaaacaattggctttgctatttgcggcactttacacagtagcagtgggtggtggaggaatcaaatccaatgtctcaggttttggatcagatcagtttgatacatcagaccccaaggaggaaagaaagatggtgtttttcttcacaggttctacttcttcatcagcataaggtc

SEQ ID NO: 210532 - DNA, 613 bp, Glycine max
  unsure (1)..(613): unsure at all n locations
tgcctccttgtgtcgggcgtctatctgtatctgnangtgcagtnaaggttagagcgactaccagtcggcggccgtcctttttttgtgttttttatttaaaaatttaacttttacagcatcccaaactcctcatgggtgctggtaaaacttgaatttgcagcccagaaacagctccacaggaatgcttttgtggatcaaccaaaaatgaaaattactacaatatatttgctatgaagggaaagagacccgggtagggcgggaacccctatcggaaattcattgggcttggatttaagactcccaaggaagccacatatggatcctacctcgacaagaagtgccccttcactggcaatgtttccatccgtggccgcatcttggctggaacatgtcacagtgctaagatgaacatgaatagccccgtgtagaggaattatccaccatcatttagccctcttccggacgcacactgacctatcttgcgacattgatgctgatatatgaactgcacctgcaaccccagctgattcccatattcttcaacaacaccgggacttatattctgttgatcactggtaccaccctgcaccggagcccctgcataaggcacacc

SEQ ID NO: 210533 - DNA, 537 bp, Glycine max
caagtccttctcctcacacacataaaaacaaatatcctccacttcttctacccccagcagtagaacaagaggtgccggagcaagtttcgtcacgccggaacgatgaccggcggcggatccacggggaggttgccgacgtggaaggagagagagaacaacatgaggagagagagaagacgaagagcgattgcagctaagatctacactggccttcgagcccaggggaactacaagcttccaaagcactgcgacaacaacgaggtcctgaaagctctctgcgccgaagctggctggatcgtggaagaagatggcacaacttatcgaaagggatgtaagagacccacgagtgagattggaggaacaccactgaacttaagcgcgtgttcttccattcaggcaagtccacaatcctcgtcatacccgagtcctgtaccatcctaccatgctagcccaacctcttcctcgttcccaagccccacgcgcattgacggaaaccacccttcttcctttctcatcccattcatccgcaacataact

SEQ ID NO: 210534 - DNA, 487 bp, Glycine max
aaaaaatcgtagttggaggttccgttctccactccactccaatcaatcagggactagggatggggaggaagcgaaaggtaccaccgaaatcttctgaatccgccgagcccccgctgaagcaacaccaaccaaaacccgaaaatgccgctcaggaatacgaagaagaggtcgaagaggaagttgaggaagaagaggtagaggaagaggtcgaagaggaagaagaagaagaggaggacgaagaggacgaggaagaagaagaagaagaccaaaaagaccaataccagcaccaacaacaacagcaagacgaagacgacgacccgatctccaagcttctggaaccgttgagcaaggaccagctactcatccttctttgcgaggcggcgggcaaacaccaacacgtggctgagaggatccgaagggcggtcgccaggatccggggcaccgtagacatttgtcacggattggctgggacacaaccgccgaaccc

SEQ ID NO: 210535 - DNA, 551 bp, Glycine max
  unsure (1)..(551): unsure at all n locations
ccgagtttgcccacgcaaacgtatcgagccagcctctcaagctagggttcttcaccgcgctccaaccttcttctctctcccttcgtcccctccaattggaatgtgattgtgacttcacatgctggtagctgacattttgaaattgtaactgtggtgggagcaatattatatattttgcgacatcatggagatacagacttgtggcaggccgattgactccttgctagagaaagtgctttgtatgaatattctctcgtctgattacttcaaggagctctatcgattgaaaacgtatcacgaagttattgatgagatctacaatcaagttgatcacgtggagccatggatgacggggaattgtcgtggtccttcaactgcattctgtcttctgtacaagttttttactatgaagctcaccgtcaagcaaatgcatgggctgttaaaacacctcgattctccttacataagagcggttggatttctctatctgagatattgtgctgatccaaagacactatggaatnggtttgagccatatgtaaaagatgatg

SEQ ID NO: 210536 - DNA, 514 bp, Glycine max
agcaaaatgaacagggcgaggagtgggagaatcctgtctaccaaccacgtcttctatccaggggacacacattccatgagctaaggaccatacttcaatctttgtgtacccatgggtgtattggcaacagggcctgctataagaggcggggtgctggaccagcctggtattgaaaatgtcacccctgtccgtgagtgtgaatgtgatgtaccgaactcacggagctctgacccgacctatcgcgtaatattgcacaacgacagactcaatatacgggactactatgctccaggtgctgatgaaggtcatacgtggcatgacccttgataatgccgataatctcatgcaagaagcacactacattggatcgtcagtggtgatcatgagcgaccaatgcctgtgctgaggatcactgcatgcatctaagatgcattggattgctcatgtcaattgaacctgcatatgggggtcgcagctgacaagtctaacttgaaatcacactggctctgatgct

SEQ ID NO: 210537 - DNA, 442 bp, Glycine max
agcaaaatgaacagtgcgatgtgtgggagaatcctgtctaccaaccacgtcttctatccaggggacacacattccattagcaaaggtccatacttcaatctttgtgtacccatggttgtattggcaacagggcctgttataggaggcgagttgctggacaagccagttattgaaaatgtcacccctggccgtgagtctgaatttgatttacagaactcacggatctcggcaccgacctatcgcgtaatattgcacaacgacaactacaataaacgggaatactatgctccaagtgctgatgaaggtcatacctggcatgacccttgataatgcagttaatctcatgcaagaagcacactacattggatcgtcagtgatgatcatgtgcgaccaagcctatgctgaagatcactgcatgcatctaagatgcattggatagctc

SEQ ID NO: 210538 - DNA, 389 bp, Glycine max
ccgtagttgcgatatctctggaacatttgatttcattttcggatactccaccaccttgatccataactcgaagatcttggtgaggaagcccatggcaaatcatcagaacatagtggtggcagatggctcatggcagtagaacatgcccacaggaatagtcctccataactgcgagatcatgccggaccctaccctcttggcagaccgcttgagcgtgaagacttacttgtccaggccatggaaggcattcttaagggcagtgttcatcgagaatgttatcggtgacttgattcagtcagatgggtatattccatggaacccaattgaaccaaacacacaggattgctacttagctgagtttggcaacactggaccaggtttcgttgctc

SEQ ID NO: 210539 - DNA, 493 bp, Glycine max
cccatttgattcccttccctctcaccaagttttatgatctctgtcatttcctcaactacttttattttccatttatatctactcacaaagcaacatcatttccacttgcatttcacacgcatgtgagacacgacccaaataacacacaaagcaaagtaaggttgctttgcattgtgttaacaaacaaggcaacctcattatttgttgccactttggttctgaaaaagtttcttactttagttgtgggtttgctccgttctctctgttctggaaaacagaaaaacaaaaaaatatgagagcgacacagattgtgttggttctgttttggttgctctgcattcacagtcccacgttgttctgcgccaatgtggagtatgatcatcgagcattagtcatcgacggcaagcgcagggtcttgatctctggttccatccattaccctcgtagtactccagagatgtggccagaccttattcagaaatccaaagatgga

SEQ ID NO: 210540 - DNA, 544 bp, Glycine max
aaacaaaatttttatttcattatatgaatgatacatgaccaaagtaaaactaaaaatcagacaaaacctggtggcacattgaattagtatctccattacagttatgggcgttgcatccaaacccaatagaaagctcagagtattacacatcccaaaaagtaaaatcctactacagtttagcaccgagatgtcctaaaccacattacatgaacacaaattcgagttgtcttggaagaggaccaagaaataaaagctagataatgttcaaccctgcatccagaaataccaatccgcaagactcccgtctcccaaaggcattaagccttattggcaatgttgttggaaagccagtccagaccttcgtaaaggccctccccagaggttgcacaggtgctctgaatgtaccagtgacgctgtctcagagagtggagacccaacttgttagtaatttagcagaatcattgcattaggaagatcttgtttgtttgaaaacacagcaatacggcatttcttagttcatcctcattcacattctatgtaacta

SEQ ID NO: 210541 - DNA, 526 bp, Glycine max
  unsure (1)..(526): unsure at all n locations
cccatttgattcccttccctctcaccaagttttatgatctctgtcatttcctcaactacttttattttccatttatatctactcacaaagcaacatcatttccacttgcatttcacacgcatgtgagacacgacccaaataacacacaaagcaaagtaaggttgctttgcattgtgttaacaaacaaggcaacctcattatttgttgccactttggttctgaaaaagtttcttactttagttgtgggtttgctccgttctctctgttctggaaaacagaaaaacaaaaaaatatgagagcgacacagattgtgttggttctgttttggttgctctgcattcacagtcccacgttgctctgcgccaatgtggagtattgatcatcgagcattagccatcgacggcaagccagggtctngatctctggttccatcattaccctcgtagtactccagagatgtggccagaccttagtcagaaatccaaagatggaggattggatgcgattgagacttatgttttctgga

SEQ ID NO: 210542 - DNA, 407 bp, Glycine max
cggactacagctggtgttgttcagcagtttccaaacaatacatgtagtgtatatattacttactcgaaggaagaagaagcaattcgctgcattcaaaatgtgcatggattcgtcatggagggtagacctttaagggcttgttttggaaccactaaatattgtcatgcatggctcagaaacatgccttgcagcaatccagattgtctatatcttcatgagattggctctcaagaggatagtttcacaaaagatgaaataatttcagcatacactagaagtcatgttcaacaaattactggtgctgcagacaatatacaacgacaagcagggaatgtattgcctcctccattggatgattgcatggataactcatcaggaaaaccaattgtgaaaaattcatcaagtac

SEQ ID NO: 210543 - DNA, 578 bp, Glycine max
  unsure (1)..(578): unsure at all n locations
ctcagtctcaactctctccaacaaccacaatggctctcttgggcgccgcctcctcctccgctcgcatcattccctccgtctcactctcttcctcttctcgctccttcttctcactctcatcctcttcttccaaactccaatgcttgcgctcctctcctcgtatttcgcacctctttctcaatcagcgaagagcggaggttcgcgtttcgagtggaggatacggaactgtgtcggcaccgaagtcagttgcgtctgatcctgatcagttgaagagcgccagagaagatatcaaggagcttctcaactccaagttctgccatcctattctcattcgtttgggatggcatgatgctggtacttataataagaatattgagggagtggccacagagaggtggagctaatggtagcttaagatttgaaattgagctgaaacatggagccaatgctggaccngtaaatgcanntgaactcttcagccgatcaagacaatatctggtgtgacatatgcagactatttcagttgcttgtgctcagctgtggagaagctgagcccaaaatcctatgaatatggagag

SEQ ID NO: 210544 - DNA, 557 bp, Glycine max
tgctttttttttttttttcactacggagttgagattttagcgcatcatacacaagattgggtccgggtacctaagtaataacaagtgatattgtgaaattatcgtaatcagacccaagttgaaatgagatcagaacaaaacttaaatatatctatcaactgccttgatttgcccaaaaaagaacgagatgggctgagacctgtgatggtgatagccgtcaaaaaaattgctttaacacagaagggcctgagggcctagatggagatggaaaattatttggaacaccttcttgatgcccccacaagataaacatgccagtgctttcacacgaaaatgcatcatggagctgcaatgcatcttcctcgagtgccattggaattcaagtctcaggtgcactactttaagctggtgaacatttgaacattaatatgcaatcctttcaagattttcggagacagttatcattctaggcctgacttcagggtctacctcagtgcattgtaatgctacatgaaacacagccagtacctctttcttggcatgcacttcatggagca

SEQ ID NO: 210545 - DNA, 534 bp, Glycine max
ctcagtctcaactctctccaacaaccacaatggctctcttgggcgccgcctcctcctccgctcgcatcattccctccgtctcactctcttcctcttctcgctccttcttctcactctcatcctcttcttccaaactccaatgcttgcgctcctctcctcgtatttcgcacctctttctcaatcagcgaagagcggaggttcgcgtctcgagtggaggatacggaactgtgtcggcaccgaagtcagatgcgtctgatcctgatcagttgaagagcgccagagaagatatcaaggagcttctcaactccaagttctgccatcctattctcattcgtttgggatggcatgatgctggcacttataataagaatattgaggagtggccacagagaggcggagctaatggtagcttaagatttgaaattgagctgaaacatggagccaatgctggacttgtaaatgcattgaaacttcttcagccgatcaaagacaaatattctggtgtgacatatgcagacttatttcagttggctg

SEQ ID NO: 210546 - DNA, 471 bp, Glycine max
  unsure (1)..(471): unsure at all n locations
gctccccttggccggctttctntgtactgtangcaaataccggtaagagcaacatacagtcggcggcgtccttttttggcttttttctttgttttttttttttttttttttttttctttttttttttggtctggggcaaattgcccgccgtttatggagcttgcttgaccaccttcgaagactccgagaatgagagtgaatacgggtacgttcgcaaggtatcaggaccagtcgtcgttgcagatggcatggctggggctgctatgtatgaactcgcgcgtgtcggtcatgataatcacattggcgaaactattcgtctcgaagggaattctgcttccatccaagtttatgaggaaactgccggcttgaaggctaatgatccggggttaccgactcaccagcctataacccccgcagtcgggccctggaatactggggaatcttccccatggaaatcagaggcccttggaa

SEQ ID NO: 210547 - DNA, 601 bp, Glycine max
gatggatgaagttgatacaccttatgtttgaatccaccaacactggactaagacttctgctgagcagcactatggggctatttctgtgggaaagagaaccgtgactcacttgcatagccgcaagatcgaggcgactcaggctacatagagaaactggtacatagtccgcatagcttggtatataagaacactgctggacattgacataaaccagctgaccatgagaggctgcatgagacagattgacaccaagaatgacggaaacaccgagtgcgacggcgttggcattttgggcatcgcttgggccttcggtggcatgatcttcatccttgtttactgcaccgacggcatctctgggggacacatcaaccctgcggtgacattcgggttgttcctgggacgcaaggtgtctttggtgagggcgttgccgtacatgatagcacagtgcgccggtgcaatctgcggtgctgggttggccaaagggttccagagatcgtactacaacaggtacggaagtggagttaacactgttagcgatggctacaacacaggtaccgctttgggagctgagataattggtacctttttcttgtctacaccg

SEQ ID NO: 210548 - DNA, 418 bp, Glycine max
tacacaccgaagcactgctactactactactttctctctagatatgggcactggtgctgtgcaactagtttctgatcttggggctcttggatagcatcatgcttagcccaagcaccattgtgctggaccggtacaaccgccgcagtacaacacccattaccaccaccacccagatcagcacctgcaccagcaccgaccagaccagcaacctcaccaccagcaaccacaccaccagcagcaacttcagacagcagcatcagactcagcaccagcagcaacaccaacaccagtaccagcaccaccaacggttgaacctacacctgcttcctgtcattcagcctgtactgcttcacgctttcctacagtgacacctagcgccacctcttctaacactagaccaggacccttagccggaccc

SEQ ID NO: 210549 - DNA, 393 bp, Glycine max; identical to SEQ ID NO: 208347

SEQ ID NO: 210550 - DNA, 387 bp, Glycine max
  unsure (1)..(387): unsure at all n locations
ctaaatgtagtcgtanntgaatcttccaacaaatttccttggctccggataggcctaataagaaaacaaataattccaattcatatatgaacatttttgcctccttatttcttgaaaatgtggaattgggattccccgaggaattccgatctcatttcctttggcttcaggataggcctaataagaaaacaaataattccaattcatatatgaacatttttgcctccttatttcttgaaaatgtggaattggaattccccgaggaattccgatctcatttcctttggcttcaggataggcctaataagaaaacaaataattccaattcatatatgaacatttttgcctccttatttcttgaaaatgtggaattggaatttcccgagg

SEQ ID NO: 210551 - DNA, 393 bp, Glycine max
cctcggggaattccaattccacattttcaagaaataaggatgcaaaaatgttcatatatgaattggaattatttgttttcttattaggcctatcctgaagccaaaggaaatgagatcggaattcctcggggaattccaattccacattttcaagaaataaggaggcaaaaatgttcatatatgaattggaattatttgttttcttattaggcctatcctgaagccaaaggaaatgagatcggaattcctcggggaattccaattccacattttcaagaaataaggaggcaaaaatgttcatatatgaattggaattatttgttttcttattaggcctatcctgaagccaaaggaaatgagatcggaattcctcgggggtaccgagctcgaatt

SEQ ID NO: 210552 - DNA, 231 bp, Glycine max
gagatatcctccatggttcttatgaagatgaaggagattgcggaggcgtatctaggttccaccataaagaatgcggttgtcactgtgcctgcttacttcaacgactcacaacgtcaagccaccaaggacgctggtgtcatttctgggctcaacgtgatgcgaattatcaacgagcctaccgcggctgccattgcttatgggctcgacaaaaaggccactagctctggggag

SEQ ID NO: 210553 - DNA, 438 bp, Glycine max
tatttttttttattttttctttttctttttattctcttttttcatttcccctctctacggtgtgtttttttctaatcctcctcctctcatatataactatacttcacacaccacacaccccccaatcaccctctaccacccacccccacaaacacaccgccactaaaacagcccccacacacccaacccccacaaaacatacccacccaacaaagaacatttaaaaaacccccccacccgccccccccccccaccacaaaaaccatagggaaccaaccccgctcccctgattaaaacccccccaaaatcctataaatcacaccacgaccaaaagccacccacccccccaaaaagtgtaggcgacaaaaacacaaaccccccccccgatgaaaacaccaaattcctttataacgaaaaacatccccccccccccccccc

SEQ ID NO: 210554 - DNA, 513 bp, Glycine max
gacgtcacctatttttaaggctaggttctcccgcttcaatttgatctcgtaaaatttaaatacagcccaagcatacataaatatacatcagcatactaacatatgcttatgtttattctgtacccaattctaataataatacaatgcaatctttatacagggacaggcaacaaaaacactggcgagggtacatcaaggcataacaagccaggaccctttatttaaagacaccattattttctttttttcaaaccttactttagcaacaaagtcttggtccttttcatgtggtactatgattaggcagaaccagatcttacgcggcggcatcaacagcatggttgctaacatccttttccacaaaatccttgacatattgttgtcttgcagggagatggtcatttggacgattgtatggagtccaaactggctcaccaacaaaaaaacgcaaagccttaatgtagttgctctcatctagccgaaagcgatgataaattccggcaggtaagatga

SEQ ID NO: 210555 - DNA, 421 bp, Glycine max
aaagcaagaatttgaaggaagaggggatatgaatacaaggagctagttgtctatttgcaataacataacatcatcaagcaggatcatcgatccaaccttagtattcaacccagagagatttgtagtaataattactacaacaacttaaaacaatggcaggaggaggttatgtagattcgggaaatgcaaagcaatttgaagggaaggtcactgcattcgtattggttacatgctttgtggcagccatgggaggcttactcttcggttatgatcttggaataaccggaggagtgacttccatggaaccatttctcatcaaattctgtcccggtgtctataaacaaatgcaagatgatgtcggccatagaagccaatattgcaaatctgacaacgagctccttacactatttacctcttctct

SEQ ID NO: 210556 - DNA, 462 bp, Glycine max
cccagctgccttaatcttctcttgtgtattcagatcccacgggggctttttctttacaaaggaaagcagctcaactttttagtacacagtggaattaggaggaacattacccaattcctgagaggacccatgatggaccaaaagcatattcaggctgtatgatcagcaatgcaatttcccctttcttcatgttcttcacaggttggtcaagtccatcaattacttgctcttcatcaattttgaactcaaatggctgttcatcaacgtagccctttttaacgaaaacagtttcatcttgcgacttgccaatcagtattacttgaactacaggtccatcattggggcgttcatatccctcccgttccttcaaagtcttcttgagaaccattctatccttggtaatgtcagacacggtcttccacgagacctacttaagatccagatgaagattagcatttggag

SEQ ID NO: 210557 - DNA, 395 bp, Glycine max
cccagctgtttttttcttctcttgtgtattcagatcccacgggggctttttcttaacaaaggaaatcaactcaacttagtagtacacattggaatttggaggaacattagtcaatttctgagaggacccaaatggaccaaatgcttattcaggctgtttgatcagcaatgcaatctccccttttttcatgttcttcacagtttggtcaagtccatcaattacttgctctttattaattttgaacttaaatggctgttcatcaacgtagcccttcttaacgaaaacagttcctttttgcaacttgccaatcaggttcacttgaactacagctccatcatttggtcgttcatatccctccccttccttcaaagttttttagagaacctttctatcct

SEQ ID NO: 210558 - DNA, 244 bp, Glycine max
tccttttttttcttttttattttttttatgtctaatttttaatcctttttttattcacctgggacttggtataatttaattttaattcaccacaacaacaacaaaaaccatataaccaacccaaacactcataaaacaaaggacacttataaaaataccaaaaaccacacaaacctaaacaaaaaaaaaacaaccaccaaaaaaaaaacaaacaccaaacccagaaccaaaccccaagacaaaa

SEQ ID NO: 210559 - DNA, 421 bp, Glycine max
tattgatattggtatggtctttctttgaaccccatttgcaaaaaggaagaagaagaacatgaagattcagtgtgatgtgtgtgagaaagcccctgcaaccgtgatttgttgcgcagatgaggcagctttgtgtgccaaatgtgacgttgaagttcatgctgcaaacaagcttgcaagcaagcaccagaggcttctccttcaatgtctatcaaacaagcttcccagatgtgacatatgccaagataagccagctttcatattttgtgttgaggacagagcactcttctgtaaagactgtgatgagccaattcatttagccagtagcctttctgcaaaccaccagcgcttcctcgctactggtatcagggtggctctgggttctaattgcaccaaaggccatgaaaaaggtaacatggaacca

SEQ ID NO: 210560 - DNA, 571 bp, Glycine max
gaaaaatttagtaactaccgataccatataataataagaatagtattattaaaagagaaagggaagggaaggtaacacgctatggcggcggaatcgggtggtacgccgacaaactttgatcttcccgaggaggtggtgcaagtgctaccgtccgatcccttccagcagctcgatgtggctcgcaagatcacttccattgctctatcgacacgtgtcaacaccctcgaatcagagctgtcctcgcttcgcgcccagatcgccgacaaagacaacctcatcgccgaccttcaatctcagctcgactccctcgacgcttccctctcccaaatcgccgacaaactcctccaaaccgaacaagataaggagagcttgctccaggagaatgcttcgctttccaacaccgtcaaaaagctcaatcgagatgtctccaagttggaagttttcagaaagacgcttatgcaatcacttcaggaggaggatgataactctggagcagcttcagacattgttgctaaaatacagagtcaagcaagtttgacttccacgtcgcagactggagataatgatgttt

SEQ ID NO: 210561 - DNA, 479 bp, Glycine max
ggcctgccaagactgtcattcggttttcatgttcaaaaaaaagtattgtattatacagaggggagaaaaaaaagttgctataaataaggagacatgcacgatagtatccgttattacaaatttggaaagaatcttttaagcacaatgtcaatggagattgcgattaatcaatccctcaaatatagtgtacagatccttgttttcaggcccaaaaattttatcagctttccgtagcgtttcctcttttgtttgtttatgggaattcaattctttaacattagccaagaatgcaccaaattgctcataagacaaacggttcctgacttggcgaaagaactctttcccatccacccgtgttcgtccagattgtgatcctgttcctgcatcagagcttgatattgaaccatgagttaaggacattgaggaaaacattgaagacctgtcatcatacatgccttttgtggttgcaaaggaaattg

SEQ ID NO: 210562 - DNA, 515 bp, Glycine max
aaacaaaattaatcatcttacttatgtattctccgaaaatggttgatttacattggaaatcaaagatgccaagttccgacatgccttccaaaactctaaaactctctctctccgacaacaagtccttaccctctttgcaactacccttccgcaccacagatatctctcacgccgcaccttctgtttgcgccacttacgactactatctccgtcttcctcaactcagaaagctttggaactcctcagattttcctaattggaacaacgaaccaatcttaaaacctatcttgcaagctctcgaaatcaccttccgctttctctccattgttctctccgatccaagaccttactccaaccacagagaatggactcgcaggatagagtctcttatcacacatcaaattgaaatcattgccatactatgtgaagatgaggaacataattccgacacacgtggcactgcaccaaccgctgatctcagcaggaacaatagcagcgagagcagaagctacagc

SEQ ID NO: 210563 - DNA, 458 bp, Glycine max
  unsure (1)..(458): unsure at all n locations
agaaggagcaaaagcaatggcgccgaagaagccgagaaccacgacaaggaaccctgatttggttagggggattggcaagtattcgaggtcgcagatgtaccacaagaggggcatctgggccatcaaggccaaaaacggtggcgttttgccccgccacgatcccaagcccaagcccgaggccccggcccagaagccgcccaagttctaccccgcggacgatgttaagaagcccctcgtcaacaagcacaagcccaaacccgcgaaactcagggctagcattactccagggactgtgttgatcctgcttgctgggaggttcaagggaaagagggtttgtttacctgaagcagctcccatctggattgcttcttgtaactggtccctttaagatcaatggngttcctctcagaagggtgaaccaatcgtatgtcattggtacatccacaaaggtggacatc

SEQ ID NO: 210564 - DNA, 850 bp, Glycine max
  unsure (1)..(850): unsure at all n locations
aaaaaaacaaaaaaagaaaaaaaaagaaaataaaaaagatagaaaaacaaaacaaagttagagagaagaggtaaaaaaataagaatatacaaagaaagaaaaaaacaaaaaaaacaaatgaccaagagcggaantgaaaaccaacananaattaangggaaaaacaacaaaggaggaaaanaaaagaaaaaaaaaaanaagaaaaaaaaaagaaaatttgagaaaaagaaaaaaagaaaaaaaaaaaagggggggaaaaaaaaaaaaaaaaaaaagagaaaaaaaaaagaaaaaaaaaaaagaaaagagggaaaaaaaaaaaaaaaaaaaaggagaaaaaaaaaaaaaaaaagaaaaatagaaaaaaaaggaaaaaaaggaaaaagaaaaaaagacaaaagaagaggaaacaaaaagaaagagaaatagaaagaaaaatacacaacaaaaaaaaaaaaaagggaaaaaaaataagaaaaaacaaaaaaaaaagaaacgaaaaaaaaaataaaaaaatcaaaaaaaaaggaggtaaataaaaaaaaaaaaaaaaggaataaaacaaaaaagaaagagaaaaaaaaaaggaaaaagaagaaaaaaaattaaaggaaagaaaaaaaaagaggaaataaaaaaagaaggagaaaggagaaaaaaaataaacaaatagaaaaaagaaaaaaacacgggggaaaaaaaaccagaaggaaaaaatgaaaagactaacaaacaaaaaaaaaaaaaaaaaaaaaataacgaaaaaaaacacaaagaagaaaggaacaagtgaacaaaagaagaggaaaacaacaatagaaaacaaaaaagaaaaaagaagaagaagtgg

SEQ ID NO: 210565 - DNA, 365 bp, Glycine max
ctctttccctctttatcttcctctttcagattcaccctcgttttccctctttcgcataaataaataaataaatataaacaccatgagcgttcctccgccgtctacggcggcgatgtggacgccgttcacggcagcgcagtggcacgagctggagcaccaggccctcatcttcaagtacctcaaggcgggtctctcggttccccctgacctccttctccccattcgcaagagcctccaattgatatcgtctcacccatcgatggggtattatgggaagaagatagaccctgaaccgggtcggtgcatgagaaccgatgggaataagtgaaggtgttcgagggatgcacaccctgactccaagtact

SEQ ID NO: 210566 - DNA, 453 bp, Glycine max
  unsure (1)..(453): unsure at all n locations
gccgaggcaaagttgttgcagccaaaagatgagagctggtctgaatgtgctcacaaaggatatgcagtaaagcctcagaagggtgatgccttgttgttcttcagtctccatctggatgcaagtacagatactaagagcttgcatggaagctgtccagtcattgagggcgagaagtggtctgcaaccaagtggattcacgtgagtgactttgaaaaaccattcaagcaagtggataatggagagtgtgttgatgagaatgagaattgccctaggtgggctaaagtaggtgaatgtgacaagaatccactntatatggttggtggggaaggagtaaaaangaaagctgtatgaagagttgcaatgtctgcacttcttaaggagtctattaccttttgtttgctctgaaatgcatgtagagccatacatacattgtcaaatatattgtatataaca

SEQ ID NO: 210567 - DNA, 481 bp, Glycine max
tctggcctgcttcacataatcatgcttctgcttactttggacagactccgtatcgcgggaggatgctgaataggccaactattagcatgagattcatgcctgacaaagggtctcctgaatatgatgcgttagctaagaagtctgggagggccaacttgctgaccttgactggcttaaatgagaccctcattgacctaaccatgataatgatccaaagctggcaaacatttgttgagagctaccttgcgcctacagatggcggtgactactgtacttctgatgccgggccattagaggcctttaagaggtttggaaagattctagcatagattgacatgaagctgatatagaagaacaataatgagacattgagaaaccgctatgggccggctaaaatgccctacactttgctctatccttctagtgaggagggattgactttcagaggaattcccaacattatctctatctaatggctcta

SEQ ID NO: 210568 - DNA, 462 bp, Glycine max
taaacggatgctattgacatctcccaaaatattcccggtacaccggcgcgtgtcggcggccgccctttttttttttttttttgttaaaaattttaaacctgcatgattgcatttattatttggggttccattacacaaacatggtttattaatgacaaatacaagtacattcagccactccaaatacataacttaaacatacacaactgatgaaggaatcagattccttctatttcacatttatttaaagccagggacagtacttcagcaaccatagagcccttaaatagagatactgttgggaattcctttgaaagtcaatccctcctcacttgaaggatagagcaaagtgtaaggcattttaacccgcccaatacggtttctcaaaggctcaatattggacttctctataagcttcttttcaatcttttcaagattcttttcaaaccttttaaaaggctt

SEQ ID NO: 210569 - DNA, 510 bp, Glycine max
  unsure (1)..(510): unsure at all n locations
cctttgttcactcttcttctcttgcggctagggttttagcgcagcttcttctagatttaaggaagatgggtaaggaaaaggttcacatcagtattgtggtcattggccatgtcgactctgggaaatccactaccactggtcacctgatttacaagcttggaggcattgacaagcgtgttattgagaggtttgagaaggaagctgctgagatgaacaagaggtctttcaagtatgcctgggtgctggacaaacttaaggctgagcgtgaaagaggaatcaccattgatattgcttgtgggagtttggaacaacaaagtattattgcacagttattgatgcgcctgacatagggatttcattaagaatatgattactgggacatcccaagctgactgtgctgttcttatcattgattcgaccactngtgggtttgaagcttgtatttccaggatggacagactcgtgaacatgctctgctttcatcacccttggtgtgaacagatgatttgc

SEQ ID NO: 210570 - DNA, 346 bp, Glycine max
ccttgctttccaggctgcaattaggagatggatgacaccaatgaaaaagacacaggcctctgctcatgatgcttctgccggcagctggaagcctaccaagaatgacactatggagaatcgggttcctggatttggcactacaatgaacattctctatggggatggtgtttgaggacaaggcgatgtggactcaatgaacaatatcgtttcccattacctgtattatcttgaccttctaggagacggccgagaacaggctgggccccatgacatgcttacatgcgctgagcaggttcctttcaacccatcttgcgaacctgcttcatcatcctaagattattatatt

SEQ ID NO: 210571 - DNA, 575 bp, Glycine max
  unsure (1)..(575): unsure at all n locations
tcctttttttttttttttttttaagaactttaactttacatgcattaatttaatcagtatgcaaatggcagcaaaataactgtatagaaaacagaaaaaaccatttatactatacagaattactatgtaaactacagaataactatatatatacaaagaataattatgtatactgaataacaatgtactaaataactgaatatacgctgaataacttaattatactgaataatcgcagcagaaatatcaaaataattgcagcacaagggaattaaaacaaacaaacatacatactgaataacttgataccaagaaaaaatagcattgtatgcttgtgtaaagagccgaagttatcttcaccttaaagaattgtagaagcctaaccagattctttgtaaatccacgatatttcttcaaaaataccttgacaaccacaatgatattgtcatagcagaagtcatatagcgtcttcacattgatattccaatcatcgccagaagatttacaatgttaatgacctatttctgcattacaaatgttgtcgcccgaatctgaacttcttacaagtngataat

SEQ ID NO: 210572 - DNA, 531 bp, Glycine max
ctcgagccgctcgagccgcaggttcaaagaagtgcagatgacaaaacagtgttgataacaagctacgaaggcaatcacaaccaccctctgccgccagccgacaccgccatggcaaatactacatcagcagctgcagccatgctgctatcaggttcagcagcaagcaaggaatcgctaacaaactctgcaggatattactcttctacaattccctatgcttcaatggcaaccctatcagcttcagctccattcccaaccatcactctcgacttgacccaaaaccccaacaacgccgccatgcagctgcaccgagtaccaccaggccatggcggcgccacgttccctctgccactgcatgcggcagcatctggtggtccccaccttctagggcaccccttgttcttccaacagaagctgcttccaccgcaagcattaatgccccttcttcaacgacaaccttcgtcgatggtcgaaacggtgagtgcagccattgcttctgatccgaactcactgagctttgcagcagcatct

SEQ ID NO: 210573 - DNA, 508 bp, Glycine max
gtgttgttcagttcttcttcctctcttttaacaacatctcacaattcattcaccttttaattcatctcactcacaaatcacaatgctcttcctttcttccttaataataataccataataatctgttacgttacggggcccaaatgtctgttacggagctcaaggagcgtcactctgctgccaccgacaccgtcaacaatctcagacaccgtttaaagcagaagcgcctttcgttgctcgacacagatatttctgggtatgcaaggtctcagggtagaacgcctgtgacctttggacctacggatctggtttgctgtagaaccttgcagggtcacacgggaaaggtgtattcattggattggacttctgaaaaaagtcagattgttagtgcatctcaagatgggcgattaatagtgtggaatgctctaactaggcagaaaattcatgccataaagctaccttgtgcatgggtcatgacctgtgctttttcaccaactggtcaagtctg

SEQ ID NO: 210574 - DNA, 481 bp, Glycine max
caattatacgtttccatatatacatcaggcacacaagtaatccattcatatgttaaattgttacacaagcatacaacagtgtcatgatttcctcaggtccacaaatattggaagtttgaatgccaatagcctcgaatatgcaacttgaatcttagcccaaaacttttacttagttattggctttgccatagcttcttgggaaagggataacgtccctaacattgccaaggccagttgcgaagaggaccatcaggtcaaaccttagagtgaacccagagttcttcactgttccgtttcgacgaagatctaggtaccattcatacttctctcgcggcaagcctaactcatcaatcctggagcttatcatgttaagacgttcctcgttttggctaccagatattattgttccaagctttgggacaaccaagtcaaacgcagctacagttccatcatgattctggcgagcataaaatggcttagc

SEQ ID NO: 210575 - DNA, 615 bp, Glycine max
cacctttccttttttcccacagaaaaaaacaccacctttctttttccgactaaaggttcgccggaaaatgcctctatcctcctcttcctcctccgccgtagactccgccgtctccggcgagatcatgctctttggcgttagagtcgtggtggactccatgcggaagagtgtgagtatgaacaacctctcgcagtacgagcttcctcgcgacgctgccaacgccaaagacgacgccgcaggatacgcctccgccgatgatgcagctccgatcaactccgacaagaaccgcgaccgcaagcgagggattccatggactgaggaagagcacaagctattcttggtggggttgcagaaagtggggaaaggtgattggagagggatctcaaggaactatgtcaaaacgaggacgccaacacaggttgctagccatgctcagaagtactttctccgccgcaccaaccttaatcgccgtcgccggagatccagcctctttgacatcaccaccgactcggtctctacaacccctatggaggaaggagtacagatccagcatcaagatatgtgtctctctttcatcagtgtaccctgtacccctgaaggaacaacatgaatgga

SEQ ID NO: 210576 - DNA, 595 bp, Glycine max
cacctttccttttttcccacagaaaaaaacaccacctttctttttccgactaaaggttcgccggaaaatgcctctatcctcctcttcctcctccgccgtagactccgccgtctccggcgagatcatgctctttggcgttagagtcgtggtggactccatgcggaagagtgtgagtatgaacaacctctcgcagtacgagcttcctcgcgacgctgccaacgccaaagacgacgccgcaggatacgcctccgccgatgatgcagctccgatcaactccgacaagaaccgcgaccgcaagcgagggattccatggactgaggaagagcacaagctattcttggtggggttgcagaaagtggggaaaggtgattggagagggatctcaaggaactatgtcaaaacgaggacgccaacacaggttgctagccatgctcagaagtactttctccgccgcaccaaccttaatcgccgtcgccggagatccagcctctttgacatcaccaccgactcggtctctacaacccctatggaggaaggagtacagatccagcatcaggatatgtgtctctctttcatcagtgtaccctgtacccct

SEQ ID NO: 210577 - DNA, 285 bp, Glycine max
accaattacaaattacactctttgcctcgcaccttcaacttaaccttttctactcataatcttaacaacttgctagaagaagataaagaaagagaaaaagtgtgtgtgtgtgagagagagcaatggctggctcgtgggcacgccgttctctgattgttctggctatcatttccttcggatgtttatttgcaatttccattgctaaggaggaagccacacaattggggacggtcatcgggattgatcttggaacgacctattcatgtgttgggtgtttacaagaac

SEQ ID NO: 210578 - DNA, 373 bp, Glycine max
gagcaattaattttttttttaattattttaaccgggggtggggtggtaaactttatgaatttaatctgatggcatgaaatgaaacaaccaaaatgaaaacttttgtttccaaaactatgatctcgaaaaaacaaggtcccaaattggggaaaaaatcaataccaatttcttggatccaaaatatcaaaaggacaagggaatcggcatgatcatcccaggaaattggagaaactcagcaagccaccttcaccagatccgcctttctttccaaacaagacaagctgcatcttggcataaccttccagcacaccggaatcagcaacagatgcaaatgtttgcaccaacacctttgaagaaagactttggaccctca

SEQ ID NO: 210579 - DNA, 488 bp, Glycine max
  unsure (1)..(488): unsure at all n locations
agaaggagcaaaagcaatggcgccgaagaagccgagaaccacgacaaggaaccctgatttggttagggggattggcaagtattcgaggtcgcagatgtaccacaagaggggcatctgggccatcaaggccaaaaacggtggcgttttgccccgccacgatcccaagcccaagcccgaggccccggcccagaagccgcccaagttctaccccgcggacgatgttaagaagcccctcgtcaacaagcacaagcccaaacccgcgaaactcagggctagcattactccagggactgtgttgatcctgcttgctgggaggttcaagggaaagaggggttgttttcctgaagcagctcccatctggattgcttcttgtaactggtccctttaagatcaatggggttcctctcagaagggtgaaccaatcgtatgtcattggtacatncacaaaggtggacatctctgggtgtaatgttgataaaattgatgac

SEQ ID NO: 210580 - DNA, 448 bp, Glycine max
ccgcagttgcgaaatctctggagcatttgatttcattttcggatactccaccaccttgatccataactcgaagatcttggtgaggaagcccatggcaaatcagcagaacatagtggtggcagatggcacacggcagaagaacatgcccacaggaatagtactccataactgcgagatcatgccggaccctaccctcttggcagaccgcttgagcgtgaagacttacttgtccaggccatgggaggcattctcaagggcagtgttcatcgagaatgttatcggtgacttgattcagccagatggttatattgcatggagcccaatcgaaccaaacacacaggattgctacttcgctgagtttggcaacactggaccaggttccgttgctcatgcaagagccatgtttggaaaggtcttattagctagcggaggctgtacaatacactgc

SEQ ID NO: 210581 - DNA, 461 bp, Glycine max
gctatgaagttcggggtgagtggcgaaggctcgttttcctccggagaagccaaccttattttgttctttatatgtgcatttgttgctgcatttgcatggtcttggggtccactagggtggttggtgcctagtgaaatatgccctcttgaggttcgttcagcaggtcaagccatcaatgttgccgtaaacatgctgttcacttttgcgattgctcaagttttcctagtcatgctttgccacttgaagtttggccttttcttcttctttgctgcatttgtactcatcatgaccatcttcattgccatgttgttgcctgagacaaagaacatccccattgaagaaatgcatacagtctggagatcacattggttttggtcaaagattgttccacatgctgatgatgatcgcaagcctgaggcttgccaaagttgaataagaatgccaatgatatataaggagtg

SEQ ID NO: 210582 - DNA, 450 bp, Glycine max
tgcaaagcatccttcgcttcaatctctctctctctctttgcgctttctgcaaaccgaacatttcatctccaaagggatcaacaggtcgaaggagaaatggggctgacattcacgaagcttttcagccggcttttcgcgaagaaggaaatgcgaattctgatggttggtcttgatgctgctggtaagaccactatcctctacaagctcaagctcggagagatcgttactacaattcctaccattgggttcaatgttgagactgtggaatacaagaacattagcttcactgtttgggatgttggtggccaggacaagattcgtcccttgtggaggcactacttccagaacactcagggtcttatttttgttgtagacagcaatgatagggacagagttgctgaggccagagatgagttacataggatgttgaatgaggatgaactgagagat

SEQ ID NO: 210583 - DNA, 494 bp, Glycine max
tccttttttttttttttttttttttttttttttttttttttactatcttgcatcagcttggggactgttcttttttattgcatgtgagactaaactggtttagttgactatattctcttggatgttcctaaaattacaaatctacttttgcttattagaaggaatcatcttcagaaaattgggaagtgttattgaagaaacatgtctgtctacgcacaagtagcttcaactgctaaactttttgccactcctctacaagggtttccgaatgtctcacttgatactccaacactacaactgcttgatccaatgcaggccttttgcacaatagaaagagccttgttgctgctgcaacgtccctggtagaagttaccacagggtccaaggggtgttccatagctagcaaatttaatggaagagatgacctgggtatcaagagggcaagtgagtgatagcacaggacctacttttcttcctgattctggatctgagtt

SEQ ID NO: 210584 - DNA, 484 bp, Glycine max
aaatggcaagtatatcaaattggttttttgtcttcctcctcatctctacactactgggcatagagcccagcctctcaagcccaagcccaagcccaagcccaagcccgttcataaaatcctcctgcagcaagcacccagtacccagccctctgcgtctcatccctctccgtctacgcctccagcatccaacaggaccctcaccaactggttcagacagcactctccctctccctgaaccgcacccaagccaccaaaaccttcgtggctaactgcaacaaattcagaggcctgaaacccagagagcacgctgcactcaaggactgcgccgaggaaatcagcgacagcgttgaccgcctcagccggtcgctgaaggagctcaagttatgtaaggctaaaggtgaggacttcacgtggcacattagcaacgtggagacatgggtcagttctgctttgaccgatgagagcacttgcggcgatggattct

SEQ ID NO: 210585 - DNA, 569 bp, Glycine max
  unsure (1)..(569): unsure at all n locations
ctcagccattaccacctcttcactttttctctctcttcccaaactaaacataaacatacattacacatttctagggttctctcacacaccaagattctcctagctgcagctgaaggactgtgaagatgttggagaaagttgaagaatttaacacggagaggatgatggaggaatttgagagggtgacaaaggatgctgagaggattcaaagggaaaccctgaagaggattttggaagataatgcttctgctgagtacttgctgaatttgggcttgaatgggaggacggatcctgagagtttcaaggcctttgttccacttgttactcataaagatttggagccttatatcaatagaataattgatggtgatttttcttctgttctcactggcaaacccatcacaaccatgtctttgagttctggcactactcaaggaaagccaatatatgtaccatggaatgatgaattgtttgacaccacattgcagatatatcacacctcttttgccttcagaaacagggaatttcccataaacaatggcaaggcncctgggcttatctacagcagc

SEQ ID NO: 210586 - DNA, 578 bp, Glycine max
  unsure (1)..(578): unsure at all n locations
ctcagccattaccacctcttcactctttctctctcttcccaaactaaacataaacatacattacacatttctagggttctctcacacaccaagattctcctagctgcagctgaaggactgtgaagatgttggagaaagttgaagaatttaacacggagaggatgatggaggaatttgagagggtgacaaaggatgctgagaggattcaaagggaaaccctgaagaggattttggaagataatgcttctgctgagtacttgctgaatttgggcttgaatgggaggacggatcctgagagtttcaaggcctttgttccacttgttactcataaagatttggagccttatatcaatagaataattgatggtgatttttcttctgttctcactggcaaacccatcacaaccatgtctttgagttctggcactactcagggaaagccaatatatgtaccatggaatgatgaattgtttgacaccacattgcagatatatcacacctcttttgccttcagaaacagggaatntcccataaacaaatggcaggcctngggctttatctacagcagcaagcagttc

SEQ ID NO: 210587 - DNA, 544 bp, Glycine max
  unsure (1)..(544): unsure at all n locations
tctagatcgcgagcggccgccctttttttttttttttgaccatatgcaacttatatcattggtaagttgaaacggggaaaagtacattaaaaaaacgagaaaagtaaaatccaaatccaaaacataatgacaagacaggttattatctaaacttcaaaagggtcttcgcaaaatcaagaacaacccatgacaattggtctgcttaatcgacttcctcaattttgggtccagcaccgcttccactgccagcagcaggaccatcctcatccatggctccacccgcatcaccaccagctccttggtacatctttgctatgatggggttacaaatgctctccaactccttcatcttgtcctcgaattcgtcagcttcagcaagttggtttccatcgagccattggatagcctgctcaattgcatcctcaattttcttcttatcatcagcagacagcttggaagcaatcttatcatctttaattgtgttcctcatgttataggcgtaattctccaatgtatttttggcctncactttcttcttatgctc

SEQ ID NO: 210588 - DNA, 488 bp, Glycine max
gggagaggaagaagaaggtgcgagtcaacaagagtctcatgttgatgttagtttggctgagacataagaagctagattccgaggagtttacaaggtattcgcatctacaatatttgcagcaatatgtctgattcgggtgtaccgagtggcaaacatactcacagttgctagtgggagatggacttggattagtgctatggtgtcagagttatgttttggaatatactggatcatcactcaatctgttcgttggaaaatcgtatatcaaacgcctttcaaacacaggctcttacagagatatgatgatgagagtttaccagcagtggacatttatgtgtgcacagctgacccaacacttgagccaccatgcatggcgatgaatacggccttatcagcaatggcgtacaattatcctgcgaataaagtgagcgtgtatctctctgacgatggatgctcagagctgacatgctatgctctcttataagcct

SEQ ID NO: 210589 - DNA, 539 bp, Glycine max
caaagcctccaccaatgtttttgctgctttcgccgccgaaacctcaccggagctccggtaactcccctggcgacagcattccagactggatctccgaatcaatcaacggcggctccctccgccgcgtcgacctcaactccggcaccaacggctgggcgtcgccgccaggctccgtgttctccctccgctccgaaagttactttcagaaccgccaaaaatctcccgccggcgactacctcctctcgccggcgggcatggactggctcaaatccgccgcgaaactcgaccacgtgctctcacgcgcggacaaccgcgtgatgcacgcgctgcgaagatgtcaaaccctaggtcgctccctaaagagcttcgtcttcgcggtgaatctccagatcccgggcgcgaaggagcaccacagcgcggtgttctacttcgcgaccgaggaaccggatccggtccgaaccggttcactcttaaaccggttcgtgcacggcgacgacgcgtttcggaaccagcggttcaagctggttgaccggatcgcg

SEQ ID NO: 210590 - DNA, 573 bp, Glycine max
  unsure (1)..(573): unsure at all n locations
gcaccacctccggcccatttctnntagtactagaagccaaatacccgatacacccacataccagtcggcggccgcccttttttttttttttttttacttttttttttttattttttattttttttttttttcttttgggtcttggtttaatttattttcattatttttctttttacctttttttcaaaggccccaagaaaaaaaatttaaccccagaaaacccaccccaaaaaaccccccaaggggccaaaaaacggggccaaaacccaaaataaaagaaaaaaccttgcggggaaaaaacccccaaaaacgggggaaaaaaaaccaaaaaccgcccccaaatcccgaccttccaaccccggaaaggcaaatcaaaccccttctaaaggggcccccaaaataaaaacctggggccgcttttaaaaaacggcgaaaggggaaaaccccgggggtccccaaaaaaaaccccttgggaaaaaacccccttttcccacgcggggaaaaaacaaaaaggcccccccccgaggcccctaccaaaaagtggccccccccaaagggcaaagggcccccccc

SEQ ID NO: 210591 - DNA, 425 bp, Glycine max
tatttttttttttttatttttttttttttttttttttttattttttttttttgggtttgggtttatttttaattttttttttattttattttttttttttttttttttaaaaggcaaaaaaaaaaattataaaaaaaaaaaaatacacaaaaaaaataaaactaagggataaaaaatcgggataaaaaaaaaaaaaataataaaaaaaaatgggggaaaaaaaaaccaaaaaaaggggtaaaaaaaaagaaaaattgacccaaaatccgaagtttacaaaccgggaaaaaaaaattaaaaacttttaaaaggggaaaaaaaaaaaaaaaaaaaggggggtttttaaaaaaaggataaagggaaaaaaccgggggttccccaaaaaaaaaaccatggaaaaaaaacacccttaaccaagttgagat

SEQ ID NO: 210592 - DNA, 605 bp, Glycine max
  unsure (1)..(605): unsure at all n locations
ngctccccggccccccccccaggcccccnactgcccgggacgtaaatagcatatattcgcancgcctcatgcgcgattnaccggggacaagccactcactagncgggggacgccctctttggcagtgatacattttttgaacgtttatcaaaccaaagaactagccggggggttagggctcactggctcacctaacatcccggttctgaacgacccatccaatctctctgccaaagctgagttggaaagagcattgccaaaagggcattgggaaagagagaagaataggggagtggtgcacagtggttggtttcagcagcagcttgtgctgaaacactcaagtgtggggcgctatgcatgccatggtggctctagcccactgattgaagctatggtcaacgagtgtcaacaggcgctgctgcctttcaagggtgaccagcgtgtcaattctaaactcattgccaatgattcaaaggcaggggtagaggtgaataggattgatgaagacgggtgcttccacagagaggatatactggaggcattgaaaactgtcatgttggaggataacagagagcaagggaagcaaacaacagaaaaccacatgc

SEQ ID NO: 210593 - DNA, 562 bp, Glycine max
aagacaacttcttggtcttgaccaaaatgagtaggaatacaataacttcaagttacaaaagcaatttttagcttttttaaggtgaatctcctaactgcattaattgatcgggagaaaggagacacagaataaaacctacaacgggaaagcaaaatcacaagaacaacgagactgaccacgcatatctcaattgatatatgataatatgatcattttgaactatagtttatactttctagtcttggtagactttattttccattggaagagacaagactaagccatagactttaactgggcaaccagatctgtgatgaatttgttctgaatttccttatttgataaaaacttgctccattgcatgtggttttctcttatttgcttcccttgctctttgttatcctccaacatgacagttttcaatgcctccagtatatcctctttgtgaaagaacccatcttcatcactcctattcacctgtacccctgcctttaaatcattggcaatgagtttagaattgaaaaactggtcacccttgtaaagcaacagcaccagttgacac

SEQ ID NO: 210594 - DNA, 435 bp, Glycine max
gggggagcaatacggcaaaaatattttatcagggagggaccaagtccatttttttttaaaattaccccaaaagacattcaaggctaaacatcattggcagaacataaaattgtgacaaattccaaggccctttaaactggaaatttacatttcccaaagattccctttacccacgcccaatccactatgggggaacccctatatctaattcaaccccaatggggaccctaccaaaagacgttattcacgagccgttggggccaaaacctacaaggcccaacaaccttgggccttccaaacgagggttaaactaaaaggtattcaagggaatatgcccgaaaggcccggaggttggaaatgtcccccataaaccattaatgggaacatccccttctttaagggttgaaacggcaaccaggtccttggggaacgggc

SEQ ID NO: 210595 - DNA, 628 bp, Glycine max
  unsure (1)..(628): unsure at all n locations
cgcccccgggccccccncagcnccnnntgtgcccccaggatgcgcaccagcaactatcgtaacctatcatgcgcacatacctaagctcggcattcttattaaaatgaaattcaaatcatttcttttataaatttaaaaaaaattctttaattaaatattcaatgaaattaaatatttaaattaataaaattagtcctgtcttattccattgcttgaattggtttctttttacagcagctaatgctagtcaccgcacttagtcaatgagctagaatgggttctaaagatatccatagacatatatagatatatttatctatacatatctttagaaaaacaaaaggagggatatctcctaggacgtatcatcctatgcatagcagtggggaattatgggacaaacaataaatccgctggggttcagactaggctcaactcagagccatgacactattgggttagctcagccaacacattattccgagactatacacgaggatatagaagtacgacattgtatcaaaaatcatctacaaaaaaatataagactatcctctggcgttgagggaattggccagctgctgattcagagacgaattgatcctattcaaggtataatatatatggg

SEQ ID NO: 210596 - DNA, 427 bp, Glycine max
gggaaacaaaacggcacaaatattttatcagggagggacccagtccatttttttttaagattacctcaatagatatccaagtctaaacaacattggcagatcataaaagtggtacaaaatccaatgccctttaacatggaaatttacatatcccaaagattccctttacccacgcccattacactatgagggaacccatatatctaattcaaccccaattgggaccctaccacatgacgttattcacgaaccgtttggggcaaaacttacaagtcccaacaactttggaccttccaaacgaggattaatctcaaaggtcttcaagggaaaatgctcgaaaggcccggaggtaggaattgtcccacataaatcattattggggacatccactactttaaggcttgaaacagcaaccagttccttgggg

SEQ ID NO: 210597 - DNA, 482 bp, Glycine max
  unsure (1)..(482): unsure at all n locations
ctcagccattaccacctcttcactttttctctctcttcccaaactaaacataaacatacattacacatttctagggttctctcacacaccaagattctcctagctgcagctgaaggactgtgaagatgttggagaaagttgaagaatttaacacggagaggatgatggaggaatttgagagggtgacaaaggatgctgagaggattcaaagggaaaccctgaagaggattttggaagataatgcttctgctgagtacttgctgaatttgggcttgaatgggaggacggatcctgagagtttcaaggcctttgttccacttgttactcataaagatttggagccttatatcaatagaataattgatggtgatttttcttctgttctcactggcaaacccatcacaaccatgtctttgagttctggcactacttanggaaagccaaaatatgtaccatggaatgatgaattggctgacaccaca

SEQ ID NO: 210598 - DNA, 583 bp, Glycine max
caaaaacatagtactatacagccccactttctctttctttttctcttcactctaaagtctaagcatccatggccatggcgtctgcaaagctcaacaccttgtcttcccagtggatcgcccacaattccttctctcctcgccgtggatcctcttctcgccgagtctctcttccgatccgcgcttcttcttaccaacacgaactcgtccaaaccgccaaatctattgcatctcccggtcgtggaattcttgcaattgatgaatcaaatgccacatgtgggaagcgtttagcatccattggattggacaatactgaggtgaatcgccaggcctataggcaacttctgctcaccacacctggccttggtgaatacatctctggtgcaattctttttgaagaaaccctttaccagtcgacaacagatggaaataaatttgtggattgcctccgcgatcagaacattgtgcccggcatcaaagttgataagggtctggtccctctgccagggtcaaacaatgagtcttggtgccaagggctggatgggttggcttctaggtctgctgaaactacaagcaaggtgctcga

SEQ ID NO: 210599 - DNA, 376 bp, Glycine max
gctctgtttctgtctctgtgtttgctgctgaggattccgaacgagcgaccttcttcgtttctcgcaaagtttaagtcatcatgggtaaggaaaagactcacatcaacattgtcgtcattggacatgtcgactctgggaagtcaactaccactggtcatttgatctacaagcttggaggtattgacaagcgtgtgattgagaggttcgagaaggaggctgctgagatgaacaagaggtcattcaagtatgcctgggtgcttgacaagctcaaggctgagcgcgaaagaggaattaccattgatattgctttgtggaagtttgaaaccaccaagtactactgcacagtcatcgatgcccccggacatcgtgactttat

SEQ ID NO: 210600 - DNA, 588 bp, Glycine max
ggcaatgtcttaccaaattagaaattcttttgtcttctttttcctttgtgttcttctctttggtgtgtctgctctgggtcgaccagccacttttctgcaagactttcatgtcacgtggtctgactcccacatcaagcaacttgatcaaggcagggcaatccaactcagacttgaccaaagctctggatgtggatttgcttccaaggtgaagtacatgttcgggcgtgttagcatgaagatcaaactcgtccccggagactctgctggcacggtcactgcattttatttgaactctgacacgaactacgttcgcgacgagcttgatttcgagttcttgggcaaccgtactgggcaaccttacacagttcaaacaaacatctacgctcatggaaagggtgacagagaacagagggtcaacctctggtttgaccctgctgcagacttccacacctattcaattctctggaaccatcaccatattgtattctacgtggatgattttccaatcagagtatacaaaaacaacgaggctcgggggattccatacccaaagatgcaggcaatggggtgtattcgacattgtgggaa

SEQ ID NO: 210601 - DNA, 562 bp, Glycine max
gccgccatgggaaatgccttcctcttccagggcggagactgtgctgagagcttcaaggagttcaatgccaacaacatccgtgacaccttccgcatcatcctccagatgagcgtcgtcatgatgttcggcggccaaatgcctgtcatcaaggtggggagaatggcggggcaatttgcaaagcctcgttcggattcgtttgaggagaagaatggcgtgaagcttccgagttacagaggggataacattaacggagactctttcgacgagaagtcgaggattccggatccgcagaggatgattagggcttattgccaagccgcggccacgctgaatcttctcagagcttttgccaccggtggttatgctgctatgcagagggttactcagtggaatttggacttcacggatcacagcgaacagggagataggtaccgagagcttgctatccgagttgatgaggcccttggattcatggctgctgctgggctcacggtggaccatcccataatgagaaccacttgattctggacatctcatgagtgcttattgctgccttatgaac

SEQ ID NO: 210602 - DNA, 666 bp, Glycine max
gtcctaatctctgccggctttacgttatcgagctgcatgtccgatgcccgttagaaccaataccagtcggcggccgctctttttttttttttttgagttgccaacgttttcgtttcgatttcgtttctttattatcagggaaaggactcttgtccttggcagttcaaacgcattactagatagtatacacatacaaacacagaacacaacatcaaagtgacaaccatcgattaataataaatatgtagggcaaataaaaaacgaacaaagatatctttctcttgttgctttttgaaggtgacttttacagtactcctagaggggcaagaggttgctgcgatctgatcctgctctttctcaaacgctcagcgatgatgaaagcaagctcaagagattgtgaagcattgagccttgggtcacagtgtgtgtggtaacgtgagctcaagtcatcaaatgtgaccgtccttgacccaccaatgcactcggtcacattctgacccgtcatctctagatgaacccctcctgggtggcttccttcttgctcgtgtacgtcgaagaatgctctcacttcggccctgatggaatcgaaggggcgagttttaagaccacagggagccttaatggtgtttccatgcataggaacactgacccaagtgacaatttggc

SEQ ID NO: 210603 - DNA, 537 bp, Glycine max
gacatctcaactgacccgactccgactctgatgttgtagtgccaataaccgttagacccgataccagtcggcggccgctgtcaaatgtgactttattatcctacttttcattttttcccgggaactgatgacacagtccgaaggaaggactatgcatctgactgtgacataaacagaggagtatgtaatgtgcttcttcctgaaatactacattctgattcttcgcgctggtgtaacaccagaagaaggaatcgttgtagaagcctcagaactttgaggagcattgaaacacttggccacaagctgctcaatcggatccactgcacaaccgtgcagaacaaggtcagagaattcagcaacatagggagcatacttgtagaaaaccctgtatttgcccccattggtagcccaatcagatgcatcccatattgatgcatacaaagtcataggcttagaagggaaatgccctcccatagattctgtacgagtaacttatctaataagaacattgtccacataaaatatgatctgagagtc

SEQ ID NO: 210604 - DNA, 552 bp, Glycine max
agtactatgggatcaacattagggatacagcttctccccatgcagagcaggaagtgggacagtagttataattaacacacacaactgctaccgttaaacggttagtgattacaaacaacattgcgaaagtaaattggatcaaggtcgtcatatcagtggttaccatcttcaagggttgtcatttctatcggtagtaagcctgctgataagtgggagccaaaacatttccatagccaccatatgcaggaggatagttcatgggagctgccgggtaagaccctgcaatagccggtgccggctcaggtgaataagcagcataaggatttgtcgggggacttctgctgccatacatgtggggtgcggaagggtaatgctggaagagcagctgggtattggccgtgtgatggagacctgacaaatgtaggagcagcagggaaagatgatacatatgcattaggcaaacgcccagctttggctggaggcattggacctccattgctgttgcttgctcgagttcttttaatggcaggaacagcaatccgtttccttttc

SEQ ID NO: 210605 - DNA, 477 bp, Glycine max
  unsure (1)..(477): unsure at all n locations
ttngttttanccgttttttttgaggccattttagaacacgcattcatgagtaaaaacaaagggggcaccaaaaacagcgcatatcattatcaaatgttcgaacatgaacacgaacacgaaacactaacataaaaatccagccaacaaaactgtaacaagatgatagtgggtatctagctattaagataatcaatgtatcaagcgcgatcacaaatccaccggattaaaaaaaaaattcctcaaaagacacggtaagatttccccattgtactctacagatacaagcacctgacatttagccaggcctttttcaacaaagagacaaggaaattaacactcagttgaacattgtggaagattggcttttcctccatactaacattccccacagctactcccatgcagagcaccttcttaagttgaaatttaaccatggccttggactcagaaaccttcgactcaagagtttcctggtga

SEQ ID NO: 210606 - DNA, 448 bp, Glycine max
  unsure (1)..(448): unsure at all n locations
gccaaacaacacgagcgcttcaccccagtctacgatgtcacctaatgatacagagcaaaaccagacagcagccgccggccgccctnaaattaaaccagaacctttacacttttacagaacgaaaccgcaaagaagggcccagagaaacaagcagacataggaacgaccacaaacaaacgagaaagaggacaaaccgaaacacaagaaacacaaagcaacaacaaaaaaccggaaatcaaagctcacattccagtaaaagccttctttgcaccgctagaagaaccagctgggatcactatcaacacagagaacctcacagcctaagaaagaggccggcaaggaccacaaacaacgaggccggataagcctagaggaaagccacaagaaacgagccaatcaagatcagaccaaatgaaacaaggaagaaacccagcagagacaaaacgca

SEQ ID NO: 210607 - DNA, 523 bp, Glycine max
ccatagtcatgttcaatattgaaggatgaatatgtacacaacaatggaaccaaacgagaaaagcagatatccaaacgggctaaaagcaaagagtcacacactcatcatattaggttacacttttaaccacttagaaagaaaaatgctggactaagaatcagctaagcttgttagccccaagttgcccaattagcttcacttccaacacgtggcatcacctggatctttgactgagagtcaacattgaagttggccccgcacataaccccctcgctgtcaatccgaggcattgctttcatcttctgtgttggatgctcaaagttcatgagaccgtgttcactatgaaacatacacccagctggaaatggtgcaaatgatttagcacaacttgcttttataagctccagattttcagaaattataacagaaccatcacctgcaataccccagtagagctcaatatggccattagaaccagatgcaacaaaaactgttccatccttggtgtcatagatcacaaatg

SEQ ID NO: 210608 - DNA, 539 bp, Glycine max
gggaggctagccgtcggtgaagaatcgtttgattcgcctggaaatcgcgattcaagcacgattcatccccgatacagagattcaaccacaattcaggaaagaaaaacgagacaaactccgtttcgtatcaatagaagctggaatcgtatcgaatcgcgagatacggatcgtgaatcattattgtagaagtctctgggtgatggctggttcagaacctgtaagtgcagagggagagagtatggctgtggatgctgccccaaggaagccccggattctacttgctgctagtgggagtgttgctgctgtcaaatttgcaaatctttgtcattgtttctctgaatgggcagatgtaagagcagtttcctcaagtggatctttgcatttcattgatagagcatcaatgcccaaggatgtaattctatacacggatgaggatgaatggtctagttggaagacattaagtgatagtgtgcttcacattgagcttcgcaaatgggcagatatcatggtcatcgctccattatcggcaaacacccttg

SEQ ID NO: 210609 - DNA, 582 bp, Glycine max
caaaaacatagtactatacagccccactttctctttctttttctcttcactctaaagtctaagcatccatggccatggcgtctgcaaagctcaacaccttgtcttcccagtggatcgcccacaattccttctctcctcgccgtggatcctcttctcgccgagtctctcttccgatccgcgcttcttcttaccaacacgaactcgtccaaaccgccaaatctattgcatctcccggtcgtggaattcttgcaattgatgaatcaaatgccacatgtgggaagcgtttagcatccattggattggacaatactgaggtgaatcgccaggcctataggcaacttctgctcaccacacctggccttggtgaatacatctctggtgcaattctttttgaagaaaccctttaccagtcgacaacagatggaaataaatttgtggattgcctccgcgatcagaacattgtgcccggcatcaaagttgataagggtctggtccctctgccagggtcaaacaatgagtcttggtgccaagggctggatgggttggcttctaggtctgctgaatactacaagcaggtgctcg

SEQ ID NO: 210610 - DNA, 506 bp, Glycine max
ataattaggctaagcttatcatgtataaagtgtatgtaacatttgaaatttattacatgctttattttgtggcaaattaaccatccctcagaaattgcctaagtctgaagtttaattcaaaaaaatagaaaatccgacaacacatgatttttaagaatataaacacaagaatttgatgagtgcagctagctcacaagaatttatccaaatattttccaagaagagaagctatgagccttctataaacgctttcagtaggatgaaaactgtcccaaaacacatactctaaatcgttgggacacaagggagtgaaacggttgcataataacacaacctctattgttcccgtgccacagcaacccttgtctccgactttatagccatattttttgtagtttataatgatgtcaaagagagggttgtaaacatcaatgtaaactatcctgctatcttgaaagttgtgattgagagaatccagctcctttgacaatttgctgttaaataac

SEQ ID NO: 210611 - DNA, 578 bp, Glycine max
ctatcacttccctcaccatggccgagtcttgcctcctctcttctccctcctcactcttccacaccaaaaccaaaccctctctctttacacccccctccaaacccctcacactccaattttcatgcctcaactcctccgtctctctctccctcgccgcaccaactcaccgttctccccttgtaactttcgtggcccaaacttccgattgggctcaacaagaagaagaacagagcctcgctgaaaccgaagcgggcctggaaagttgggagcccaacggcgaagacgccggcgatgagagcttcgtcgaaccgccggaagaggccaagctcttcgttgggaacttgccttacgacgttgatagccagaaattggccatgcttttcgaacaggccggaaccgttgaaatcgctgaggttatttataacagggaaactgaccagagtcgcgggtttgggtttgtgacgatgagtactgttgaagaagctgaaagcgctgtggagaaattcaaccgctatgatatcgatggaagactgctgactgttaataaggcttctccaagagaactcggcccgaacgcc

SEQ ID NO: 210612 - DNA, 557 bp, Glycine max
  unsure (1)..(557): unsure at all n locations
ggcaatgtcttaccaaattagaaattcttttgtcttctttttcctttgtgttcttctctttggtgtgtctgctctgggtcgaccagccacttttctgcaagactttcatgtcacgtggtctgactcccacatcaagcaacttgatcaaggcagggcaatccaactcagacttgaccaaagctctggatgtggatttgcttccaaggtgaagtacatgttcgggcgtgttagcatgaagatcaaactcgtccccggagactctgctggcacggtcactgcattttatttgaactctgacacgaactacgttcgcgacgagcttgatttcgagttcttgggcaaccgtactgggcaaccttacacagttcaaacaaacatctacgctcatggaaagggtgacagagaacagagggtcaacctctggtttgaccctgctgcagacttccacacctattcaattctctggaaccatcaccatattgtattctacgtggatgattttccaatcagagtatacaaaaacaacgaggctcggnggattccatacccaaagatgc

SEQ ID NO: 210613 - DNA, 601 bp, Glycine max
aaatggcaagaatatcaaattggtctcttgtcttcctcctcatctctacactactccacatagagcccagcctctcaagcccaagcccaagcccaagcccaagcccgttcataaaatcctcctgcagcagcacccagtacccagccctctgcgtctcatccctctccgtctacgcctccagcatccaacaggaccctcaccaactggttcagacagcactctccctctccctgaaccgcacccaagccaccaaaaccttcgtggctaactgcaacaaattcagaggcctgaaacccagagagcacgctgcactcaaggactgcgccgaggaaatcagcgacagcgttgaccgcctcagccggtcgctgaaggagctcaagttatgtaaggctaaagggtgaagacttcacgtggcacattagcaacgtggagacatgggtcagttctgctttgaccgatgagagcacttgcggcgatggattctccggaaggcgctgatgggaagatcaggactctattaggctaggatgtcaatggtgtcagttactagcatgctctctgcttataaccatatgctgacacactagtgggaacatgatct

SEQ ID NO: 210614 - DNA, 680 bp, Glycine max
agtaacatctcatgtgtctggtcttctagtctctgatgcctgtatgctaaatcgcggatagacgcgctaaccagtcggcgggcgatcttcgtttattttttttttttttttttatctatgatttactcacatatataataatgacatggagcacgtaaaagaagaaaagtaaagcattaagcaaccaagatcattgttcccaactagtgttgtgcagcatagcggttaataagcgagagagcattgctagtaacctgagcaacattgagcatcctagccctaatagagtccttgatcttcccattcagcgccttcccggagaatccatcgccgcaagtgctctcatcggtcaaagcagaactgacccatgtctccacgttgctaatgtgccacgtgaagtcctcacccttaaccttacataacttgagctccttcagcgaccggctgaggcggtcaacgctgtcgctgatttcctcggcgcagtccttgagtgcagcgtgctctctgggtttcaggcctctgaatttgttgcagttagccacgaaggttttggtggcttgggtgcggttcacggagagggagagtgctgtctgaaccagttggtgagggccctggtggatgctggaggcgtacacggatagggatgagacgcagagggctggggactgggtgctgctgca

SEQ ID NO: 210615 - DNA, 514 bp, Glycine max
aaatggcaagaatatcaaattggtttcttgtcttcctcctcatctctacactactgcacatagagcccagcctctcaagcccaagcccaagcccaagcccaagcccgttcataaaatcctcctgcagcagcacccagtacccagccctctgcgtctcatccctctccgtctacgcctccagcatccaacaggaccctcaccaactggttcagacagcactctccctctccctgaaccgcacccaagccaccaaaaccttcgtggctaactgcaacaaattcagaggcctgaaacccagagagcacgctgcactcaaggactgcgccgaggaaatcagcgacagcgttgaccgcctcagccggtcgctgaaggagctcaagttatgtaaggttaagggtgaggctttcacgtggcacattgcaacgtggagaatgggttcaagtctgctttgaccgatgagagcacttgcggcgatggattctcggggaggcgctgaatgggaagatcaggactc

SEQ ID NO: 210616 - DNA, 696 bp, Glycine max
  unsure (1)..(696): unsure at all n locations
ggccctgagtgtggtagtcagcnctgagctgtcatatacattcccggtaagacccgtctaccagtcggcggccgctcttttttttttttttttttttttttttttttataattactcacatatataataattacatggagcacataaaagaagaaaagtaaagcattaagcaaccaagatcattgttcccaactagtgttgtgcagcatagtggttaataagcgagagagcattgctagtaacctgagcaacattgagcatcctagccctaatagagtccttgatcttcccattcagcgccttcccggagaatccatcgccgcaagtgctctcatcggtcaaagcagaactgacccatgtctccacgttgctaatgtgccacgtgaagtcctcacccttaaccttacataacttgagctccttcagcgaccggctgaggcggtcaacgctgtcgctgatttcctcggcgcagtccttgagtgcagcgtgctctctgggtttcaggcctctgaatttgttgcagttagccacgaaggttttggtggcttgggtgcggttcagggagagggagagtgctgtctgaaccagttggtgagggtcctgttggatgctggaggcgtaaacggagagggatgagacgcatagggctgggtactgggtgctgctgcatgaggatttttgaacgggcttgggctt

SEQ ID NO: 210617 - DNA, 525 bp, Glycine max
  unsure (1)..(525): unsure at all n locations
gctccatactgacctcttttctnttagagcttgcatgtcaaatacccgttagaaccaataccagtcggcggccgctctgaaattgaaattttctttccgaaaattttacattttctacaacctgagatcacgacatgggactggcacaaatcttgaaagagcattaacttttggctgatcatatataatatatacgacatgaacgaacacatacagagtacacataaaaaggggggacattcagcactaaagccacagctgaaagaacagaattgaataagagggaaggaaacatagagaaaataagcacaatccgatgactgaatgccaatggatgcgcaaaaggaccgtgccaagagtgtcggaaccccgatgagttaaacacgtaccttgagccccttgagtggctgacaccacttacgatgtgaaggcatggacattgctgccaaaacgcacatatgcacaagcccacaagaacctgccaattacacccctgttgagatcaatgttgaagcagatcatgcc

SEQ ID NO: 210618 - DNA, 563 bp, Glycine max
gaagattatcgtgaatgcttataaaaggtaaataaagaaattagcgtcaaaatgttgggtgtgttcagcagctccatagtgtcgccgccggacgagctcgtggccgccggcagccgtactccgtcgccgaagatgacggcggcggcgctgcggaagcggttcgaggagaagaacccctccgccgtgtcggtggaggtcggagagcatgtccagctcgcttatacccaccacaacgagtcgccgtttcagcccagatcctttgctgtcaaggatgaggtgttctgcttgtttgagggagcccttgacaatttgggaaacttgagacaacaatatggactggccaagtcagtcaatgaagtattgttggtcattgaggcttacaaagctttgcgtgaccgagcaccctaccctgctaatcatgttgttggccatctcagtgggagctttgctcttatagtttttgacaaatctacttctaccctctttgtggcatctgatccatatggtaaggtacctctgtattggggaataactgctgatggctacgtaacatttgctgatga

SEQ ID NO: 210619 - DNA, 534 bp, Glycine max
tctttttttttttttttttttttttaacttttactataatttgtatttatcatagtaacaggatacataaactgtattttttatgggggaataaacacaatcagtctttattactctaataattctaatcgctttggaaaacaacttgagagatcaatagagataatcaaaagaagggattgattgattaatttactttgtctctctccaatttcaactactcttcttagatggaacagtaccgtctgttcctgcaaggatgacatacttgtccttcctagtcaaattggtgcactcaaacccgagagtccctgcaagaaccctctgaatataatttgcgacctcgatcgcagatttccctcccttgcaggtgagttctgcaggcaactggttcaagaaagtgatctcataagttggcatgggattcatgaatacaaaataaggatccaacagcttgtggccgcgaacggatgtcccgtataacacgctttgcttggtgttgatggcgaccgggacaattctatcggttagctc

SEQ ID NO: 210620 - DNA, 538 bp, Glycine max
  unsure (1)..(538): unsure at all n locations
ttnntnctctnccttttttttgaggccattttagaacacgcattcatgagtaaaaacaaagggggcaccaaaaacagcgcatatcattatcaaatgtttgaacatgaacacgaacacgaaacactaacataaaaatccagccaacaaaactgtaacaagatgatagtgtgtatctagctattaagataatcaatgtatcaagcgcgatcacaaattcaccggattaaaaaaaaaattcctcaaaagacacggtaagatttccccattgtactcttcagatacaagcacctgacattttgccagttctttttcaacaaagagacaaggaaattaacactcagttgaacattttggaagatttgcttttcctccatactaacatgccccacagctactcccatgcagagcaccttcttaagttgaaatttaaccatggccttggactcgttaacctttgactcaagagtttcctggtgaggaacaagtgtagggaactttcctgccttgttgagaccaggacccaaaagacgaggaatct

SEQ ID NO: 210621 - DNA, 588 bp, Glycine max
gaagcaagtgttagttaaatagaagacgttgaagacatttctggtcactgggggattcttgtttcagatccatggcttcagaatcagttcacacaagtggagcttcgtagcttaaagtcccatttcatgagcatgaggagggaaagtgggaggcttgtgattgcggatttggcttccaagatgtcaaggttgaaggtggtgggagagaatctgagtgaggaagagagagcttcttgcgtgaaggatgtgtatcagaacactgaagaggaggctgattttgaattgtttctcaaggtctacttgaaactccaaacatttgtgaattctagaaccggaagtagtccaaagaactcgtcagcgttcctcaaggcagctacaaccacattgcttcacacaataagtgaatcagagaaagcatcatatgtagcacatataaatcactatctagcacaagatgagttcctcaagaaatatcttcctattgacccttcaaccaatgagctctttgaaactgcaaaagatggtgttcttcttttgcagcttatcaaatgagcagttccagggaccatcgacgaacggcgatcaata

SEQ ID NO: 210622 - DNA, 604 bp, Glycine max
  unsure (1)..(604): unsure at all n locations
attcttagcttctccgagtgtctctttctgtctgcggaatccaaaccctccaaggtttctttcctgtgctcctcctcgtgtggtgcacctacgcacgaggtttttgtagctaccaccgtgcccaattcacatcgcatgtttcgaacgctttgtgctgcaactgaaatcgaaaatcagagaaagcggagaagagagagagagcatggctgatctctttgcgtggctcatctccttcttcattcttattgccttaattgtactcgtcatttaccagttaatgtgcctggcagacctagaatttgattatataaatccatatgattcctcatctcgaataaacaaagtgatattgcctgaatatattatagtaggtgtcctattcggcttctaccttgtaacagggcattggataatgtcattgatctgtgctccttacctctactacaatgtgagattgtacagacaaggaaaacatctggttgatgtcacagagatattcaacttgctccctaaggaaaagaagcaaggcttttcaactcttctataatgttntatccttttctatccttatttgatgatcacacatctttgatgacatgatgat

SEQ ID NO: 210623 - DNA, 538 bp, Glycine max
agattatcctaagtctttgggaatagtgttgcaatggcttcaagtcaggaggaggtgacccttttgggagctactggaagcccatttgtgtgcagggttcatattgccctcaagttgaagggagttcaatacaaatatgtcgaagaaaatttgaggaacaagagtgaactgcttctcaaatccaacccagttcacaagaaggttccagtgtttattcacaatgagaagcccatagcagagtctcttgtgattgttgaatacattgatgagacatggaagaacaaccccatcttgccttctgatccttaccaaagagccttggctcgtttctggtccaaattcattgatgataaggtttttggtgctgcatggaaatccgttttcacagctgatgagaaagagcgtgagaagaatgttgaggaagcaattgaggctctgcagtttcttgagaatgagataaaggacacgaagttctttggaggagaggagattgggttggtagatattgctgctgtctacatagcattttgggtcccta

SEQ ID NO: 210624 - DNA, 579 bp, Glycine max
aggaggaggagggtggttttacgcgacttgcctcattcgtctgcgattgcgagcctttgacggaggatgatctggaagccatcgaagcctctctttccaataacaaaaaacgtccattcaacgatcacactcacactcctcgtcgtcgcttgcccaaatcgcttatcgctcttcaacacccaaacgcttcttctttctcgccccatccccgtccatgcgattcaagaatgacattgcctgtaatgaagtttagtggtcaaatttcttatagcaggacttttgatgctgtagagaaagctgcaacaaagctcttacaaattctccaagaaaaaacgaccgacatgatgcaaactgcaattggatttgacattgagtggaaacccaccttcaaaaaggtgttcctcccggaaaggtagcagtgatgcagatatgtggtgacactagacattgtcatgttctacatctaattcattctggaatccctcaaaatttacagcttttgcttgaagatcccacagtcttgaaggttggagctgggattgatggtgatgctgtgagggttttagagaattatacata

SEQ ID NO: 210625 - DNA, 591 bp, Glycine max
tattatgctcctttggcagtgagacatttttgagtgattatcaaatcaaagaactagccagtgggttagaactcactggcttacctttcattttggttctgaatttcccatccaatctctctgccaaagctgagttggagagagcattgccaaaagggtatttggaaagagtgaagaataggggagtggtgcacagtggttggtttcagcagcagcttgtgctgaaacactcaagtgtggggtgctatgtatgccatggtggctctagttcagtgattgaagctatggtcaatgagtgtcaactggtgctgctgcctttcaagggtgaccagtttttcaattctaaactcattgccaatgatttaaaggcaggggtagaggtgaataggagtgatgaagatgggttctttcacaaagaggatatactggaggcattgaaaactgtcatgttggaggataacaaagagcaagggaagcaaataagagaaaaccacatgcaatggagcaagtttttatcaaataaggaaattcagaacaaattcatcacagatctggttgcccagttaaagtctatggcttagtcttgtctct

SEQ ID NO: 210626 - DNA, 412 bp, Glycine max
ctaaaagatatgatagcacgacaattattctactacagggaaggacgtctttaccaaggggagtatgcactggaagccattgggaatgctggaactgggctagggatcttgtccataagatggggtagttcaggtcggtgaaaagactggcacatacaagctgctggagacatcaagctacacctgagaaaatgtacaagatcgatgaacatgtagcctgtgctgtggctggaatgtatgtgctgatgccaacatgctaactcatactgctagagttcaggtccatggctatgcatatgcttaccaacatgcaatgcctgctgagcagatggatcaatctctgtgcgatactaggcaaggttacacacagtctgctggtcgtcgtccatttggagtcttattactgtttgct

SEQ ID NO: 210627 - DNA, 507 bp, Glycine max
gaacttcgtcctccctctgcttctttctttcttagtttcagcgcgattgctgcatcgtcctccaataagagctcgctgctagtgaaccctaacacggcggcaacgagaggtgttcggttgaagctcagatcagcgatggcagcagcaacccgcacttctctgcggttcctcctctcagtctccgtaaccctaactctcgctcacctcgccgcctcaaattccgaaggcgacgctctctacacgctgaaacggagcctctcggaccctgacaacgttctccagagctgggatcccactctcgttagcccctgtacttggttccacgtcacctgcaaccaggacaaccgagtcactcgagtggatcttggtaactctaacctatctggacatttggtacctgaacttgggaagctggagcatctacagtatcttgagttgtacaaaaacaacattcaaggaactattcctccagaacttggaaacctgaagagtctagttagcttggac

SEQ ID NO: 210628 - DNA, 510 bp, Glycine max
atctatatattttttcttatacataagaattaaacgtggtatcaaaaggttttacaatatttatacattctgtttaatcaacagaactagaccctctttactttaagttaggtttaaagttcagtttgggcatcatcatttgctacatgcataaataaagcatgtatctaattagactaaaaaccaactgatgggatctcaagctgaatcacgagccttgcaaacaggtaaatcatcttcgaaattgggagggactccaaggattggatttctctcaagaaattagcaggcttcaaatcaaaacttgatgatacagtaggcatgacaggatagtcctcttgacagggtatatgatggaaccctattgtgtaccacaaaacaatgtctttattctcaattggacgatccctgttggaccagacttgaagagtatcatcccctttgctctggtaagcaaataaaccaccagcccattgctcacttttgttgtaaggagtaacccatatttga

SEQ ID NO: 210629 - DNA, 464 bp, Glycine max
  unsure (1)..(464): unsure at all n locations
gccgtcccgcctgagcgtatatttctgttgacgtcggatntcacgttgcagggtcacatccacagcgcccggaactcggcttgtggctctagaattggacctcttcacgttttggacttttgccttcctgctacataaacaggcattacacatttctagggtcctctcacacaccaggactatcctaagccgaagcccgttcatagaatcctgctgccgagcacccaagacccagccctctgcgtgtcatacctgtccgtctacacctgcagcatgcaacaggaccctgaccaactgggtcagacaggacactacctctacctgaaccgcacccaagccaccaaaaccttcgcggctaactgcaacaagattcaaaggcctgaaacccagagagcacgctgcactcaaggactgcgccgaggaaatcagcgacagcgatgaccgcctcagacggtcactgaatg

SEQ ID NO: 210630 - DNA, 674 bp, Glycine max
gctcttgtgtgccggctttcttttgagcttgtatgccaatacccgatagaagcgtataccagtcggcggccgcccttttttttttttttttttttttttttttttataattactcacatatataataattacatggagcacgtaaaagaagaaaagtaaagcattaagcaaccaagatcattgttcccaactagtgttgtgcagcatagtggttaataagcgagagagcattgctagtaacctgagcaacattgagcatcctagccctaatagagtccttgatcttcccattcagcgccttcccggagaatccatcgccgcaagtgctctcatcggtcaaagcagaactgacccatgtctccacgttgctaatgtgccacgtgaagtcctcacccttaaccttacataacttgagctccttcagcgaccggctgaggcggtcaacgctgtcgctgatttcctcggcgcagtccttgagtgcagcgtgctctctgggtttcaggcctctgaatttgttgcagttagccacgaaggttttggtggcttgggtgcggttcaaggagagggagagtgctgtctgaaccagttggtgagggtcctgttggatgctggaagcgtaaacggagagggatgagacgcatagggcttggtactgggtgctgctgcaggaggat

SEQ ID NO: 210631 - DNA, 570 bp, Glycine max
  unsure (1)..(570): unsure at all n locations
gctgtcaaggcttatggaattcacctgggaactgaaatgtgcaaaaagattttagctcatggaattaatacattgcatctttatacactaaatatggagaaatcggcattagcgatactaatgaaccttggcctaattgaagagaccaaagtttctaggtccttaccttggagacgccctgcaaatgttttccgtgttaaagaagatgtccgtccaatcttttgggcaaatcgtccaaaaagctacatatcaaggacaataggatgggatcaatacccacacgggcgttggggtgattcctgtaatccatcatatggtgcattatctgattatcagttcatgcggccacgtgcacgggacaagaagcttgttgaagaatgggcagttcccttgaaagcattgaagatatatatgagaggtttagactgtattgtctggaaagttgagagcaatcctggtcagactagatggtcttcagccgagacaagatataaagagctgtgganagattacacaagggcttctcacatcatagccagcactgtcatgggaaaagcagatctctactgt

SEQ ID NO: 210632 - DNA, 648 bp, Glycine max
ggccctaggtgacgaatcattgaacagtactgaaagcacatacccgttaaacccgcataccagtcggcggccgctcttttttttttttttttaaaatataactttcaagatttcgatattctactttcacagttaggaaacgtcgaattcaaaggaaggagtaacttgtccttaagtcaacgtacaggttactcatgcgactcagaagaatgaaaaaataaagatgtttgggacaaagcccagaaaaataatttggtacttcaacttagaaccacgtgtaatatgaaccatcctactgagaagaaaacaaaagaaaggaaaggaacatgacaacgaacagaagtgacataactaaagaactaataaataataagctcatgtcagaaatctgcaaagacggtgaaaagatcaccattgatgtaatcattgtcgaccaaactcaccaagaagtagctgcccccaacctcttcaaccaatttcctggatgcatcaccctcagggtacaagcttgcccatcctcttgaccaaatttcaaatgcctcatccttccatacattgaagctgacaggatcaacaatggttggttgaattatctccttagctgggaagacaccccatgtcacagcattaacatcagtttgacccaca

SEQ ID NO: 210633 - DNA, 519 bp, Glycine max
gaggccattatagaacacgcattcatgagtaaaaacaaagggggcaccaaaaacagcgcatatcattatcaaatgtttgaacatgaacacgaacacgaaacactaacataaaaatccagccaacaaaactggaacaagatgatagtttgtatctagctattaagataatcaatgtatcaagcgcgatcacaaattcaccggattaaaaaaaaaattcctcaaaagacacggtaagatttccccattgtactcttcagatacaagcacctgacattttgccagttctttttcaacaaagagacaaggaaattaacactcagttgaacattttggaagatttgcttttcctccatactaacattccccacagctactcccatgcagagcaccttcttaagttgaaatttaaccatggccttggactcgttaacctttgactcaagagtttcctggtgaggaacaagtgtagggaactttcctgccttgttgagaccaggacccaaaagacgaggaatctgc

SEQ ID NO: 210634 - DNA, 485 bp, Glycine max
  unsure (1)..(485): unsure at all n locations
attacagttgaatcaacactgatttaggtttgtaatgcttcaagatgctatgacatatattctagtttgaaacccagattcaagacacctagtgtcaacttcatgtatgatttatgatgataaataatttttccttgtgccttgcnaaaaaaaccaangncaaaaaaaaaacaaaaaaaaaaaaaaaaaaacaaaaaaaaaaaagaaaaaaaaaaaaaaaaaaaaaaaataaaaaaaaaaaaaaaaaaaagggggggggcccccccttaggggcttcccccccccggaaaaaaattccgcccgggcccctgggggggccccagttttcctttaaggggggcgaataaaacctgggctaaaacggggccaaaagtgttcccgggggaaaatggttttccctaaacaatcccccaaaaaatcaagccggaaagcttaaagggtaaacccggggggccccaagggggggcccaccccccttaattggg

SEQ ID NO: 210635 - DNA, 533 bp, Glycine max
aggcaactagtgtttagaaattttatatttctactatatccagggaacaagaaattaaaatccattgaagaataattaaaatataaaaaaaatcataaacttcgtactactatcactaaacaaatatctaatcatccaaagcaagctcatccgcagacttatgatgattcaccttggcccacccaaccccgcgcggcacgtgcaacgcctcaaccaccgtggccgacgccatctccatctggcaaaccctaatcgcaccgatcaaccgctccggcaactcatcctccgcctgtgcctccaccacaaaccccatatcgatcgtcaccgtcgtcacgcaccccaacgcgaggtgcagaatcgcgttcgcgatcgcgctgcttccgatatcgacgtcaatttcgaggtaattcgaacctttgtagtaagcgcaattcaacgctttccctaacaagcacgcgctgtggctccccacggccttcttcacgatccacgggcccttcgcgatccggttcaccagcttgaaccgctggttc

SEQ ID NO: 210636 - DNA, 597 bp, Glycine max
tcgagctctgcgagatcttcattcttcgattttaaaagatgagtaagcttcagagtgatgctttgcgtgaagccatttcaggaatcatggccgattccaaggagaagaatcgcaaatttgtggagaccatcgaactccaaatcgggttgaaaaactacgatccacagaaggacaagcgtttcagtggctctgtcaagctgccccacatccctcgccccaagatgaaaatttgcatgcttggtgatgctcatcatgttgaagaggcggagaagataggactggactggatggatgtggaagccctgaagaagctaaacaaaaataagaagttggtgaagaaactagctaaaaagtaccatgcctttttagcttctgaagcagtcattaagcagattcctcgtcttttgggtcctggtctcaacaaggcaggaaagttccctacacttgttactcaccaggaaactcttgagtcaaaggttaacgagtccaggcgcatgttaaatttcaactatgaggtgctctgctgggagagctgtggggatgtagtatgaggaaaagcaatcttcaaatgtcactgagtgtattccctgctcttgt

SEQ ID NO: 210637 - DNA, 472 bp, Glycine max
gcgagcggccgccctggctcggcactccttgctcttatttctccgcctctaccaacgccctggacaccggggcgatggcagtggccgggcaccacgccgacgacggcccgatccgtcaggtgctgccagaagctggcgaagcggcccaggaggacaacctgctggacgcctagcaccaatccgggagctgcaaggtcgtggtggccatgacctaggcctacaaagcggagcacggatgatccgccaagcgtgttcaacacaacgcacgcagagcgcagcctgaacgccaagctcggcccctcccacgaacacggcgtgaccaaattatgcgcactgactccgggcgacttaagccgtccgaatgttggccgcgagccaattgggtttccgaaggacgcccaaaacgcgcacatgcaacccacccaagatagagccatggaacccgataggcgagacaaaggagccgtccctt

SEQ ID NO: 210638 - DNA, 588 bp, Glycine max
  unsure (1)..(588): unsure at all n locations
tcgagctctgcgagatcttcattctccgattttaaaagatgagtaagcttcagagtgatgctttgcgtgaagccatttcaggaatcatggccgattccaaggagaagaatcgcaaatttgtggagaccatcgaactccaaatcgggttgaaaaactacgatccacagaaggacaagcgtttcagtggctctgtcaagctgccccacatccctcgccccaagatgaaaatttgcatgcttggtgatgctcagcatgttgaagaggcggagaagataggactggactggatggatgtggaagccctgaagaagctaaacaaaaataagaagttggtgaagaaactagctaaaaagtaccatgcctttttagcttctgaagcagtcattaagcagattcctcgtcttttgggtcctggtctcaacaaggcaggaaagttccctacacttgttactcaccaggaaactcttgagtcaaaggttaacgagtccaaggccatggttaaatntcaacttaagaggtgctctgcatgggagtagctgtgnggaatgttagtatggaggaaaagcaaatcttccaaaatgttcactg

SEQ ID NO: 210639 - DNA, 571 bp, Glycine max
actaaatctcattcttcatctgcagctatttggattgctgattattgttaactgatattggtgcttttctttgagaaagtgtgtacactttttggataagagaaaacaagagaggtgacattggaagctaactcagagagaggcaaagatgttgggaattttcaagcagaagttggttaatgcacccaaggagctgaacagtccagcttctttgaattcatgcattaagcctaagctaagtcatgaaatcctgaaggatttcatgtcctgcaattcctccaatgctttctcaatgtgctttgggaatgatgctttgctagcctattccacttcatacaagccctccattaatcataggttattctctggattggataacatatactgtgttttcctgggtggcctgcacaaccttagcatgctcaacaagcagtatggactatcaaagggaacaaatgaggccatgtttatcattgaagcatatcgtacacttcgcgacaggggtccataccctgctgatcaagtcctcaaagaacttgaaggcagttttgcatttggatctatgacaaca

SEQ ID NO: 210640 - DNA, 554 bp, Glycine max
caaggttccttttctgaattttgattagaacacaattcaagaaaacaagccatttactgacatgcaattagcaaagagtgtcagctcaggaagtttgagctcaatggactggatgcgtggagctgcaatgaagcctgctttcattgatatctctgcaatagatttcaatgcagattatggcatgcggagatcatttagtgaaggagatataaagactcttggtaatggtaacatgaacatcgtccaatcaccccttgagaggccccttcttatcagcaactgcaccagtgaggaacgcttccaaaagctctccagatacaggaataagaagacaaagaggaattttgggaggaaaatcaagtatgcttgcaggaaggcacttgctgacagtcagccaagaatccgtggaagatttgcaaggactgaagaatctgatgtcaagagggaatgaatgacttaaaactgatttagtaggaagaaaatagagttgagtagctatatctgatcaagctatatggaaaaactcagcagtaatatgtgattagaacttatgt

SEQ ID NO: 210641 - DNA, 564 bp, Glycine max
caaggttccttttctgaacattgattagaacacaattcaagaaaacaagccatttactgacatgcaattagcaaagagtgtcagctcaggaagtttgagctcaatggactggatgcgtggagctgcaatgaagcctgctttcattgatatctctgcaatagatttcaatgcagattatggcatgcggagatcatttagtgaaggagatataaagactcttggtaatggtaacatgaacatcgtccaatcaccccttgagaggccccttcttatcagcaactgcaccagtgaggaacgcttccaaaagctctccagatacaggaataagaagacaaagaggaattttgggaggaaaatcaagtatgcttgcaggaaggcacttgctgacagtcagccaagaatccgtggaagatttgcaggactgaagaatctgatgtcaagagggaatgaatgacttaaaactgatttagtaggacgaaactagagttgagtagctatatctgatcaagctatatggaaaaactcagcagtaatatgtgattagaacttatgtggggagtctct

SEQ ID NO: 210642 - DNA, 562 bp, Glycine max
  unsure (1)..(562): unsure at all n locations
gacacgtggtaccctagttagagttccattctgtggtttctttctttctttctttctgcatcacatcacaatttgcattgcctcgtgtcctttttcttctttgctctccaaaaatctcacacacacaggtatctagcanatgggttctcaccaacaagaaccatggctattggagaatgggaaaccaagggttttgaccaaggagaccaggcatggccgttctgcacacagaatgtcctccacctctttgcgcaagaaatctagccgaactcttgtctcaaaggttccatgtgccactctcagaaactttctttcaaatttgcaagaggttattcttggcaccaagctttccattctcatccctgctattccagctgccatcgttgctgagtgctttggctttggaagaccttggatttttatattaagcttacttggacttacaccacttgctgaacgtgtgagcttcattacagaacaatttgccttttacactggtcccacagttggaggacttcttgatgctacatgtgngaatgttactgagctcattatagcaata

SEQ ID NO: 210643 - DNA, 674 bp, Glycine max
  unsure (1)..(674): unsure at all n locations
gccctctaattgacgcttctacncagagctgtatgtaaataagaggtaaatgcgcacaccagacagaggccgacctgacatttttttttataaattaaaattttttaaattttgatttcccacgatacctagtggagatatatagtaacacaataaatacaagagattctgcaaactgaaaaagggattcttactaaagcaaactcaaacaagaacaacttccactcatttggcatctaccgtagtaacacaagatcaaaagcagcttctctgatagaacacacgtacgtatgattcaacatctttcacagtagtggttcatttctaacagctagctattgcaacttaaaataattgcaatgcttctgcaaagtgctaactttttttcccccccttctttatggatatgacaatgtgatcagaatgaaacaataaccaatccattgaatttgaatctgattttgggtttggatcgataccaccattcttcatctcaggaaaggacaagaaataggccaaagcctactaattaagcgcttaaaactgcattagtggctggtttaagtgtgatgttagtaacatcagcttggatattaaagggtgttctttgtacgaagaagcatgccccaataacaatgtagcacagcatgagaacaaggccttcatgtagtgag

SEQ ID NO: 210644 - DNA, 431 bp, Glycine max
gactcatggtaccctatttgtagttctatcctgtggtttattactttatgtctttgtgcatgacatcagaattcgcactgaactggaaaccttggacttgtatgctctgcaactgtgtcactcacacaggtatttgaccaaatggcttacaaccaacaagaaccatgggtattggagagtgggaacaccaagggttatgaccactgagaccaggcttggccactctgaacacagaaagtgctccacctgtaggcgcatgaaatcaagccgagctcttgtatcacaggctgcatgagccactctgagaaactgacttgcacattggcactgggctcttcttggaaacacgctctgcattctcatccctgcttgtccaggtgacatcggtgctgagtggattgactttggcggaccgtgcacctatatatgaa

SEQ ID NO: 210645 - DNA, 657 bp, Glycine max
  unsure (1)..(657): unsure at all n locations
ggacacagtgtgtcctctttcattccngtactatgttgtatataaangttaaaggcgactaccngtcggcggccgctcttgatttaaggttttttgttttgactttttcatttgaacaaganaaaccgaagcgacggggcgggggtcagctctaaacaaattcatttatacgatgaaccggtttataaatttgttaaattggaaccgttctaaaaaactaacgagtcgcacactaagcatagcaatactatcaatatgaaatgattcatttcattttttagtcgattcaatcttataaaattgatcattttggagaaataaaaatcgagtaatttttcattttttgttttctaaaaaaaaatatagcacatttaagataaaatatagcacatttaagataaagaataatatatttttctttatttagaaaatatccaaactttgatccctaaaaccccataaatagttcgaactgtatagcaacaataatcgattttcgctcgaatggtttgtagaggaactctaccttctctgatccattcaacacgtgcaatttcttttccgtcgatacgtcctgcaatttgtacttgaacctcttttgtacccgcctgttcagttaattcaatagcttttttcattgctttacgaaacgaaact

SEQ ID NO: 210646 - DNA, 559 bp, Glycine max
aaagttctggactgtcacctttgcttcctttatataccagatagggatgattagtttgaccctatcggcagtgctaccacagtttaggccacctccctgcaagggtgaagaggtgtgccagcaagcaagtgcaggacagctggcaatcctctacatctcactcctcctcggggcactcgggtcgggtgggatccgaccctgcatcgtggcgttcggggcggatcagttcgacgagtctgatcccaagcagacaacaaggacatggacctacttcaactggtactactttgtcatgggtgtagcaattcttgtggctgtgactgttttggtgtatattcaggacaatattggttggggaattggccttggaatccctaccattgcaatgttcctctcaattattgcattcattgtcggatacccgctttaccgtaacttgaacccgtccgggagcccgtttacccggttagtgcaagtggctgtggctgcatttcgtaagagaaaggtcccaaatgtgtcacaccctagtttactctaccaaaatgatgaactagatgcc

SEQ ID NO: 210647 - DNA, 592 bp, Glycine max
tctttttttttttttttttgtttttactttctctttagatctagataatccgaagcgatgcgttggttattagttcttttttaattcatttatacgatgaaccggtttataaatttgttaaattggaaccgttctaaaaaactaacgagtcgcacactaagcatagcaatactatcaatatgaaatgattcatttcattttttagtcgattcaatcttataaaattgatcattttggagaaataaaaatcgagtaatttttcattttttgttttctaaaaaaaaatatagcacatttaagataaaatatagcacatttaagataaagaataatatatttttctttatttagaaaatatccaaactttgatccctaaaaccccataaatagttcgaactgtatagcaacaataatcgattttcgctcgaatggtttgtagaggaactctaccttctctgatccattcaacacgtgcaatttcttttccgtcgatacgtcctgcaatttgtacttgaactccttttgtacccgcctgttcagttaattcaatagcttttttcattgctttacgaaacgaaactctattctttaa

SEQ ID NO: 210648 - DNA, 591 bp, Glycine max
ttctttttttttttttttaaaattttggattctctacgcagacaactaaccagcggtaacaggggccgttttttagaaaagaaaacacaggtatgtaaatgacataatgcaataaatagaattccgtattacactttaaacaattatttagtcgaataataaataactgagcggtggcgtctagcaagcagaaagcaaaaataagtttagaaaacaattaattagtaaattgcaggcaatagagaagcatctacatctttcaccattattctttataatcaacctcactaccttatattatatacacgttttcaatgtcagcaatctttggccagtcttcgcctccgggttcccggcaacgttgattgagcaacggacaatagtaagtcctcaaagttgaaatggatttgggcagaccctcctctggtaagcattggagcctggggcagttagtaagaaacaatgtcttgagagaggagaggtggcagagacctttgtagtccaggctttttagatctggacagttcctgatctctagacaaacaagagagtgtggcagtacaccttcgtcaggaagacactaacatccac

SEQ ID NO: 210649 - DNA, 598 bp, Glycine max
  unsure (1)..(598): unsure at all n locations
gcccccccccaggccccccgtgcccccgggctgggaaaacctnnnatnntgtangncntccnggacaattacccgagcacggcaaacggctcgagggtatggctgccgctaggaggaaacagattccgaagcttgcgctctcgctcggtctcgctcagcaaatgggggatatgattgaagagttgatcagcaaagggcagcagcttgatgcggctcactttacatatgaagtgggtcttgggaaaagtccctcccgtccccttgttgaagcctttactcaaggatgctaagaaagatgcggcttctattttggaagatcctaacaatgcaggccgagctgcgtacctagctgcaaggaaagagcagtctgcactcagggctgtgattaaatgcattgaagaatacaaacttgaggatgagttcccaccagagaatctgaagaagcgacttgaccagttggagaaggtgaagacggtgaagaccgagaaaaggaaaccggctgctgttcctgccaataagagaactcgagcaagcaacagcaatggaggtccaatgccaccagccaaagctgggcgttagactaatgcatatgtatcat

SEQ ID NO: 210650 - DNA, 589 bp, Glycine max
tcgagctctgcgagatcttcattcttcgattttaaaagatgagtaagcttcagagtgatgctttgcgtgaagccatttcaggaatcatggccgattccaaggagaagaatcgcaaatttgtggagaccatcgaactccaaatcgggttgaaaaactacgatccacagaaggacaagcgtttcagtggctctgtcaagctgccccacatccctcgccccaagatgaaaatttgcatgcttggtgatgctcagcatgttgaagaggcggagaagataggactggactggatggatgtggaagccctgaagaagctaaacaaaaataagaagttggtgaagaaactagctaaaaagtaccatgcctttttagcttctgaagcagtcattaagcagattcctcgtcttttgggtcctggtctcaacaaggcaggaaagttccctacacttgttactcaccaggaaactcttgagtcaaaggttaacgagtccaggccatggctaaatttcaacttatgaaagtgctctgctgggagtagctgtggggaatgctagtcatgaggaaaaagcaatcttccaaatgttcactgagt

SEQ ID NO: 210651 - DNA, 591 bp, Glycine max
gtgagactgaagagacccttgctgaaggttaaatcgttcaagtcacagttcgcagagtgcaagcccagaaagcaatatgcgggcttgaatctggaatgactggaatcctcttgaaagaagactatacagatgactggagagatataattgaattatctgataggctacatgaaggtgacatgctcacttgtaaaattaagtcaatccaaaagaataggtatcaagtcttccttgtatgtaaggatagtgaaatgagaagtaatcggttacagaataaccgtgatattgacccctattaccatgaagaccgaagctgttttcagagtgatcaagacaaagctaggaaagaaaaggagcttgcaaaaaagcatttcaagccaaggatgattgttcatccacgctttcagaacataactgcagatgaagcaatagagttcttgtctgacaaagatcctggagaaagtattatccgtcctagttcacgaggaccttcatatcttactttaactctcaaaattaatgatggagtatatgcccataaggatatagttgaaggtggaaagaacacaaggacattacaagcttactccg

SEQ ID NO: 210652 - DNA, 559 bp, Glycine max
  unsure (1)..(559): unsure at all n locations
gagaactcttatcattcttttttccacttgacattgccgacgccaccaaatacacaaccttaactttcccacaacactacccatccatcattcgttttctctctagattttttcagttagttattgctgtcttctttttgtgtgtgccaacaacacagaaagagagagaaagacatggctctgaaccaatcaaaggccgtgttgttgagggtgagtttggtggtggtggcgctgtgtatagcaggatacatagtgggtccccctctctactggcatttcgttgcagtgaacaaccactcttcatcttctacttgtgcaccctgcatctgcgattgctcttcacaacccattctttctattccacaaggacttagcaacacttccttcggagattgtgcaaagcctgacccagaagtgagtggagacactgaaaagaattttgctgagctattgacagaagaactcaagcttcaggagagccaagctgtggaaaaatcagcacgtgctgacatggcattgcttgaggcaaaanagattgcatctcagtattcagaggaag

SEQ ID NO: 210653 - DNA, 609 bp, Glycine max
  unsure (1)..(609): unsure at all n locations
gtgagactgaagagacccttgctgaaggttaaatcgttcaagtcacagttcgcagagtgcaagcccagaaagcaatatgcgggcttgaatctggaatgactggaatcctcttgaaagaagactatacagatgactggagagatataattgaattatctgataggctacatgaaggtgacatgctcacttgtaaaattaagtcaatccaaaagaataggtatcaagtcttccttgtatgtaaggatagtgaaatgagaagtaatcggttacagaataaccgtgatattgacccctattaccatgaagaccgaagctgttttcagagtgatcaagacaaagctaggaaagaaaaggagcttgcaaaaaagcatttcaagccaaggatgattgttcatccacgctttcagaacataactgcagatgaagcaatagagttcttgtctgacaaagatcctggagaaagtattatccgtcctagttcacgaggaccttcatatcttactttaactctcaaaattaatgatggagtatatgcccataaggatatagttgaaagtgggaaggaacancaggacattacaagcttactccgaattgggaagacactaa

SEQ ID NO: 210654 - DNA, 573 bp, Glycine max
  unsure (1)..(573): unsure at all n locations
caaggttccttttctgaatattgattagaacacaattcaagaaaacaagccatttactgacatgcaattagcaaagagtgtcagctcaggaagtttgagctcaatggactggatgcgtggagctgcaatgaagcctgctttcattgatatctctgcaatagatttcaatgcagattatggcatgcggagatcatttagtgaaggagatataaagactcttggtaatggtaacatgaacatcgtccaatcaccccttgagaggccccttcttatcagcaactgcaccagtgaggaacgcttccaaaagctctccagatacaggaataagaagacaaagaggaattttgggaggaaaatcaagtatgcttgcaggaaggcacttgctgacagtcagccaagaatccgtggaagatttgcaaggactgaagaatctgatgtcaagagggaatgaatgacttanaactgatttagtaggaagaaaatagagttgagtagctatatctgatcaagctatatggcaaaactcagcagtaatatgtgattaggacttattgtgngagtctctgtttgttg

SEQ ID NO: 210655 - DNA, 540 bp, Glycine max
  unsure (1)..(540): unsure at all n locations
acaacacataatcgcaaggcaccatcctcaaccccaacccaaatctccccgtctagtttctcttgatgtttttcgtggtctcaccgtcgcgcttatgatacttgttgatgatgctggcggactcattcctgcactcaatcattcaccatggaatggtttaacgctagctgattatgtcatgccatttttcctatttattgttggtgtttcgcttgcactcacatacaagaaactgtcttgcggagttgatgcatctaggaaagcaagtttacgggctctaaaacttcttgtgttaggccttttccttcaggaggttatttccattcgggtgaatgatctgacctatggagtggatttgaaacagataagatggatgggaatactacagagaattggggtagcatatttggttgccgcactgtgtgaaatttggctaagagtgatgatactgttaattcaggaccatcccttgttaggaagtatcggtaccagtgggctgtggctttgattctttctttcctttatctntgcttgctatat

SEQ ID NO: 210656 - DNA, 365 bp, Glycine max
gactcatggcaccctagttagagtttaaccctgtggtctcattctttatgtctgtgtgcatgacatcacaattcgcatagactgagagtcctttttctcactttggtatccaaaaatgtaacacacacagggctctaacaaatggcatatcaccaactagaaccatgtgtattggagaatgggaaaccatgggtcatgaccacggagaccaggcttggccgctctgacacagaatgtccttcaactatgtgcgcatgacagctagccggactcttgctcataggttccatgtgccactctgagaaactgacctgcacattggcatgacggtcttattgacgccagactctgcattctcatccctg

SEQ ID NO: 210657 - DNA, 534 bp, Glycine max
gtttatgctcctgtggattttgttgctatgaatgttgtcttgagtggaggagatccagattatgttgccctgctcccctcgggctttgctattcttcctgatgggcctcctgcattaaatggtgggcccatgcatgaagttggatctggaggttctctactcacagttggattccagatcttagttgattcagctccaaccgcaaagttatctctgggttcagtggccactgttaacagtttaattaagtgcacagttgaaaggatcaaagttgcagtcatacgtgacaacaacaacacctgatttcaattcagaactttcatatacatgtcagaagagcaaattaaggtagagaaagtaatgatcgagcttggcgtggtgcctatttcgtttccaaaacaagggcaagaagtcaatgaacgcacctcggagtatcacttaaacgtaggagtttgcagaacttcaggttcggtattgactttcacttatgacttgaagactaaaatggttccatccagctgtagtattttaact

SEQ ID NO: 210658 - DNA, 617 bp, Glycine max
ttcttctttttttttttttatctttctgtgatgaagtttacaatacaataggaaaagccagggtaaccacacttaggaaagtttgctcaagcctacaaatactactccaaaattctacgctaaaataaatagcgagtccgaaatttgcagtttttctaagttaaaatactacagctggatggaaccattttagtcttcaattcataagtgaaagtcaatacccgaacctaagattcttcaaactcctaacgttgaagtgatactccgaggtgcgttcattgacttcttgcccttgttttggaaacgaaataggcaccactccaagctcgatcattactttctctaccttaatttgctcttctgacatgtatatgaaagttctgaattgaaatcaggtgttgttgttgtcacgtatgactgcaactttgatcctttcaactgtgcacttaattaaactgttaacagtggccactgaacccagagataactttgcggttggagctgaatcaactaagatctggaatccaactgtgagtagagaacctccagatccaacttcatgcatgggcccaccatttaatgcacgaagcccatcaggaagaatgccaaacccgagg

SEQ ID NO: 210659 - DNA, 668 bp, Glycine max
  unsure (1)..(668): unsure at all n locations
agatacactacctggcgacttccagcccnacgtagtctgtatggctacataccggtttaagacccgaataccagtcggcggccgccctttttttttttttttgtgtttagactttttcactttatctagaaaatccgaagcgatgcggagggggttaactctttttcaagtcatttatacgatgaaccggattataaatctgataaattggaaccgctctaaaaaactaacgagtcgcacactaagcatagcaatactatgaatacgaaatgatccattccatttcttagtcgattcaatcttataaaattgaccattctggagaaatcaaaatcgagcaatttttcattttctggttcctaaaaaagaatatagcacatttaagataaaatatagcacattcaagatacagaatgctatatggttctttattcagaaaatatccaaactttgatccctaaaaccccataaatagttcgaactgtatagcctcaataatcgattttcgctcgaatggtttgtagaggaactctaccttttgtgatccattcgacacgtgcaatttcctttccggcgatacgtcctgcaattcgtacttgaactccttctgtacccgcctgttcagctcaatcaatagcgtttttcattgctttacgaaacgaaactct

SEQ ID NO: 210660 - DNA, 572 bp, Glycine max
tcattgcttatggactcgacatgtttgccttttgctctggggagaagaatgttctgatcttggacctcggtggtgggacttttgatgtctcccttctcaccattgaggagggtattttcgaagtgaaagccactgctggtgatactcacttgggaggtgaagattttgataacagaatggtgaaccattttgttcaggaattcaagaggaagaacaagaaggatattagtggaaatgccagagcattgaggaggttgagaacagcatgtgagagggccaagaggactctctcttccactgctcaaaccaccattgagattgattccttgtatgagggtattgacttctacacaaccatcacccgtgcccgtttcgaagagcttaacatggacctattcaggaagtgcatggagcccgtggagaagtgtttgcgggatgctaagatggacaagagcaccgtccatgatgttgctcttgtcggtggttctactaggattcccaaggttcaacagttgttgcaggacttcttcaacgaaaggagctttgcagagcattacccagatgaactgttg

SEQ ID NO: 210661 - DNA, 519 bp, Glycine max
tctttttttttttttttaatatttttacttttctggccaaacttggaacggacaagtttctggatggaacaagagctcataattcatgaaagcctcgaaaagggaaaacaacattgttcagtgcccctacatgactaagtaataatactcaggatcttatttcatagaaattaaggagcaacttagaggcttgatttgagagcttaatcatagtacaagggattaggcagcttaaaagtcctagtccctttgttgcttcccaggaggtcactccattggtctccaacgtttccaatgattctgtatccctccttctccagcttctctctctcagctgatttgtattcaaatgataacttaccagagtactcagatggatccctgagaattaacttctcccatgtgttgaatccaacctcctttaagttcttggctgttacatcccctagactcaatggtctttctgataagaatacaatcttgatgccgagagccaacagttttgttgtacattttaag

SEQ ID NO: 210662 - DNA, 449 bp, Glycine max
gcagacagcacaaccgcacagagcggatttctggctgttcaaacgaccatcggcctcaacgtaacttagggccccctggccagaagccaaaacggcccaagaaaccaaactatacacaacagcatcagtgacccaggggcgcccaggcagagcctgagaccagaggaacgaggctgtgctgcatgcaagcgcggagcaggaccctgacgccctggaggcccgagaagcctgcaccaagaccaacatggaggaggttacacggagagaacacaaccaaagcgcacaggggcactgagaaggaagagcgtgacgcacgcaagaacaaaggttgcgacacgcatgacgagagacgagaggctgacaacaggaaggccctgctgcacatagaccagcaaaagactgagcttgcacagggagtgcacaggcaccacccaaaaaggcctagagga

SEQ ID NO: 210663 - DNA, 527 bp, Glycine max
attcttcagttagctcccccaacctattttcttcaccttcacaccacaaccctaccctctctctctgtcatggtcattggaggagccttccctcgtttcgacccaatcaccaaatgtagcacccaagaccgctccaaccagaccatcgcctcggacctcgatggcaccctccttgtctcccggagtgccttcccctactacttcctcgtcgccctcgaagccggcagcgtcttccgagccctccttctcttaaccttcgtccccttcgtctacttcacgtacttcgtcctctccgaaaccctagccatcaaaaccctaatcttcataaccttcgcggggcttaaactaaaagacgtcgagctcgtgtcccgctccgtgctgccgaggttctacgccgaggacgtgcaccccaccacgtggcgcgtgttcaacgcgttcggggggaggcggtgcattgtcacggcgagcccccgggtgatggtggagccgttcgcgaagacgtttctcggcgcggatacggtgctcgg

SEQ ID NO: 210664 - DNA, 608 bp, Glycine max
gtgagactgaagagacccttgctgaatgttaaatcgttcaagtcacagttcgcagagtgcaagcccagaaagcaatatgcgggcttgaatctggaatgactggaatcctcttgaaagaagactatacagatgactggagagatataattgaattatctgataggctacatgaaggtgacatgctcacttgtaaaattaagtcaatccaaaagaataggtatcaagtcttccttgtatgtaaggatagtgaaatgagaagtaatcggttacagaataaccgtgatattgacccctattaccatgaagaccgaagctgttttcagagtgatcaagacaaagctaggaaagaaaaggagcttgcaaaaaagcatttcaagccaaggatgattgttcatccacgctttcagaacataactgcagatgaagcaatagagttcttgtctgacaaagatcctggagaaagtattatccgtcctagttcacgaggaccttcatatcttactttaactctcaaaattaatgatggagtatatgcccataaggatataattgaaggtgggaaggaacacaaggacattacaagcttacttcgaattgggaagacacta

SEQ ID NO: 210665 - DNA, 659 bp, Glycine max
  unsure (1)..(659): unsure at all n locations
ngccccgcnnnggggnnnnccgaggggnnggaggggcattgnnacatcngtanncnctaagagaagtaccggggganaccaggaagagagagggtggactcgctgattatagaggttttgttggggaattttagcaggactggacctaaaaagggccctccggggcggacccaaaaagagagagggactatccgcggtggccagacacgccagaagggtggagatcggtgactgaggaatacagcgacaaagaaatgggtctagcttgcaagctcatggaggtgttgtccgaagcaatggggatagagaaagagggtttaagcaaagcatgtgttgacatggaccagaaggtggagggtaattactaccccaaatgccctcaacctgacctcactcttggcctgaagcgccacacggatccgggcactatcaccttgctgcttcaggaccaagtgggtggacttcaagccaccacggacaatggccaaacatggatcaccgctcagcctggggaggctgccttcgtcggcaatcttggagatcatgctcattatctgagcattggaagggtcaagaatgctgaacaccaagcggtggtgaactcaaaccatagccggttgtccatagccccctttcaaaacccagcaccaaatgcaact

SEQ ID NO: 210666 - DNA, 517 bp, Glycine max
  unsure (1)..(517): unsure at all n locations
agatattagggtttttgagtgcggtgcggcgatcctagcactctcttctgcagctttcgccgacagcttcattcaccatggctgagcaaaccgagaaggcttttttgaaacaaccaaaagtgtttctcagctcgaagaaaactgggaagggaaagagacccggaaagggtgggaaccgcttttggaaatccattgggcttggatttaagactcccagggaagccatcgaaggaacctacattgacaagaagtgccccttcactggcaatgtttccatccgtggccgtatcttggctggaacatgtcacagtgctaagatgaacaggactattattgttaggaggaattatctccattttatcaagaagtaccagaggtacgagaaaaggcactccaacattcctgctcatatatcacctgctttccgtgtgaaggaaggagatcacgttattattggtcaatgcaggccactttctaagactgtgagggtcaatgtgtngaaagtgatcccagctgg

SEQ ID NO: 210667 - DNA, 616 bp, Glycine max
gactcaccttctgatcgactactgaaatagtactgtatgttacatacccgttaaacgcgaataccagtcggcggccgcccttttttttttttttttaacaagatccttatcatattgccagaacgaaacctcaaagaagagccaaaattgacaaggttttcatatttgttatcatccagaaaagaaatcagatataataattaataaggtaacatttatcttcaataaaaactggaaatcaaagctcacattccagtaaaagccttctttgcaccgctagaagatccagctgggatcactttcaacacattgaacctcacagtcttagaaagtggcctgcattgaccaataataacgtgatctccttccttcacacggaaagcaggtgatatatgagcaggaatgttggagtgccttttctcgtacctctggtacttcttgataaaatggagataattcctcctaacaataatagtcctgttcatcttagcactgtgacatgttccagccaagatacggccacggatggaaacattgccagtgaaggggcacttcttgtcaatgtaggttccttcgatggcttccctgggagtcttaaatccaagcccaatggatt

SEQ ID NO: 210668 - DNA, 482 bp, Glycine max
agatattagggtttttgagtgcggttcggcgatcctagcactctcttctgcagctttcgccgacagcttcattcaccatggctgagcaaaccgagaaggcttttttgaaacaaccaaaagtgtttctcagctcgaagaaaactgggaagggaaagagacccggaaagggtgggaaccgcttttggaaatccattgggcttggatttaagactcccagggaagccatcgaaggaacctacattgacaagaagtgccccttcactggcaatgtttccatccgtggccgtatcttggctggaacatgtcacagtgctaagatgaacaggactattattgctaggaggaattatctccattttatcaagaagtaccagaggtacgagaaaaggcactccaacattcctgctcatatatcaacctgcttccgtgtgaaagaaggagatcacgttattattggtcaatgcaggccactttctaagact

SEQ ID NO: 210669 - DNA, 678 bp, Glycine max
  unsure (1)..(678): unsure at all n locations
gctttcccgtctgatgcgcttcagtcatagcagtctgtatgttaaattacccngttagaaccgaataccagtcggcggccgcccttttttttttttttttaacaagatccttttcatatatccagaacgaaacctcaaagaaggtccaaggttgacaaggttttcatatttgttatcatccagaaaagaaatcagatataataattaataaggtaacatttatcttcaataaaaactggaaatcaaagctcacattccagtaaaagccttctttgcaccgctagaagatccagctgggatcactttcaacacattgaacctcacagtcttagaaagtggcctgcattgaccaataataacgtgatctccttccttcacacggaaagcaggtgatatatgagcaggaatgttggagtgccttttctcgtacctctggtacttcttgataaaatggagataattcctcctaacaataatagtcctgttcatcttagcactgtgacatgttccagccaagatacggccacggatggaaacattgccagtgaaggggcacttcttgtcaatgtaggttccttcgatggcttccctgggagtcttaaattcaagcccaatggatttccaaaagcggattccaccctttccgggctttttcccttccaggtttttcgagctgag

SEQ ID NO: 210670 - DNA, 573 bp, Glycine max
gggaggctagccgtcggtgaagaatcgcttgattcgcctggaaatcgcgattcaagcacgggtcatccccgatacagagattcaaccacaattcaggaaagaaaaacgagacaaactccgtttcgtatcaatagaagctggaatcgtatcgaaatcgcgagatacggatcgtgaatcattattgtagaagtctctgggtgatggctggttcagaacctgtaagtgcagagggagagagtatggctgtggatgctgccccaaggaagccccggattctacttgctgctagtgggagtgttgctgctgtcaaatttgcaaatctttgtcattgtttctctgaatgggcagatgtaagagcagtttcctcaagtggatctttgcatttcattgatagagcatcaatgcccaaggatgtaattctatacacggatgaagatgaatggtctagttggaagaaattaagtgatagtgtgcttcacattgagcttcgcaaatgggcagatatcatggtcatcgctccattatcggcaaacacccttggcaagattgctggagggttgtgtgacattctac

SEQ ID NO: 210671 - DNA, 588 bp, Glycine max
agcactcacaccagccgcttttcgaccccgttactagtttgttagttaaccgttagaaccaataccagtcggcggccgctcttaaatttttttttttaaactttttttttttcagttcaggcaaaaaaacaaaaaccagggggcaaaggtaagcctcacggccgcacaacccccaagccccaagcccaaccgggggaacaccaacccccaaccaacaacaaaccaagaaaaccctcctggccagctccaattaattcaaactcatttgctagaagttgaaaaaaaataaaatacagcacatctaagtccccttcgaattcactgctaagaaggaatgataaataactaaaagaaaacaactgaaagccaaagactccaaaagttttagtaggcatagcccttgacaaacattcccttcttggcctcttcactctcaccctcagcagagtatcttccaagttgagccaaggagtttgctttagcacgcaccaaaagggacttttgagcagcttccacattctcagggtgtccttgccatgtcttaagcacagtgttctgaaaagcccgtgcatatgagaaagaaacatg

SEQ ID NO: 210672 - DNA, 558 bp, Glycine max
gaacttcgtcctccctctgtttctttctttcttagttgcagcgcgattgctgcatcgtcctccaataagagctcgctgctagtgaaccctaacacggcggcaacgagaggtgttcggttgaagctcagatcagcgatggcagcagcaacccgcacttctctgcggttcctcctctcagtctccgtaaccctaactctcgctcacctcgccgcctcaaattccgaaggcgacgctctctacacgctgaaacggagcctctcggaccctgacaacgttctccagagctgggatcccactctcgttagcccctgtacttggttccacgtcacctgcaaccaggacaaccgagtcactcgagtggatcttggtaactctaacctatctggacatttggtacctgaacttgggaagctggagcatctacagtatcttgagttgtacaaaaacaacattcaaggaactattcctccagaacttggaaacctgaagagtctaattagcttggacttgtacaacaaccacatatcaggcaccatcccaccttcattggggaaattg

SEQ ID NO: 210673 - DNA, 558 bp, Glycine max
gaacaggcaaataaacaatggctatggggtaaactttgtttttcttctgttcttttctcatgttcttttcccatttgggtttttactaatccccaacctccattttaccaagaaaacctttctttctagcttcaatttattcaaactcatttgctagaagttgaaaaaaaataaaatacagcacatctaagtccccttcgaattcactgctaagaaggaatgataaataactaaaagaaaacaactgaaagccaaagactccaaaagttttagtaggtatagcccttgacaaacattcccttcttggcctcttcactctcaccctcagcagagtatcttccaagttgagccaaggagtttgctttagcacgcaccaaaagggacttttgagcagcttccacattctcagggtgtccttgccatgtcttaagcacagtgttctgaagagcccgtgcttatgagaaagaaacatgccatgggttgggactttggttcatggcatttagatttagtggtgcttccacttgggattgccaccagacaaaaacatgattccgg

SEQ ID NO: 210674 - DNA, 541 bp, Glycine max
tctttttttttttttttttattttttttttttttttctttttttttttttttttggttaggggtaaatttcatttcatttcatcaaaataatgggtacattacaaagctttcttatatcacaaccaataacgcgccctaaaataccaacaaagagggccccaagaggtttattttaacccaaacaacctatgccccgtctgattcaaacccaggcttcggccaacgtacgaactcggacccatggaataattcgttatatgcccaatgggtacataacacaacaaaaacaaattaacagggtaagaaacaaaataacaaacatgtactacgtattagcgaggcatgcctgaatggtgggaaccactgaaaatttaattaaattaaatgccaccaagggactctgggggggccactgggaaccctgacttatccctacaatagccatagataacatggttcaaacgaacccacctgtacctttttggttcaatggagttaagggcttggaatgctggcccttcccaacagttacttgggttg

SEQ ID NO: 210675 - DNA, 561 bp, Glycine max
gttgagagcattagcagcacgaaatgattttaggaacataagaagaacaaaggcttcaacaaaaattcagacacaatggagaagagcccaagctctttctgattacaaacagcaaaagaaagcaactgttacacttcaatgtctatggagagctaaagtggcaaggaaagagctcagaaagcttcggatggctgcaagggaaactggggcacttaaggaagcaaaggacaagttggacaaacttgttgaggagcttacatggagaatagatatcgaaaagcacatgaggacggatcttgaagaagctaaagggcaagagattgcaaaattgcaaaatgctttacaagaaatgaaagctcagttagatgaagcccatgctgcacttatacatgaaagagaagcagcaaaaatagcaattgaacaagcaccaccagtaattaaagaggtaccagttgtggacgaaaccaagctagagttactgacaaataaaaatgaggagttggagactgaagtagatgagctgaaaaagaagattaaagagtttgaagaaagttgctctga

SEQ ID NO: 210676 - DNA, 581 bp, Glycine max
attaatattagtatttattattgatatacagcacgtgagactcccaatctctaagcatggacactaaaagggtaagaaactctaaatctaaaccacttaatccctacaacaccacacttaaaccgtggtagagagctcaatttggttcccttctgaattgctatcccctttgtcatggacctgaattggcttgtaggtgtacaatttggcacaaaccaagtagtaaataagattgagaaactgcaatatggtgataagccagtaaaagtactccaacttccctttgttgaggttgttgtcagggagccaatttgacccattagacccagcactgaacttgtggaccaaagtaaccataatggtactcacatagttcccagcagcgatagcagtccaaaataatgccatggcagtgctcctcatactctcaggggcctggtcatagaaaaactccaagtgtccaattgacataaaggcctcagccattccatgaaggctgttttgagggacaagccagaacactgagaatgggattatggcatgtgggtggtcaaaagcccatgggccacagctgccttttt

SEQ ID NO: 210677 - DNA, 589 bp, Glycine max
acttacttgaagttgtgctattcaatctttaagccacataaataatattattcagattttagagactgaaaacatcatggccaacctcgacctcgacccattccagacaagcatcttaatcctcgtcccaatagcactcctggtggcgttactatctcgtactcgtcgaagagcaccctacccaccaggcccaaagggtttaccaatcataggaaacatgttaatgatggagcagctaacccaccgcggcctcgccaacctggccaaacactacggcggcatcttccacctccgcatggggttcctccacatggtcgccatctccgaccccgtcgccgcgcgtcaggttctccaagtccaagacaacatcttctccaaccgcccagccaccatcgccatcagctaccttacctacgaccgcgccgacatggcttttgcccactacggccccttctggcgccagatgcggaaactctgcgtcatgaagctcttcagccgcaagcgcgccgagtcctggcagtcagtccgcgatgaggtcgacgcccgcgttcgcgccgtcgctagcagcgtcggaaagcccgtcaacatt

SEQ ID NO: 210678 - DNA, 578 bp, Glycine max
ccattattggcccccattttactgttcatgaaggaagaatttatcaattgaagctgttttgtgataaagactacccagaaaagcccccaagtgttcggtttcattcacgagtcaacatgacttgtgttaatcatgaaactggagtggttgaaccaaagaaatttggtcttcttgcaaattggcaaagagagtacaccatggaggacatactgacccagctgaagaaggaaatggctgctcctcataaccggaagcttgtccagcctccggaaggtacctacttttagcatccaacaagatggtatagatgtcggatcgtattgcatatgctgcatgcaatatatagtgtgtaatgctttgtagatccttccttctgaattcaagaacataggggaatgccccgaaaagcttcatatttccatctccatggcttcagagttgttttgctgtctttgtcaacggtgctgaaggggactgtttgattgaaatattggtgtgtcaaaaattttcgaagcaactctttaagtagtattttatgtaatgtgtgctttggctatgtttggtcactctaatagtgg

SEQ ID NO: 210679 - DNA, 588 bp, Glycine max
agatattagggtttctgtttgcggttcggcgatcctagcactctcttctgcagctttcgccgacagcttcattcaccatggctgagcaaaccgagaaggcttttttgaaacaaccaaaagtgtttctcagctcgaagaaaactgggaagggaaagagacccggaaagggtgggaaccgcttttggaaatccattgggcttggatttaagactcccagggaagccatcgaaggaacctacattgacaagaagtgccccttcactggcaatgtttccatccgtggccgtatcttggctggaacatgtcacagtgctaagatgaacaggactattattgctaggaggaattatctccattttatcaagaagtaccagaggtacgagaaaaggcactccaacattcctgctcatatatcacctgctttccgtgtgaaggaaggagatcacgttattattggtcaatgcaggccactttctaagactgcgaggttcaatgtgttgaaagtgatcccagctggatcttctagcggtgcaaaaaaggcttttactggaatgtgaagcttgatttccagttttattgaagataatg

SEQ ID NO: 210680 - DNA, 634 bp, Glycine max
  unsure (1)..(634): unsure at all n locations
tgctaactatatgtgcgcttagttaaagactgtatnttaaatgccngtacaaccaataccagtcggcggccgccgttttttttttttttttaacatgatccttttcatttttccagaacgaaacctcaaagaaggtccaaagttgacaaggttttcatatttgttatcatccagaaaagaaatcagatataataattaataaggtaacatttatcttcaataaaaactggaaatcaaagctcacattccagtaaaagccttctttgcaccgctagaagatccagctgggatcactttcaacacattgaacctcacagtcttagaaagtggcctgcattgaccaataataacgtgatctccttccttcacacggaaagcaggtgatatatgagcaggaatgttggagtgccttttctcgtacctctggtacttcttgataaaatggagataattcctcctaacaataatagtcctgttcatcttagcactgtgacatgttccagccaagatacggccacggatggaaacattgccagtgaaggggcacttcttgacaatgtaggttccttcgatggcttccctgggagtcttaaatccaagcccaatggatttccaaaagcggattccacccttt

SEQ ID NO: 210681 - DNA, 559 bp, Glycine max
  unsure (1)..(559): unsure at all n locations
ccctttctctctgcttagggttttgatcgcatcggatcttcactctcttctccgatctcaaaatgcccgccgtttatggagctcgcttgaccaccttcgaagactccgagaaggagagtgaatacggttacgttcgcaaggtatcaggaccagtcgtcgttgcagatggcatggctggggctgctatgtatgaactcgtgcgtgttggtcatgataatctcattggtgaaattattcgtctcgaagggaattctgctaccatccaagtttatgaggaaactgctggcttgatggttaatgatccggtgttacggactcacaagcctttatccgtggagttgggacctggaatactggggaatattttcgatggaattcagaggcctttgaaaactattgctanacgatctggtgatgtctatatcctcgtggtgtctctgttccagcactcgacaaagatacactttgggaatttcaacctaagaaaattggtgaaggcgaccctttaactggtggagatttatatgctactgtttttgagaacagtctaatgcaacac

SEQ ID NO: 210682 - DNA, 569 bp, Glycine max
cgaataaatatgtatagatattcattgctacaagaagtccatctatgaaatacaggattcaagataatccacttccaccaaaaattccacctatatgaatccagaatccgcttgctgtaggcacttcatgtcctaagataattttattctcctaaatacatattgaaagagcaagtctcgtttcttattctcaataaacaaactgaggatgactgaaacacatgattatagctacacatgagactagatcaaaagccaaaccagcaccaagaaaggaaataaatgtgatatgaatgaatcgaacagtcaaatatgagaacactcgggacgttgcaaccctgcgatgctagactgcgtcttacaattggaaataacacaatatttgagcaaactaccaaatcttcaatcatcaatcatcgggtttcgtcctcaaggttgcggaaaccattagtcaggtcctcatgtaacttctgaaatttcgcaaccaaagcagcttccccttctgctggatcctcaaatttctgagacactaatcggtagaacagatcttccatacgatgcttgatagg

SEQ ID NO: 210683 - DNA, 592 bp, Glycine max
  unsure (1)..(592): unsure at all n locations
gggaggctagccgtcggtgaagaattgcgcgattcgccaggaaatcgcgattcaagcacgattcatccccgatacagagattcaaccacaattcaggaaagaaaaacgagacaaactccgtttcgtatcaatagaagctggaatcgtatcgaatcgcgagatacggatcgtgaatcattattgtagaagtctctgggtgatggctggttcagaacctgtaagtgcagagggagagagtatggctgtggatgctgccccaaggaagccccggattctacttgctgctagtgggagtgttgctgctgtcaaatttgcaaatctttgtcattgtttctctgaatgggcagatgtaagagcagtttcctcaagtggatctttgcatttcattgatagagcatcaatgcccaaggatgtaattctatacacggatgacgatgaatggtctagttggaagaacttaggtgatagtgtgcttcacattgagcttcgcaaatgggcagatatcatggtcatcgctccattatcggcaaacacccttggcagattgctggagggttgtgtgacaatctacttacatgtatcgntcgagcct

SEQ ID NO: 210684 - DNA, 506 bp, Glycine max
ctttttgattacgaaaatgttgaagagatcgggttttgaagaagaagcagttcaattgatcaactcagatttcagggacctaagtctagctgctaatagactcgcccatcatgccatcaaacttggtggcattggctttggagcctcttttttcggattgtttgctgccattgctgctatttatctgttgattttggatcgtacaaactggaaaacaaatattctcacagcactactcattccatacattttcttcagcttgccttcattaattttcgacgtcttcaggggagagcttggaaaatggattgctgcagttgctgttgtattacgccttttccttccaagacacttccctgattggctggaattgcctggtgctctgattcttcttatcgttgtagctccttctctaattgcaagcacctttagagacaacattgttggggtggtagtgtgcctcatcattgcatggtatttgctgcaagaacacattcgggcttctg

SEQ ID NO: 210685 - DNA, 506 bp, Glycine max
gaacttcgtcctccctctgcttctttctttcttagttgcagcgcgattgctgcatcgtcctccaataagagctcgctgctagtgaaccctaacacggcggcaacgagaggtgttcggttgaagctcagatcagcgatggcagcagcaacccgcacttctctgcggttcctcctctcagtctccgtaaccctaactctcgctcacctcgccgcctcaaattccgaaggcgacgctctctacacgctgaaacggagcctctcggaccctgacaacgttctccagagctgggatcccactctcgttagcccctgtacttggttccacgtcacctgcaaccaggacaaccgagtcactcgagtggatcttggtaactctaacctatctggacatttggtacctgaacttgggaagctggagcatctacagtatcttgagttgtacaaaaacaacattcaggaactattcctccagaacttggaaacctgaagagtctagttagcttggac

SEQ ID NO: 210686 - DNA, 555 bp, Glycine max
aagggcaccgaaaccattaaattgactagggtcatacattgatcttttgatcaactaaaaagagtggttatatatatatataacggtttcactcaaggcatatatttatatggtcccattctcatctagtgatgaatcagaggcagagtcatctagtgttgagtttgatgtagtctccaattgacccccactctcgttatcggaagttcccactgtcctttcttcatgagggtgttttaggcaccaagacattatactagctgttagtgtaaggatcatttttggattcacctcagtgatgtcttcaggaagcaggaatatagaacatccaagctttcttgcaatactgataatgtaggtggcgttcatctttttctcttggtaggttactccctttgttacaagaccccaatttacagctctgggtgtcactgaacttagaagctcaaggaaaaatattccatctgataaacttttatccttaaaactgtccatgcggctttggcttctggagctgctaaccttgcttgtgcccactctaaaatatcagcatca

SEQ ID NO: 210687 - DNA, 486 bp, Glycine max
ctcgagccgctcgagccgattcggctcgttctcaaccaacaagtagacaaaaaccccagttataatatatggttctttttatgaagctcccttttcctcctcatcttccttcctcactgctccatttcacattattattattgttttttattgtgtgtaaaacaagggcagttgtgaaacttccgccaaatgtttcagttccagcagtgttggtgtttggagattcaatcgtggacactggcaacaacaacaacaacttaggaacaacagctcggtgcaattacccaccatatggtaaagattttgagggaggcaaaccaactggtcgatttagcaacggaaaggttccatctgactttatagctgaagaattgggcattaaagagtatgtaccagcatacttggatccacatctccaacctggtgaattggccactggtgtgtgctttgcatctggtggtgcaggatacgatcctttgacatcgc

SEQ ID NO: 210688 - DNA, 499 bp, Glycine max
ggaaaaaggccaccacaaagtattacttatctccaatctccggagtcaggaattacaacttaactttcatctggacattaaattaataacaacgaaatacttaaatctaatctgaaattggccccccaaaaaaggattttcctttaaacaaaaattgacactataggatatcctcagcttttaaaaaaatgccagaaaactccagcagctgacatggggaactacatatgctaacgctcaaaaggagccacgccttggcctgtcctcagcaacactcaccttaattgcccttccgtccaaacttttgccatcaaaagcagcaccggcatcattcatttctggctcatcagacattgggacaaagccaaagccacgtgatcgacctgactccctgtcataaactacccgagcatttacaacattaccgtgtttactgaaaatttgcttcagccgggtattggcaacatcccatggcaaattacccacattgattgataag

SEQ ID NO: 210689 - DNA, 489 bp, Glycine max
ataaaacttcgttataaatgaaatgcggcttaaaacatccctcagcagcaaaggaaatggactaaaaccctatagctgcttgtgaaattcgaaatatctcagactcttcttaccatcaaaacaaaaaacagtactcatcaaaaacaaacagcaatgaaaattgaccaccgccgatcaagaacctagttttgaaagttacggctacatgaaatcggcagaaacttaaaaatataacttaaacaaaacacctaagactctgcaaggataaaactactataaaggagtaaccacgatgatgatcacatgtgctagcaaaattgcccaaatgcaatcacttcttcttggcagcggccttggtgaccttggctccggtggggtctttcttctcaacactcttgatgactccgacagccacagtttgacgcatgtccctcacagcaaaacgaccaaggggaggatactcaaagaaagtttcaaccaccatgggct

SEQ ID NO: 210690 - DNA, 616 bp, Glycine max
  unsure (1)..(616): unsure at all n locations
ggccccgaccccacccagcncnccttggccccngggtaatactgattactatagnanncttacggcaataccgagcacggcanncnnannaaaaggaaanncaaancatnncnnnnataaatttaaaaaattttctttaattaaatatttaatggaattaaatagttaaattaataaaattagtcgtgttttattcgattttttgaattggtttttttttacagtagctaatgctagtcaccgaacttagtcaatgagctagaatgggttataaagatatctatagatatatatagatatatttatctatagatatctttagaaaaaaaaaaagaaaataaacaaataagacgtatcattttatgtatagtagtggggaattatgggacaaaaaataaatccgcttggtttcagacttggtacaactcaaagtcatgattctatttggtttgctcaaccaacaaattattccgagaatatacaagaagataaaaaaatacgagattgtatcaaaaattatatacaaaaaaatataagaatatcctctggtgttgagggaattggacagataaagattcaaaaaagaattgatcctattcaagttataatatatatg

SEQ ID NO: 210691 - DNA, 668 bp, Glycine max
  unsure (1)..(668): unsure at all n locations
gccctgcccccccaggccnnctggccaggagccacgcactctcgtaancnctatgggcaatacctaagctcgccattcttattaaaatgaaattcaaatcatttcttttataaatttaaaaaattttctttaattaaatatttaatgaaattaaatatttaaattaataaaattagtcgtgttttattcgattttttgaattggtttttttttacagtagctaatgctagtcaccgaacttagtcaatgagctagaatgggttataaagatatctatagatatatatagatatatttatctatagatatctttagaaaaaaaaaaagaaaataaacaaataagacgtatcattttatgtatagtagtggggaattatgggacaaaaaataaatccgcttggtttcagacttggtacaactcaaagtcatgattctatttggtttgctcaaccaacaaattattccgagaatatacaagaagataaaaaaatacgagattgtatcaaaaattatatacaaaaaaatataagaatatcctctggtgttgagggaattggacagataaagattcaaaaaagaattgatcttattcaagttataatatatatgggatttccaaagttttaatagagggtagtctcaaaaatcgaagaatacagacgaattgc

SEQ ID NO: 210692 - DNA, 530 bp, Glycine max
caccgattcattaacttcacacacagtcttctgtgtttccaccacaccatagcatatagtactagtagattaaacgccaaagaaataaattactcactttcacgtaaaccataacgtgcttccaccgcaaccaaccacaatgggtgccgttaggtccataacggtgttgctactagtgttatttatggccatgagctccggcgtgcgctcgtgtccgccgtcggacagggcggcgctgctggcattcaaggcggcgctccacgaaccctacctgggaatcttcaactcgtggaccggcgccgactgctgccacaagtggtacggcgtgagctgcgaccaggagacccgccgcgtcgccgacatcaacctccgcggcgagtcggaggagccgatcttcgagcgcgcccaccgcaccggctacatgaccggctacatctcgccggcgatctgcaagctcgcgcgcctctccagcatcaccatcgccgactggaagggaatctccggcgagatcccgcgctgcatcacgaccc

SEQ ID NO: 210693 - DNA, 588 bp, Glycine max
  unsure (1)..(588): unsure at all n locations
atttgaaattaacaagtagcaaagatgtttggaatcatcggaggaaacaagggtcacaagataaaggggaacttggtgattatgcgaaagaatgtgttggatatcaacagcattaccagtgttaagggtgtcatcggaaccggcattaacatcattggaggagtcgtcgacaccgttactgctttggcgtcccacatctccatccagctcattccatatttgaggaaaataaatgcaactaccacaaagacttacgctacaagaaccatatttttcttgaaaagtgatggaaccttgacgccattggccattgagttaagtaagccgcatcctcagggtgaaggatatggtcctgttagcgaagtctacgtgccttcgagcgagggagttgaagcttacatttggttactggcaaaggcttatgttgttgtgaatgattcgtgctaccatcaactcgtcagccactggctaaacactcatgcggttgttgagccattcgtcatagcaacaaacaggcatctgagcgtggttcaccctatttacanacttttgtttcctcactatcgtgacaccatgaacattaattca

SEQ ID NO: 210694 - DNA, 506 bp, Glycine max
ctgattgttcatctgtggacagctccgttctgtccttctcagatgagactaaaagcaatctgaaccttaaggctactgagctgagactggggcttccgggattgcagtctcccgaacgagattcagatctttgcttgagaagttcaattcagtttgatgaaaaaccactgtttcctttgcatcctgctactgatgatcaccattcctcatcaaagcctgctgttttgggtaacaaaagagggttctcagatgtcatgagtggattcgccgaggagaaattgcttgttagttctgaggtcaacacaatattgtcaccaaggccttcttctaatgtggcattgaaaccaagctctatgcttgagaatgttggggctcagcaatccaaagccaaagaactcgcaacagcgaaggttggtcttgagaggtctcatgttttcaatgatagcagaacaaatctgaatgattctgctaataacaatagcagtgcaccagctaccaaggcacag

SEQ ID NO: 210695 - DNA, 566 bp, Glycine max
acagcacaaagcgggttactgtctgttcaagctaccatctctctctctctttcttagtgcctccttgccagaagttaaaatggcccaagaaactttcctattcacatctgaatcagtgaacgaggggcaccctgacaagctctgtgaccagatctccgatgctgtgctcgatgcatgcttggagcaggaccctgacagcaaggttgcctgtgaaacctgcaccaagaccaacatggtgatggttttcggagagatcacaaccaaggccaacgtggactatgagaagattgtgcgtgacacatgcaggaacattggttttgtctctgatgatgttggtcttgatgctgacaactgcaaggtcctcgtcaacattgagcaacagagtcctgatattgctcaaggtgtgcacggccacctcacaaagaggcctgaggagattggtgctggtgaccaaggtcatatgttcggctatgccactgacgagactcccgagctcatgcccttgagccatgtccttgccacgaagctcggtgccaagctcaccgaggttcggaagatcggacatg

SEQ ID NO: 210696 - DNA, 576 bp, Glycine max
  unsure (1)..(576): unsure at all n locations
gaattcctcgcatgaagctctaactcattgttttcagttggctttttccttaaggaacatttctctcaatgaaaatgtaaagctgcaaccatcacgccgcagatctctctttacactggcaacatccatgattatcttcgcatccaaggcctacaacatcctctctctaatttctattgctaaaacgacattgacagatagaacagttgatccattcctgcaactggttaatgatagcaagttacaagcggttactgatacagataagcagccaagtaaagtttatggatcaaaagaggatgatgaagatgctttaaagtcactttcagcaataaagttaactgagagccagtctaaagaatcatttgctaccatgatagtgcagagtctgggaaaatcgtctaatgaatcatccatcttaagagaacggctgctgaatgatttctcacctgatgatgcctgtcctttgggagcccagttatctgccgagacaacaggaaatatgtaccagtctggactaaaagaagataaacttcctgatatggntgaaatttcattatttactattgacgatga

SEQ ID NO: 210697 - DNA, 553 bp, Glycine max
gtcctgctgtgaatatgagaatttcttgacattcgtcatcagaagttatcaactgctgccaactttgtgaaaagattgcatgatcttgcagttcagaagaggggttatgttgacttgcaagagatggtcagggaggacagtatcacatgctcatatggatccactcttccacaagatcctacttgtacattaccatgtagtttgacagaaacagatccttatactttcctgatacgtggagaaaattatcttgaagaccgccagaaggttaaagcaaagggaaccttgatgaaaatggttgctgcagattgggtgagatctgacaaaagggaagatgaccttggtggccgtcctgggagcattgcgcagaaatatgctgcacagggaggacccgagttctttttcattgtaaacattcaggttccaggttctactacatatagtctagcactatactatatgatgaatactcctgtggaagatgctcctttgctagagagttttatcaagggtgatgatgccttcagaaatccagatttaaactatccataca

SEQ ID NO: 210698 - DNA, 529 bp, Glycine max
agacaaagcaagtgatggtgattggtatcgacgacagtgatttcagcacgtacgctctccaatggactctggatcacttgctatcccctgcaaatgttcctaagttcaagatttttcttgtttatgccaagccttctgttgcctctgctgtcggttttgttggccctggagccgctgaggtgttacctgttgttgaggccgatttgagaaaaacagctgccaaaatcactgaacgtgctacagaactatgcaagaagaaatccgtaaatgacgtagcagtggaagtgctagaaggtgatcctagaaatgttctttgcgaggcagtggaaaagcaccaagcttcaatgttggttgtgggtagtcatggttatgggactttaaaaagagcggctctaggtagtgtaagtgactattgtgctcatcatgctcactgcactgtcatgatcgtgaagaaaccaaagcacatacactgatctcaatcgttggctccgattaaatagcagtgcacataaatcttttcagcaacagg

SEQ ID NO: 210699 - DNA, 541 bp, Glycine max
  unsure (1)..(541): unsure at all n locations
aagaagaagggggagctaaagtcaatttttcttcctttcctttccactagtcacataatcccggtagtggacatggccagactcttcgccttgcacgacgtcgacgtcaccatcatcaccaccgcacataacgccaccgtttttcaaaagtccatcgatttagatgcgagtcgcggtcgccccatcagaacgcacgttgtcaacttccccgccgcacaagtgggtctccccgttgggatcgaagccttcaacgtcgatacgcctcgggaaatgacccccagaatctacatgggcctatcccttctccaacaagtcttcgaaaaactcttccatgacttgcaaccggatttcatcgtcaccgacatgttccaccgttggagtgtcgatgctgctgctaaactcggcattccaggatcatgttccacgcgcatgttatctcgctcgcttcgctgcgcactccgtgaacagtacgcacnccacttggaagcaaaattcgacaccgccagttcgtggtacctgggttacccgataacttggagat

SEQ ID NO: 210700 - DNA, 350 bp, Glycine max
ggtttgagggtctcttctttatacggatggcagcaccattggcatgtcttgttgggagtggtttatctatacagagtaataaattaactcttggcaaggacgtcaatggaagatatctcttctcatatcataggctttcagcacaagagtagggagtcaaagacaatatgcataaaggcatccttggatcaaaggaagcatgaagggagaagaggatttctgaaattgttgaatgtgggagttggcttacctgtattattaggaggtgggaaagcgtatgctgatgaacaaggaccttcctcctccagaatgtcttattccagatttcttgagtatttggataaggtaga

SEQ ID NO: 210701 - DNA, 557 bp, Glycine max
aagaaatatttaattggatcttttgaattgctgagtaaaactgctcccattcaagcgctttttcttcttattcttggtccatttgtcgattactacctcagtggcaaattgataaccagctataagatgtcttctggtgccattttatgcattcttctttcatgctcactagctgtattttgcaatgtgagccaatacctttgcatcgggcgcttttcagctgtttccttccaggttttaggccacatgaaaacagtatgtgttttgacgctgggatggctgctatttgattcagagctaactttcaagaatatcatgggaatgattatcgcagttgttggcatggtaatttacagctgggctgtagagcttgaaaagcagtcaaatgcaaagaccttacctcacgtgaaaaacagcatgacggaagaagaaattagatcattgaaggttggagtagaaaacagtcctctgaaggatgttgaacttggtgaggcccaaggatagattgactcagatttggcggtgaaattgatgagaaatgaattgcaggcattata

SEQ ID NO: 210702 - DNA, 585 bp, Glycine max
ctccacaacccaattttcttttcctatgtatccaattccaaatccaaatcaccaattctaattccattcttcaggagttgaattgaattcgtgatgaagagggaccacaaagatagctgcggcggcggcggcgccgccggagggactgtgaagggtgagtgttcctcaatgcagtcaaacgggaaggcgaagatgtgggaggaagagcaacagcagcagcagcagcaacaacagcaacaacaacaacaggggatggacgagttgctggcggcgttggggtacaaggttcgtgcttccgacatggctgacgtggcacagaagctggagcagttggagatggtcatgggttgtgcccaggaagacggaatttcccacctggcctccgacaccgttcattacgaccctacagatctctattcctgggtccaaagcatgttaaccgaactcaaccccgaacccaacaacaacctcgatccatcttctttcttgatcgacaacaacaacaacatcatcaacagcacagcccctgttttcaacgacgattccgtatatgacctcagagccattcctggcatagcagcctac

SEQ ID NO: 210703 - DNA, 539 bp, Glycine max
tctcattggattctgtcacaaggtttgctgaagcatggaatgcacgctcagcacccttgcatgttctcatcaataatgctgggattttttctattggagagccacaaaagttttccaaagatggttatgaacagcacttgcaagtgaatcatcttgctcctgccttgctttcgatacttcttttgccatcccttattaggggttctcctagtcgcattgttaatgtgaattccataatgcatcatgttggctttgtagacaccgaagatatgaatgtcacatctggaaaaaggaaattttctagtttggtagggtactcaagcagcaagttagcagagattatgtttagtagtattcttaataaacgactccctgcggaatctggcatcagtgtattgtgtgtatcacctggaattgtccagaccaatgtggcaagagatcttccgaaacttgttcaagctgcgtatcatttgatcccttacttcatctttagtgctcaagaagggtgcaggagtgctctctttgctgccactgatcct

SEQ ID NO: 210704 - DNA, 563 bp, Glycine max
  unsure (1)..(563): unsure at all n locations
aaaaaatgaccaagatcttctttgtattgctgctatgtctaatcatagcatcttcttctgggtttgtgaattgctctgatgttgagaaggaggaaaagattggaatatttgagctcaagaaaggtgacctttctttgagggtcaccaactggggtgcttcaattttgtccctggtgattcctgataagaatggaaagttgggtgatgttgttcttggatatgattctgttaaggattacagtaatgatacaacatattttggagctactgttggccgggttgctaacagaattggaggagctcagtttactctaaatggaatctattacaaattagttgctaatgaaggaaacaatactcttcatggtggagccagaggatttagtgatgttctttggaaagtgaaaagatatcaaaaagaaggtccaagtcccagcattaccttcagttaccatagtgctgatggtgaacaaggattccctggtgatctcctagtaactgtgagctacattctaacggngaaaaatcaattgggtatacttatgaaaggaaaagccctaaac

SEQ ID NO: 210705 - DNA, 547 bp, Glycine max
  unsure (1)..(547): unsure at all n locations
tataagcaagccctagaacacagcttctctgtctatgagagaaatccgctccgtactgacaacttactactcctgggtgcagtttattatcagttgcatgattttgatatgtgtgttgcaaaaaatgaagaagcactgaggattgagccacactttgctgagtgttacgggaatatggcaaatgcatggaaggagaaaggaaacattgaccttgcaattcgctactacttgattgccatagagctccgtcccaattttgctgatgcatggtcaaatctagctagtgcatacatgcgtaaaggaagactcactgaagcagcccagtgttgtcgtcaagcacttgctataaatcctctaatggttgatgcccatagcaacttgggtaatcttatgaaagctcaaggcttggtgcaagaattcgatacagatatgaagttgttgtcttcaagccagggctcagatgatggttgctcttgttgtaacttccatctccaagactgcaaatagtcagaatctaacattntttgcaggcatacagttgttacct

SEQ ID NO: 210706 - DNA, 552 bp, Glycine max
  unsure (1)..(552): unsure at all n locations
ctcgtatgcttgaattttcacgtgttttgtgtgtaatccgtagaaatcatgttggtgactggggaacacagtttgggatgctgattacaaacctctttgaaaaatttccaaacccagatgatgttagtgaagcagacattggagatcttcaggcattctataaggcttcaaaagtgaggtttgatagtgatcctgagtttaagttgagggcacagcaggcagttgtccgcctccagagtggagaaatcaagtatcgcaaggcatggaaacaaatttgtgatgttagtagggctgaatttgataaagtctatcaacgccttggagttcaattggaggaaaggggagagagcttctataatccatatattcctggggttctggagaaactagataatttaggactgattgaagagagtgatggcgcgcgtgtgatttatgttgagggtgtagacataccacttattgctgtgaaaagagatggtggatacaactattttacaactgatctagcatcacttttgtatncgctaaatgaagaaaaaactgagtgga

SEQ ID NO: 210707 - DNA, 554 bp, Glycine max
tggtcccacagtcggaggacttctttatgctacatgtgggaatgttactgagctcataatagcaatatttgcccttagcagtaacaaaattgctgtggtcaagtattctctgttgggttctattctttcaaaccttcttctggttcttgggacctctctattatgtggtggcattgcaaaccttaaagtggaacaaaaatatgacagaagacaagcagatgtgaactcacttatgctgttgttgggattgttgtgctacttgcttccaatgctgttcaaatacagtggtgcctcagctgctctcactgtagacccttcactccacttgtcaagagcttctagcattgtgatgttgattgcatatgtagtctacattgtctttcaactgtggacacacaggcagttatttgaagccgaaaatgaaggtgaggatggtgaggaccgtgaagaagaacaagctgtgattggattatggagtggcattgcttggttggtagggatgactgtgttcattgctgtgttgtctgaatatgtggtggatacaattgaggatg

SEQ ID NO: 210708 - DNA, 343 bp, Glycine max
tggtgccactctcaatggacttctgtattctacatgtaggaatgttacttaacacatacgtctctctattctcgctcatcatcaaccgaattggcgtggtcaagtagtttatgatgactctattcgataaaacttgtctgatctggggacctatctatgatggagtggcactgcgcaccgtaaagggcaacattaacacgacggaatacacacatctgtgatggctcatacactgcggcggggattgttgctgcacatggattctgggctgagaatacacacgagggcctctactgctctcactgtagaccctgcactgagctggcgctgagcgcttagcatt

SEQ ID NO: 210709 - DNA, 511 bp, Glycine max
  unsure (1)..(511): unsure at all n locations
aataaacttatatattcattccgataaagtaaacgtagaagaaaacattttatcatctaatctgaaattgtgctctcaattgaagcaatggaagtaacagctgctccagtgccttatgtccaagaaattgcaaaggaggcattgaccatagtgcctgagcgttatgttcgaccagttcatgaacgtcctatattatctaactctacacctttacctgaaattcctgtcattgacttgagcaaattgttgtctcaagaccacaaggagcatgaactcgacaggcttcactatgcatgcaaaagaatggggtttctttcagctaattaatacnggagtggactcttcattggtggaaaaagtgaagagaggtgctcaagggattattcgatcttccaatggaagagaagaaaaagtttgggcagagagaaagagaagctgcagggtatggtcaaccttccgtggtttcagaggacaagaattagagtgggcagattttgtnttcatgttcact

SEQ ID NO: 210710 - DNA, 514 bp, Glycine max
aacattaagcttggttcatcaaaaggcttcatcacttgaagggttactatatactacttctgtgactgaaaagtgagctgaggtgtataactgcaaatgggtgtttggtggtggaagctgtttgttgctgctcttgctgggattctcttctcaacccaacattgtgcttcccaaaaagttccaaactacacatttatgcacaatgcaacgacagcaccagacgtatcatactacgactacatcgtaattggcggcggcaccgcagggtgtcctttagctgcgacactgtcccaaaattacagcgtgttgctccttgaacgcggtggttcaccctacggcaaccctaacatctccgacttagctgctttcggtgctgccctctcagacacctcccctacctctcccgctcagcgtttcatctccgaagacggtgtcatcaactcaagagctcgcgtcctcggtggtggaagttgcttgaacgctggcttttacactcgcgctagccctcaatatg

SEQ ID NO: 210711 - DNA, 555 bp, Glycine max
aaaaaaaatcgtagttggaggcgccgttctccactccactccaatcaatcagatactagcgatggggaggaagcgaaaggtagcaccgaaatcttctgtatccgccgagcccccgctgaagcaacaccaaccaaaacccgaaaatgccgctcaggaatacgaagaagaggtcgaagaggaagttgaggaagaagaggtagaggaagaggtcgaagaggaagaagaagaagaggaggacgaagaggacgaggaagaagaagaagaagaccaaaaagaccaataccagcaccaacaacaacagcaagacgaagacgacgacccgatctccaagcttctggaaccgttgagcaaggaccagctcctcatccttctctgcgaggcggcggccaagcaccaagacgtggctgagaggatccgaagggcggccgacgaggatccggtgcaccggaagatatttgtccacggattgtgctgggacacaaccgccggaaccctaatcagttcgttccgccagtacggcgagatcgaggactgctaggccgtcaccgacaggtc

SEQ ID NO: 210712 - DNA, 423 bp, Glycine max
  unsure (1)..(423): unsure at all n locations
tgctctccttcagctgccaagaagaggcctgtgtaagaaacgtgctgcggatgctacgtgaggagtttgagctaaccatggccttgagtggttgcacctcactcaaggatatcactcgtgatcacattgtcactgattgggaccaacctcgcattcttccccgcgcattgccaagattatgaaaaatttgctcctcatttgagccaagntngnntaatgnngngcanaacaaaggaggaaacagnnnganatgnggngaaggaacctnctttatttggctgtgtggagaactcatttatggttgtatttggaaaactctatgcttaacttcttttatgcattatatgatgatactttgggtgactactgctgctgctgcatttaattcactctttggttacttctacatctgcgaaatttatt

SEQ ID NO: 210713 - DNA, 578 bp, Glycine max
ctcaacaaaaccttgcctccctcttttttcttggcggcagctggggcaaccaagctctgtgtgcaacgacgccgtttcgacctcctttcttcactctttggcgagcaagcaagcaagtaacaatggcgactcgcgacggcggcatgaagtcgacgtcaataaacggcgttaagatgtacacgatagcgtcgcagcaaccctcactcgcttcctggctcccctcctccaagaagcagaactctcatcgcaacgtcaaaagttacacgcagaacctgcaacttctcgaagacttgcgcttcgccaccgccgccaccaaaatcaaggccactcccgacggcgagtacatcattgcttccggcatctatccgccgcaagtcaaagtctacgaggtcagggagctaggcttgaagttcgaacgccacttggattccgagatcgttgattttcaggttctgtcagacgactattcaaaacttgcatttttatgtgctgatcgctctgtttatttgcatgcgaaatatggaaagcactacagtttgcggattccgaggatggggagagatatttcttatgactgc

SEQ ID NO: 210714 - DNA, 553 bp, Glycine max
atttccttggcggcgcaggggtgatagggttgaatattcaagaagaatttgtgaagttcacgggaataggtgtttatttggaagacaaggccgtgtcatcactcgctgccaaatggaagggcaagagtgcagctgaattgctcgactcccttgacttctacagagatatcatcaaaggcccctttgagaagttaattcgagggtcaaagttaagaacattggatggtcgtgaatacgtaaggaaggtatcagagaactgtgtggcacatatgcaatctgttgggacttacagtgatgaggaggaaaaagctattgaggaatttagaaatgctttcaaggatcaaaatttcccaccaggctccactgttttctacaaacaatcacccactggaacattggggcttagtttctcgaaagatgagacaataccagaacatgagcatgcagtgatagacaacaagccactttcggaggcagtgctggagactatgatcggagagattcctgtttcccctgctttgaaagagagtttggctacaggtttcatcagttc

SEQ ID NO: 210715 - DNA, 614 bp, Glycine max
  unsure (1)..(614): unsure at all n locations
ggaaaaanaatggctatctcttatgcacncnnnnnntnnatttnnnnnnccnnnnccnnnnnnnnnnnnnnnnnnnnnnnnnnnnnnnnnnnnnnnnnnnntttnntttnnnnnnnnnnnnnnnnnnnnnnnnnggggnnngtttatgttcatattatacctnttaacaagagcccaggcacacacagagcacaagtgagtgtttgaaatagtgtcccacaatttaacatttttttccttacagaaaacccagataaatacatagaagcatgtatgcattgctttcaagtccactgttttttacgggaatccaagcataccttaagtcaattttggcgacctaggttctcttggctcctttattgggaacttgagacaaaacaaagcataaaataatttagtgaaatgggctatgaatcatatgtgcagaggtcatcaaatcccatatactcgtgattttcaatctttttgaccattgctacaatgccaactccacctagtgagactgcgctgacaagtattgtgaaggctagaacaaagatgattagagatgctctcgcaagcacatcgatcagctttctcacaatatgctgccctacaattgctgaaatagc

SEQ ID NO: 210716 - DNA, 523 bp, Glycine max
aaacactgtcgtttcgtgggtcagaaatcttttccacgattgcgtggttaagtcatgcgatgcatcattactgttagcgacggtgagcgatgtagtgtcggagcagacatcggatagaagttttgggatgagaaacttcaagtccgtaaacactatcaaagcagcgggtgagaaagaatgccccttcacagtgtcatgcgctgacattgttgctctttctgccagagatgccattgctttgttgggaggaccaagcattgaatgaagacagggagaaaggacagcacagaaagctatgcaatggaggtggaagacttgattccaaaccacaatgattgcatgtcctcagcgctgtctcgttttcaagccattgtcattgacgttgaagccacagtcgctcttttaggagctcactcagtgggaagagttcactgcaagaatctggtgcacagattataccccaccatagattcaacactggaccctgcacatgctgagtacctaagacgtccgtgcccaacac

SEQ ID NO: 210717 - DNA, 557 bp, Glycine max
  unsure (1)..(557): unsure at all n locations
gcctcaagttagtaacccttcctctctttttcttcttattctgtttcaaaaaccattttttattattttccggatggcgtccggtactgtgaaaccttcttctcggtaccgttcctacgattcacgctcctccacttcctctcatttctccgacccttcctcctcccatgaattcaacaatctcaaaaccaaaacctcttcttcttcttctcgcgctctcgtcaaggccaaaccctcaaacaccgccaaggtggaccccaccttcaccaccatggtcaagaagttcatggacaggaaacccaaatcctcctcctcggccgccgccaccgccaccaggttgattattccctccgattttctcgcgaaggatttgaagaaggacgcgaagaaagtggcggggttctccgcgctgcagaagaagctcttcggaaagggcgcttccgagaagaaggagaaggtgaaggccttgaccgaggtgaagaacaacaccaggacattggccatggtgctcangagcgagagggagcttctcagcatcaacaaagagcaggagcagc

SEQ ID NO: 210718 - DNA, 389 bp, Glycine max
ctctcttcagcatccaagaagaggcttttgtaagaaacgtgctgcggatgctacgtgaggagtttgagctaaccatggccttgagtggttgcacctcactcaaggatatcactcgtgatcacattgtcactgattgggaccaacctcgcattcttccccgcgcattgccaagattatgaaaaatttgctcctcatttgagcccttggagaaaaatgatatacgtatcactagtgagcatgtagaaaactatagtggatgaacatcacaattaccacaggagtgagacacacgtggttagaaatggattcaagtgatgttgcaccctctttaccaaagcatactgctgtgaacatatctgcaatgacgctcatgatgaatgctgttgcat

SEQ ID NO: 210719 - DNA, 480 bp, Glycine max
tcttcccaaccactactactcactctcttcagatctcaattgcatcgctgtccatggctaccatcgttagcatcaaggcccgccagatcttcgacagtcgtggcaatccaactgtcgaggtggatttgacttgctccgatggtacttttgccagagctgctgttccaagtggtgcatgcactgggatttatgaggcccttgaattgagagatggaggatctgactaccttggaaagggtgtgtcagaggctgttgacaatgtgaacaccgtcattggccctgctttgatcggcaaggacccaactgagcagactgctattgacaacttaatggttcaacagcttgatggaactgctaacgaatggggttggtgcaagcataagctaggagcacatgccatattggcagtgtctcttgcagtctgcaaagctggtgctagcgtcctgaaaattcctctatacaagcatattgctgatatcg

SEQ ID NO: 210720 - DNA, 344 bp, Glycine max
atttccttggcggtgcaagggtgtttgttttgaacatacaagaataattggccatggctaccgtaattagcgtctatgtggaacacatggtcgtgtgatcactcgctgccactgggaagggggagagggcttgctacttggtccactccctcagactcttacagagatatcatcacatgcccctttgtgaatgtagccctagggtcaaaagatagaacatcggacggccgtgaatacggtgggtaggtatctgagaactgtgtggcccatatgctatccgctgggacttacagcgatgacgcggctgaagctactgaggtagtcagctatgcggtccaggatca

SEQ ID NO: 210721 - DNA, 530 bp, Glycine max
  unsure (1)..(530): unsure at all n locations
ctctagcgttgttgcattgcagaagcgtctccattttctttcgcgatggccgcgcgagccctgttgaccagaaaaaccctagccaccgttctccgcaacgacgcgaagcccataatcggagctggcatagctgcagctactcattctcgtgggttgcacgtgtacacgctccccgatctggattacgactatggcgctctggagccagccatcagcggcgaaatcatgcagctgcaccaccagaagcaccaccagacttacatcaccaacttcaacaaggccctcgagcagctccaagacgccgtcgccaagaaagattcctccgccgtcgttaagctccagggcgccatcaagttcaacggcggaggtcacgtcaaccattctattttctggaaaaatctagctcctgttcgtgaaggaggtggtgaaccacccaagggttcactgggatgggccattgacacacattttggctcttttgaagcattagtacanaaagttaatgcagaaggtgctgcactacaggggtc

SEQ ID NO: 210722 - DNA, 703 bp, Glycine max
  unsure (1)..(703): unsure at all n locations
nggggnnnnaaggggatgagtactctaaggcatnccannnnntatngtcgcgnncgccagccngggannnggggggagcgcnnctcaannctcatattccaatggcaaatcctcaaacaaacaataaccgccaccagcccagccgcctgcagcgccgcgccccctcctccctgcaaataaaccgcgccgtcgagtggaacgtcgccatccccctcctcttcccggctcgcatcctctccgccgccgatggagctaaaaccgccgcaagagccgccgcagcgggaggcggagaaggtcaccgtgtcgttcaagaagtggcagcaccccgccgcacctttctgttacgagcccgctcccatggtgcctcccttcgttcccgtgtagatatacaaaccaaagaaaaagaagaagatgaaggaacagagagagttttaggatgctgctatctaatggttcatactactatttagatagaatgaagaaagatctaacgctgtatttttaattaattattattggtcctttttttttggtggggagaaggcntgccttgctttgcacacggggattaccatgttcatgcctcattcattcatgtgatatgaatgaacattacaccccctctgngntntnttctctctctcttttttagcctttccccgtttttttttatgcctttcatnttggggctaaataaactact

SEQ ID NO: 210723 - DNA, 434 bp, Glycine max
ggggcggaaaaaaaaaaaaaaaatttcccctggggggcagggggggattttggccccccaactgaaggggcacaaaaaaaacggggggcatcttccgacaccgaggcaaacaaaacccccccgggggggggcgctcctttcttcttcccccccggtaagggggcgcctcccttttttcccccggggggaaacaaaggggagaccccccccccccccaaagaagggggcccgctttttgtttctgaaatccccggggtgattcttctttttttctctaaagaggggggggccccccctgataccgcgccccccaaaaccgttccggggccctagtttgttttttttttttggggggggccctctcccgcaccccggggggggcccccggggcgggcctccacaccaaagagggggggggggggggtgcctttttt

SEQ ID NO: 210724 - DNA, 517 bp, Glycine max
  unsure (1)..(517): unsure at all n locations
ggggnnnnnccgggtagatgtcgtataccanncnannnnntnnnttccccncnccnanncnnnnaaatagntcnagggggngctgaaactgcagaagcggctggtcgcatgcgtgctcaagtgtggcagaggaaaggtgtggcttgaccccaatgaagtcaacgaaatctccatggccaattctcggcaaaacatcaggaagttggttaaggatgggtttatcatcaggaagccaaccaagattcactcacgctcgcgtgctcgtaggatgaaggaggcaaagaagaagggccggcactctggttatggtaagagaaagggtacaagggaggcgaggcttcccaccaagatactttggatgagaaggatngcgtgtgctcaggcggttgcttcgtaagtacagggaatcaaagaaaattgacaagcacatgtaccatgatatgtacatgaaggtgaaaggtnaatgttttcaagaacaagagagtcttgatggagagcattcacaagtccaaggctg

SEQ ID NO: 210725 - DNA, 542 bp, Glycine max
  unsure (1)..(542): unsure at all n locations
tgaanannnacggggtgagcatacatgcacnncccggaagtaattnnccgggccacgaccccactagaaggagggcggccggganaaanaaaaaaaanaaaaattttttttttantattnccgcaaccagatgaatggggggggcaaattcagtaaaccccacccaacaaaatatataatttaaaatatgcaagatatgaagtttttatacatccaaaacttaccaaggtctaaaaccaacaaaaagagattcgtcacaactactttagcagactaaagattttgccagagctattaaagactccacgtccttggaattccaggatatgctactcactttttgaatttctttggcgcttgggtaaactggggtgctggggcacctggggcactgggggcaaaaaatgtcttgtcaataggaccttgggctaagcgctcctccctccgagcaagattgctttccctgctagccttgttctttgcacgcttagcctcaaactgatcagacaaagtcttctttcttgccttctcagccttggact

SEQ ID NO: 210726 - DNA, 588 bp, Glycine max
  unsure (1)..(588): unsure at all n locations
atttgaaaacaaaacctaacagtaacactcttgtagagcttgttttccattccatctgcaccgaactgcggtgtagtgtttgttggtgtcttgagcatggcgacgcaactgagcgatgcggaactcataaccagcttgcaagccagggtcaaggaattagaaactgagaatgcaaagttattgtcccaacttgctgattgccgcagtcacgagatggagaaaaaagtatatgtccctgatgagagaggcgggaaatcaaaaaaaggcaacaggaaatctgaagagaagatagagaaaatgccaggctataacacaaggtttatgagtcatcatagcaggagatatgtagctttaaaagtcatgtactttggaaaaaggttttatggttttgcttcagaggcacaaatggaaccaactgttgagtctgaactttttaaagcttttgagaaaacaaggctattggttggcaataagaaggaatcacagtattcaagatgtggtagaacagacaaggnggtttcctctgttggacaagtgatagctcttttnctaagatcaaacctcaagatatctgaaacaaataatgga

SEQ ID NO: 210727 - DNA, 515 bp, Glycine max
cttcaaaagattgcagcattggaagcacttaagagaatgagtctgcagatggagaggaagaagcctgaggagaagaccttgagtagttttggacacactgcgaggtacagaagatacaccattgaggaaatagaagaggcaacaaacatgttctcggagtctctcaagatcggggaaggagggtatgggccagtatacaggtgcgaactagattgcacccaggttgcaataaaggtgttaaagccagatgcagcacatgggagagagcagttccagcaggaggtggaagtgctgagttgcataaggcatccaaacatggttcttctgctgggtgcgtgtccagagtatgggtgtctggtgtacgagtacatggccaatggaagcttggacgactgtctgttcccaagaggaaaatcacggccacctctcccatggcagctgaggttccaaatcgctgcagagatagccacaggtctccttttccttcatcagactaaaccggagccactggtcca

SEQ ID NO: 210728 - DNA, 539 bp, Glycine max
  unsure (1)..(539): unsure at all n locations
attgaaaggaagacaaaacacaagactttttcattcagcaaggcttgaaacgagaagcgaggatgcccatcagatgtattctgcattggcaaccgaaccaaggaagcgttgtgaacagccaagtcctgaatgagatctcgcagtgcgtcgaaagccttaacggcgtcaaagaaggaagatgcaaagcctccctcactttctacagacccaatttacgagaccaatcggtgaccatcgattttcctcgcgattttctggggatatcgatgctggagcagccgaacaaatactacttaatcattcgcggccagaagattgttctcgaggccgattcttctatcttgcttatcatggagaaactccagtcctacaagtccaaagtcgcccttcatttcagggagtgctgtataagttgggtgactctcagatcagggtgattaaagttgttcccagtcaagcggagagtctcagaggaattatgattgagattgagtatctncctatctcgtcagttggaaaatccaagcaaattttggaag

SEQ ID NO: 210729 - DNA, 566 bp, Glycine max
gtcaacattcctttgttggttgatgcttaacacacttctgttcaacctgctattgactacttcacatactcctctgccatcttgcacaacaaaggtgacaaccccattgtgtttgggaccatgcagacctacctcaaggatgccaaggagagactcttgctggctgcagaggctgcagacaacatgggaatcccaatgggcttcaaacttgtcaggggtgcttatatgtcaagtgaaacaaaattggctgagtctttgggctattcttccccaattcacgacaccatcgaggacacacacaagtgcttcaatgactgctcctctttcatgcttgagaaggttgctaatggccctggtggacttgttcttgcaactcataatgttgagtcagggaaactggctgctgcaaaagcacatgagctagggattggaaaggtgaaccacaagcttgaatttgcacagctgcatggaatgtcagaggcactttcctttggtttgagcaatgcaggatttcaggtgagcaagtatatgccatttggaccagtggagactgttatgccatatct

SEQ ID NO: 210730 - DNA, 609 bp, Glycine max
  unsure (1)..(609): unsure at all n locations
agggcnnnnaagggctgatccttattgcagaccannnnntnnnntgncnnnnccnnncccnnnnnnnnnnnnnnnnnnnnnnnnnnnnnnnnnnnnnnnngnnntttnattgagcgtgtttnnttccaaaccgcactggggaaatgactaaagaagaagactttaagctccttaaaatccagacttgtgttctcaaagtgaacattcactgtgatgggtgtaagcagaaagtgaagaaactccttcagagaattgaaggtgtttaccaagttcaaatagatgcagaacagcagaaagtaacggtttcaggttgcgtggattccgcaactttgatcaagaaactggtcagagctggtaaacatgctgaactttggtctcagaaaacaaatcagaaccaaaagcagaagaacaacaatgccaaggatgacaagaacaaagggcaaaagcaagcactggtcaggggacttgaggccttcaaaaaccagcagaaatttcctgcttttagttctgaagaagatgaatactactccgaatatgatgatgacgatgacgaggacgaagatgaagagatgcggnttctgagggagaaagcccattcactncaaatgc

SEQ ID NO: 210731 - DNA, 583 bp, Glycine max
  unsure (1)..(583): unsure at all n locations
gctgattccacagacacacaccgctttactattatgcaagacccttctcgccccgcccctcctcccttctaccaccaaaacggcggccagcctcctccccccgccgcctccgccgccatcgccaccggctacccctacgcttgcccacaacaatactacaacaccacttaccctcctcctcgctcctacgcctcccgctccttcttccgcgctttcttcgccaccatgatctgcctcgccgtcgtcttcggcgtcgtcctcatcatcacctggctcgtcctccgcccctccctcccccacttcaccctccactccctctccgtttccaacctctccagcacctcccaatccctctccgccacgtggcacctctccttcctcgtccgcaacggcaacaagaagatgaccgtctcctacaacgccctccgctcttccatcttctaccgccaaaactacatctncgagtctcagctcgcttccttcaggcaggacaccaggtcccagaccacactcaatgccaccctcaccggcgncggcacctacctngagcccaaactgatcgacaatctcaacgccgagagga

SEQ ID NO: 210732 - DNA, 577 bp, Glycine max
  unsure (1)..(577): unsure at all n locations
ggaaattggaagcaaaacctaaggaatcttggttgaacaaggtgtccatgaaagtgacaaaaggggtgtctgagactgataaaaattcatgtgtgattgatataaaccgtggcagctgtgatggctttagcgagaatttggaaggtgaaatgatttgtaggatttgccatctggcctctgggcaacgattggaagcagcagatgttggcactgcaagtagtgctactactaatacagatttgattcagctcggttgtgcatgtaaagatgagctagggattgtgcatagtcattgtgctgaggcatggttcaagcttaaaggaaacaggttgtgtgaaatatgtggtgagactgcaaaaaatgtttcggatgttacggataatggatttattgaagagtggaatgatactagattcatggacagtgataatacctcatccagaaggtttggtggatgcttgtgcggacaaccattttgtaacttcttaatggcatgcctggtaatagcttttgntctgccatggttcttccgtgtaaatatgttctagntgaggagtcaaacactattctttccttc

SEQ ID NO: 210733 - DNA, 592 bp, Glycine max
  unsure (1)..(592): unsure at all n locations
ctctgcaaccaaaatctgaatcttagggttccaacacctttgatccaatgggttcggctgccgcagaagaactgaacttagatttaagatcctccttcgtccccaaaaccatcaccgatttcctccgccacctctccgccaacaacaaccaccctgccaccctccgcgatttcctctcccgcctcgaagacgagctccgcaagatccacgccttcaaacgcgaactccccctctccatgctcctcttaaacgacgcaatttccgttctgaaggttgaatcgcagaaatgctgcagggtggcgcgcgattcgccgccggtgctggaggagttcattccgttgaagaaggagcttggtgatcagagcgaggaggaggaggagaatgatgatgacaaggacgataacgaatgcagggataagaggaattggatgagttccgttcagctctggaataacaacactaccaccactactactaataacaacaacaatgcctctgatcgncaacaactacttcataaattacaaaccaagataagtgaagaagggcagtctgtggctgaggatccctttcagacctgagtaatagaaat

SEQ ID NO: 210734 - DNA, 560 bp, Glycine max
ttttcctttcccttttgaaggatgaatttcctgacgtacgcctaaacattatcagcaagcttgatcaagtgaatcaggttataggaatcgatctgttatctcagtctttgttaccagccattgttgagcttgctgaggataggcattggagggtccggcttgcaattatagaatatatacccttattggcaagtcaattgggggttaggttttttgatgacaaacttggtgctctttgcatgcagtggttacaggataaggttcattcaattcgcgaagcagctgctaacaacttgaaacgccttgctgaagaatttggacctgagtgggctatgcagcacataattcctcaggttttggagatgaacaacaatccacactatttgtatcggatgaccattcttcgtgctatctctctgcttgctcctgtgatgggccctgaaatcacttgttcaaacttgttaccggttgttcttgctgcatctaaagacagagtgcccaacataaagttcaatgtggcaaaagtattagagtccatcttccccatcgttgatcagtcg

SEQ ID NO: 210735 - DNA, 569 bp, Glycine max
tacaattactactttctctctctttgtttcttgtaagcatggagtcctcaaagatctatgcttacctcttcctttgcatgctcttcctctcctccgccactcccattctcggttgtggctactgtggcaaaccccccaaaaagcacaagcctggtaaaacaccaaagacacccacagtacccgttgttaagccaccagtcacaatccctcccattgttaagccaccagtcacaatccctcccattgttaatccaccagtcacaatccctcccattgttaatccaccagtcacaatccctcccattgttaatccaccagtgacagttccacccgttgtgcttccaccaatagtgaagcccccgggttttctccctccaattcttaacccaccaagtacaccaacaccgtcgccggggaagggagggaacactccatgtccaccaccaaagtctcctgcacaggctacatgccccattgacacgctcaaactaggtgcttgtgtggatcttcttggtggctcggttcacattggctggggagaccctgttgcgaaccagtgctgccccgtg

SEQ ID NO: 210736 - DNA, 551 bp, Glycine max
ctcgcgatttcggaagggtcgtgtttccttgcttcagtttcagcttcggcttcgagaagcgtcgattgggtccttaagctgttccttctctgtttctgacaaactgtataactcctatcaaacatgagcggtcgcttttctcgcacaatttatgtcggcaacctgccctctgatataagagagtcagaaattgaagatctattctacaagtatggccgtataatggatattgaattgaaggttcctccccgccctccatgttattgctttgttgagtttgataatgctcgagatgccgaagatgcaattcggggtcgagatggatacaactttgatggttgtcggctaagagtggagcttgctcatggtggtagagggccatcatcaagtgatcgacgtggatatggaggaggaggtggtaatggtggagcaagcgggggtcgttttggcatctcacgccattctgaatttcgagttattgttcgtggactcccatcttctgcatcttggcaagatttgaaggatcatatgcgaaaagctggggacgtgtg

SEQ ID NO: 210737 - DNA, 556 bp, Glycine max
gttcctataattttttttctccattttattaccaagctctgcaactttgcttctcaacatggagtatcgtctcctacccatttttactttactcaatattgcactggtggcaacccatgctgctttaccccctgaagtttactggaagtcggtgcttcctactacgccaatgccaaaagccatcactgatatcctttactctgattgggtggaagagaaaagcagctcagcgcatgttggaggtggaggcgtgaacgtgcatacaggaaaaggaggtggcagtggcaccactgtcaacgttggtggaaaaggaggcggaggcgtaaacgtgcatgcaggccacaagggaaagccagtgcatgtttcagttggctcaaagtctccatttgattacgtctacgccgccacggaaactcaattacacgatgaccccaacgtggcactcttcttcttggaaaaggacttgcattctggacaaagttggacttgcacttcacaggagtacatctaatcaagccacgttcttgtcacgccaagtgcggattcgatacccttt

SEQ ID NO: 210738 - DNA, 557 bp, Glycine max
caatcagtgaaagattctttgggattcttgagcttctttttgatgtttgtgaccgctcttgttggagtcacggcaaatcagaatgcatacttcaaaggattattttatgcatcttctactgcagctaccgctatgagtaatctgataccggcattaacgtttgtaattgcagcaattgcgggatttgagaaagttgacataagcttaagaagcacggccaagatattagggacagtttgttgcgtggctggagccttaaccatggcattggtcaaaggacagaagctgttacacacggagttccttccttctatacatctcaccggcagtcaaggtgatgattggctgctgggttgcctattgctcttagcaagcagtgttttttggtcatgttggatgatcctgcaggtaccaatcacttcgtgctgcccagaccatttattatcaaccttttggatgtgtctgttttcaacaatacaggctgccctatttgccctgctttcagagtcggatcttcaagcatggattttgcaatcacctttacagatttcatgttc

SEQ ID NO: 210739 - DNA, 444 bp, Glycine max
  unsure (1)..(444): unsure at all n locations
gtggtgtttcatttgtgaaactaacaacaacacaaggccatcatcatggcagctgcttccccaatggcaagccaactcaagtccaccttcactaggactcttgtagctcccaagggcctctctgcctcttcaccacttcacctcggtgccttctagaaggcaatttagcttcactgttaaggccatccaatcagagaagccaacctatcaagtgattcagccaatcaacggtgacccattcattggaagcctggaaaccccagttacatccagccctttgatcgcatggtacttgtccaacctgcccgcatacagaaccgcagtgagcccactactaaaaggatcngaggtgggcctggcccacggataccttcttgtgggcccattcgtgaaggccgggcctcttaggaacaccgagatcgccgtgcaagcgggctctctggc

SEQ ID NO: 210740 - DNA, 391 bp, Glycine max
  unsure (1)..(391): unsure at all n locations
tgacagagttcgtagccattccnnnntnnntgtgaaannccnnnccnnnnnnnnnnnnnnnnnnnnnnnnnnnnnnnnnnnnnnnnnnnntttttnttttnnnnnnnnnnntnnnnnnnnntnnnnggggggggttttttttttnnnttttttttttttttttttttgtttgttttgtnttttttggtgatttaataagaaaaaattaaaaaaacctagtaagcacattcatcatttgatgtaaaatggaaggcccaaaacgtagaggaggaagtaggcccaaataacacccgaaatgcctccaaagaaaaaacctccggtgaacttggcccacccatcaccagtttgcagctgatcgggctccttcttgccgcccgtcaaagtcagcgac

SEQ ID NO: 210741 - DNA, 502 bp, Glycine max
  unsure (1)..(502): unsure at all n locations
ggcancaaaagggtatgatctttanagcagaccaananntnatttnnccnncccnaanccnnaaaaaaanncngggnnaaattaacacacacacaccgcgngttttccttaccatagcatatagtactagtagattaaacgccaaagaaataaattactcactttcacgtaaaccataacgtgcttccaccgcaaccaaccacaatgggtgccgttggtccataacggtgttgctactagtgttatttatggccatgagctccggcgtgcgctcgtgtccgccgtcggacagggcggcgctgctggcattcaaggcggcgctccacgaaccctacctgggaatcttcaactcgtggaccggcgccgactgctgccacaagtggtacggcgtgagctgcgaccaggagacccgccgcgtcgccgacatcaacctccgcggcgagtcggagggagccgatcttcgagcgcgcccaccgcaccggctacatgaccggctacatct

SEQ ID NO: 210742 - DNA, 526 bp, Glycine max
  unsure (1)..(526): unsure at all n locations
aggaccnaaacggggtgatccgtatggcacnncnccngaatnaatttnccggggacanagcccactaaanannagangnncnnaanaatttnttttattaaaacatttgtttttatanatttagcgtagcgnaggcccagggatggagtactacatttactatatcacgatcgcgataacaaacaacaaattgatacatgaaacggaccgatgagttaactaagggtgggtccacactggtctaactgcaaatatacatatatttttccaagatatttgagtttgcatgtaatggtgagctagtagcaaggtttgaggggcttcccgcagagacaatcgttgtagacaaaggaggaggcttcgagatgatcaaaaggagagccaaggggaatcttgccacagagatggttatgactcaaatccaagtgcccaatataggaagcagaggatatggacttaggtatggccccttttaggttattatacgacaaatccagagcagtgaaataagacctcacgccgaacg

SEQ ID NO: 210743 - DNA, 583 bp, Glycine max
gtggcatttacagattgcccaggtcctcagtctgaatctgctggaaaatccgatgcatgtgaagggtgcccgaatcagcaaatttgtgccactgcccccaaaggccctgaccctggtactcttcatctttatcttattattttatgcttcttcccagaaaccatcaacttcttcaaaatggcattatttatctatgtgaaatatatgatttgatatgttttaattacaacagtttagtatggaattattttccttattactcattatttagtttccttattttgtaaacctccttcattataaataagagtatttcatgtggtctgatatgacaacacacaacagtaaataatccttacgatctatataagcatgctgtgatgccacagctaatgattctagaatttgggactgtttctcagtatgttgtgaccctagcgtgcctatttagtagacaatgctagtagtatgatttctccccagctttgtttatgtggtttgattagcccaggaagtgagcaaatcatttccttcacagtcaagatgtttgcagcactgcattgagagcattcttgcactgctc

SEQ ID NO: 210744 - DNA, 557 bp, Glycine max
gtggcatttacagattgcccaggtcctctgtctgaatctgctggaaaatccgatgcatgtgaagggtgcccgaatcagcaaatttgtgccactgcccccaaaggccctgaccctggtactcttcatctttatcttattattttatgcttcttcccagaaaccatcaacttcttcaaaatggcattatttatctatgtgaaatatatgatttgatatgttttaattacaacagtttagtatggaattattttccttattactcattatttagtttccttattttgtaaacctccttcattataaataagagtatttcatgtggtctgatatgacaacacacaacagtaaataatccttacgatctatataagcatgctgtgatgccacagctaatgattctagaatttgggactgtttctcagtatgttgtgaccctagcgtgcctatttagtagacaatgctagtagtatgatttctccccagctttgtttatgtggtttgattagcccaggaagtgagcatatcatttcctccacaagtcagatgtttgcagcact

SEQ ID NO: 210745 - DNA, 538 bp, Glycine max
ttctcttcacttttaagttaaatagtttttcattgtttcatttaatctacaatggctgcttcaacaatggctctctcttcatcatcattggctggccaagctatcaagcttgccccctccacccctcagcttggtgttggaagggttagcatgaggaaaacagcctccaagactgtttcttctggaagcccatggtacggcccagaccgtgtcaagtacttgggcccattctctggtgagcccccatcctacctcactggtgaattcccaggtgactatggttgggacactgctgggctttctgctgacccagagacctttgccaagaaccgtgaacttgaagttatccactccagatgggccatgttgggagccctgtgctgtgttttccctgaactcttggcccgcaacggtgtcaagttcggtgaagccgtgtggttcaaggccgggtctcaaatatttagtgagggtgggcttgactacttgggcaacccaagcctgatccatgcacaaagcatccttgccatctgggccactc

SEQ ID NO: 210746 - DNA, 511 bp, Glycine max
cttgccagatggacgtcaaataattatttgaggaagaagacaattcaactacgagttttaccccaagacacaagccaagaatacttacagtttaccttttcttgctcaaaccaacgacgctaacgctgaaaacaatctctacccgtttgtttttctaaacgtcgatggcaacctttttatctttgccaacaaccgcgctatcttgttcgattacaataagaacagtgtcgtgagaacctaccctcaaatacccggtggagatccacggtgttatcctagcaccggttccgcagttttgcttcctcttcgagaacctaatgtggaggctgaggttctgatttgtggtggagccccgagaggggcttttcggaatactctctcgggtaagtttgttggagcgttgagaacttgcgctcggattaaaataaccgacccgaaagcgaattgggtgatggaaaccatgccgggtgcgagagttatgagtgacatggttttactccccaacggcgac

SEQ ID NO: 210747 - DNA, 553 bp, Glycine max
atttgggagttaggttctgcacgctcttcttccagcgagtgttctttcttcgtttcaacaccttaatttgcacacgctgcttcttcagcttgagaaatggcacaagaaacctttctattcacatctgaatctgtaaacgagggtcaccccgacaagctgtgcgaccagatctctgatgcagtgctcgatgcgtgccttgaacaggaccctgacagcaaggttgcctgtgagacatgcaccaagaccaacatggtcatggtctttggagagatcacaaccaaggccaacgtagactatgagaagattgtccgtgacacatgccgcgaaattggattcatctctgatgatgttggtcttgatgctgacaaatgcaaggtgttggtcaacattgagcagcagagccctgatatctgccatggtgtgcacggtcacttcaccaagcgcccagaggaggttggtgctggtgaccagggtcacatgtttggctatgccactgatgaaacccctgagtacatgcccctcagccatgtccttgcaaccaaactcggtgctc

SEQ ID NO: 210748 - DNA, 564 bp, Glycine max
gattccaatacggcgccgttttccttctccatcaagcgcaacgcataacaatcgtcagcgccaccatttcccttcggttcccaagaatcaatggcgactcgtgcgttgctcggagcaatcaagaaacgcaccgtttcgttccccgcattccgcggccattccatttatcgacacggtagcacgcttgtggtggcggaacacgaaggtggttttatcaaacccccttctctctcagcactggctgctgccacgtgtcttcccgatcctgactcttccgtttctgtgctcttggccggttcgggtccttctcttcatcaagctgcttcacatgctgcttcgtgccacccttcaatctccaaggtgcttgtggcagattcagataaattcaagaaccctctggcagagccctgagctaaattagtccatttggttcaccagagtggcggctactctcatataattgctgctgcaagttcttttgggaaaaatgtcgtgccacgtgcggctgcccttttagatgtttctccaattactgacgttactggaatttctgattccaatact

SEQ ID NO: 210749 - DNA, 598 bp, Glycine max
  unsure (1)..(598): unsure at all n locations
gttcatgatgtgagtgtgagatgtgatgctcattattatttcttttttaccacaaataaagcaaatttccacagtaaacccctctcttttcccttcaatactcacttcttctctttctcgttgcactgatcttagaggggtttgtgttcttggtttcctcccctttctctctctctctgccttgcatttttgtgtgtttttctcaataggggtttcgaaaatgccgatgtttcagccttgtcggaaggacttggttgccgggtacgagggtggtggcgacggccagattctagatctggacaccgccgtgaaagacggcgttttgggcggcgtggagggcggcgtcctgggaggtggggttggtgagaaggtggatctggaaganatattggagggagcttgagttatgtgaagtgccgagtgtgttcatttgcccaatctcattggaaccaatgcaagaccctgttaccctctgcacaggccaaacctacgagaggtccaacattcttaaatggttcaacttgggacacttcacctgccccaccacgatgcaggagctctgggatgattccgtcactcaaacaccacccttacagct

SEQ ID NO: 210750 - DNA, 541 bp, Glycine max
ctctcatgttacaatcctcttgccgctgagctccctttctcctcggtccacagagacaaaatgtaagacaggtgccaacagttcatcacgaaagaaaggactagctgagccgagatcactaactaaaacgaatttaatacttaatcgaaaatactaatagaatagaaatagaactgtcttttcatatagatatcccttcaacacaacataggtcatcgaaaggatctcgaagacccaccaacgcacgaaagccgggatctttcagaaaatggattcctattcgaagggtgcataaccgcatggataagctcacactaacccgtcaatttgggatccaattcggttccttagggaggtatcgggaaggaattttggaatgtaataatatcgattcatacagatacagaaagaagggttctctattgattcaaacgctctacctacgagatagggatagagaaagaggaaaaaaccgaggatttacatagtacttttggtcgaaaatcgatctgattttttcgtacttttcgctcatgatgaa

SEQ ID NO: 210751 - DNA, 537 bp, Glycine max
  unsure (1)..(537): unsure at all n locations
gaactaaatgtacgctgcaagcaancaaaataattaaaggaccaancnnaaanaaaaanaaaaaanaaannnnnannnnnnaattttttttaaaaaaaaaaaaaaaaaaaagggggggttttattaagttattttattagactttgtattccaaggctatctgctttaccacttacctgtgcctttagaaggcaaattagcttcactgttaaggccatccaatcagagaagccaacctatcaagtgattcagccaatcaacggtgacccattcattggaagcctggaaaccccagttacatccagccctttgatcgcatggtacttgtccaacctgcccgcatacagaaccgcagtgagcccactactaagagggatcgaggtgggcctggcccacggataccttctggtgggcccattcgtgaaggccgggcctcttatgaacaccgagatcgccgggcaagcgggctctctggccgcccgtgggcttgtggtgatcctcagcctttgcctcacaatctatgggatttcatccttc

SEQ ID NO: 210752 - DNA, 604 bp, Glycine max
atcgagataactagaaacagtgtgatgataaatgaaggtccttgttttcttcgttgctacaattttggtagcatggcaatgccatgcgtacgatatgttccctctccgaatgaacactggctatggtgcccgtactccggaggtgaaatgcgcaagttggaggcttgctgtggaagcacacaacatctttggctttgagaccattcctgaagagtgcgttgaagcaacaaaggaatacatccatggcgaacaatatagatcagactccaaaacagttaaccaacaagcttacttttatgccagagacctcgaagtccatcccaaggacacatttgtgttcagtatagatggcaccgtactctctaatattccatactacaaaaaacatggatatggggtggagaaatttaactcgaccttgtatgatgaatgggttaacaagggcaatgcaccggcactgcccgagactcttaagaattacaacaagctggtgtctcttggcttcaagattatattcttgtcaggaagaacactggacaaacaggccgtaacagaagcaaacttaaagaaggctggctaccacacatgggaaaaattaattctc

SEQ ID NO: 210753 - DNA, 406 bp, Glycine max
tgatcgtaataacttttaacacagcgatcatgattacagatctcgatcgctccgaccacagggggatgttatcgtggcattaccgtgcgtacaagactgaccctattcgaacgaacacaagccttgaggcccgcactaccgaggtgtaacgcacacctcgtacggccgccgcagaaacacacaccaaattgagctcccataccatgcctgaacgacgccctataccaacgaaggactacatccttggcgaagaatttagatcagactcccacacagttcgcccgctaactaacctgcaagccagagaccccgtcgcccatgctaaggacacattcatgctcaatatcgagggcaccgcactggctaatgttccatactacaacacacacgtatctgatgtcgagaa

SEQ ID NO: 210754 - DNA, 578 bp, Glycine max
tgaatctgcactctctttgaaaactgtctcgctttcaccggcgtcggaaacatcgtccggttagggttccggctatcgctaagggcacggatcataaaatcttccagaagcttctatgctattactcagtattattaccatttgccaaggtgttgttaggcaccatttttatcacttgaagtcagtcagcaacaacttttctgcgaatttttcaggaatattttcgcctgaaaaagttggagcaaatgtctttgcaaaacaagggattttggatggtaaagggttctggacacattaatgacagagatacagtatttgataatcccaccaaaattgaaccaaaacgacctcatcaatggtttgttgatgctgctgaagtagatttttttccaaacaagaaacaagccgtagaagatgcagatgaaaaatctagtcctggattttcaaatgtaaatattcctccctgggagaacaatcccaattttcattcagtcccaaaccaatttattggccggttatttgggtctgaaaccaggcctgtcaatttcactgaaaagaatactatgttttggctgatg

SEQ ID NO: 210755 - DNA, 549 bp, Glycine max
caatttaatacctcaaaaatggttttctctctgctcctacttcttctcctcctcactctcactgcaacctctgctcaacatgacggcccttcgatcacagccaccatggagcaattctccggttacaaaatccacgaacctgactctttccaaccctcttcactctccgttgatgctcaggctcttcagaaccagattgatgagcttgcggcgttttctgactcacctgctccatcagtaaccagggtcttgtatactgacaaggatgttttaggtcgcaggtatgtaaaaacccagatggaacttgctggcctatctgtgagagaggatgctgttggtaacatatttggtcgttgggatggccttgaacctgagcttgctgcagttgcaacaggttcgcacattgatgctataccttactcgggaaaatatgatggagttgtcggtgttttaggtgctattgaagccatcagagtcctgaaaaggtctggctctaaacctagaagaccattggaagtcatatcattcacatcagaagaaccaacacgc

SEQ ID NO: 210756 - DNA, 459 bp, Glycine max
gtatcttaaacgatcatcgagggtttttttcttaactgaactctgtcttctttctgtgtgcatgttaacaagcccaatattgacgctcctaggccaacatgagaacataacccatgtggcaggtaccatttctctttggccaactcctatctcacctgcttatactgcgtcattgattaggctgacattactctgatctcagagcaagaatggcgtaatggcattcttggcagatctatcaacaatgattcatgtgctgacttgttggctattgactatacaattcaagtttgggattccgggcgcgctgatctctacaattgagacgttgcggattcctactattgggcaagtaataatgaccacgagcgggtggtgccatgaaacacggcaaggtctctcattgatagcatacatagatcttgagcctgttgtcaagctgtccctttcatatggggc

SEQ ID NO: 210757 - DNA, 508 bp, Glycine max
ctttgagatggctctgagcacagcttatgccacattccaaaaccttgattcatcagaaatctccctcactgatgtcagtcattactttgactcagatccaacaaacctggttcaaagtctaagaaaagatgggaagaagccaagtgcatacgttgctgacacaaccactgctaatgctcaggtgcgtacccttgctgagacggttcgacttgatgcaagaaccaagctattgaaccccaagtggtatgaaggcatgctgtctactggatacgagggtgttcgcgagatagagaagaggctcactaacacagttggatggagtgcaacctcaggccaagtcgacaactgggtgtatgaagaagccaacacaactttcattcaagatgaggaaatgttgaagaagctaatgaacacaaatccaaactcctttaggaagctggtgcagacattcttggaagccaatggacgcggttactgggagacttcagaagacaacattgacaagctc

SEQ ID NO: 210758 - DNA, 368 bp, Glycine max
ggcattcgtattgtcgcagagaaagaaaaccctagctcaccgtttcaagatgcaaatcttcgttaagaccctcactggtaagaccatcactctcgaagtcgagagttcagataccatagacaatgtaaaggccaaaattcaagacagggaagggatcccaccagatcagcaacggctcatttttgctggcaagcagcttgaggatggacgtacccttgctgattataacatccaaaaggagtccactctccacttggttcttcgtctccgtggggggatgcaaatctttgttaagaccttgacgggaaagacaatcacccttgaggtcgagagctccgacaccattgacaacgttaaggctaagattc

SEQ ID NO: 210759 - DNA, 407 bp, Glycine max
tggcttttttttttttttaaagtttttttttttttttttttccacgaaccaaacagaatttatggaaggacctgaacaaacaacagttttttaaaggccactattgtccatggaaacaattcaacaagagtaaacctttccggaacctttaaaaaaaaaaaccccaaagatcttcggaacttccacatgcttagacttcaagacacctacagaacattctcagactttaaaaacccaccaggaagacccaacacagggggaaaagtagactctttctgaatgttgaagtaagaaagagcccttccatcctcaaattgcttcccagcaaatatcaacctctgctggactggtgggataccctccttgccctggattttggctttgacattatcgagagggtctgagct

SEQ ID NO: 210760 - DNA, 388 bp, Glycine max
  unsure (1)..(388): unsure at all n locations
cagggagccaccaaccatggcttccaagctctgtgactcatgcaaatcaaccactgctacctggtactgtgcgcccgacgcggccttactctgcggcgcctgtgactctaaggttcatgccgacgacaagctcgcattgcggcaccccgtgcgtcntgctctgcgaggtgtgcgagcaggcgcccgcgcatgtgacctgtaaagccgacgccgccgcgctctgccttgcctgcgatcgcgatatccactccgccaaccccctcgccagccgccacgagcgcatccccgtcacgccgatcttcgagtccgtacattcagtcgaggcctcctcgccgatcaacttccaccaccgattcttctccgacgccgacgctgatgctgacgtcag

SEQ ID NO: 210761 - DNA, 526 bp, Glycine max
  unsure (1)..(526): unsure at all n locations
gcncccaaaggtagagttgaatgcaccccccggataattnccgngngcannccnnnnnnnnnnnnnnnnggnnnnnnnnnnnnnnnnnnnnnnnnttttnnttttnnnnnnnnnnnnnnnnnnnnnnnngngggggggnttanttgatacacagcaagagtttttttgcaactttacattgcataattcaaacaaaagaaggcgtagtccatatattcagccgcaaaacgcagccatcagaaatcaaaacagtgagcattcatattcatatatgatatatatgataatcatcaacacgacggaacgacgccgtatccagccagagggtccgcatcagtgcgtttcgcgaacctctcctttgattcttggcctcgcttcggcatactcttttctggatgcgtcacgaatggtctactcgaactttcggatctttctcttctacctgaacctcaacactctagcctccctatccggcgccaagaactgcgccgtcaccgtcacctgtgccactttgctgtagctgcag

SEQ ID NO: 210762 - DNA, 472 bp, Glycine max
  unsure (1)..(472): unsure at all n locations
gacaaaaatgcagagtgaacgcaaccncnnntnnttnnggggcannccncnnnnnnnnnnnnnnnnnnggggngnggnnnnnngggggttttttttttttngggggngnggnnnnntntgggggngggggttttttttnttttcttcccaatgtcctccctctatatatatgcataacaggcctgaatttcaacaaaccacatggttactacacataccaatccgcttcagccgccattacgaccgataatgctggcatcacaaaaacactaccacattctgagattaatgactacgactttgagccatgtggttattcaatgaactctgatgaaggaactggtgctactaccattcatattaccccacaagatggattcagtcatgcaaaccttgagactgtagggactgacttcaaacagctgaatcacaacgaaatggttaacaaggtatcggcctgttctctcccaac

SEQ ID NO: 210763 - DNA, 668 bp, Glycine max
  unsure (1)..(668): unsure at all n locations
ggtcctnaatgtatgatgcctctgcataccacttntngnntnatgaagcgcatccccagctnggaaatngggtggagggtggaaagacaaacacaccgaatttcacttttnctaatgatttgcggccgggtnttggggtgtgtccttgttgcctttggagggtacagggcctccaacgcgccacatgctgacgtgtcatcgccagcatcgaacgatgaaccaccctagtcccacatcggtgccttctccgaaatggtacccggtttcacggggtgtttcttctggggtgtcggagaagtcatcaagcatgttgtttgcggttaaagatggagcttcggaagcatttccttgggacaatagcatgctgtcgtggcagagaactgcttttcatttccaaccagagaaaaactggatgaacgatcctaacggtcctatgtactacaagggatggtatcacttcttctaccaatacaacccgaacggtgcagtttggggtgacatagtttgnggacacgcagtgtcaagggacatgatccactggcttcaccttccactagcaatggtggctgatcaatggtatgacatgcaaggtgtgtggacaggctcagccacgatcttaccaaacggtgaaatcatcatgttatacacgggttccaccaacgagtcag

SEQ ID NO: 210764 - DNA, 530 bp, Glycine max
ggaggagcttcctgtttccatttcctctcacttaaatcacttattatgaacacacgaaaagacatggaccggatcaaaggcccatggagcccggaggaggacgaggctctgcagaagctggtggagaaacacgggcccaggaactggtccctcatcagcaagtccatcccgggccgctccggcaagtcctgcaggctccgctggtgcaaccagctgtccccccaggtggagcaccgggccttcacccacgaagaggacgacaccattatccgggcccatgcccgcttcggcaacaagtgggccaccatagcccgcctcctccacggcagaactgacaacgccatcaaaaaccactggaactccaccttgaagcgcaagtgcacttcaaccatgattgacgacgacaacactcccccgctcaaaagatccctcagtgccggcgctgctattccagtctccactggactctacatgaaccctcccactcctggtagcccctctggatcagatgtgagtgagtccagcgtact

SEQ ID NO: 210765 - DNA, 550 bp, Glycine max
  unsure (1)..(550): unsure at all n locations
catggctacggctgcgtaggataacatctaacaaacctagcgcacgatagtcttccttcacccatgcttggagtactctgcgccactcgccccaaaccttggcttctctccctcgtccacgtccacgcttccctgcctcgcctacctcattcccctctatcaccttcagcctcgccgncgccccgtcgccgccattccaccgcctgcanactttttctctccggcggctctgtctgcctcctccttttccctctttnttccctttttttctcttttntttctttctttctccttttcttcccccttccctcccccccagggatcgtggaatgtcgcttgggacgcgcggccggcacggtggctccaccgccccgactccgcgtggctcctctttggtgtctgtgcttgtctggcgccgccgccgggttgcgtggatgctgacactaattctgctggaatcgctgtggatgaaagttgcggccttctcgatcaggaacgggaggaggatgaggtttctgctgattacagagtcactggggtacctgctgat

SEQ ID NO: 210766 - DNA, 612 bp, Glycine max
  unsure (1)..(612): unsure at all n locations
tgacattacttngtanagcaancacnnnnntnnnttggnnnaannnncnnnnnccnnnnnnnnnntnnnntnnnnnnnnnnnnnnnnnnnnnnnntnnnnnnnnnnnnnnntttttttttntnnnnncnnnnnnncnnnnnntnnntntnnntgggggggggtttttttttntttttttttttttttttccctcttcttttttccaccatttacaccacttgacaattcttaaaggccaaaaaatccaaggaccaaggaaaggcatcccaccggaccagcacaggctgatttttgctggcaagcaactcaaggatggaaggaccctctctgactacaacatccagaaggaatcaacccttcaccttgtcctccgtatccgtggggggttataagctcattgtgtaatgttggatgtgttcccaaaacatttgaagaactttgatgtttaatgggtctgtaataatgacccttgaaacataaatcggaatgtgttgaactcaattgtgtcccataaataatagcactctaatatcccacctacgtttgatatgaatgtgtgaaatatgaaatgattaactgtcaaaataaaaaaaaaagggcggccgccgact

SEQ ID NO: 210767 - DNA, 613 bp, Glycine max
  unsure (1)..(613): unsure at all n locations
gccnacacgctgtgctatatgcaaacacatgtcgnttatgtccgcatacccccagctcggaaacggtttgagggngcaaaanccaaaaacacactttttgtttgtgttttgatctgcttcctactgcgatagttggtctactgttacatggccatggcggtttccgcaattggttttgaaggtttcgagaaaaggttggaaatatcctttttccagcccggacctttttgctgaccctgaaggcaggggtctaagggctcttacataatcccagttgggtgagattctaacaccagctgcttgcaccattgtttcttcgctcaaaaacgataatgtcgactcctatgttctatctgagtccagcctctttgtttatgcctacaagatcatcatcaaaacctgtggtactactaagctattgcttgcaatcccacccatattgaagttcgctgaaatgctttcccttaatgttaagtctgtgaattacaccaggggaagtttcattttccccagtgctcagccatatccccatcgcaacttttctgaggaagttgctattcttgatggctactctggcaacttggtgcaggaagcaatgcttatattttgggtg

SEQ ID NO: 210768 - DNA, 163 bp, Glycine max
gagttgcccaagtgggaagaagatcccaatttttactctaaggctagatttaagcaaataattaaagaccttgcagacaaatatcatactgagaacttgctgcttgtcacacacggagaaggagatgcagtggctctgtcttcattcaaacaggatgcttcag

SEQ ID NO: 210769 - DNA, 460 bp, Glycine max
gttagaagtgggggaatggaagagaaatactctagcctggaaattgtggaggagagcccaaactcgggtgtgttctttcttatcttaaatcgtccgtcacgacggaacgctctctcgcgcgaattcttcagcgagttcccgaaagctctgcacgcactggatcacaacccggaggtgaaggtgatcgtgttgtccggcgccggggaccacttctgctccggcatcgacctctccctcctgggatcaaccgccgcgagttcgggttcctccggctccggcgaaaccctccggcgagagataatggcgatgcaagacgcggtcacggccctggaacggtgccggaagccggtgatcgcaagcgtacatggggcgtgcatcggcggcggaattgatatagtgacggcgtgcgacataatgatgtgcagcgaggaggcgtttttctcggtgaaggaagtggatt

SEQ ID NO: 210770 - DNA, 548 bp, Glycine max
gattccacaacagtgggagggagatccaaattgagagagtggaaaagatggcgcggttgatcacagtggtgtggtgcgcggtggcggtgctattatgcgccgcggccggtgcgtcgtgggtggaggaggcggcgaacccgatacgaatggtgtctggcgtggaggcggaggtggttcgggtgatcggggagtgccggcgtgcgttgaagtttgctaggttcgtgagcaggttcgggaagagttaccaaagcgaggaagagatgaaggagaggtacgagatattctcgcagaatctcaggttcatccgctcccacaacaagaagcgtttgccctatactctctctgttaatcattttgctgattggacttgggaggagttcaaaagacacagactaggagctgcccaaaattgctctgccactcttaacggcaaccacaagctcaccgatgctgttcttcctccaacgaaagactggagaaaagaaggtatagtgagttcaattacagatcaaggcagctgcggatcatgctggacattcagcacaact

SEQ ID NO: 210771 - DNA, 483 bp, Glycine max
gtggagggtagatatttccgccacataattttatttttttccagaacccactctatttatgagggggggggttgacaagaacaataacgttggtctcccatcataagatggtagatatgccatattgaaggtgcatgccatgaataaattttttcctgctgaggaggaagaggagactctacttcaggaaattgctgatctgacagaagattttgctggggcccagctacaaaatatactgaatgaagctggaattgtgacagccaggaaggatgtggactacattggacaatatgagctgcttgaggcattaaagaggcaaaagggaacatttgaaactgggcaagaggataataccgaaattcctgaagaattaaaactgacattggcatacagagaagcagctgttgctgctctagcatgttattatcccaagccccaccgaccttttattgagactgctatgaagtctatacgcaggca

SEQ ID NO: 210772 - DNA, 171 bp, Glycine max
atttccctacctctcccttcaagatgcagatcttcgtcaagaccctcaccggcaagaccatcacccttgaggtggaaagctctgacaccatcgacaacgtcaaggccaagatccaggacaaggaaggaatccccccggaccagcaacgtctcattttcgccggaaagcaac

SEQ ID NO: 210773 - DNA, 163 bp, Glycine max
atttccctacctctcccttcaagatgcagattttcttcaagaccctcaccggcaagaccatcacccttgaggtggaaagctctgacaccatcgacaacgtcaaggccaagatccaggacaaggaaggaatccccccggaccatcaacgtgtcattttcgccgg

SEQ ID NO: 210774 - DNA, 371 bp, Glycine max
aaattgcgctgtatgtagtgagggtcctttttttcattttcatcaaccataaattttctctttgcgtgccatcttctttaggccattcttccataaaaacacaaaaagacccacagagaggaacatggcatgtccagcaatggcaaatgggaacggctcattgaagaactcgaagctaaatgacaccaagggaaagaccatcacttgcaaagctgccgtggtatatggtcctggagagccctttgtggtggaaaacattcttgttcatcctcctcagaaaatggaggttcgaatcaagatcctctacactctcatttgtcacaccgatcttatcgcatggcgaggcgtgaaccaagctcaacgtgcttatc

SEQ ID NO: 210775 - DNA, 318 bp, Glycine max
tattgatattggtatggtctttctttgtaccccatttgcaaaaaggaagaagaagaacatgaagattcagtgtgatgtgtgtgagaaagcccctgcatccgtgatttgttgcgcagatgaggcagctttgtgtgccaaatgtgacgttgaagttcatgctgcaaacaagcttgcatgcaaactctatttttttttatttttttcttcttcctccttattttcatctttttttacattatgtcaagataagccagctttcatattctgtgttgaggacagagcactcttttgtatagactgtgatgagccaattcattt

SEQ ID NO: 210776 - DNA, 563 bp, Glycine max
tattgatattggtatggtctttctttgtaccccatttgcaaaaaggaagaagaagaacatgaagattcagtgtgatgtgtgtgagaaagcccctgcaaccgtgatttgttgcgcagatgaggcagctttgtgtgccaaatgtgacgttgaagttcatgctgcaaacaagcttgcaagcaagcaccagaggcttctccttcaatgtctatcaaacaagcttcccagatgtgacatatgccaagataagccagctttcatattttgtgttgaggacagagcactcttctgtaaagactgtgatgagccaattcatttagccagtagcctttctgcaaaccaccagcgcttcctcgctactggtatcagggtggctttgggttctaattgcaccacaggccatgaaaaaggtaacatggaaccatctaatccaaatgcacaagaagttcctgtgaaaactccttctcagcaagtgcctagcttcacatcctctagggcagttgatgacttgttggaattaacagactttgaatcgccagacaaaaagcaatccctggaatttggag

SEQ ID NO: 210777 - DNA, 543 bp, Glycine max
ctttagccgaggtcaggaggagcactagctaagttcacaatttcaaaatggctaggggactaaagaagcatttgaaaaggctcaatgctcctaagcattggatgcttgacaaactgggtggtgcatttgcgcctaaaccctcatttggaaccacacaaatcgagggagtgcctccccctcattcttattctgcgaaaccggctgaagtatgctctgacataccgtgaagtcattgctattctgatgcagcgccatgttcttgttgatggcaaagtcaggactgacaagacttaccctgctggtttcatggatgttgattcaatcccaaaaacaaatgagaacttccgcctgctctatgacactaaaggccgattccgtcttcattccatcagggatgatgaggcatagttcaagctctgcaaggttaggtcagtacagtttggccagaaaggtatcccatacctgaacacctatgatggtcgcaccatgcgatacccagaccctctcatcagggccaatgacactgttaagctggatctggag

SEQ ID NO: 210778 - DNA, 135 bp, Glycine max
gccttattaaagaccaatggttaacttttgttttgaagggcggtcttgctagaataaacagtgatgagatcactgttttagataatgatgcggacaatgggtgtgacattgatccacattaagcacattaaactc

SEQ ID NO: 210779 - DNA, 460 bp, Glycine max
  unsure (1)..(460): unsure at all n locations
caggatagaaaatttgaatggagagtggtgaagactattccctgtttgagactaggaaagacaaaggaaggcacattcgaaggatctatgcaatctctttgtttgtggccatatgcttcatctgggcttacagattgagccacatacccgcatatggcaaatgggcttggcttggtttgtttgctgcagaactctggtccggtttctattggctctttggtcaagccctccgctggaacatgctgttcagaaaaaccttcatcaatagactctctgaaagatatgagaatagcttgccgagagtggacatgtttgtgttcacggcagacccaatcattgagccacccatgatggtgattaatacagtgttatctgtgatggcttatgactatccagcagagaagctcagtgtgtatctctcggatgatgcaggctcagacataactttntatgctctttt

SEQ ID NO: 210780 - DNA, 416 bp, Glycine max
ccattttgaagcatgcaaagccaaaactagattgtaggtttattttggatgttaatgtgatagatggtacaatgatggctccatctactgcatttacaaagatctggcggatgcgcaataatggcactatagtctggcacaagggaactcaacttgcttggattggaggagacaagtttagtgactctcattcagttgacttagaggttcctgaggatggtgtccctttggagaaggaacttgacattgccgttgacttcacagcacctccattacctggtcgttacatatcatattggaggatgacaactccatctggacatcaatttggccaacgtgtttgggtccttatacaggctgatgcctctctcaaggactcattttatgataactctcaaggtctgaacttgaatatt

SEQ ID NO: 210781 - DNA, 177 bp, Glycine max
gggaagcctcgtttctctgacttcatcttgtttcctgccaattggggtgctgatattcattcttggcttgtggtgttagctgagaagtacccttggcttgaggagttgaggctcaagagaatgactgttactgatgagagcttggagtttctggctctcaaattccccaatttcaaa

SEQ ID NO: 210782 - DNA, 482 bp, Glycine max
caaaaatggcacctgcaacactgtctctgtctctcctcctcctgttctcactcagcatcgccgtaaccgttagatcgagcgactactactacgattgtgtgtacactgcatacgttagaaccgggtcggtgtcgaagggcggaacggactctaagatcgggctgaagctgtacgacaagtacggctactacatctacattaaaaacctcgaagcatggggcggcttgatgggcaagggctacgactacttggagcgcggcaacctcgacatcttcagcggaaggggaccctgtcttgacggacccgtctgtgccgtttacgttacttctgacggatcgggttctcaccacggctggtaccttaactacgtccaggtcacctccactgggccccacctttcctgcgctcaggatcagtacgaagtggagcagtggctcgctctcgacacttcgccttaccagctttgggccgttaggaaccac

SEQ ID NO: 210783 - DNA, 559 bp, Glycine max
cttctttagcaccaaagaggccaaatatcccaacggaaatcgctctaacagagccacaaattcgggttattggaaggcaactggcttggacaaacaaattgttacttcaaaagggaaccaagttgtggggatgaagaagacacttgttttctacagaggcaagcctcctcatggatccagaactgattggatcatgcatgagtatcgcctcaacatccttaacgcctctcagagccatgttcccatggaaaattgggttctatgtcgcatatttttgaagaagagaagcggtgctaaaaatggggaggagagcaacaaggtgaggaactctaaggtggttttctatgacttcctagcgcagaacaagactgattcctcatcctcggccgccagtggaattacacatgaacatgaatcagatgaacatgaccatgaagagagcagtagctccaacaccttcccttatactattagaacgaaaccttaacaaccaagtcaacaaccaccttccttaaaaaagtgattatcacctagtttttttttttttaattctctttcc

SEQ ID NO: 210784 - DNA, 241 bp, Glycine max
  unsure (1)..(241): unsure at all n locations
tgcaaaaaaatgccggagttgnagcnattcagcatgtttgatgtagactccgaggatcccctcggggaattccaattccacattttcaagaaataaggaggttttatttgttcatatatgaattggaattatttgttttcttattaggcctatcctgaagccaaaggaaatgagatcggaattcctcggggaattccaattccacattttcaagaaatatggaggcaaaaatgttcattta

SEQ ID NO: 210785 - DNA, 248 bp, Glycine max
  unsure (1)..(248): unsure at all n locations
tgganaaattatgggcgacatagcagtgcatgncagcatgtctgcatgtcgactgcagaggatcccctcggggaattccaattccacattttcaagaaataaggaggcttatatgttcatatatgaattggaattatttgttttcttattaggcctatcctgaagccaaaggaaatgagatcggaattcctcggggaattccaattccacattttcaagaaataaggaggcaaaaatgctcatatatg

SEQ ID NO: 210786 - DNA, 474 bp, Glycine max
  unsure (1)..(474): unsure at all n locations
gaattgagttgaaatcgaaagggaagcggtggtttaggttaggatttggtgagtgagtggggatggcgaagttcaatgtggtgcagaagcgaaggagagctctaatagcagagaagaagagacagcttcacggagaccctttaaccggcaagctcaagatcaaggaccaaccccttttcctatncntaaatntntntctctttcctcttttctttttccttcttttttcttcttcctccctcctaaatggtttggtaaccatggaagatgttcaaatggcagttgctgaagcaggggataccaaagatacccctagaccttcaccaaaaattcacttatagaagaaggccttgaaacttaaacagctcaagcgcaaagggaagaacacaagaaaatctgatgtgcctgctgatgtttcggctgatgcaatggtggaataaatatgaaaagttttgatatcctacatacttggta

SEQ ID NO: 210787 - DNA, 556 bp, Glycine max
  unsure (1)..(556): unsure at all n locations
gaattgagttgaaatcgaaagggaagcggtggtttaggttaggatttggtgagtgagtggggatggcgaagttcaatgtggtgcagaagcgaaggagagctctaatagcagagaagaagagacagcttcacggagaccctttaaccggcaagctcaagatcatggaccaaccnctttccctatccggaaaacgcaaacgcaagctcttcaaaaaatggcgccgggaccaaaaggacgccttacagaatggtttggtaaccatggaagatgttcaaatggcagttgctgaagcaggggataccatagatacccctagaccttcaccaaaaattcacttaaagaagaaggccttgaaacttaaacagctcaagcgcaaagggaagaacaaaagaaaatctgatgtgcctgctgatgtttcggctgatgcaatggtggaataaatatgaaagttttgatatcctacatacttggtagggtggaggatagaagaggccgatgtctgatggtatataatgttgcaatcctcgagtgaatatgctattcctatattttcttc

SEQ ID NO: 210788 - DNA, 581 bp, Glycine max
gcaaactgatgatgttgtgaagatttttaagcaactcttggatttgggcattgttccagatgtttacttctgctgttgtcttctgaatgttatgactcaaacaccaaaagaagagtttggtaagctaacagactgcattgagaaggctaatacaaggcttggttctgtggtaagatatttggtggaagggcaggagggtgatggagattttagaaaggaagcatcagaacttcttaattcaattgattttaaggtaaaaaagccgttatgcaattgtctaattgatctttgtgtcagcctgaatgcgccgaacagagcacgtgacgttctggaccttggactgatgcttgagatatataaaaatatacaatccagatctgaaacccagtggtctttgcatttgaagaaactctcagttggagctgctataaccgcattacatgtttggataaatgacttgtctaaggcattggaatcatgggaagaccttccaccactgcttggagttaatactggacagggaaaacacatgtattcagaccaagggtttgctagtgtatttgaatacatttgagggaact

SEQ ID NO: 210789 - DNA, 168 bp, Glycine max
ggccacaccagcatccatcaccaatgtcactgtggtgttccttcaattccccgcggtggtgacacctcctgcctctaccaaatcctatttccttggtggcgcaggggtgagagggttgaatattgaagaagaatttgtaaagttcacgggaataggtgtttatttgga

SEQ ID NO: 210790 - DNA, 322 bp, Glycine max
gtcttcttaaagaccaatggttaacgatggctctgatgggcggttttgctagaataaacaataatgagatcactgttttagtaaatgatgcggaaaagggtagtgacattgatccacaagaagcacagcaaactcttgaaatagcagaagctaatttgaataaggcggaatgctaaactcctattcttttcttttttttatctttcttcctctttcccttcatatcttctcttatcttttttctctttctacattctttttttcttcaactttttcttttttttaatatatatctattctttttttttcaatattttaattt

SEQ ID NO: 210791 - DNA, 175 bp, Glycine max
gttattaagagcttttgcttttctttctgcgcgcttttcccaattaagtagttcttccttttctcaaagcaaaaaaaatgttcatcgagagtttcaaggttgagagtcctaacgtgaagtacacagagactgagattcagtccgtgtacaactatgaaaccactgaacttgttca

SEQ ID NO: 210792 - DNA, 527 bp, Glycine max
cggcgcggcacccacacacacagttcgtcggaatgggaagggtgattcgcgctcagcgtaagggtgctgggtcggtgttcaagtctcacactcaccaccgcaagggtccggcgaggttccgcagcctcgacttcggcgagcgcaacggctacctcaagggcgtcgtcaccgacatcatccacgaccccggtcgcggcgcccctctcgccaaggtggcattccgccaccccttccgctacaagaagcaaacggagctcttcgtcgccgccgagggcctctacaccgggcagttcgtctactgcggcaagaaggccaccctcgtggtcggcaacgtgttgcccatccgatccatccccgaaggtgccgtcatctgcaacgtcgagcaccacgtcggcgaccgcggcgttttcgccagagcctccggtgactatgctattgttataagccacaaccctgataacgacacctctaggatcaagcttccttctggtgcgaagaagattgtgccagtgggtgcagggcgatga

SEQ ID NO: 210793 - DNA, 578 bp, Glycine max
gcaatggaagctcaatcacaccaccgtctcaatgtcctttttcttccatatccgacacctggccatttacttcctatggtagacacagcaagactatttgccaagcatggtgttagtgttactattctcactacccctgctattgcttcaacattccaaaatgccatagacagtgacttcaattgtggatatcacatcagaactcaagtggttccattcccttcagcccaagttggtctcattgatggacttgaaaacatgaaagatgccactaccctagaaatgttggttaaaatcggttatggactatcaacgctccaagatgaaattgagcttcggtttcaagaccttcaaccagattgtatagtgactgatatgatgtatccttggacagtggaatcagctgaaaaactaggcattccaaggattttcttttacagctcatgctacttctccaactgtgcttctcattttatcaggaagcatagacctcatgagagcttagtctctgacagccacaagtttacaattcctggtttgcctcatagaatagagatgaccccttcgcagctagcaga

SEQ ID NO: 210794 - DNA, 335 bp, Glycine max
agagaatgaaaaaattatctactcatttccttgaatgtactatgcccacaatcccaaaggattaatcaataatcagttaatcaccaccatttatcatgacatctgaagcatatgtgcctaaaagatatgagtctctagagaacccttttgctcataaaccgccgcgttagcgttctcttttttttttcttcttcctcttctcttcttttctcttttctccctctctttctcttcttcccttttttcttttttccttctcttcttctttctcctctttttttttttttctttcttttctttttttttctctttctcctttttccttcttccctctc

SEQ ID NO: 210795 - DNA, 427 bp, Glycine max
ctttgaagttcacacacacttgttcacccctgaaatggaacacaacctcacaatgaagtgtcgtagaaatgaaaaccttctaaccagtggcactcatttgccagaaagccctcgagtaccaatggagtttctgtcaagatcatggagtgcctcttctcttgaggtctctaaagcccttacacttacaccacctccacctctttcttgttacataccttccaagcctcctaatgcaccctcttctgtgactaactccatttccgaagaaacttcagaggaattctcaaccatgtgtggcaaccagttctcttttgcttcctctgccacctcacaacttgtccttgaccgcataatgtcacagtccgcaagagaggaagtgtctccattaacgtcaggtagattgtctcatagtagtgaacctttgaac

SEQ ID NO: 210796 - DNA, 650 bp, Glycine max
  unsure (1)..(650): unsure at all n locations
atgaacaggagttctgtactgcnatnancaaaaaataaaaattganaaaannccccnaccaaaaaaanananaaaaaannnnnanaaaaannaaaaaanaaaanaaaaaaatttttttttttnnatanaananaaaanataataattatggggggggatttataaatttaatgttaagtgaattttaaagaataagactcctaacattgtccaaagaccaattggacagattttaaccaacagagtgcagtattgttgcatcactttcaaacgattatgttgactcttatgttctgtcagagtcaagcctgttcatctatccttataaaattatcatcaaaacttgtgggactaccaaattgcttctgtccatccctgtcatcctcaagttggctgatgctcttgacattgctgtgaaatctgtgaggtacactcgtggaagtttcatttttcctggggcacagtcttttcctcaccgcagtttttcagaggaagtttctgttcttgacagctatttcagcaaccttggttctggtagcaaagcttatgttatgggtgacccttcgaagtcacagatttggcacatctactctgcaagtgcacaaaccaaagggtcatctgaagttgtctatggccctgagatgtgcatg

SEQ ID NO: 210797 - DNA, 617 bp, Glycine max
  unsure (1)..(617): unsure at all n locations
cgcattttctttgtcaatgatacatatcttccaagtgccacaccagctccactacttaggtacagaaaagaagaattggaggttttaagaggagatggaacagggaagagaaaggactttgacagaatctatgattatgatgtcctttaatgatttgggcaatccagatggtggtgatcctcgcccaatccttggtgggtctagcatctatccctaccctcgcagggttagaacaggaagagaaaggaccaggacagatcccaacagtgagaaaccgggcgaggtttatgttccaagagatgaaaattctggtcacttgaagtcatcggatttccttacatacggaatcaaatccttatctcacgatgtgatacctttgttcaaatctgccatttttcaattaagggtcacatcgagtgagtttgaaagcttctacgatgtgcgtagtctctatgagggtggaattaaattgccaacagatatactgagccagattagccccttaccagccctcaaggaaatcttccgcactgatggtgaaaatgatctttcatttccaccacctcatgtagccaaagttgtangtctgggtggatgactgatgaggaatttgctag

SEQ ID NO: 210798 - DNA, 439 bp, Glycine max
ctcagagagcacattgcattggcgacaccgtttgcgacgacggaaattgaattgctcgtgcgcgtgggtgcgtgatcgatcgaaggacgaacgatgtcggagatggcgagcccagatcccgagggactcgacggagtccgcatgacgtggaacgtgtggccccgtacgaaggttgaatcgagcaagtgcgtgatccctctggcggcgacggtggctctgatccgtccccaccctgacatcccccgcctccagtacgcccctctccggtgcaagacctgctgctccgacctcaaccctttctcccgcgtcgacttcaccgccaagatctggatctgccccttctgctaccagcgcaaccactttccccctcactaccacgccatctccgaaaccaatcttcccggcgatctctacccccaatacaccaccgtcgagtacc

SEQ ID NO: 210799 - DNA, 439 bp, Glycine max
ctcagagagcacattgcattggcgacaccgtttgcgacgacggaaattgaattgctcgtgcgcgtgggtgcgtgatcgatcgaaggacgaacgatgtcggagatggcgagcccagatcccgagggactcgacggagtccgcatgacgtggaacgtgtggccccgtacgaaggttgaatcgagcaagtgcgtgatccctctggcggcgacggtggctctgatccgtccccaccctgacatcccccgcctccagtacgcccctcttcggtgcaagacctgcttctccgacctctaccctttctcccgcgtcgactttaccgccaagatctggatctgccccttctgctaccagcgcaaccactttccccctcactaccacgccatgtgcgaaaccaactttcccggcgaactctacccccaatacaccaccgtggagtacc

SEQ ID NO: 210800 - DNA, 174 bp, Glycine max
tttcagtgagtgatcggtgttcacttgatctcatcataatcgtcagcgtcaattgaagaagatgccgatcagaaacatcgccgtcggaaggcctgaagaggcgactcaccccgacacgttgaaggcggctttggctgagttcatctcaaccttcatcttcgtgttcgccggctc

SEQ ID NO: 210801 - DNA, 170 bp, Glycine max
aattccctttggagggtacaaaatgtgtggtctaggaagagaaaaaggagaatacagtctcaagaattacttgcaagtgaaggctgttgttacatccttgaagaacccagcttggctttgaacatcattagctttagatttatttgatgaaaagattaataaattggctc

SEQ ID NO: 210802 - DNA, 551 bp, Glycine max
agtcttcgaaggaactggtgccttggctctctgtgctggcacaggtgactttgcaaccggtgtcggaatgggtgccttggcaccttgtaatgatgacataggagctttggcaccctgtgcagcaacgggagcattggctccttgtgaggattgtgcaccacatgatgaggctggggtttgtgaatcaacacctgggactaggatgggtttggcgacttggagaatggagatgttgtagggctcgctggtgacggtcctcatgagctcggtggcgtcgactggggcgccactcacggccgagccgaaggcgatctcgccttcgccgacgagtgcaaccttgaggaagccttgttggttcactgcaatgcctgaggcctggaatagggttgtcaactgttggctattagcttgagccttcatgagcttcttctcatcaaagaagtcatggatgacatgggtgctaatgatggccttaatggcttctggtgactcgggcagcatggaattcatggctgagtcttcaacggcgaggacagtgatggtgttgcggc

SEQ ID NO: 210803 - DNA, 471 bp, Glycine max
gacttaagttaaaatgttcagatccatatgagcatatacttcgaaataagatgaatattacaacaaaaaggcgattgaaaaatacgaattacaataagcagtaacctaattttaattctagatcacacaatgaaacctaattttaagctctctcgcctctgattctgcgagcaagttgaatatccttgggcataatggtgactctcttggcgtgaatagcgcaaaggttggtgtcctcgaagagtccaacgagataagcctctgcggcttcctgaagcgcagaaacagcgctgctctggaaacgaagatctgttttgaaatcctgagcgatttctctgacgagcctctggaatgggagttttcggatcagaagttcagtgctcttctggtactttctgatctccctcagagccaccgttccgggcctgaagcggtggggcttcttcactccgccgggggccggagctgact

SEQ ID NO: 210804 - DNA, 537 bp, Glycine max
aaaaggtttctatcagtgcctgtgttggcagtgtttttgttgatgctttttgtgtattactcttcaatcttcgtcttcctccaagattggctcggtttgcagagttcccctggcactttgaatgcgttccttttctctctctttgcttctctatccctcttctcttttttctcttgcgttctcactgaccccggccacgtcccttcttcctacgccccagatgttgaattctccaaagataatgcagaacagaagaaatgtgacaagtgctttgcatacaagcctcccaggacccatcattgtcgagtttgcagaaggtgtattctgaaaatggatcatcactgcttgtggataaataactgtgttggttattggaattataaggctttctttgtttttgtattctatgccaccacggcaagtatttattctacggtatatttccaatctggcatctactggttctgtagtgaacaggattcctatttgacataagcttttacaatgtgcagatcatatttatgagctgtgtatttc

SEQ ID NO: 210805 - DNA, 624 bp, Glycine max
acaagccaagtgaaagagagaagaaaagtcaaagacaatgtcagggatcattcacaagattgaggagacccttcatgtgggaggccacaagaaggaggaggagcacaagggtgagcagcaccatggtggagaatacaaaggggagcatcatggtgaacacagtactgaatacaaaggagagcatcatgttggtgagcacaagccggagcaccatggaggagaagagcacaaagaggggttcctagacaagatcaaggacaagatccacggcgaggagggtggcgccaccgccgagggcgagaagaagaagaagaagaaggagaagaagaagcatgaacatggccatgacagcagcagcagcagtgacagtgattagattatctcccactgctgcatcacctatatatcttataaggtgtatgggaccatagtagtgagggctgtgtctttctctttttttcctacttgtcatttatatttatgagcgagagaaatagtgcgtgtatctggttgctaattcgagtgctattagtctgtggtttcgttggtttgtaacccctctggcttgttatgctggatttgtatatatccttaaagaaataaaagaataaattattcatgcgt

SEQ ID NO: 210806 - DNA, 490 bp, Glycine max
ggccgccctttttttttttttttttattttttttttttttttttttttttttttttttttttttttgatttttgttatttttttttttttatttttttttaccgatggggaaataaaagttgaatttctttaaggggaaatatccatccgggaaaaccaaagcgaagggggtacaaaccacagagagcccccatctaaaaggccccaaaataacaaccaataacccgccctatatctcccggcaaaaaataaaaaagaccagggggaaaaaaaaaaaaagacccaggcctaaatacaaggggcccaacccccttaaaaaaaatatgggggatcccaccgggggaaaaaatgaaaaccctggcacaggtgctggggcagacaagggcatagtaaggactgttgcatcccctatatattttataatgtgccccctaggaggggggcccacccttttgcggggggaatcgtcccaaaaattgtttagaaaccc

SEQ ID NO: 210807 - DNA, 615 bp, Glycine max
gtccgatcccccagcgccaaacgcaccaccgaagcaaatcaatattaagggcctgtccgtcgtcaaaaattacttatctgactacggctacattgaatcctctgggccatttaacgattctttcgaccaggaaataatatcagccattaagacctaccagaatttttccaatcttaatgttaccggcgacctgaacaaacagcttattcagcaaatgttgtccatacgatgcggtgtccccgacgttaacttcgactacaacttcaccgacgacaacatttcctatcccaaagccggacaccgctggttcccaaacagaaacctcacatacggttttcttcccgaaaaccaaatcccagacaacatgactaaggtgttcagagattcctttgcgaggtgggcccaagcctcggggactttgagtctcacggagacaacctacgacaacgccgacatccaggtagggttctacaacttcactaactcgaggattgaagtgtatggtggcagccttatatttttgcaaccggattctagtaagaaaggggtggtacttctgaacgtaacatgggctggttactttcagtgaaaacgccacactgtctaaagatgatg

SEQ ID NO: 210808 - DNA, 611 bp, Glycine max
  unsure (1)..(611): unsure at all n locations
cctgaacctgtctgcatccattcccatttcttcttccgtatgcatgttcccaccgtctaaaaaacctagcaaagcaacaaaacggcgtcatgcttgggaagtagcatgcaatggtaaccctagaaataggagggacattctgatcggccttggaggactctatggtgctacaacaagtctcacaagtaacaacactggttctgcatttggtgcttcattgtcgcctccagatccaactaactgcgttcaaccggacccagaaaaagaccctttttgcccaccaccccccttcaaagactacgagctccctccacacgatgacaagacattaccccttcgaattagaccagctgctcatttggtcactgatgattacatagccaagtacgaggaagccgtgaggcgcatgcaagaccttccacctgatgatcctcgcagtttcatgcaacaggccaatgtccaccgtgcctactgcgatggtcgcggctataatcaaaagggcttcgctgactacaagcttgacgttcacggctcctggatattctttccttggcaccgctggtatctctatttctatgagaaaatcttggngaagatgatcgatgacccca

SEQ ID NO: 210809 - DNA, 519 bp, Glycine max
aacaaacatttattataacaatatcatagtatccctcaaagatgaaagggatctattaagttccaaggcaaataactacaacacactaattaagaaacaacaaatgacaaatagagtatccccggagaaacaaaccctagcagtagcacacacataatttagatttattcatcgtctacctcaggataaacacgctttatccttacgtccttaattgtaacaggcttgtctccatatatgggagccagtgtgacagaaatactatcatcgtcttttgttactcccaagtctttcaactgatacgttaatggcaatttgaaagaagctctggtgatgttgatatggttgacatgcggcgagtgaggcaaagtcacaaagcttcccgcaaactctgaatcctgtggtccaatctcattatcgccttggtcgttgatgaacacatcaaacctcacaccatcagtgctatcgtactcaacatctatcactaacacctcttctacgccttcttcttcttcattc

SEQ ID NO: 210810 - DNA, 521 bp, Glycine max
ggctggtctcaaatcataatcaaattgccataacaatgaaaacaaccaagttaaaaactgtaagtcaagactgtttcccagaccatatataacataattgataatccttatggacatcaaacagaaaatcccctgaaaacgaagtctcttgagtttcacacaaaggataccctataaaaacctatatatagtcctatactgcattagctacaagataaataaactccacatatgctttaagcaggttggttttcttgctgtggattccatcaccaacatcacgatcacaattcttgtagctgtatttacataaaaagggatatgaaggtgttcagaagactcctgccatggaaggcaggtcgtcgaagctccaaaggttcatagggtttccagcagcatcctgagatgcatcttcactgagcaaagacgccaatgcagcatcagcccaggcttcatcaagaaaagaaggggtctcaaagaacttcagctgggattcaatgtctgcaagctcctcaaaagag

SEQ ID NO: 210811 - DNA, 493 bp, Glycine max
attaaatactacggtacaggcttctgcggactggaaaaataacacactggtgcgtgcatcatttccatgatgattagtggtacactgctagaacgtacgtttatggcctcatgagcccttaagtgataagggctatgccttgtacaatcaaagcatcggctaaaacttggttagcagcttgtgaaggatggacactgtcccaaaacacatattgggttgcattagagcaagttcctagtgattttggattgcacaataaagatgttgtctccactatcccagtaccacagcaacctttccttgcctccgcaaaaccaaattttgaaggggactgaacaaggtcatagagaggtttgaaaatatcaaagactacaatcttaagaccaggaagttgcttttggagatttgctgccactgacttgatttcttgttaaatgcttgggtgtcattgatgatcctcgagacacaaccttttttatggaaactaaataaa

SEQ ID NO: 210812 - DNA, 540 bp, Glycine max
aaatggcacttcagaggttgagtgcataaatctcttggctgatgccaaaacaaagtatggtgtgaaatcttcaagtcgagaacaacagaatctaaaatgcaaaattgattcttgacatggaggccctgatattcccaatgatacaaaatccttgagcatgcccaagtgggatccaggaaaggaagaagaaactactgcttcattggcactcataattgatggaaccagtttggtttatattttatagaatgaattacagtcagagcttttcgaccttgcaacttcctgtagggttgtgctatgctgccgggttgcacccttgcagaaagcaggaatcggtgatctgataaaaagccgcacagatgatctgacattaactataggggatggggcaaatgatgtttcaatgatccacacggcagatgttggtgttggaatatgtgggcagggagggcgccaagcaccgatggcatcaaattttgctatgggacaattacagttcttggataaattacttctagttcatggacactggaatta

SEQ ID NO: 210813 - DNA, 581 bp, Glycine max
  unsure (1)..(581): unsure at all n locations
agaaaaagcaaggaagaataataagggagagagagtgagaggaagaagggaaaaccaaagacacttcctagttacttccctctgcagccataatagaataaccagcaccaccaaaggtgaatcatggttatttgcttgaagctcataataatgtggaatgtggcactgcttctggttttttctctaattggttctgctaaggcctcagtgtcctatgactcaaaggctatcaccattaatggccagagaaggatcctcatttctggatccattcattacccaaggagcacccctgagatgtggccagatcttattcaaaaggccaaggatggaggtttggatgtgattcagacttatgttttctggaatggacacgaaccttcacctggcaagtattattttgaggggaactatgatctggtgaagttcataaagctggtgcagcaagcaggcctttatgttcatctcaggattggcccttatgtctgtgctgagtnggaacttggtggtttccctgtttggctaaagtacattccaggaatcagtttcagaacagacaatgaaccatttaagcatcaaat

SEQ ID NO: 210814 - DNA, 525 bp, Glycine max
gactgaatctgatctttatcatcttgagaagtttcttacaggaagaaagaaactaaatcactatgaatgcagcttacaagggaaaactaatattgcaggaagcaagaggcttccacacctaagtctaaaacactagcacatggactcaattcagtatcgtctcatagtgcaccaagcaaatcatcacctttcacctctgtataacatgcagaacacaagtatatacacatatccacaatcatctcagcaatctttacaggctttcaaccatatggcgtgttgtgttttctgcaacttcaccttggtaaagccaaaataataatgctcgtgttgatcagattcagaagtgcagactttggttgacccaaaagaactgtattgaaatgaatagtggtgggaaaaatcaatctggagagtttaatctatttattttctgaggttaaaatgatcaggaacatatagctcccactgagagtttcttcaagacatttggacatggatctcctccaaaattttcaggtgaca

SEQ ID NO: 210815 - DNA, 452 bp, Glycine max
ggcgtgttgggtgagaaggaaagagatgagactaatctacgactaagagggaggacacacacacatcaaaagtgattgctcaccaaatgggaggggcccaaaacgacgcgcttacaatcagtctccatactctcaagaccgacatcagtggctctcaccctgatcaatattcactccaatccacgcggagactggatgaacctatgaatatgccatgcaaacgacacctgtaccgaactgcttttcccatgaatgaggagctcgacaggcaaaccctgttcagtgtgcaccggcctcctggaccaattgcttcttgaatgctggactgggagactgatgcaggaagtgctgaccactttggtcatgaggatggactaaccgacccccgtgagtctgagactttccgggcattagacacgcatcatgggatggaacatcagcttgctctatat

SEQ ID NO: 210816 - DNA, 444 bp, Glycine max
ataccgtataattcataattcatatgtggctagtttttttggtttcaccaaaagccttttacaaaattttaacaggggagggcaagtggctactcgccacaatgataaggcaaatgtaacatataacccccaaaccagtaatatatgatatgtgaaaaacaggtaaccgatcctaataaatgcttttaattgaagtttgcatccaatgtagatatgaagaggtatatcgagacctcttttgcaccatccaaaaaattgtggcataaacagcagaagaattccttgtaatgggggtgatcattttacagtcaagatcttgatgatagatgcactgcccacacgatgcagtgccaccactgaatccccgttgtggcagagacccttggccttggcatgttgcatggcgaattctattgcttcctcagatgtttcagcatgagaagc

SEQ ID NO: 210817 - DNA, 540 bp, Glycine max
  unsure (1)..(540): unsure at all n locations
tgcaaagtgtgagagaaagacaatgccgaagtctcaatttcgaaccccatttctggtttctcttccccttttgttattcatcttcaacctcaccccttcgcacgcactctatggagcatcctcacccgtgcttcaactcactccctctaacttcaagtccaaggttctgaattcaaatggagttgttcttgttgaattctttgctccatggtgtggacactgtcaggctctgactcctatatgggagaaggcagctactgtgttgaagggtgttgttactgtggcagcaattgatgctgatgctcatccgtctttggctcaggaatatggaattagaggatttccaactataaaagtgtttgcacctggaaagccacctgttgattaccaaggagcaagagatgtcaaaccaattgctgaatttgcacttcaacaggtaaaggctcttttgaggatcggttaagtggaaaagcaacaggaggatctagtgacaagacagaaaccagttcttcagtagaatngaactctcggcaacttgat

SEQ ID NO: 210818 - DNA, 506 bp, Glycine max
agctgaaagctcattgatagggaaaagaaaataccaaaacatgctaacattttccggagatatatcagtacgtacccactgaatgacatatatcaaaatcctcagagaagatcactcatcactagactggttttttaacttggaacatggaaaaacagaatagtgatcacaataatcatgagaaacaagttgcctgtaacgtaaaaatcggtggttgaaactttaatttggtataaattccttataaattgatcatagctcatccttgcttgaagcatcttcccccattagttcttcaagagaaaattcatcctcctcaattatttctccatcttttccatcccatggttctgtctttacaatggttggagtgccttgcaggggcaaattccctttgcctgcacgtccagcttctttcacaaattctataatctggtcaagttcaaaagcactcttgagaggagcataaacagctttcttaggttaagggccactaagctggataa

SEQ ID NO: 210819 - DNA, 587 bp, Glycine max
  unsure (1)..(587): unsure at all n locations
ctgaaatcggtggagaacgcgcacgatgattcggtgtgggcggtcacctgggtacccgcaaccgccaaccgaccaccgctcctcctaaccggttccctcgacgagaccgtcaggctctggcgctccgacgacctcgttttggaccgcaccaacaccggccactgcctcggcgtcgcctccgtcgccgcccaccccctcggctctgtcgccgcctcctcctccctcgacagcttcgtccgcgtcttcgatgtcgattccaacgccaccatcgccaccctcgaggctcctccctctgaagtttggcaaatgcgcttcgatcccaagggtgccattctagcagttgctggcggaggtagtgcatctgtcaagctttgggacacttcctcatgggaacttgttgccactctgtcaattcctcgtccagaaggacagaagcccacagacaaaagtggcagcaagaaatttgtgctatcagttgcatggagtcctgatgggaaacgactngcttgtggttcaatggatggcaccatttcagttnttgatgtgccccgcgccanatttctgcatcaccttgaaggtcacttcat

SEQ ID NO: 210820 - DNA, 508 bp, Glycine max
  unsure (1)..(508): unsure at all n locations
agactccgctttatcattgcaacnccnnnnantncgggacatacatcgaattcgctcgagcttcatcatcataagtaagactttttattttaacggggcacgagctacaagatgaggtctttttcgcaaagcatccccatcatccgttggaactccgtctcgtgcaaggctcaactctttacacttatatcttatactcaaaaggatctaatgatccacactaactgaccctgaccctccgccggcttttccctccaggccatggactccaaccacaggccatcgctgacctttactcctccgacccgagggcttagacctcataccaatacacccgcatgataatgcatggggcatgaacgctcaacaacataggccaagatgcttatagtgagctggcaatgacctacatgatcaccatcaaggtcctcgaccgcagcgacactgtcactttcatgacctaaagccatacacaagacaaggattttgattctgaaatgaagccgat

SEQ ID NO: 210821 - DNA, 590 bp, Glycine max
tttttttttttttttttttttttcacgagaaagtagagtttttgtgaagattaatcaaccaaataatgtgcaaatgtcatagtgagaagcatataactaaagaaattgataaaatccttcaccaattgggattctactagaccaaggcgtaaaagatgttgcagaacaaatcacttgagcagcatgagcagatgagttggctggctttctgccaattatttcttaaactgccaaagttgtatcctctctcactcattgctcagatatactaatttttagcatttctgcacagaagaaccaaattctccaaattaagaaacgaagatccatttgggccagaagcagcactttttgccaattccttccattgcaaacctttcttcttcatctgcttacccttttcaccatccatcaactccctcacaaggctctctattttatccctcttaacatcttcaatctccaatccaatcccccattccttacaacagaatcgacaattggtttgttgctccgcaaagaaaggccaacatatcattggaacacctccacacacactttccaacgttgaattccaaccactgtgcgtc

SEQ ID NO: 210822 - DNA, 566 bp, Glycine max
gcgaagatctgaagtcaaggtccttctaagaatgcttccagactatcatcatcatgtgaagtcatatgaaaatacacttatcacaaaattttttggtctgcacaggattaaaccttcaagtggtcaaaagtttcgctttgttgtaatgggaaatatgttctgcacagacttaaggatccatcggaggtttgatttaaaaggttcttcccttggaagatcatcagacaagatagaaattgatgagagtactacgctcaaagatttggatctgaactacagcttctacctggaaccatcttggcgagagtctttactaaagcagattgaaatagacagcaaatttttggaagcacagcacattatggattacagccttcttctaggtgttcactatagagctccccagcatctacgttctcacgtttcatacaaccaaagtagaagtgtggatggattagcaatgcttgcagaggaagatcctctagaggatgaagtattctatccgcaggccttgttctagttcctcgagaggagatgatgacagtgttgttgttggctcacacatg

SEQ ID NO: 210823 - DNA, 582 bp, Glycine max
aaatataacactttttttttattatatatttactcactttacatgagataaatctatttacctcattattcacttgattcctattaccaccatcaacaaggtgcccacgtggccacctactataaaaattctggagcaagcatgaaaagtgcaatattcacactttctaaataaacttactggttaaatataaccccaaaattatcttgattaacctgtcgtcgcatttggtggaaacaccttctgaataaattccaggaagcgatgcgaatagaacgtagggtccacagctgagatagacaatgaatcaaactgaagagatttataagcatgttcaatcctcttagccatgttgaagtcctgcaatatgtcaatgataccaaggtacagcaccacatcgtacacttcatgaaacatttgcttttcttgtatctgttttcctgaaatctgatctgcccttgatggcatgttcacaccaagctgtatttggagtcttgctgtaccaggtagaagtagatccaccttctcatacccgcagatgaagcttgaacccgctacccttatggtgagccaacaacacac

SEQ ID NO: 210824 - DNA, 608 bp, Glycine max
gtgcaaaactgggatgatatgtgtcatgtttgggatcacgcgtttttcaatgaattgaaggttaatccaccagactgtaagattttactcactgatccgcctcttaatccttccaagaatcgcgaaaaaatggttgagacaatgtttgagaagtacaattttgctggagtgtttatccaaattcaagctgttctaacattatatgctcaaggtttgctgactggattagttattgactcaggcgatggtgtcactcatgtggttccagttgttgatggctattctttccctcatctaactaaacgaatgaatgttgctggtcgacatataacctcctatcttgttgatttgctttcaaggagggggtatgcattaaataggactgctgattttgagactgtcagggaaatcaaagagaagctatgctatattagttatgactacaagagggaatatcagttggggcttgagaccactatccttgttaagaattatactcttccagatggaagggtcattaaagtatgcactgaaaggttccaggctcccgaggctcttttcactccggaacttatagatgtagaaggtgatggaatggctgacatggt

SEQ ID NO: 210825 - DNA, 495 bp, Glycine max
ctcgatcccattttaacacatacacttctctttatctgtgtcggatcgcatgaacagcacttggaggaggaagaagatcaccaccgtgcgggtgctagtcgtggaccaaatctgaagagacggggcggggggggtggactgtttctctgtgaccctacatgaacaagagtccatggaccgtgaccattcacctgtgactagacaattttttccggcggaagatgctgacgcggcgggtgccaccttcggtggtggacccggtctcacctccacgatcccttgtgctcactggctacgtgtgaaattttgccactcatattcactttgcaccggaaaatcatgaggggaagtttttctccctatgaagaagagtcgtcgaggaccatagtcaatgagctctcagtttagaggagtcaccctctaccatataacgggccgctgggagtctcatatatggcattggggaaaacaagtgtatctatgtggatcttacac

SEQ ID NO: 210826 - DNA, 609 bp, Glycine max
  unsure (1)..(609): unsure at all n locations
gctaacaagagattcaagaccggcatggctaatgaagaggaacagaaaaaccacctcttcggcatcaaagatctcggtcacaagactctccttcagagtgatgcactctatcagtatatacttgaaaccagtgtctatccaagagagcacgagtgcttgaaagagatacgcaagatgactgcaaaacacccactgaacatcatggcaacaccagcagacgaaggacaacttctgagcatgcttgttaagctcacgaattcaaagaacgccttggaaattggtgtattcactggttactctctgctctccactgccctggctcttccccctgatggaaagatcttggctttggatgtgaatcgcgaatactatgagttaggattgccaataattcaaaaagctggagtggctcacaagattgatttcagagaaggacctgctcttccgtttcttgacgagatgcttaaagatgaaaataacaaggggtcgttggatttcgttttcgtggatgctgataaggacaattacttgaactanccacagagggtactagagcttgtgaagattggaggactgatcggatacgataacaccctatgggctggatct

SEQ ID NO: 210827 - DNA, 330 bp, Glycine max
gatgttgatttgtatcctttcagctaaatttctaacgggacaagaaacacacaaagatctagaaaagacagttgaacatttgagaactccaccattcacgcaacctgttttaatgaaaggaatttctgtcatgaaaaatctagatgaagagaaaatgaccagatgatgcgggggcacagggtaatcccattacccacggggagctggcaaatctcgatcctggaatcttgagccagatactggttgagctccatcacatggccgctaagaggcttaatggaatccatcaatggggcatcgggtggggcagccacagatccagcccatagg

SEQ ID NO: 210828 - DNA, 554 bp, Glycine max
actataagaaaaaagattatatatactatattttacaataaatttattaatttttacaataattacataaaaaaatcataccaataattatttgtaacaacccaacttcattacaagtttattatactaatacaaccccgatactttaaagtcctatgaaaatacgtaagatatgcaagcattcgatcgcataatatccattaccataacataaaagagttaagccttgtgtctttacaaaactaaaaagagccataagatgaaaaacaatgtcttaacgtttgttgacatggctttgcctttttatgggcacaacttttcaaattaaacttcagtggatggcaagggaaccaacctacgatattcagctagagcccacattggataaatattcctgtacattgggtaatgcagcatgcacgtactattgaatactccagcgagttcctgttgaggccaatcaccctctttcaactgataaatgatgagcaattttgcagcacggtgaagagaagtagtatctctctctgcctgtccagcaagaatttgaccca

SEQ ID NO: 210829 - DNA, 567 bp, Glycine max
gacggttgattttcggaaaggggcatgcggcgctggactaccattcagacgagagaagaaaaaagattaggaaatttaaggaatcagcttggaaatgtgtttattatctttcagctgagattcttgctttgtctgtaacatacgatgaaccatggtttacaaatactagaaacttttgggtgggcccagggacccaggtctggccagatcaaaagatcaagttgaaattgaaggcagtctatatgtacgctgctggattttactcatactccatttttgctttgatattttgggaaacgaggcgctccgactttggagtgtccatgagtcatcatgttgctactgtaattctcattgttctgtcttacattttcaggtttgcacgtgttggatcagtggttttagcacttcatgatgctagcgatgtgtttctggagatagggaaaatgtccaaatacagtggtgctgaaactatggctagctttgcttttattctatttggtttatcttggatcatattgcgtctcatttactacccattctggattctttggagtacaagctatg

SEQ ID NO: 210830 - DNA, 535 bp, Glycine max
  unsure (1)..(535): unsure at all n locations
attaagctgggcagcatcttcctggaaatgggacctcccaaggaaatggctctgccactgttgctgacattttcatctcccagaatgtggtcagcttgagcaggtccgggattgagaatttggcgaaattagagaaccgaaaagaacactggcttgttgtgctctatgcaccatggtgccgcttctgtcaggctatggaggagtcgtatgttgatctggcagagaagttagcaaggtcaggagtgaaggttgcaaaattcagagccgatggacagcagaaggaatatgcatagagtgaactgcagttgggaagcttccccacaatacttctctttcccaagcactcttctcaaccaattaagtacccttcagaaaagagagatgttgattcattgacggcattcgtgaatgccttacggtgatggtcaattgagtatcttgctcaatgttccgtcgtaccataccggcgataaatttcttcacagattcgggcaattcactgaaaatgggaatggcagtntttgatagcaaaacg

SEQ ID NO: 210831 - DNA, 577 bp, Glycine max
ggcaaaatctaaaaaagtagattatgatagtgaagaaacaacataatacaaccataactctactcatctaacaaaacaggaaatcacatcctcctcatagaatgactactacaattatatttgtgaggaaggttatctaaatctatacagggatactgctagctgagaatcttcgttctgctatcaaaaactgccattcccattttcagtgaattgcccaaatctgtgaagaaatttattgccggcatggtacgacggaacattgagcaagatactcaattgaccatcaccgtaaggcattcacgaatgccgtcaatgaatcaacatctctcttttctgaagggtacttaattggttgagaagagtgcttggggaagagaagtattgtggggaagccttccaactgcagcacactctttgcatattccttctgctctccatcggctctgaattttgcaaccttcactcctgaccttgctaacttgtctgccagatcaacatacgactgcatcatagcctgacagaagcggcaccatggtgcatagagcacaacaggccagtgtccttttcggtctct

SEQ ID NO: 210832 - DNA, 374 bp, Glycine max
gggcccttttttttgtattcaccagtctctgcttcgggctcgggatctgtgcgcatccatatcaggcgccacacatgttctcgccatgccgatctactttgaggcacgatgagcttgaggatatgctggcttggctctagagccatactcactgtgcatggcatcccatttgaccggcatgacgccaagattgctttgtttcgtacatctatacgccgcttgaacgggaggctgcctagactttctctctcggccatgtggaccactgcacattgtctggcgcctgcaaaggatgtgtgacaggactcagctctcgagctcgagcgatagagacgcacgcctgtacgatatgacaggaaccttgcggagaacgt

SEQ ID NO: 210833 - DNA, 500 bp, Glycine max
gaattcaacatcattctgtgattcaataaaattagtttacgaacccttgtaaacaaagtactcatcttagtatgcaacaattttgatctctaaggaacttattttgttttgtaaattattcttcctagaatcctatatataattttacaattgagtttcacccctctgtagtatctatatatcccccaaataataaagaaattctaaaaacactagctgaatatataaccaagggatgaagaaaaggatcaatttgtatggggccttcaccttcatttggtgagagctgcatataggagctggttccaagtgtccggtaatcctggtaggcaccagtggctgcagtcattgcctgcatggtccccactataagcagaagggtgagcatcctttcttaattgtgagaggagtgttatattaagtagataaactggagtaatcattttccttacacattgttcaattggtagttgctggaggtagacctgctgatatgttga

SEQ ID NO: 210834 - DNA, 560 bp, Glycine max
  unsure (1)..(560): unsure at all n locations
gtcgccgtctccgtcggcgccaacatctccggcggccacgtcaaccccgccgtcaccttcggcgccttcgtcggcggcaacatcaccttcctccgcgcatcgtctacgtcatcgcccgctcctgggtcatcgcgcctccctctcctggccttcgtcaccgcctccactgttccagcattcggactctccgctggagttggagttggcaacgccttggtgttggagatcgtgatgaccttcggtctggtgtacacggtctacgcaactgccattgaccccaagaagggtaatttgggaattattgctcccatcgccattggtttcattgtcggcgctaacattttgttgggtggggccttctctggagcggccatgaaccccgctgtgacatttgggcctgctgtcgtgagctggacctggaccaaccactggatctactgggccgggcctctcatcggtggtggaatcgctggccttgtttacgaggttgtctttatcagccacacccacgagcagcttccaccactgactactagagggggggaaatganaaataaaaa

SEQ ID NO: 210835 - DNA, 498 bp, Glycine max
gacccgaataatgatactacattcaattcaattgttgtggaccaagtgagagagagagagcatgcacaaaatgataataatttaactttaaagagaacttcatgatcatcaaccatccaaggatttaagactaaaggaacaagtacaaccctcgaaagtgaattaggaagaaaacacatggaaggaaaaccatacacagaagaagattccagagaaattcaataatacacaatttttttttttttattttcatttccccccctctagtagtcagtggtgggaagctgctcgtgggtgtggctgataaagacaacctcgtaaacaaggccagcgattccaccaccgatgagaggcccggcccagtagatccagtggttggtccaggtccagctcacgacagcaggcccaaatgtcacagcggggttcatggccgctccagaaaagccccacccaacataatgttagcgcccgacatgaaaccaatggcgattggaagca

SEQ ID NO: 210836 - DNA, 606 bp, Glycine max
  unsure (1)..(606): unsure at all n locations
gtcgccgtctccgtcggcgccaacatctccggcggccacgtcaaccccgccgtcaccttcggcgccttcgtcggcggcaacatcaccttcctccgcggcatcgtctacgtcatcgcccagctcctcggcttcatcgtcgcctccctcctcctggccttcgtcaccgcctccactgttccagcattcggactctccgctggagttggagttggcaacgccttggtgttggagatcgtgatgaccttcggtctggtgtacacggtctacgcaactgccattgaccccaagaagggtaatttgggaattattgctcccatcgccattggtttcattgtcggcgctaacattttgttgggtggggccttctctggagcggccatgaaccccgctgtgacatttgggcctgctgtcgtgagctggacctggaccaaccactggatctactgggccgggcctctcatcggtggtggaatcgctggccttgcttacgaagttgtctttatcagccacacccacgagcagcttcccaccactgactactagagggggggatatgaaaataaaaaaanaaaatgtgtatattgaattctctggatctcttctgga

SEQ ID NO: 210837 - DNA, 531 bp, Glycine max
gacccgaataatgatactacattcaattcaattgttgtggaccaagtgagagagagagagcatgcacaaaatgataataatttaactttaaagagaacttcatgatcatcaaccatccaaggatttaagacgaaaggaacaagtacaaccctcgaaagtgaattaggaagaaaacacaaggaaggaaaaccatacacagaagaagattccagagaaattcaataatacacaatttttttttttttattttcatttccccccctctagtagtcagtggtgggaagctgctcgtgggtgtggctgataaagacaacctcgtaaacaaggccagcgattccaccaccgatgagaggcccggcccagtagatccagtggttggtccaagtccagctcacgacagcaggcccaaatgtcacagcggggttcatggccgctccagagaaggccccacccaacaaaatgttagcgccgacaatgaaaccaatggcgatgggagcaataattcccaaattaccctttcttggggtcaat

SEQ ID NO: 210838 - DNA, 452 bp, Glycine max
ggccacagtgtgcttcccaagagcacaaatgatgcaaggctcaaggaaaactttgatctctttgattggtccatacctgcagatttgcttgccaacttctctgacattaagcaggagagaatagttactggagatggttttttagcaagacatctcccgggtacaaaacaattgaagaactctgggatgagtaatggacagtttccatattggccacatccccccctcttgcttaatgcaaaaatgagcctatctttatgattattgtaataatctacgatgtgtttataattttggacttgagatgtgtcaagggagatttcgagtttacattaataacgtgtcattttggaattcagttgtttgagtcttgaccttattgtgtgtttgacaaaactattgttagaagtctaatatcgtttagatcggaaaatgttagttattaatatgtt

SEQ ID NO: 210839 - DNA, 453 bp, Glycine max
aacatattaataactaacattttccgatctaaacgatattagacttctaacaatagttttgtcaaacacacaataaggtcaagactcaaacaactgaattccaaaatgacacgttattaatgtaaactcgaaatctcccttgacacatctcaagtccaaaattataaacacatcgtagattattacaataatcataaagataggctcatttttgcattaagcaagagggggggatgtggccaatatggaaactgtccattactcatcccagagttcttcaattgttttgtacccgggagatgtcttgctaaaaaaaccatctccagtaactattctctcctgcttaatgtcagagaagttggcaagcaaatctgcaggtatggaccaatcaaagagatcaaagttttccttgagccttgcatcatttgtgctcttgggaagcacactgtggcc

SEQ ID NO: 210840 - DNA, 572 bp, Glycine max
  unsure (1)..(572): unsure at all n locations
aggcacttagcactacttcaatatcttatctcaagtcttcacttgttcttgacaagtctgagtgggtgaagggacaaacacttcgccaaccttctgctgcatcagttgtgagatgcaaccccaccaccccatcaggcctcacaatcagagctggttcctatgctgatgagctcgttaagaccgcgaaaacagtggcttcaccagggaggggtattttggccatggatgagtccaatgctacctgtgggaagcgtttggcttcaattgggctagagaacactgaagctaaccgccaggcgtaccgtaccctccttgtgacagttccaggacttggtcagtacatctctggtgccattctctttgaggaaactctctaccaatccacaactgatggcaggaagattgttgacgtgctcctcgagcaaaacattgttcccggtattaaagtcgacaagggtttggtaccccttgctggttccaacgatgagtcatggtgccaagggtctgatggtcttgcctctcgcttcgctgcatactanccagcaggtgcccgtttcgccaaatggcgtact

SEQ ID NO: 210841 - DNA, 606 bp, Glycine max
aagtacacaattcacagcaaaaaggtttataagctgtaaaggtacatgtaaccataaacaaaaatagtctccaagactataaaaacattacattttagacaaattagtcttcttccacttgatcctccgtcaacacctactacaactgctggtgttgctgctgcctaacatgtatcatattcactacaaacatcttagtaggagtagcctttgacgaacaactccttcttggcttcctcagattcaccctcaccggtgtacttcccaagctgggcgagcgagttggacttggcacggaaaagaagtgcatcttgtgccgccttcacattctctgggcggcctccccatgtcttcaaggcagtgttttggagggctctggcatacgagaacgacacgtgccacgggtttggagattggttcatggcattcaagttgaaggtagcttcaacctcagactgtccaccagacaaaaacataattccagggacagcagggggaattctcctgtgaaggagcttgacggtgtaatcagcaactgtctgaggactggccttgtccttgactcagctcaggtgtaccatgctggcttaagaagataccctcaaa

SEQ ID NO: 210842 - DNA, 587 bp, Glycine max
gtttacacactgacacactccttcatccaactccaacagaacaagaaaacatagtacacaccacacagtgaaaaagagagaaactccatcttctttctttctttctcactcaccacagaacacaaaaaaacatttccaaatttcaggtttgggaaatgcacgaaacacattccatcggcggcggcaggttctacggcggcggcgaccggaggctgaggccgcaccaccagcagcagcagccgccgccgctaaagtgcccacgttgtgactcactcaacaccaagttctgttactacaacaactacaacctttcccagccgcgccatttctgcaagaactgccgccgctactggaccaagggtggcgtcctccgcaacgtccccgtcggtggcggttgccggaaatctaaacgctccaacaaacccaaaacaaccaccaccaccaccaccagcaacactaataacaaccgttcttctttctcggcaaccgcaccggccaccgcaccaacgccaccggcaccagagctggagcatcattctcattctcactccagcagtgaaagctccactttaaccgtgaccgcgacg

SEQ ID NO: 210843 - DNA, 575 bp, Glycine max
ttttcaattttaatttcctctcaaaccctaaccctaaccctaaccctccccgtcacaaaagaaaaccctctttgtccgatcatcgtcgtcaagatgttggaactccgtctcgtgcaaggctccctcctgaagaaaggttttggaatccgtcaaggagctcgtgaacgacgcgaacttcgactgctcctccaccgggttctccctccaggccatggactccagccacgtcgccctcgtcgctctcctcctccgatccgagggcttcgagcactaccgctgcgaccgcaacatctccatgggcatgaacctcaacaacatggccaagatgcttaagtgtgctggtaatgacgacatcatcaccatcaaggccgacgacggcagcgacactgtcactttcatgttcgaaagccctacacaagacaagatttctgattttgaaatgaagctgatggacattgatagtgaacaccttgggattccggaggcagagtatcatgctattgttaagatgccatcctctgagtttgctaggatctgcaaggatctcagtagtattggtgacactgttgtcattt

SEQ ID NO: 210844 - DNA, 539 bp, Glycine max
cgaattgttcttaacaatcaaatcgagggaaaataaggtggtaggtaaccaatacacatctaagaaatccacaaaatgtgaattcattgctcacacggttaaaatatcttcaacagaagatgtatgacgaaagctacaagttcaaagacattaaaatcctaatatcctaacccaaccatctaataggtagattaaacttgaggtttcgtatcttcttcatcctcttctatcttgggagccaaatagaaccgcacataacccatctcagcaatcttgtactcaacaacaactggcaactcatttgaaagactaatggtaactgtgttagacaatggcgttgcctttgtaaaagagttcatatatcgcaaagcaaatgtcaaggacacgggctcattcatctcaatgacagttgcttcttcaggcttgtccacagaagtattctgcctacaaactatattggcagttccaatatctcctttggtggaaaacttcacaccctccttagtaaccgaaatgacaacagtgtcaccaatactact

SEQ ID NO: 210845 - DNA, 360 bp, Glycine max
gaacgggaagaggagagagaaacgataaagaagaggggatctcacatcacatggtctgcttgcccttggggcgccaccaccaccaccacaaaccggcggcggcggctatacatccgtcccaaccgccgcagactcagccgaaacccgtagttcctcgccggagctccgatgtggagaccgagctggatatgacagctactgccattgacgggaacgatgctgtcactggccacataatcttcaccacaatcggaggcaaacagggggaacctaaggagaccatcacctacatggcacaacgggtcggtggcactggatcatctggagttggtattcaggcacagcgcttggagactggag

SEQ ID NO: 210846 - DNA, 531 bp, Glycine max
ccatatgtaaatatttttagcatagaattggataacattaacatcatatttctttgaacagattctcttgtaagcatcatttcacatgatatgataaaattacaacaaaaattctgatgaacataactgggcaaaaatgaaggaatgcgctttgagcaagaaccataaccttatgtcggttattcaggggaggacattacaactgataagtacaaattgccaacccaagatgtattccaatcctttgtgactatagctcttctatctccaattcaaatttttaactcttctgatcagggtggaatgggcgtataaatgcagaattcatttgccaaacttttagtgaggctgtcacagtggcctcggtagcattgttgaacaagaacaacctatcagctccatagattgcctttgttggataaacccgagatgtcacaaccgtccttccaccttgagcaaagctttcaacaatagaatggtccaccagtatccgcaaggaaaacttttcgcctttaagaactggaacagcgc

SEQ ID NO: 210847 - DNA, 330 bp, Glycine max
ttatttttttttcattttttttttttttttttttaacttatttattctaaacaacttgaattgtttttatcataatgacacagaagtccccaaaaaaaaataaagacaataaaaatagactacaacagtcaaatacacatcattcgaaaacaaagaccaaacaacaaaaacatactgaccctacctaaagccagaatggcaaacaggacaaaactaacaacaagacaaacagagcaagaaaaaaacaaaaacctaaaaccccaacaagaacgactatcaatacaaaaaaaaaaaacagccaatcaaacatcataaacaaagggaataaat

SEQ ID NO: 210848 - DNA, 586 bp, Glycine max
  unsure (1)..(586): unsure at all n locations
aaaaaatgacactaactggtcattcagtcagataaaacttgtccttccaaaatattcaaattaaatactataaccttcatgccacatcctatgtctatggctaaagttttaatagttttaagtcagtcactgctgtttttatgccaaaacaaattaacagaagaacaagcagcatttacacatttccaacagcaagaggcattttgactttggccttaggtgtttgctaattttatttatgtagccatctaaaatactgagatcttaggtcaaagcatccatccaggaataaatccattgacttgttgagcttgagttgtggcagctagctgctgctctgaggcttcagggatgtacctgtagtcagaacctatctgcaatgtggggttgcactccaaaggctggaagaagccttgagagtgagcattttgggttccatatggcatactttgctcaccagcttcccatgtttgcctatactggtttcttgaattgatttcttccagcttcatggtcaaagatctgtttgctttcaccaacatatgnctccttatctgaagatcagctaactggntcagcatgaact

SEQ ID NO: 210849 - DNA, 592 bp, Glycine max
ataagttcaagaaagctcaattcatgtggtaaaaaatggcgcatggaattagctcttcacaaaaaggccaaatcaatgtacaaaccataatcaatcaatagacagaactaaaagttcccttcccacactctccaactgagatttggagtatttctttgccagcttggctttgtcggcaacagagacgtcgtggaacctgatgccaattcttgctcaaaggttgcactgctacccggatctctcccacattgcgcagaggggggaggagaggaaagcataaaattctctttttgaaatcatctttatctctaccccgaacatatgaaccccaagaagcattaccctctcttccagtatctttcaagaagaatcgagtgggccctttacaaacagatttgtatggttccctggcatcgaaatcaaattcatttgtttgactaataccattccaagcagagtaagttctttcagagcgctccagttctcgaggaaaaacaatgttaggcaggacttgtacgacataacccagtgacaccgaatatgttagatgccgtgcatggtcgtaacatattgaacgctgcaaaaagctttg

SEQ ID NO: 210850 - DNA, 568 bp, Glycine max
agaaaaaggggttagggtttgttcttgtgatcgaagctaagcgaagcaaaatgggtggatcagtgagggacgtgaagtcgaagggcgaggtcgacgaggtggtggcgagtggctctccggttatcctccacttctgggcgtcgtggtgcgaagcttccaagcacatggaccaactcttctctcacctttccactgatttccccaacgcccgcttcttaagggtcgaggccgaagagcaacccgagatttctgaggcttactccgtctccgctgttcctttctttgccttctgcaaggatgggaagacctttgatacattggagggagctgatccgtcaagcttagccaataaggttgctaaagtagcaggctcaattaaccctggagaatctgcatctcctgccagtcttgggatggctgcaggggcttctgttcttgatacggtgaaagaattagcaaaagacaatgattcttcaaggagaaaaatcaagttcaaccagggcttagtggtcctctgaaaaagagaattcagcagctttgtgactctaatcctgtcatgcctttcatg

SEQ ID NO: 210851 - DNA, 436 bp, Glycine max
ccaccaaataattatgtaatatataacaatttctaatctgatgggaattcatgcatgttcagtataccattagttgaggctccacactaacattttaaaaatcactgacgggggcttataaaaaacccatgtagttaatgaggggcataaaacacaaccttcaaaaatggcttctaggacataacccatgttatttgagggaataataataatcctactcagataaagtggactttggctccccattatttcgcaggtcccttacaatatcatgaccaccaatcagctcacttttgaaggaaagttgaggataggttggccaattgggggatcccttaaatcccggtgtcactttctaataggccaatttatcaatggacccaaaattcaagcccttttgtcgaagggcatcagcaactttggaactaaaaccaca

SEQ ID NO: 210852 - DNA, 578 bp, Glycine max
  unsure (1)..(578): unsure at all n locations
attcttcaagattcaggtactgcgtttcggaagcagacacagatggctcgtacgaagcaaaccgctcgtaagtccacaggaggaaaggctcctaggaagcagcttgcaaccaaggctgcacgtaagtctgcaccaactactggtggtgtgaagaagccccaccgttatcgtcctggtaccgttgctcttcgtgagattaggaaataccagaagagtaccgagcttttgatccggaagctccccttccagaggctggttcgtgaaattgctcaggacttcaagactgatctgcgtttccagagccacgccgtgcttgcattgcaagaagctgctgaggcataccttgttgggctctttgaggacactaacctgtgtgccattcacgccaagcgtgtaaccattatgcccaaggatattcagctggcaagaaggattcgtggtgagcgtgcttgagttggtggttggaaagatgaagatgattggtggctgcggttggtgtttttgtttttcagattcctttttttattcaatagatggngttgttagggagggtaggttttctgctggtagtagcatta

SEQ ID NO: 210853 - DNA, 398 bp, Glycine max
ggtgtgttgtgtggtttggtttggtttttcacttttcttcatctttttgcgagaagacacacacacagagagagatggctcccacgaggattggggcacagaacaacccgcttacaaagagcgtgtgcactctgagcaccgcatcacggtcgtgtccaatgatcgataatcttttgcgagcacgcatgaacgtggcgcgcttcaacttatgccatgggtcccacgagtaccaccggcatgccctcgacatcctgcgggccgtcgtggagaacaccgtgattctctgcgccgtcatgctcgacaccaaggcgcctgagattctgaactggtttactcaaggacggaagagcctatccaactgatacatggtgatgaaataaccatcccactgactatga

SEQ ID NO: 210854 - DNA, 461 bp, Glycine max
tctgtttccaattcaagctcttcagctgtagtcatcggagacgggtcagatgaagagtacgaggaggaagaagaagatgaagaaggtgttggtgttggtggtggaagaagtgtgatgaaacatagcggcgagattttcgggttctctgtgacccaaaatgaagaagagtgcatggacagtgaccatccacctgtgactagacaattttttccggtggaagatgctgacgtggcggttgcaaccggtggtggctggtaccggcgtaagctcaacgttccctcgtgctcactgggtaagtgtgaaattttgccaatcagaaacacttggcaccggataatcatcagcggaagtttctcagcctatgaagaagagtcgccgaggaccgctgtcaatgagctctcagtatagaggagtcaccttctacagaagaacgggtcgcttggagtctcatatatgggatt

SEQ ID NO: 210855 - DNA, 548 bp, Glycine max
tctgtttccaattcaagctcttcagcagtagtcatcggagacgggtcagaagaagagtacgaggaggaagaagaagatgaagaaggtgttggtgttggtggtggaagaagtatgaagaaacgtagcagcaagattttcgggttctctgtgacccaaaatgaagaagagtccatggacagtgaccatccacctgtgactagacaattttttccggtggaagatgctgacgtggcggttgcaaccggtggtggtggaaccggtgtaagctcaacgttccctcgtgctcactgggtaggtgtgaaattttgccaatcagaaacacttggcaccggaaaatcatcagtggaagtttctcagcctatgaagaagagtcgccgaggaccgaggtcaaggagctctcagtatagaggagtcaccttctacagaagaacgggtcgctgggagtctcatatatgggattgtggaaaacaagtgtatctaggtggatttgacacagcacatgcggctgctcgtgcatatgatagagcggctattaaattccgaggagt

SEQ ID NO: 210856 - DNA, 582 bp, Glycine max
  unsure (1)..(582): unsure at all n locations
gcaagaatggcacttcgttgcttggtgatgtccctttctgttctcttcactcttggtcttgcgagagaaagccatgccagagacgaagatttttggcatgctgtttggccaaacactcccattccaagttcattgcgagatcttctaaagcctggccctgcaagtgttgaaatcgatgatcaccctatgcaaattgaagaaacacagtacccgaaaaccttcttctataaagaagaccttcatccaggcaaaacaatgaaagtacaattcagcaagcctccctttcaacaaccatggggtgttggtacatggttaaaggaaattaaagacactactaaagaaggatatagttttgaagagctatgcatcaagaaagaagccattgagggagaagagaagttttgtgcaaaatccttgggaacagtaattggttttgccatttcaaagctgggaaagaacattcaagtactttcaagttcctttgtcaataagcaagaccaatacactgtggaaggagtgcagaatcttggagacanagcagtgatgtgtcataggctaaatttcagaactgcaagtatttac

SEQ ID NO: 210857 - DNA, 507 bp, Glycine max
aggcacgagataaccactttttaccatatatatatagagagagagaatacgaagcacactgatcacaggatgatgctctctttaagtagggaagcagatcttatcagtacacataggtaggttgaaattctagctctagcaatctagctagagaaggtagtacttgcacaacacacagcacatgataatttattttatacacaatctcattctcatggtgctcaagatgcatggactaattaagcaacaatgttggtctgataggcagtgtccacagataaattgggtacccataaaatggccttgcttccaaggaaatggcaaacagggttagttccaggatcaactcccataagatgatgaagcatttgatgattcattccagacgtatttgagtggcaaatagcaagtgcctgagttttggttccatcaccagccaccaatggaaccatgaaagctgttgtttcacggacttcatggcagtaaatactgcagttctgaatttag

SEQ ID NO: 210858 - DNA, 467 bp, Glycine max
gttttcctcttctgaatccaccgccactgcagcgtggacggaatcggagtgcagccatatcagcagcagcagaagtccttgaagtgctgctctagtttgaggcacaatgagattggagaaatgctggttttgctcttcaaccatataccctggacatggaatccagtttgttcgtaatgatgcaaagatttttcggttttgtagatctaaatgccacaggaactttaaaatgaagagaaatcctcgtaaggtaaaatggaccaaggcatatcgtcgagtgcatggaaaggatatgacacaggactcaacttttgagtttgagagaaagagaaacaggcctgaaagatatgacaggaatcttgcggagaatgtcctcaaggccattcctaagattgataagatcaagcctccggggggaagagagacaccttttgaacaggatgaaaggcaaagaggaaaaattgctg

SEQ ID NO: 210859 - DNA, 559 bp, Glycine max
ataatagttgactatctcagagaaccatagtttcaagagacaaatacatcaaatgtttgaaatcttgtttgagaatcacatcattcacactaatgatcacaacgaaactggtaaactggaccttacaggcaactaatttagcaacaaatattaaaatagcaaaaattaagtgcagcattgttagaattactcttccatggcatgattctcctctgattgctgttgggaaaccttgactttgatctttggtaaagtgagagatggatcctgttgaagcacagaaggagctttgaccaaactgatgccctgctccaactccttcactgcctccttcagcaatttttcctttttgcctttcatcctgttcttatggtgtctctcctccctcgagactctgatcttatcaatcttaggaatggccttgaggacattctccgcaagattcctgtcatatctttcaggcctgtttctctttctctcaaactcaaaagttgagtcctgtgtcatatcctttccatgcactcgacgatatgccttggtccattttaccttacgagga

SEQ ID NO: 210860 - DNA, 498 bp, Glycine max
gcttcttgtaactggtccctttaagatcaatggggttcctctcagaagggtgaaccaatcgtatgtcattggtacatccacaaaggtggacatctctggtgttaatgttgataaatttgatgacaagtactttgccaaggaagccaagaaaaagaaaacaaagggcgaaggcgagttcttcgaggcagagaaggaggagaaaaatgtgcttccccaagaaaagaaagatgaccaaaaaaccgtggacactactctgttaaaggccattgagaatgttccagacctcaagtcttacttgggtgctaggttttctttgaaggccggagtgaagccccatgagctagtcttctagagtgctaaattcattttcttcattctgtttttgtcgaagcttggtcccaatagttgcactgttttttcatcatgataatgaacattgttcaagaagttcttattccagttgtggttctaagtattttatacttctatagttctact

SEQ ID NO: 210861 - DNA, 497 bp, Glycine max
agtagaactatagaagtataaaattactagaaccaaaactggaataaaaaactcttgaacaatgttcattatcatgatgaaaaaacagtacaactattgggaccaagcttcgacaaaaacagaatgaagaaaataaatttagcactctagaagactagctcatggggcttcactccggccttcaaagaaaacctagcacccaagtaagacttgaggtctggaacattctcaatggcctttaacagagtagtgtccacggttttttggacatctttcttttcttggggaagcacatttttctcctccttctctgcctcgaagaactcgccttcgacctatgatttctttttcttggcttccttggcaaagtacttgtcatcaaatttatcaacattaacaccagagatgtccacctttgtggatgtaccaatgacatacgattggttacccttctgagaggaaccccattgatcttaaagggaccagttacaagaagc

SEQ ID NO: 210862 - DNA, 450 bp, Glycine max
gctttttgtaactggagccttgaagatcaatggggttcctttctgaagggtgagccaataacctgtcattggtacatacacagaggtggacatctttggcgttaatgttgataaattagatgacaagttctctgccatggtagccaagaaaatgaaaacaaagggcgaaggcgaggtcttcaaggtatataaggaggagaaaaatgtgcttccccaagaaaagagagaagaccaaaaaaccgcggtcactactatgttaaaggccattgacaatgttccacacctgaagtgttacttgggagctacgctgtgtttgatggccggaatgaaggccgatgatctagtcttgtagagcgctgaagagattatcttcattctggttcagtcgaagcttggctccaatagtggtactgatttttcatcatgataatgaacattgtttagagagtt

SEQ ID NO: 210863 - DNA, 498 bp, Glycine max
attatatctattgaagtataaaattactagaaccaaaactggaataaaaaactcttgaacaatgttcattatcatgatgaaaaaacagtacaactattgggaccaagcttctacaaaaacagaatgaagaaaataaatttagcactctagaagactagctcatggggcttcactccggccttcaaagaaaacctagcacccaagtaagacttgaggtctggaacattctcaatggcctttaacagagtagtgtccacggttttttggtcatctttcttttcttggggaagcacatttttctcctccttctctgcctcgaagaactcgccttcgccctttgttttctttttcttggcttccttggcaaagtacttgtcatcaaatttatcaacattaacaccagagatgtccacctttgcggatgtaccaatgacatacgattggttcacccttctgagaggaaccccattgatcttaaagggacccagttcaagatgc

SEQ ID NO: 210864 - DNA, 440 bp, Glycine max
gcgaacatctgaagtcatggtccttttttgattgcttacacactatcatcatcatgggaagtcatttgaaaatacacttatcacataatttttgggtctgcacaggattaaaccttcaagtggtcaaaatatttctctttacttttttgagaaatacattctgcacaggactgaaagttccatcggaggctcgatttaaaatgttttttccttggttgatcatcagacaagatataaactgatgagagtactacgctcatggaattggcatctgatctacagcttctacctgcatccatcttggagagagtgtttactagaggacatagtattacacagcatattgttggaagcacatcacatgatggattacagtcttcttctacgtgttcactatagaactgcccagcatttacgttctaacgtttgatacaaccaat

SEQ ID NO: 210865 - DNA, 507 bp, Glycine max
gaagatatattatggcattctctatcttcaaacatgttctgtcgttattccttctttgcattatcttgcaggaacctaccaatgcccttagaaagacctacattgtgtacatgggaggacattctcatggtccagaccctatgcctagtgatctggaaacagccacaaattcccatcatgatttactcgcttcttacttaggaagtcacgagaaggccaaggaagcaattatatactcgtacaataagtacatcaatggctttgctgccctacttgaagaggaagaagcatcacagattgcacaaaatccaaatgtagtttctatgatcttgagcaaagagcgcacattgttcactaccaggtcatgggattttcttggactggaaaaaaatggaaaagtcactgcaaactccgcttggaggaaagcaagatatggagaaaatataatcattgctaatattgatcaagggtttggcccgaacaccccaggttcagcgacataggata

SEQ ID NO: 210866 - DNA, 554 bp, Glycine max
cttttgccaaaaaatacagacctagaccaaaggtctagcaatggcgtcaggacacatggaagctctggttgggtatccgggcaagctcacccttagggtggtcctaacatgtgtcatggcagccactggtggattaatttttggttatgatcatggggtttcaggtggagttacctccatggattctttcttgaaggaattctttccttctgtctatgaacaagagtctaccatgaaagcttcaacagatagttactgcaaattcaacagtcagatattgactttattcatttcatctttgtatctaactgctcttgtggctggtctagtggcatccagcataacacgattgatggggaaggcgtgcaactatgattataggtggcatattctttgtgttaggtgcattactcaatggattagctacaggtttatggatgcttattgttgggagaatgttgcttggttttggtattggatgtgccaatcagtcggtaccaatctatgtctcagagatggccccctataagtacagaggaagtctcaacatatgc

SEQ ID NO: 210867 - DNA, 365 bp, Glycine max
ggcggagctgcccgatgggtataaacatattaatgcctggaggatgtgaaactgacacggatctccttagtgacggtgatcgaaccgggaaaagcgtaccatgagaacgctctgtcctgcgagttcgaaatgtagtctggagaagctttgtaagcgctggaccacacccaagtggtgtgggaggtcgcgccgtacagggtgagagaccagttgtgctcggaccttgtcgtatcactaggggctgcaagcgactcgagttgtttgtgattgcagtcccaataagccgttcaattacagacaaggctgaatactgacgagagaccggtcgcgaacaagtgccgcgagggcaaagatgaaaaggactc

SEQ ID NO: 210868 - DNA, 498 bp, Glycine max
  unsure (1)..(498): unsure at all n locations
ccagaaaagaggctgtacccaggtggcagttacttcgacccactgggcctggcctcagatccagagaagaaagccacccttcaattggcggagatcaagcacgcccgtctcgccatggtgggcttcttgggctttgcagtccaagctgccgccactggcaagggcccgctcaacaactgggccacccacttgagtgacccactccacacaaccatcattgacaccttctcatcctcctcttaagaagaagcaaaagaagaagaatagtctttcttgtgcctggtcattctagttatattgtaaaagtctgtttcttcttcttcggctttgggttgtaattaaacattttctacatagctggattagtagtacttgtgaaaaacttgtaacgtgaaattggagaggctaagcagaaatgcttctgcttgatgttaagtgttctcctgtgaatgttaactatgcacgaaatcgatagggatgacgacggtanagaatact

SEQ ID NO: 210869 - DNA, 493 bp, Glycine max
  unsure (1)..(493): unsure at all n locations
ctctactctcttattctcaacgtcaaacccaaaaccccttcttcttcttcttctctcgcgccgcaataataatactaaaacatgtccaactctgatggagccactaacgccgtccctcccaacgacgccaacaacaacacaatcgttgagtaccagcagcgaaccaccaccaccaccaccgccgacgccgccgccctcgccgtcaagaaaccgccttgcaaggaccgccacagcaaggtcgacggccgcgggcgccgcattggcatgccgatcatctgcgccgcccgcgtcttccagctcacgcgcgagctcggccacaagtccgacggccagaccatcgagtggctcctccgccaggcggaaccctccatcatcgccgctaccggctccggcaccactccggcgagcttctccactgtctccacaaangcgcccctncctncctccccctacccncttcatcctcggcaaaacgcatcgacctgacgacgac

SEQ ID NO: 210870 - DNA, 371 bp, Glycine max
aaaagaatcgcattttctttgtgtaagttatgtatcttccaagtgccacaccagcttcactacttaagtacagaagagaagaattggaggttgtaagaggagatgggacagggtatacagaggactatgacagaatctatgattatgatgactataatgagttgagcaatccagatggtggtgatcctagcgcaatccttggtgggtgtagcagatatctataccctcgcagggttagaacaggaagagatgggagctggactgataccaacagtgagaaaccagtcgatgcttatgtaccgagagatgaagatcttgatcacttgaagtcatatgatgcccttacatacgggctcagatccttatctcac

SEQ ID NO: 210871 - DNA, 533 bp, Glycine max
  unsure (1)..(533): unsure at all n locations
tctaccaccacctagtatctctctaactttgagaaagtgtgtgttgtgtgttctcttctctcactaaaaaaggtttcattaattctatattatggctcagaccacagcgaatcacacagtgaccgtatctgggtgggcagctcatgattcttcgggcaagattaccccctacactttcaaaagaagggagaatggtgtgaacgatgtgacaataaagatactgtattgtgggatctgccacacggacctccactatgcaaaaaatgaatggggcattactatgtatcctgtagtacccggacacgagatcattggnggtggtaactaaggtggggagagacgtgaaggggttcaaggaaggagacagagtgnntgtgnnggtgtttggcggcttcatgtttgnaatgtgagcactgncagaccgatcagganaattactgtgaaaagttgcaatttgtctacacggagtattctgggatggcagcatcacctatggnggctactctcaaattttgtcgcagattacagatatg

SEQ ID NO: 210872 - DNA, 298 bp, Glycine max
gtaaaagggtagtcatgaaatggattgtgattgcaatgataggcccaatgtgaggtatgatcgtggcattagtgcaatcctttatcgggaattctttttacatgttgacattggggcatttcttttattgagcccctgaaagaaaacaaggacactaagaaggtcattgcctgtgatttgtacatttttttaaaaaaaaaatattcctcccaaaaaaaaaaaaaaaaaaaaaaaaaaaaaaaaaaaaaaaaaaaaaaaaaaaaaaaaaaaaaaaaaaaaaaaaaaaaaaaaataaaaa

SEQ ID NO: 210873 - DNA, 588 bp, Glycine max
ctcgagccgaatcggctcgaggggatgtttgactgcttacacatgtgctcagatgcgcatgaatgcgtttagtagaaaatgtcctgttaggtagtcatcagcaactgtcttctctgggttccatgccctcgttggcatgcaccataggatgccgagtaaatgctgatgcagataattgcagtttctcagtattctctcaatctcttgaagaaaatggtgtggtcttgcctctatgcatctgcttaccttctgtgggcctcctgtgtgataataatttctttctttagtacccaattgctttgtccggcctagggcagcacaaaatgctgcagatgaagcaaaagctagtttaggacacattgatggggatcatctcacgctcttgaatgtataccatgcctacaagcaaaataggcattgaaatcagcggacagtgttagacaacaacttgtgcgaatcatggctcggtttaacttgaagttatgcatcactgatttcaatagccgtgactactatgtcaacattagaaaggcaatgctggcaggatatttcatgcaggtggcccatctggagcggacaggacattta

SEQ ID NO: 210874 - DNA, 520 bp, Glycine max
gggaacactccatgtccaccaccaaagtctcctgcacaggctacatgccccattgacacgctcaaactaggtgcttgtgtggatcttcttggtggcttggctcacattggcttgtgagaccctgttgcgaaccagtgctgccccgtgcttcaaggcctgattgagcttgaagctgcggtgtgtctttgcaccactcttaagctgaagcttctcaacctcaacatttatgtcccacttgcccttcagcttcttgtggcttgtggcaagtctcctcctcctggctacacctgctacctctaaaccagtgaaaggattgaggaaaatatggtcaaaatcgacatgagaggatgtcgagccacactatctgtcttctgtcctgattggaactgactgtgtttgctttgctattatttgaaaaaccgatcttgctgtaattgagattgttgcatgtatgttgtaatcctaggcaagtagcagcaaagatgcttctctgagacatgttcaattattaatgtatatg

SEQ ID NO: 210875 - DNA, 585 bp, Glycine max
gtgaatattaaatgttctacatcattgtcttctgctccggctatatgcgccattgacacgctcaacctctgagctagcgcggatctcttcgtagggtagactgacaccggatcgtgagaccctgctgtgaacaactgcatgctcatgctctacggcctgaaccttctcgaagctgccgggtccctgtggaccatgcttaacttgaaactcctctacctcgactttactgtcccgatgacccttcatctgattgtggatggtaacgggtctgcttcttctgacaccccctgctacgtctaagccaatgagaggattgctgaaactccggtcatggtctacatcagaggatgtatagtcgaattatgtgtcttgtggcctgactgcatctgctggtgtgcgctgacctattatgtcgaagcacagacgtgctgtcatggagattcgggatgagtgaggaaatcctaggcgtgtagcgggaacgacgcttctctgagacatgcgcaactagtaatggatatgaactgcgcgatcacatgatggattgcggagattcaagaagggaaggggacgccgagagaaaccgag

SEQ ID NO: 210876 - DNA, 546 bp, Glycine max
  unsure (1)..(546): unsure at all n locations
aaataatcgggtcgggtcgagatttggtttataaagaaacggactcagtagcgggttacggcccaattcccagcccgcagtccctacggctgctccattaacaatcaaataatcgggtcgggtcgagatttgaggttcaaacatcgtctgatattccgagaatgtaccactccagtgccgttttgcttcgtgacggtcgcgttctggttgctgggagcaaccctcacatttattacaaatttacgaatgttttgttcccaacggagttacggatggaagcgttttctccttggtatcttgagcctggattctctagcgtgcgtcccacaatagtgattcctgcgtcccaaacaaaactcaagtacggtcagacgttgaggcttcggtttgaggtgatgagcgcgactntggttggggattcgggttncggtacgatgctgtcgccgtcatttaacacgcactcgttctccatgaatcagaggatgctggtgctggagccacacgatttgagtaatggttgggaatcgacgtacgaaggtgaagtta

SEQ ID NO: 210877 - DNA, 505 bp, Glycine max
ccaccccagaaatagagagtaagcctgagatcatggaaaaagttggtgtggctgtaaatagcaaaaatcaagaatccaaagcaacttccaccattaccattaagggtttcatgagccttctaatgaaaagtgtagatgagaatggtgatggtagcaagagagttatttctctgggtatgggtgacccaactctcaccacttattttcccatctcaaatgtagctgaaaaagctgttgctgaagcacttcagtcacacaggtttcgtggctatgctcccactgcaggtcttccacaggccaggattgcaattgctgaatacctgtctcgtgaccttccttaccaattatcaagtgatgatgtttacatcacttgtggatgcacacaagccattgatgtttcagtggcgatgcttgctcgccccggtgcaaacatcattcttccaaaccaggtttcccactctatgaacttagcgcttcattagaggagttgaagtgaggcattatg

SEQ ID NO: 210878 - DNA, 515 bp, Glycine max
aatcattacaactagagataaacacctgtttacgggacttaaagttgattatgttcacgaaatgaaggaaatgcacgcaaatgagtcccttgaacttcttagttggcatgcttttagagaagcaaaaccaaaagaagacttcaatgaacttgcaagaaatgtagttgcttattgtggaggactaccactagcacttgaagaccttggtttatatttaactaataggactacaaatgagtggagaagtgcattgtcaaaactagaaacaactcccaatcctcatgttcaagagatattaaaaataagctttgatgggttaaatgatgagaaggaaaaagatatatttcttgatggtatgttgcttctttattggtaaagacatagcctatgttacggagatactaatggttgtggactacattcggactgtggaataccagtcctcatggaccgtagcctcataaagttgaaagaacacaaacttgaatgcatattttgtaccagaatgggagaga

SEQ ID NO: 210879 - DNA, 545 bp, Glycine max
ctaatatttttctcactgtcttgtctctccagagaactgtatagagagagatggcagctgcaacatctggtgctgtgttaaatgggttgggatcttccttcttgagtggaggaaacaggagccaaacccttctggccactgctattggaggcaaagttggtgctgctgctgttactgttagtcctagaagactcattgtggtagctgctgctgcaccaaagaagtcatggctccctggtgtcagaggtggtggcaacctcgtcgacccagaatggcttgatggatcgctaccaggtgactatggctttgacccactaggccttgggaaggacccagcattcctcaaatggtacagagaagctgagctgattcatgggagatgggcaatggctgcagttctaggaatctttgtgggccaggcatggagtggagttccatggtttgaagctggagctgacccaaatgcaattgctcctttctctttggtactcttctgggacccagttgattctcatggggtgggttgaaagcaagagatgggtgga

SEQ ID NO: 210880 - DNA, 546 bp, Glycine max
  unsure (1)..(546): unsure at all n locations
tcctcctacaccaacaaaaatggcaccttctccacaagaaatcatcttccgatccccactccccgatattcccatccccacacatctcccattgtactcttactgcttccaaaacttgtcaaagttccatgaccgtccatgcctcatcgacggcgacaccggcgagaccctcacctacgccgacgtcgacctcgctgctcgccgcatcgcctccggcctccacaaaatcggcatccgccagggtgacgtcatcatgctcgtcctacgcaactgcccgcagttcgccctcgccttcctcggcgccacccaccgtggcgccgtcgtcaccacagccaaccccttctacacgctcgcggagcttgcgaagcaagcgacgggcacgaaaaccaggctcgtcataacgcaatncgcgtacgttgagaaaataagagtttcgcggacagcaacagcgatgtcatggtgatgtgcattgatgatgatctttcttatgaaaacgacggcgttttgcatttctcaacgctcagtaacgccgacgaaacggagccc

SEQ ID NO: 210881 - DNA, 555 bp, Glycine max
  unsure (1)..(555): unsure at all n locations
gattgatgatttgagcgtgcatgggtgagatgataagcacgcaacgcaattaaaaagaattaatatgcaacgaatggatgtgtttgaagctggcctcatatatcaataatggatttgatctgattctggctcaacgttcatgacgatcaccacccactactccattccgggaagctctgggtatctggacatatacccagagaggaaagtctctgcctttcaaaacccttacattatgggcttcactgctgtcgctagcattggtggattgctctttggctacgacactggtgttatatctggagcccttctctatatcaaagatgattttccggaggtcaggcacagtaattttctccaggaaacaattgtcagcatggcagtggctggtgcaattgttggggcagcagcangtggttggattaatgacgtttatgggagaaagaaggcaaccctcattgcagatgttatctttactctgggagcaattgtaatggctgctgccccagatccttatanttctcataatggcccgtgtttggttgggttgggtgt

SEQ ID NO: 210882 - DNA, 500 bp, Glycine max
caggatagaaaatttgaatggagagtggtgaagactattccctgtttgagactaggaaagacaaaggaaggcacattcgaaggatctatgcaatctctttgtttgtggccatatgcttcatctgggcttacagattgagccacatacccgcatatggcaaatgggcttggcttggtttgtttgctgcagaactctggtccggtttctattggctctttggtcaagccctccgctggaacatgctgttcagaaaaaccttcatcaatagactctctgaaagatatgagaatagcttgccgagagtggacatgtttgtgttcacggcagacccaatcattgagccacccatgatggtgattaatacagtgttatctgtgatggcttatgactatccagcagagaagctcagtgtgtatctctcggatgatgcaggctcagacataactttttatgctcttttagaggcttctacctttgccaagcattgggtgccattctgc

SEQ ID NO: 210883 - DNA, 552 bp, Glycine max
  unsure (1)..(552): unsure at all n locations
gttattatgttggatttgcgagaattggaaataggttaaagcttattgaaaccgtagtttattttctaccttgctgcagttggaacaccttccagccatggttactggtgttttcaccgatgacaataacatgcagtttgaggccacaactcagtttcggaagttgctttcgattgaacgtagcccacctatcgaggaggttattcaagctggtgtagttccacgctttgttgagttcttgatgagggaagattttccacagctgcagtttgaggcagcttgggctttgacaaatatagcttctggaacttctgaaaacaccaaggtggtaattgatcatggtgctgtcccaatttttgtaaagctccttggttcacccaatgatgatgtccgtgaacaggctgtttgggcattaggaaatgttgccggagattcacccaatgccgtgatctntgtctcggtgatggagctttgcttcctctactggcacaattgaatgagcatgccaagctttctatgctaagaaatgctacctggacactatcgaatttc

SEQ ID NO: 210884 - DNA, 503 bp, Glycine max
ggtgtgaagaaaatattaattgttgattgggatgtccatcatggaaatggtactcagaaaatgttctggaatgattctcgagttttattcttttccgttcacaggcatgagtttgggagtttttatccagctaatgatgatggattttataccatgattggagaaggagcaggtgctggatataatataaatgtcccctgggagaatgggcgatgtggtgatgcagattactttgcagtgtgggaccacatcttgcttcctgttgctaaagaatttaatccagacataattatagtttctgctggatttgatgcagctgttggtgaccctctgggaggatgccgtgtcacaccatttggttattctgttctgttagagagttgatgaattttgctgaaggtaggattgtactgattttagaaggaggatataaccttgattccatcgcaaaatcaatgcatgcctgcttggaagttttgctagaggacagcctgttattggat

SEQ ID NO: 210885 - DNA, 502 bp, Glycine max
  unsure (1)..(502): unsure at all n locations
ctcgagccgtttttttttgccgttgaaaaaaatggaaaaggtggctccgcctccgattctgatgcaccggaagcgcgatctatcgtacgacatcgtttcggcgggtccgaacgagagctggaggtgggagtgggacagcgtgcgtttcgcaggaaaaccaccgccgccgccaccactgtccccaaacaacgacgtcgttttcgaggcggaaagtgtcgttcctcctctacagttaaagctcggaggaacaacaagagtgaataacaataacatcaatatcaacgttagcaacaagagagttaggtcggggtcccccggaacggngtcgtatccgatgtgccaggtggacaactgcagggaggatctgtcgaaggcgaaggactatcaccggaggccaaggtgtgcgaggctcatagcanagcctcgaaagcgcttctcgcgaatcaaatgcaaagattctgcagcagtgtagtaggtttcacccgctctcgagttcgatgag

SEQ ID NO: 210886 - DNA, 533 bp, Glycine max
  unsure (1)..(533): unsure at all n locations
ataacatagcatagagtgagaagtgagaagagaaaaatggcaatctccatacccagtagacaacttttcatagatggagagtggaaagtccctcttctcaacaatcggtttccgatcatcaaccccgctactgaagacatcatagggcatattccagccgctactaaggaagatgttgaccttgcggtggatgctgctaaaagagccttttcccataacaaaggcaaagattggtcttcagctcctggctctgttcgtgctcgctatcttcgagccatcgcttcaaagataacagagaaaaaggatgaactaggaaagcttgaagcaattgattgtggaaaaccactagatgaagcactggcagacctggatgatgttattnggttgttttaactactatgccgagcttgcagaaggattggacgcaaagcaaaatgctcctgtatcccttcctatggaaaccttcagagttatgttctcaagagcccatcggagtttgtgcttaattactccatggaactatnctctattga

SEQ ID NO: 210887 - DNA, 555 bp, Glycine max
ctcgaacccttgagagcgagaaaccacgtttctctcttgaggttaattattattattattgagtattgagcatggaggcgccatctctcaccaaacccaacgacccaacaaaaccttccaacacttccagcacccttagtctggagggggggccgggcgaagcgagcccactccgaaaaatgtttgcggtggcgtccatcgccgccggcatacagttcgggtgggctctgcagctgtctctcttaaccccctacgttcagctcttaggagtcccccacgcggcggcctccttcatctggctctgtgggcccatctcggggctggtggtgcagcccattgtgggctactacagcgaccactgcacctctcgcttcggccgaaggcgccccttcatcctcggaggcgccttagccgtcgccatcgccgtgttcctcatcggctacgcggccgacataggacactccgctggcgacgacataactaaaaaaacccgaccccgtgcagttggggtcttcgtcataggattctggatcctagacgtggccaacaacatgc

SEQ ID NO: 210888 - DNA, 592 bp, Glycine max
  unsure (1)..(592): unsure at all n locations
accttgtgatatctctctcttttaatttctaggatcaaaccaaaaaatggtcttagaagagagtgtagtgcatgatgtgaggctatcctcagttgggccgggccgggccaccgggtcggacgtattccacaacccgggtggcttggacttggccatgaagcttcactaccttagagtggtgtacttctttgatagtgaggctgcacaagacctaaccatcatgaaaattaaggatggcatgttcactttgttcaaccattacttcatcacctgtggccggttccggcgatcggattccggtcgacccttaatcaagtgcaatgattgtggagcaaggttcattgaggccaagtgcaacaaaaccctagatgagtggctagccatgaaggattggcccttgtacaagttgctcgtctctcaccaagtcattggcccagaactatctntttctcctcctgttttgttccaggtgactaaatttaagtgcggcggaatttcattgcgtcttagttgggcccacgtattgggggatccttctgtcgcttcagaattcattaactcttgggtctaatattgaaaaatatggcctaaa

SEQ ID NO: 210889 - DNA, 532 bp, Glycine max
ctcgagccgtatcggtttgagcgttcgaggggagatgcccgagagagatatcgagagagagagaaagacacttagccttgtatatctctcgatgtcctttgacgctcatgacccttgatgtgtgtgagaaatcgttcgatgtccattggttcatctgagtgtcgtaatggatatcgcacacctttcttgacgtcgaagctacgtgataccttgctatatctactactgtggctgccaagcgctctctgtacaccacatgactaataccgtctgcgctgacgccgtcatcggtctctgcgcgtcgccggtcaatagttcacgccgtatcgagtgggctcatgagacgctctcacgctgagtaacgcaagatcgagttgtactctcacggctttgacgcacgctgcaccggcgatggaatcactaggtgagggctcaatcacatgaccgtgactcaccttgacctagtcaagtgtctaaatgcagattgaccctgcttaggacaggagcttagcggctggcaccggaggaatga

SEQ ID NO: 210890 - DNA, 521 bp, Glycine max
gggaacactccatgtccaccaccaaagtctcctgcacaggctacatgccccattgacacgctcaaactaggtgcttgtgtggatcttcttggtggcttggttcacattggcttgggagaccctgttgcgaaccagtgctgccccgtgcttcaaggcctggttgagcttgaagctgcggtgtgtctttgcaccactcttaagctgaagcttctcaacctcaacatttatgtcccacttgcccttcagcttcttgtggcttgtggcaagtctcctcctcctggttacacctgctccctctaaaccagtgaaaggattgaggaaaatatggtcaaaatcgacatgagaggatgtcgagccacactatctctcttctgtcctgattggaactgctgttgcttgttttgctattatttgaaaaaccaatttgtttttaattgagattggtgcatgtatgctctaatcctaggcacgtagcagcacagatgcttctctgtgacatgttcaattatttaattatatga

SEQ ID NO: 210891 - DNA, 574 bp, Glycine max
  unsure (1)..(574): unsure at all n locations
ggcaaatatggtctctttaaggccatgctttcttttcattcttatctgcatcgcgataattaatcatgcacattccaacaatgatcggaagacttacattgtctatatgggtgatcatcctaagggcatggactccacttccataccttctcttcatacatccatggctcaaaaggttcttggcagcgacttccaacccgaagctgtacttcacagctacaaaaactttaatgcattcgtcatgaagttaacagaagaggaggcaaaaagaatggcagaaatggacaacgttatctctgttttcccaaacaagaagaatcgtcttcacacaacaaggtcgtgggacttcgtgggccttcctcagaatgtgaaaagagcaaccacagagagtgacataattgtgggagtattagacacgggagtttggccagagtctgagagcttcagtgacaaaggatttggtcctccaccaaccaaatggaaaggatcttgtcataacttcacctgcaacaacanaataattggtgcaaagtacttcaatctggaaatcactttaccaaagatgatatcatat

SEQ ID NO: 210892 - DNA, 462 bp, Glycine max
  unsure (1)..(462): unsure at all n locations
atttctcagcgcgtaaagcatggctttgttggtggagaaaaccacgagtggtcgcgagtacaaggtcaaggacctttcccaggccgacttcggccgcctcgagatcgagctggccgaggttgagatgcccggcctcatggcctgtcggaccgagttcggcccctcccagcccttcaagggggcccgcatcaccggctccctccacatgaccatccagaccgccgttctcattgagaccctcaccgcccttggcgccgaggtccgctggtgctcctgcaacatcttctccacccaggaccacgccgccgccgctattgcccgcgacagtgcncgncgtcttcgcctggaaggggtgagacccttcangagtaactggtgggtgcaccgagcgcgcctcgactggggccccggtggtggacccgactcatcgtcgagaccgtggtgacgctacccttctcatcc

SEQ ID NO: 210893 - DNA, 553 bp, Glycine max
tttattttatttctatttcaaataaaatcgtgtcttctcctctgtactgagacatggccgaagaagaagaagaagaagaatcagagctcagcgataagcagaaagtggaaatcgcgaaatggttcctcctcaattctcctcccggagaaatccaatacgttgccaaagatgtgaaatccattctcaacaacgacgatttgtacaaggaagccgcttccgaggcttttctcttttacaacaaatcgcacttgatttcccttccaatgtccaaccgaagcggagacgtactggttacttcttttggtgagcttgagggtaatgcatttcttgaacctaggactgcgcaagtagcaattgttgatcatgttaaacaagtttgtacagaggtgagacctgccacagacgaagaacttccatctccatatatcgaagaatttcgatgcaatctggatgctgaaatacttaaatatgttgaagaaacttatccaaaggtttctgctctgtctactgtgtagtgggaaggatgtagaggggcccgggtgctgatttgagc

SEQ ID NO: 210894 - DNA, 432 bp, Glycine max
ctctactctattgttatcagcgtctttcacagaaccacatcgtcttcttatggtctcgcgccgtaataataagactaacacatgtccaactatgctggaaccgctaacgccgtccttgctaacgacgtcaacaacatcacaatcgttgagtaccagcagcgaaccaccaccaccaccaccgccgacgccgtcgccctcgccgtcaagaaaccgccttccaaggaccgtcacagcaaggtcgacggccgcgggcgccgcattcgcatgccgatcatctgcgccgcccgcgtcttccagctcacgcgcgagctcggccacaagtccgacggccagaccatcgagtggctcctccgacaggcggaaccctccatcatcgacgctaccggctccgggaccactccggcgagcttctccactgtctccgaccacaag

SEQ ID NO: 210895 - DNA, 530 bp, Glycine max
  unsure (1)..(530): unsure at all n locations
tgaagcttttgcgtcaaattagatgaattgtgcaaccatggacttgtaacacaagctgcctccctcatatctaacagcagttctgggggtggtcaggcttctctcagcatgctgacatatactggaggaaattcaatcggaaatcagtccttccatggagaaaggaagaaaagcagcacgtggttctaagagaaagcgccgaagtttcaaggataaggatcactatataagttcaattccaaaaaatcaacatatggaggctggcctttcagtaaaagctaatgaagactttgcttctaatagattggaagcagctgtcctcgatctagtggcagatgatggtgctggcattcagaacaaagatctatgtatcactgggataagaagggtaaaaagtgcatcaagttaaacaatggtgatncgtgttgctgcaaatggaaagaataagacgaagagtggtgcaaaaacaaaggcaaacaagactggtatatataagaagtggaaagagcgctcacatggtaggatatcac

SEQ ID NO: 210896 - DNA, 546 bp, Glycine max
agttggcattcggctcgagcaaaatcgccctgtagactgtacactgagactggttttaaagcaacgccacttgttccagccatgcctcctcaagagacccaacaacctctgttatcggaggagcaagaagagacagcctacgattcctcggagaaggttgtggtggtcggaatcgacgagcacgacggcgacttggaggcgccgccgttctcatggcggaagctgtggctcttcaccgggcccgggtttctgatgagcatcgcttttctggatcccgggaacctcgagggggatcttcagtccggtgccattgctgggtactcgctcctgtggctcctcatgtgggccacggctatgggccttcttatccagcttctatcggctcggctcggcgtggctacggggagacacttagccgaactctgcagggaagagtatcccacatgggctaggattgttctgtggttgatgactgaggttgctcttattggcgctgacatacaagaggttattgggagcgctattgctatcaggattctcagtaac

SEQ ID NO: 210897 - DNA, 581 bp, Glycine max
  unsure (1)..(581): unsure at all n locations
ggctcgaggcattgcatcgcatttgatttttaaacgatgcgccactgctagcgcatactctgaactctcaccatatatatataatgcgccggcggtgcgcatggagataacctacgcatcccctagcttctccgacctccgcgccatgccgtcgacggcgaccgccgcgcgtcccgtcaggatcattcccctgcagcacccgaccgccacgacgtcgtcgccgcagccgaacgccgccttctcgcgctggacggcgaagctccggcgaatgacgtggctggagtggattgaattcttcctcccttgcctccgctggattcgcatctacaactggcgcgagtatttccaggttcgatctcatggccggaatcaccgtcggcgtcatgctcgttcctcagtcgatgtcgtatgcgaaattggctggacttcaaccgatatatggactctagtctggnattgtgcccctatntgtatatgccatatttgggtcttctcgccagcttgcagtatgtccagtggcattggttactctctcggtctctatgtgctggtagcatagctgatcatccactgaatataca

SEQ ID NO: 210898 - DNA, 593 bp, Glycine max
cacccttataaaaagaaactcattttaactcagactttgcatttcaccttatctatctatcttttctaacatggctgctgggactggactctttgcagagattttggatggagatgtgtacaagtactatgctgatggagaatggaagaaatctgcttctgggaaaagtgttgccatcatcaaccccactaccagaaagactcaatacaaagttcaagcttgttcacaagaggaggttaacaaggtcatggacttggcaaaatctgcccaaaagttatgggcaaagaccccactatggaaacgtgctgaacttcttcacaaggcagctgctatccttaaagagcacaaagcaccaattgcagagtgcctggtgaaagaaatagcaaagccagccaaagatgctgttacagaggttgtaagatctggggatctggtttcttatactgctgaagaaggtgtaaggattctgggagagggaaagttcttggtgtcggatagctttcctggaaatgaaaggacgaaatattgcctcacatccaagattccacttggagtgattttagccatttcaccttttaactatcccgtcaatc

SEQ ID NO: 210899 - DNA, 528 bp, Glycine max
  unsure (1)..(528): unsure at all n locations
attttgttttctaatatataataactcctctgcttcaacacactacttctcactctccctctctaatagtaatagtaatatacataagtaacataaccaatggaagcgcgtgcaggagccaatcagcgtattgcaagaatctctgctcatcttcagcctccaaatttccaggaagggagtgatgttcttcttaagagtgctgagtgcagagcaaagggtggggcacctggattcaaagttgcaattttgggggctgctgggggaattggtcaacccctttctttgctgatgaagatgaacccattggtttcagttcttcatctttatgatgttgtcaacacccctggtgtcactgctgatgttagccacatggacactggtgctgtggttcgtggctttctggggcagcaacaacttgagagtgcactcactggcatggacttggtaatcatacctgctggggtaccaaggaaacctgngatgacaagagatgatttatttaaaataaatgctggaattgtgaggacc

SEQ ID NO: 210900 - DNA, 549 bp, Glycine max
ggagggtgctagtcggggggggggcgggcttttttttttttttgttataaatattttaatattaaagaaaataagatctggaattagtacaaaaggctgatattttagtatctttctgagattattaagcagttccactgatgtcaaatccgttatcatcaagcaattacggatgacaccaaaaatatagagtactattcttaagaagaagaaaaaaatctatgaacaaagagaagcattacacatggtccttatgtataagagacaaaaactagtttttccttatcacatttattttctgatgaactctacacccttctggatgcttcctgctaactctctctttggcttttccaatccaatcctttcatactcattcaggggacccagttgataaacctcttctgctccagcacgacctagacgtaccttggatgcaaagaagggaagctccgtaacctgagaatcaacgaaagcacactccactaccccagcttatggttttaagccacggaggcatgcaccatcaaacttggcagctgcatatgc

SEQ ID NO: 210901 - DNA, 397 bp, Glycine max
ggaggccaaggagaaggaacttgccaatgggagattggctatgttggcattcttgggattcatagttcaacacaacgtgacaggcaaaggaccatttgagaacctattgcagcacctctctgacccgtggcacaacaccatcatcaatacaattcgtggctactaagtttgtatccaatgacatggataagcctgtgtccttctcgtgtaatcctgaatggatgaattttgagagtgatttgggcatgattgttatgatccgtctattttcatgtacagaggaactacgatggttttacattgttatttagactgtccatcaatcagtaatcaagcatgatactttctaaaaaaaagatgcagatgaaatggaataagagaaacgaaaaaatgaaaa

SEQ ID NO: 210902 - DNA, 536 bp, Glycine max
  unsure (1)..(536): unsure at all n locations
tgaagcttttgcgtcaaattagatgaattgtgcaaccatggacttgtaacacaagctgcctccctcatatctaacagcagttctgggggtggtcaggcttctctcagcatgctgacatatactggaggaaattcaatcggaaatcagtccttccatggagaaaggaagaaaagcagcacgtggttctaagagaaagcgccgaagtttcaaggataaggatcactatataagttcaattccaaaaaatcaacatatggaggctggcctttcagtaaaagctaatgaagactttgcttctaatagattggaagcagctgtcctcgatctagtggcagatgatggtgctggcattcagaacaaagatctatgtatcactgggataagaggggtaaaaagtgcatcaagttaacaatggtgatcgtgttgctgcaaatggaaagataaagacgagagtggtgcaaaaacaaaggcaaacaagactggtatatataagaagtggaaagagcgctcacatggtangatatcacttanaggga

SEQ ID NO: 210903 - DNA, 582 bp, Glycine max
  unsure (1)..(582): unsure at all n locations
gcaaatgcgtgcgtgccacttgatcaaatgcaatgctattccactccaccctctacacacggctcaaaacacaaccctgttactgatgccatgtcataagtgcttcctctcctttccattttcttggttacaataataccattgcagagttccttcgcacttttcagattctcacgattcaaaatcaccactcgctacgcaccgtttcgatcccgtggactcttcttcgggagcttcagagaggaacggagcagagttcgaagtgcgtgcactctagctagcgcttatagaagatgtcactttatattggtaatctgtcagaacattctcgaagagatgatctcgagcgtgttttccgtcgatttggacattgtaatgttcagctgaaaagaaatggctatggctttgtagtatttgatttccctctcgatgctgaaaaggctctgagagcactgaaaggtagaaatatatgtggtgaatcgctgacactacgtggtccagtaaacagcctagttcgcatttttctagaattcctagtggtgtcagaagaaatgcatatgagttgggacatgcgangaatgc

SEQ ID NO: 210904 - DNA, 423 bp, Glycine max
gctagctgctctgctcaccgtactccattattgcacatacagctattcctcttgcttaatgccaatctcacctacagaccccacaccctctgacttcctaccattcgtggtcgaagccaaagacaggacccgcaaggaagacaggaccggtcgtcacactcgcataagaaagaaggtcgaagggacgcccgagaggccgaggctgtgcgtgttccggtcgaacaagcatctctgatgagcaagcgattgatgacaccgcaatgcgcacgcttgctatcgtgacgacaatgcaaaagacgggtgctgacgagtgtaactactccggtggccctacagtagaagccgcaaagaggatgggcgagatcattgcataatcctgtttgcagaaagggatcacacacgtatgctttgatcgaagtggat

SEQ ID NO: 210905 - DNA, 598 bp, Glycine max
  unsure (1)..(598): unsure at all n locations
gtcatagcaacaaacaggcaactgagtgtggttcaccctatttacaaacttctgtttcctcactaccgtgacaccatgaatattaattcacttgcccggaaagccctggtcaatgcagatggtattatagagaaaacattcttgtggggtaggtactctatggaaatgtccgctgtcatttacaaggactgggttttcactgatcaagcattacctaatgatcttgtaaagagaggagttgctgttaaggacccatctgctccccatggagttcgtcttttgattgaggactatccttatgcttctgatgggctagagatatgggatgccatcaagtcctgggtgcaagaatatgtctcattctactacaagtcagatgaggaactccaaaaagaccctgaactccaagcttggtggaaagaacttgtagaggtgggtcatggtgatttgaaagatagccatggtggcaaagatgcaactcgtgaaagttggttgaagcttccgtatcctcaatggattgttcagccttcatgctgctgtaaacttgacagtatccatatgaggttaatcctaacangccactatagcagagatcatg

SEQ ID NO: 210906 - DNA, 528 bp, Glycine max
gaagaaagcagcgattgtgaagtctctgcaaaccattatggatgtcttcctgctgatagtactctttagcagcaacaccaaagcagaaaaagaaacaatgcacgaccatgcaaacaaaaagacctacataattcacatggacgagaccaccatgcactgaaccttcaccgaccacctcaactggttcgacgcctacctcaaatcagcgtacccctccgcggagattctctacacttacaaacacgtggcccatggcttctccgccagactcactcccaaggacgtagacacacttgcaaaacaacccggcatcctctccgtcatccccgaactcaaatacaaactgcacaccacaagaactcccaacttccttggacttgacaaagccaccaccttgtacccgaagctagcctcttcggcttggcgtcgggtacggcgcgtggaatggccacacaagcgcgtgtggcggattacaaagtgtgctggcttggcgggtgttttacttacgacatagccgcgggaatcgac

SEQ ID NO: 210907 - DNA, 607 bp, Glycine max
  unsure (1)..(607): unsure at all n locations
gtggatctctgccatcaaaatttgactgtgattacgcatatgttcttggacacatctgctaccacatacttgccgctggtctaaatggatacatggcaactgtaactaacctgaagaatcctgtaaacaagtggcgatgtggggctgctccaatagcatctatgatgactgtgaagcgctggtctccaaatccaggagccacatcaattggaaaaccagctattcatccagctactgtggacttgagaggcaaagcatatgagctgttgagacaaaaggcacaaagctttcttatggatgatatctacagaaatccaggtccacttcagtttgatggtcctggtgcgggtgcgaaggttataactctttctgttgaagaccaggactacatgggccgcattaagaaacttcaggagtaccttgaacaggttcgaaccattgtgaagccaggatgcccncaggaggttttgaaagctgctctaagtgtcatggcgtcggttactgaagttctagctgcaatgtcaacatcttctactaacaccctgtcagccatgtgagagtaacanatggatnngtgatctttccaaaattttctggcacgagggtt

SEQ ID NO: 210908 - DNA, 574 bp, Glycine max
  unsure (1)..(574): unsure at all n locations
gcactttcttgtgcagagagaacaaaatctgttgatgcgattcctgaattagaccatctgtcaatattgacaaatggtgaaattgacggctttagtgttggacaactcttactttctaatgcggagtcatattctggatccctttatggccatgcttctgaacgccatggaacgtacgtgtggtgtgatggttgcgtatacgagggtgaatggaggatagggatgataaatgcttatggaaaactaagatggccttcaggagcagcgtctgaaggtgatttctctggtggatatatccatggtacgggcacatacattcgttctgataaattgacatcttaaggtagatgtgacgttgaagtcttaaacatggttgatcagtttcaagtttatgctaatggagatacctctgaatggtcttggatgcaaggaacacaataggggcctgtcaagtatacctggaccaatggtaatgtgtatgtanggaatatgaaaggcgggataatgtcatgcataggaactcttacttggataaatggtgactcatacgatggaaactggttaaaatggatga

SEQ ID NO: 210909 - DNA, 431 bp, Glycine max
ctcgagccgattcggctcgagggcataacctaaacttacccttcttctctctgggtgcgtgcgcattatacgcatccataagcagctatggccactgtaagaactgtgatgacgttctcctcatgagttcatcaaagcttactcttatgacctgaagcgatctgacgagatggagctgtgagagtggactgatattgagaaaactgggcgagttatggagttggctccttatgatcctgactggtactatctaagagatgcttgcatggcaggaaagatctactcgagaggatgacttggtgtctgagcctattagaggattgatggtggaagcaagatgaatggctgtcgccctgctgatttctgcaagagcagcggtgctgatgatagtcacagtcttaatcattgcagaacatgagcatgattgaact

SEQ ID NO: 210910 - DNA, 425 bp, Glycine max
gccattctcatcctcctctgtctctctctctccaccattgccatggatccttacaagctccggccatccagcgccttcaattctcccttctggactacaaattctggtgctcctgtttggaacaacaactcctctttaaccgttggagctagaggtccaattctgcttgaggattatcatcttgtggagaagcttgcaaactttgacagggaacgtatcccagaacgtgttgtccatgccaggggagctagtgcaaagggtctctttgaggtcacacatgacatttctcacctgacatgtgcagatttgcttcgagcccctggagttcagacgcctgtaattgctcgttgctcaactgtcattcatgagcgtggtagccctgagaccttgatggacccttgacgtttcgccgagaagttttacac

SEQ ID NO: 210911 - DNA, 497 bp, Glycine max
agaaaaagaaaaaaaaatatgaagttcgctataatcacaatattgttctctttatttcttcttgactttggttttgcacaacagggggatcttgacatatcaagatttggaggaaaaccaaatacaaatataggccaggctatcttaagtgcctggactcaagcatgtgcatcaccaactgctgtcaaaattgtgattccagctggcacataccaaatgggtgcagttgatgtcaaaggtacttgcaaggctcctattgaggttcaagttgatggaacaattcaagcacctgcaaacccaactgaccttaaggcggctcatcaatggtttgatgttcaatatgttaactctttcaccctgtcggcaaaggtgtttttgatggtcaaggggcaactgcttggaaacaaaatgattgtacaacagacaaggactggcagatgctttgcatgaattttggttataatttcctcactaattcaattgtccgtgacattact

SEQ ID NO: 210912 - DNA, 538 bp, Glycine max
ctttcttcctcttcctcagtagtgcgattttcgattctcttctctgcaactatgcctaaccctaaggtcttcttcgacatgaccatcggcggtcaacctgccggccgcatcgtgatggagctctacgccgacgtgactccgagcaccgccgagaacttccgcgcgctctgcaccggcgagaagggcgccgggcggagcggcaagcccctccactacaaaggctcgtccttccaccgcgtgatcccgaacttcatgtgccagggcggcgacttcaccgccggaaacggcaccggaggcgagtcgatctacggcgccaagttcgccgacgagaacttcgtgaagaagcacactggtcccggcatcctctccatggcgaacgccggtcccggaaccaacggatctcagttcttcatctgcacgacgaagacggagtggctcgacggaagcacgtcgtgttcggacaggtcgtcgagggatggacgtcgtcaggagatgagaggtcggatccagctccgcaggaccgtcaagctgcgtcgtc

SEQ ID NO: 210913 - DNA, 533 bp, Glycine max
gcctcccatttgcggcaatgcaaatgcacctcctctttccctcattaattgaaatcgctgccccagatcgtgcaagtgaagaagctgctagctattagctatggctagaggaaagatccagatcaagaggatagagaacaacaccaaccgtcaggtcactgactctaaacgacggaatggccttttcaagaaggccaacgagcttaccgttctctgcgatgccaaggtttctattattatgttctccagcactggaaaactccaccagtacatcagcccctccacctcaacaaagcagttcttcgatcaataccagatgactctgggagttcgatctctggaactctcattacgagaatatgcaagagaacttgacgaaactgaaagaggtgaataggaatcttcgtaaggagattaggcagagaatgggagattgtctgaacgagctgggcatggaaggatctcaagctccttgacgaagaaatgggacaggccgacagtggtgctcgtgagcgtaaggtgtgattaatata

SEQ ID NO: 210914 - DNA, 541 bp, Glycine max
  unsure (1)..(541): unsure at all n locations
cgcgtcgactgcgtcatctccgacgacgactcctcttcctccgccgccgcctccgacaagtcccgcggccccttctggaacctcctccgcctcgtcttcggcggaatcgtgaaacccatccaaaccctcggtcagttcctcggccccaaacgcccctcctcctcctccgtcacgtccccttcctccaccacctcctcctcccccctcgccgtcggaaccgacgacgactccgacgccggcgtcacccaccactccccgacgcaagtcctcaaaaacttcaacgagattcgcctcctccggatcgagctccccagcggcgagctaggcatcgaagacggcgtgctcctcaaatggcgcgccgatttcggatcaactctcgacaattgcgtcatcctcggcgcctcctncgtcttccaccccaaagacaacctaaccgaccccatccccaccaccaattgcaacgcanacgacgacaacggaagcatccctgattccttctacaccaacggcggtctcaaactgcgcgttgtgtggaccatca

SEQ ID NO: 210915 - DNA, 608 bp, Glycine max
ggcttccttatgctgcttagtgctgttccttgcagctataattctatcccctcaagctgttgcccactatgagaatcccacagtgtacaagcctcccactgagaaaccaccagcttataagcccccagttgagaagcctcctgtttacaaaccttcagttgagaaccccccaattgataagcctacagtcgagaagccaccaatgtccaagcacccagctgagaagcccccattgtacatgcccccagttgagaaaccaccagtgtacatgcccccagctgagaaaccaccagtgtgcatgcccccagtgtgcaaaaccgtcagtttacaagccccacattgaaaaacctccagtgttcaagtccccagtagaaaaaccacgagtgtacaagccctcagttgacatgcccccaggttacaagccctcagttgagaagtgaccagcttgcatgccgccagttgagcatccaccagtatgcaagccaccagttgagaagcctgcagtgtacaagcctgcagctgagaagcctccagattacaagccaccagtagagaaacctccaggttacaagcccccagtgataaacctactattacaagccacctgt

SEQ ID NO: 210916 - DNA, 541 bp, Glycine max
gccattgctattgagaaaggaaaagaacattcacaaacattgccgatgttgtttgctcaatattctcgatttgtatatttggcttctgggaatgcagagaaggcaaggcagattctagttgaggggcttgagaatgttttgttgtcaaagccactacttgaggctttattgcattttgaggctattcaacctttgccaaagcgtgttggtgtcgactttttggagtcatgggttgtcaaattcataatgcctaactcagagagtgctggtgtagcaagtccaacagagcgtgaggaactttctagtattcttctggagtttttaaatctctttggtgatgttcaatctatcaagagagctgaagataggcatgccaaattgtttttgcctcacagaagcatgtcagagttgaaaaaacgtcatgctgaggatgtcttagtttcggacaaaacaaacgtgcctagatcgtattctgctcagtcacctgcgcaatctgcgatgggtgcatatccaaatgcgcagaaccagtggactaattatg

SEQ ID NO: 210917 - DNA, 482 bp, Glycine max
  unsure (1)..(482): unsure at all n locations
gaaacgcaacaatggctcaagcggttgaagaatggtataagcagatgcccgtcatcacgcgctcctatctcaccgctgctgttgtcaccactatcggatgctcccttgatataatttctccgtatcatttgtacttgaaccctatattggtggtgaagcaatatcagttttggcgcctggttactaatttcttgtactttcgtaaaatggacttggatttcctgtttcatatgttttttcttgctcgttactgcaagcttcttgaggagaactcgttcagggggaggactgctgatttcttttacatgctcttatttggtgccactgtattgactggaattgttcttcttgggggcatgataccttatttatcagagtcgttcgcaaaaataatattccttagcaactcattgacatttatgatggtttacgtgtggagcanacaaaatcccttcattcacatgagcttnctggtctcttta

SEQ ID NO: 210918 - DNA, 413 bp, Glycine max
ggcgaatgaggaatgcgctgaacttagaattcgtcattggctgaatccttatgaggcaggtggccctgtcaagcgcctaacctggggctgaaattgccaccgcgctcacgtcgtacacgggctgctattgcactcagattcattgtagcacattccgaatactgagcgctcagatgagtgtgagagaccctggcactaattgtgagggacagtcgacgttactgcacggctcgtacgagcttggccgtgtgctgtggcacggaacgttcgacacggtgtaccacgcgcggtacctgaatacagggcagcacgtggccatgaacgtcgtgggatatgaacctgtgatctacgattgaatgatgtaacacgtgaagatggcgaactgagtgacgaacatggctgagtaccacatc

SEQ ID NO: 210919 - DNA, 323 bp, Glycine max
gagccgcatatagaatcagagcatgcgatgcttgagcttgcagagagggatgagatcgttgggagagggggtctcaatgatccaacgaagaatggaacctattggaagatccctgggatgctatagctacttgaacgaggcgctcaacctacaggaactgttcatgacatttcaaaacggggtggagcgcatacggaacttaacgcggatcaacgaccgaagggccattaatgaagtaaccgatagggggtgcggatgactggtatatagaattctaaaactctactctgttttatccgaccggtctatagggctattgatac

SEQ ID NO: 210920 - DNA, 300 bp, Glycine max
gcctgccgtcctttttttattattgtattcttctatatgccaagctacaaagagagtatgtggtcgctacaatacttatgtatagaatctctgaatatcttaattctcgtcatcctagcttagccaatctccaccaacagagactatacccgatggtgattcaaagaatatctgggtatgcctcatcacgactacttacagcacacaaattgtggaattggaaggacttagtctcaacgccctttgatagatctccccgtaccaacgtgcaacggcgtggttatggaataaataggaacc

SEQ ID NO: 210921 - DNA, 440 bp, Glycine max
gagccgtttatcgaatcgtagcaagcgatgctcgatcttgaagagagggaagagatcttcggaaagtgggtctcatatgatccaataaagaatgaaacctatttaaagattcctgggattctatatttacttgaacgaggcgctcaacctacaggaactgttcaggacatttcaaaaagggctggagcgtatatggaacttaactcgaatcaacaaacgaaattccattaatgaaataaacaatagggggtgcggatgacttgtatatagatttctaaaactctattctgttttatccgaccgctctatagggctattgatacctaatgggtcttatgactcgttgggaatatagaatgataggacgtagtttgctatagccagaagaagaaatgaaattggcatcgatcttcaaaacacaatgaggcaatgtatagaga

SEQ ID NO: 210922 - DNA, 180 bp, Glycine max
cctctgcatgatctggaatttgtgttttctttcgtttgttcgtttgtttaattcaataaaggaaattagacatgaccctcttgttgagtatgctctgtctatttgaaaatttccacacctcttttaattgtcgtaatgatgtgtgaagtgtgtgttattttaaaaaaaaaacataactat

SEQ ID NO: 210923 - DNA, 199 bp, Glycine max
tttctttctttttttttttttttttttttttttttcaaaataacacacacttcacacgggattgcgacaattaaaagacgtgtggaaactttcaaatagacagagcatactcaacaagagggtcaggtctaattcccttctttgtattaaacaatcgaacaaccgatagtaaacacaaattccagatcatgcaaaggcc

SEQ ID NO: 210924 - DNA, 436 bp, Glycine max
gaattattatcccgttcttttttttggagtcaatggaacagttgctcatgaattcatgattgacctgagaggctttaagaatactgctggaattgagcctgaagatgttgcaaagcgcctcatggactacggttttcatgcaccaacaatgtcatggcctgtgcctggcacactcatgattgagccaactgagagtgaaagcaaggctgaactagacaggttctgtgatgctcttatttccattagacaagaaattgctgagattgagaaaggaaatgctgacattaacaacaatgtacttaagagcgcccctcatccaccatcactgctcatggctgatgcatggacaaaaccatactccagggaatatgcagccttaccagctccttggctccgtgcttcaaagttctggtctaccacaggacgtgttgataat

SEQ ID NO: 210925 - DNA, 362 bp, Glycine max
gcctgtcttccttttttttttggatttaacttaagagcagtggattatcatcattatcagcgggtgatgaaacaatattcaacaggtgcacgaactgtatgaatagcaatatgcgttcatcctcaacgggatatgaaagccctctgccatttaacacactatgctgtggctacagctcgcacttaacagcctgagaagctgtcaaaccgccgcttactatgttgggggcaccgtacacacgttcagctctgttctggggagggccagaactctcaagcacggaccctaggtgctgggaatgctgcgtatccccttgagtctggatttgtccatgccttagcctttagcattgctcccagatg

SEQ ID NO: 210926 - DNA, 391 bp, Glycine max
ggcgagtgaggaatgcagagaaatgagaattcgtcattggctgagtccttctgaggcgggtggccctgccaaacgcagaagcttcggcagaaattgccaccgcaaacacgtcgaagacgggtagtaatagcactcggtttcattctcccacattcccaattctgagcgttaagatgagtgagaaagagaaaggcaataatagtgagggacagtcgacgttgctgcacggcaagtacgagcttggtcgtgtgctggggcacggaacgttcgccaaggtgtaccacgcgcggaacctgaatacagggcagcacgtgggcatgaaggtggtgggaaaagaaaaggtgataaaaggtcggaatgatggagccggtgaagagggagaactcggtga

SEQ ID NO: 210927 - DNA, 462 bp, Glycine max
tttctttttttttttttttttttttttttttttttttaaccttcatgcatatcgaatgatccgggggtgattctctttttatatcctcaatcacaattctgggcgacagagagaaagatcttatcaacaactcaaagttcctgaacaaaaacgagaatcagacatcattcaagcactagcaggtgcggaattctgggaggaattccagaagatatccttaagcgcagggcgaagctgtttgctgcagaactggttatactccaaggtatccccattgtccttcttgacctccaccaccataaacgacggcgtcacggcgtatatatccgcggcaatcgccagcttcccctttctcccacgctcctgaccctgaagcctcaccttggtctcgctactcctgacgtcgaacttcccgggcttggccacctcctccagccgcgaaatgacggtgctgggcgtccc

SEQ ID NO: 210928 - DNA, 563 bp, Glycine max
agaagatgatcgttgtgctgagcatgattattgatgggtagcagaagtagaacggtaaacgttaacactaaggacactaacaaggttctgaacgggatgccaagctacgctcctccattgccttcttctaattccatagccatggaagcaactaatgttcatccttcccgcatttctgaatttggaaccctggagcaatctcttggatttcgcgttgaagataccattaatcttagcagaaatccgatgtttaatcaaatgaaatcaaatagccaagctctaggtgctgatattcaatttggtgctttaaataagtcaattgcaacatcagatataaacctctctgctgctattgctgggtctcaagcattggtattacaaaaagattcacaaccaactctggcttcaacatctgctggtcgtgagaactggggagagaccaacttggctgatgctagccctatgactgatacttcaacagatgatacagatgacaaaaatcaaaggcctgaaaggggtgaatccagtggatcaaaagataaatcagatcataagacattaag

SEQ ID NO: 210929 - DNA, 501 bp, Glycine max
gagccgtttatcgaatcgttgcaatcgatgttcgatctcgaagagagggaagagatcttcggaaagtgggtttttatgatccaataaagaatcaaacctatttaaatattcctgttattctatatttacttgaacgaggcgctcaacctacaggaactgttcaggacatttcaaaaagggctggtgtttttatggaacttaactcgaatcaacaaacgaaattccattaatgaaataaaaaaaagggggtgtggatgacttgtatatagatttctaaaactcttttctcttttatccccccgctctcttgggctattcatacctaatttgtcttattactcgttgtttatatagaatgataggatgtagttttctatagccagaaaaagaaatgaaatttgcatcgatcttcaaaacaaaatgaaacaatgtatagagattacagatagaatataggagaaagatgaaagtagtcactaaatgaagtaattggacttataa

SEQ ID NO: 210930 - DNA, 350 bp, Glycine max
ggctgccgccctttttttatttttttaagacaatttatataaacataaaaagacagtcgagacacactcgcaatttctaggtattcacccttagtgtataagtacctatagtgaccctcgctaggccaaaacatatcgtattatatactacccacctactattcaaagaacatcggggtaatccttatcttcatactcacaagaaagcaaactatgggagctgcgagacatcgctgagaacggccttgtgaagattgcgactgtcgactgaatcaaccatgcgctgcgggaatcaagtatagactgttggcggacctttatgtaccgccataagcaatgtgagggcgatt

SEQ ID NO: 210931 - DNA, 515 bp, Glycine max
ccccagcattcatattaatatcatgccctccttctgcatccaaaccttcattttgtagtgggtgggggtttctcatttctctgccgttccatggatcgggaaggaggatccaacggcggatcttgctactactccgttctcgggattcgtagggacgccttcttctctgatattcgcactgcctaccgcaaactcgctatgaggtggcacccggacaagtgggctcagaatcctgcaaccgctggcgaagccaagcggcggtttcagcaaatccaagaagcctactcagttctctccgatcagtctaaaaggtcaatgtacgatgcggggctctacgatcctttggaggaagaagaccaagtccgacttttgtgacttcatgcaagagatgatctcaatgatgaacaatgtgaaagacgagggggacagtttggaggacctacagaggatgttcgtggagatggtgggggaagatcatggccatgggatcggctttgacttgaaccaggatcaga

SEQ ID NO: 210932 - DNA, 507 bp, Glycine max
ccattactggggcgatcagtggtatggcgaggacttgtccatcttctcgctagacgacaagccagttccagcaggttcattttcaccagaagaatcccgtgcctcgctagatcgaaattctccgtccttctcgagagcgcaatctgtggataccctcagcgtcacgccatcgaatctcaagctgacggtcagcagcgagcaaatgagctccagcaggactgatggcgatgttgcgggtctgcgagcagccgaggcattcattcgaccagcacccgtggctgttcatggcgacatctcttcgttcgttttcgacctcaagacgtgcacgttcaaattagccctcacagcaccaagttcaaccggcgaagatgcgccaacgacaacgtaccttcccgagttccactttactgcatgacaaacgagcgtctaggtcaagcggtggcagtggaccatgacatgcgatgagaccaacggcgcgcttcagcaaacacttcgatggtggcatgc

SEQ ID NO: 210933 - DNA, 485 bp, Glycine max
ctttctcctaaaacatctcaatgggttcttcttctattacaacatcgcccgcaaccatgaccatggctgcgatcgtgctcctgttcacggtctttgccgtttcctccgccctagacatgtcgataatctcgtacgacagcgcccacgcggacaaggccgccacgttgcgcaccgaggaggagctgatgtccatgtgcgagcagtggctcgtgaagcacgggaaggtgtacaacgcgctcggcgagaaggagaagcgcttccagatcttcaaggacaacctgcgattcatcgacgaccacaactccgcggaggaccgaacctacaagctcggactgaaccggttcgctgatctgaccaacgaggaatacagggccaagtacttgggaaccaagatcgatcccaaccggatgctcagaaagaccccgagcaaccgctacgcgccacgtgtcggcgacaaattgcctgattccgttgattggaggaag

SEQ ID NO: 210934 - DNA, 431 bp, Glycine max
gggacaaatccaaatattgctgctgcattgtcacagggtctacagaaccttgaaaactaacagcaatcaaatatgttcgccatttggaatttgaatacaaatacagtgcatcgattatatcaccctctgtacagagccattgtgtgactgaaatttgatacagaacattatctattttggttcataataaaataggaaagatctttatgttacgtgcagcattatgtgaagaagggggaagtgcatccagctggggctttagtccttagtcttcccttttacttaatgattggctccttctgcacgttcacatttccttaaactggttaagcactgatgaccttgttcttacgtccgaaggtccaatggggtttctgtggagtacgccttaatgacttcacttcaaaggggtttgacttgctcctgagaca

SEQ ID NO: 210935 - DNA, 451 bp, Glycine max
caggacatcacaagaggaaatggtttggttgactcccttttccaagctccacaggatgctggaactcactatgctgtcatgagctcctacgagtaccttagcactggacttcgccagtacttggacacaacatggatggattttacattgctccagcttttatggacaaacttgttgttcacattaccaagaacttcatgaccctgcccaacatcaaggttcctctcattcttggtatctggggaggcaagggacaaggaaaatctttcaatgtgagcttgtctttgccaagatgggaatcaaccccatcatgatgagtgctggagagttggaaagtggaaatgcaggagagccagcataactgatcaggcagagataccgtgaaagccgcagacttgatcaagaagggaaagatgtgtgctctcttataaacgatcttgatgcaagagct

SEQ ID NO: 210936 - DNA, 540 bp, Glycine max
caggacatcacaagaggaaatggtttggttgactcccttttccaagctccacaggatgctggaactcactatgctgtcatgagctcctacgagtaccttagcactggacttcgccagtacttggacaacaacatggatggattttacattgctccagcttttatggacaaacttgttgttcacattaccaagaacttcatgaccctgcccaacatcaaggttcctctcattcttggtatctggggaggcaagggacaaggaaaatctttccaatgtgagcttgtctttgccaagatgggaatcaaccccatcatgatgagtgctggagagttggaaagtggaaatgcaggagagccagcaaaactgatcaggcagagataccgtgaagccgcagacttgatcaagaagggaaagatgtgtgctctcttcatcaacgatcttgatgcatgagctggtcgtcttgggggaccactcaatacactggcaacaaccagatggtgaatgccaccccatgaacattgttgataccccaccatgtgc

SEQ ID NO: 210937 - DNA, 440 bp, Glycine max
agagaaatgaacaagaaagagattgaaaagtggattggaggagatgagagtgcctcggagatgctgagtagagtgagcagcatgcgacctttcttgtttcctccgccgctccacagggttcctctccgcgtcggaaacgtcgtcgagcttgtggggccctctccttccgccaaaacgcacattctcatccacgccgccatcacttccgttctccccaaatgctacggaggcctcgaccacttggtcctctttctcgacctcgattgtcgcttcgacattgcgcgcttctcccaattgctcattcatcgcattacccaacacggaacggattcttatgataaaacgctgtatgctctctgtatggcccgttttttgtacgtccgttgttacgacagctttgaatttcttcacactctcaggacattgcattgtcgcttaga

SEQ ID NO: 210938 - DNA, 491 bp, Glycine max
atagaacactaccctgaacatagtaaagaagccagtgctaggatttgttagtgaagcaatggctcaaaccatgttgctcatgtctagtgtctctagcagttattccgtggatttgaagaaagaccttttcctccaattgcagagtcaaagtttaaggcctaagttctctcagctctcattcaacccacttccatcatcaacttcttccttttcttcaccccgtacattcacaactctggccctcttcaaatctaagaccaaagccgctcctgctaagactaaggttacaaagccaaagcaaaaggttgaagatggtatctttggcacttctggaggatttggttttactaagcagaacgagctctttgtgggtcgtgttgctatgcttggttttgcagcatcactgttgggtgaaggaattactgtgaaaggaattctagcacaattgaatctggaaactggaattcccctttatgaagcggagcctcttc

SEQ ID NO: 210939 - DNA, 507 bp, Glycine max
tttcgttctttttttttttttttttttttttttttttttttttttttttttttttttgttatgaggaacccaatgcattttatgatccaaaaaccaaccagtttttttttaaacacaaaccaaaaaacggggtactgtctcatcaccctccccctcatctttaacaaatttgccacttccacgattcaaagctagtgttaacaaaaaaacaacatctaacaacccttggggctcgatttcgatgattggctccccagtctcaatggtgaatggggcaaatgctccctttccgggcataatttttccaataaaggggaaaaccaaacccaattgggccaatcttcccacaaatagcttgttttgtttcctgaatcccattaaagggccctaaccaagaccaaaagcttaccttaagcccttgcctggaggaataacacccgcaaatgtgggtttgtgataaacaaatttttcaagggcaccctaaacccgaatggtttcttcccgggg

SEQ ID NO: 210940 - DNA, 465 bp, Glycine max
  unsure (1)..(465): unsure at all n locations
ctcccaacccccacccgtagtttctaccaccttcagtcacggcgtaatacactaaccaacccaccatgtcgctgcctgcttgtcccgccgaacaactggcccaacttctcggcccaaacaccacagacgcctccgccgccgcctcccttatctgcggccagttcgccgccgtggacagcaagttcgtcgacacggccttcgccgtcgacaacacctacctcctcttttccgcctacctcgttttttctatgcagctcggcttcgccatgctctgcgccggctccgtccgcgccaagaacaccatgaacatcatgctcaccaacgtcctggacgctgccgncggcggcctcttctactacctcttcggcttcgccttcgctttcggctccccctccaacggcttcatcggtaaacatttcttcggcctcaaggacatcccttcatcctnctacgactacagctact

SEQ ID NO: 210941 - DNA, 487 bp, Glycine max
ctcgagccgtgcggaacgtagcatgctgttgctgttcgagaatggatgagttgaacggcgccatgacgacggagaatagcaatgcggaggtggttcgatgggagaggtttctgccgcggatggtgctcagagtgctgcttgtagaagctgatcattccacgcgccaaatcatcgccgcgcttcttcgcaaatgcagttacacagttattgcggttccggatggattaaaggcatgggaaacgttgaagaagaaggcacctgagctagatctcatattaacagaagtggagctaccagcaatatctggatttgcacttctttctttgatcatggagcatgacatttgtaaaaacattccagtcataatgatgtcttctcatgattcggttagcatggcattgaaatgcatggttaaaggggcagttgattttcttataaaacccattcagaagaatgagcttatgaactttgggcaacatgtatggag

SEQ ID NO: 210942 - DNA, 507 bp, Glycine max
ccttttcctgtcttgttttcatgacataaactatcatcaactgttgctttccattttggctataattccacaaaatgtgccattcattgcaagtgtaatattactagcatttccatatatcagtccatggcctccttaatgctcaatggagctcatcaaaatccaaacctcattagtggcatagctccaaatggccttaactttcacaacaagtgtttattccaaaagggtgtgctgtctcatggtaacaagttaagggtggtcagaaaaaacttcactcccaaaggcagcatgtcagcatcatcatcatcatcatctaggcctggttctcagccaaggttcatccagcacaagaaggaggcattttggttctacaggtttctctctattgtgtatgaccacatcataaacccggggcactggaccgaagacatgagagacgaggcactggagcctgctgatctctacaaccgcaacctgagagtggtggatgttggaggtggaact

SEQ ID NO: 210943 - DNA, 490 bp, Glycine max
agagaaatgaacaagaaagagattgaaaagtggattggaggagatgagagtgcctcggagatgctgagtagagtgagcagcatgcgacctttcttgtttcctccgccgctccacagggttcctctccgcgtcggaaacgtcgtcgagcttgtggggcccttctcttacgccaaaacgcacattctcatccacgccgccatcacttccgttctccccaaatgctacggaggcctcgaccacttggtcctctttctcgacctcgattgtcgcttcgacattgcgcgcttctcccaattgctcattcatcgcattacccaacacggaacggattcttatgataaaacgctgtatgctctctgtatggcccgttttttgtacgtccgttgttacgacagctttgaatttcttcacactctcaggacattgcattgtcgcttagagaacgagaaagaagttcacggagtttgtggtcacctactcatgattgaca

SEQ ID NO: 210944 - DNA, 347 bp, Glycine max
aatcttcattcttttcttagggtacggggttttttttttttttattttcccaaataaaatattgggccactcatacaaagaaccttaaaaccactacaaaacacctgacaaatacgagaacccgacatcattcaaacaccagcacgtgccaaattctcggaacaattccaaaaaatatccttcaacgcatggaaaatctttcaagatgcccaactggttatactccaaggtatccccattggccttcttgacctccaccaccataaactaaagcgttacggcgtaaaaatccgcggcaattgccagatttccctttcccccacgcttctgaccctgaagcctcacct

SEQ ID NO: 210945 - DNA, 534 bp, Glycine max
gaaacaattgccaataatttgacagagtacatgaataagaagggtttgccaaagagattagttattgggagctccagcattcttgagactgctggtcaaggagcacttgtgccactgtaccagagattacaatccgcggttaatgccaaggactctgaatcttcaaattccaataaaattatttggctgcattttggggttaacagtggtgcgacaaggtttgctatagagaaacaagctgtcaacgaggctaattttcgatgccctgatgaaatgggatggaagccccagaaagtccccatagttccttcggatggtggaatttcacgaacaagggagactacacttcctgttgtggagatcaccaaagccttgacagagaagggatatgaagttatggtatcagatgatgcatgcaggtttgtgtgcaattatgtttactatcattcccttcgctttgccgagcaaaacgggatcaaatcccttttcgtgcacgtgccactcttcgtgacaataaatgaagagactcaaatg

SEQ ID NO: 210946 - DNA, 524 bp, Glycine max
gaaacaattgccaataatttgacagagtacatgaataagaagggtttgccaaagagattagttattgggagctccagcattcttgagactgctggtcaaggagcacttgtgccactgtaccagagattacaatccgcggttaatgccaaggactctgaatcttcaaattccaataaaattatttggctgcattttggggttaacagtggtgcgacaaggtttgctatagagaaacaagctgtcaacgaggctaattttcgatgccctgatgaaatgggatggaagccccagaaagtccccatagttccttcggatggtggaatttcacgaacaagggagactacacttcctgttgtggagatcaccaaagccttgacagagaagggatatgaagttatggtatcagatgatgcaagcaggtttgtgtgcaattatgtttactatcattcccttcgctttgccgagcataacgggatcaaatcgcctttagtgcacgtgccactcttcgtgacaataatgaagag

SEQ ID NO: 210947 - DNA, 466 bp, Glycine max
cacaggtttcctgcaagcggtgactcttgctttggtgttagccaccgtctctgcatcagatcctgatcctcttcaagacctctgtgtcgcagaccttgcttcagcggttaaagtgaatggattcacatgcaaagatgctgccaaggtaaatgcgagtgatttcttctcagacatactagccaaaccaggtgccacaaacaacacctatggctccctagtgactggagccaacgttcagaaaatcccaggactcaacacccttggcgtgtctttatcacgcattgactatgccccaggtggcatcaacccacctcacacgcacccacgtgccaccgaggtagtgtttgtgcttgaaggaacactagatgttgggttcataaccacagccaacgtgctcatatcatagagcataagcaagggtgaaatatttgtgttcccaaaagggttgggtcactttcaaaagaac

SEQ ID NO: 210948 - DNA, 494 bp, Glycine max
aaattccaatcatcaaagaaatgaatgggctccgtttaatactctcattccaaatctttgaatttatgagttcccaacaaacatgaattgtaaagcaacacgaacaaggacaagagaggaaggtgtaagaaggaagaacaatgagagagacattacaaccacatcccacattagtattaattatttcttaggagcaagcctagacttaattttctcaacctccttggtacccacctggaacgccttggttaacacattgtctggaaccggtggcgtagctgcaaacaacgttagaacaatggactgtgtgccaggcaattgactgttgaatgctgcaatcactgaagcttgttcctttccattgttcttttggaagtgaaccaacccttttgggaacacaaatatttcacccttgcttatgctcttagatatgagcacgttggctgtggttatgaacccaacatctagtgttccttgaagcacaaacactacct

SEQ ID NO: 210949 - DNA, 528 bp, Glycine max
cacaaagttccctcctctcctaacatggcggcaattttctcttcttcactcttcgcttcctcgcctcttcccaaaccactttcttcctcctattctcgaatccataccgctccacaacttttcagggctcgatcttctctccttcaggataacgagaaaaaagtgatcgtgcatgattccttcccctccaaaacctctcctcttcacaccgctgataaatcaactggtggaaactcaattaacacctctgcgttcgagaaacggattatcaaggtcgaacaatcggtcaatatctttcttacggattccgtgataaagatacttgatactctgtaccatgatagacactatgcaaggttttttgtgcttgaaactattgcgagggttccttactttgcctttatgtcagttctccacatgtatgagagttttggttggtggaggccggcggactatctgaaagtgcattttgctgagagctggaatgaaatgcatcatttgctcatcatggaagaactaggggggaat

SEQ ID NO: 210950 - DNA, 470 bp, Glycine max
aaatttgttagggagagcaccggaatacttgaatcactgagaagaagagcaaggataatgactgatggattcaacagttgcagaaatgtggtttgtaattttactgaaggtgccatgtattcattccctcaaatacgcttgccgccaagagctttagaggctgctaaacaggctggaaaggttccagatgtttactactgcctcaagcttttggaagccactggcatatccactgttcctggttcaggatttggtcagaaagaaggggtgttccatttgaggacaactattttaccagctgaggaagacatgcctgatattatggatagtttcaaaaagttcaatgatgaattcatggagcaatacgaagacgatagaggttattcaaggttgtaagaaaatcattggtaaagctgcattatactcttgcgcttttggaagttcttcatccatccattccttcgagagaa

SEQ ID NO: 210951 - DNA, 299 bp, Glycine max
tttcgttcttttttttttttttttttttttttttttttttttttttttttttttttgggtataaggtcatttttattttttcttctattgttaattttttaatttaaaaacccttatctcaatacaaaaactgggaaaatgttttgagcctacgatgactgaacataaactgaaaatgagcccatcacagcagatcagcaacattggatggcaactcctatacccacacatcgagcaccccccgacataaaaccccccccctaaaaacaccaaagacacaaaggttatggaaacacctt

SEQ ID NO: 210952 - DNA, 526 bp, Glycine max
gcctttcgtccttttttttttttttttttttttttaacaaattttatataattcattttgggaatagggtcaggtgtattggaactctaatgctaaaatttgaaaaagaaaaacaaagagcacaaaataataatgggcaaaaagttatagccctctgatgacttaacaaagaatgaaaattaacccataagagcagatcatcaacatttgatggcaactcctctacagtcacattgtagaacttttgaatatcagacagcattcttgcatcatccaaagtcacaaagtttatggcaacaccttttcttccaaaacgcccacttcgtcctatgcgatgaagataattttcaggtcgggttggcagaacatagtttataaccaaagacacctgctgtacatctataccacgagccaagaggtcagtggtaattagaactcgagaagagccagagcgaaattcccgcatgatgatgtcacgagtgttttcgtccatgtctccatgggtggctgagacttgatggtcatt

SEQ ID NO: 210953 - DNA, 503 bp, Glycine max
gtgaatttacaaagaaattcaaaagcaaagcaagaatcatgaattccaatatttgcaattggaaacaaaatcaggttcttcccacagaggaagcaaagggggatgacacttacctctcagctttgacactatgcttcagccgaattttccctgcaatcttgaacgctgctgttgatctgaatttgtttgatatcatagccaaggcagagagttcatctttgtcagcctcggaaattgcttctttgctgcttccaaatccacaccctcaattggctaataggcttgaacgcatattgcctgtgttggcaagttactctcttctcaattgctccattcgcaccaatgaagatggtgtgagagagagactctatgctctctcaccaattggtcaatactttgcgtgtgacaacgatggaagctctttgggtcctctctcaagcttatttcatcgtggatattttcacgtcttgaaggatgtaaaggatgcaattatggaccctaac

SEQ ID NO: 210954 - DNA, 562 bp, Glycine max
  unsure (1)..(562): unsure at all n locations
tgtcgtcctttttttttttcaataaaatagatgcttaatagatcagaatcattagacattatttgcttttatgatttgggacaatcttcttccttcaacattatgaaaattgctcacatatccaaattctaagtgatatatagcataaatatgataagtgattttaattatgatgctcgagatcatccttcacgaactgattttatgtatgatgctcggcatcacccttcacaagtaatcgcataaattctatttataaaattccaccactgatagaaccgacagtgagtctctacatgcagcatgaaatccagaaaatccagaattcctgcacaagctctcaaattctttctcaggtctttgctttccacttgtttctaaaaacatgagactatcagcaacacaagtttgcatagaaatttggcttgaatccggaacttctggaattatatagtctataacaatcaccttcccatgttgtggcaaagctctgtggcaattccttaaaaactttacacagncttcgtctaaccaattgtgacatacaagcttaagtaaaatg

SEQ ID NO: 210955 - DNA, 496 bp, Glycine max
tgcccctgaagtttcgaaatgttcaattcagtggtatcgtgtatcatctgatggtgccaaaaaagaacttatctcaggagcaacaaaatcagtttatgcccctgaaccttttgatgttggacgcatattgcaagttgatattatttcagaaagcgagcacgtcacactttcaaccgctggtccaatagatccagctgctggtttgggaacctatgtagaggcactagtgcgcaaacatgacactgaattcaacgtggtagtaacacagatgaatggttcacatcatccaactgaatctattcatgtgcttcatgttggaaagatgaggattaaactttgtaagggtaagacaacagttgccaaagaatactattcaagttcaatgcagctttgtggagttcgcggaggtggaaatgccgctgcacaagcactattttggcagccaaagcaagggcattcttttgtattagcttttgaatcagagagagaaaggaat

SEQ ID NO: 210956 - DNA, 501 bp, Glycine max
agaagatattacagccatttatgtccctgacaatgacaaggacaaagtgttggagctaccaaagtccatgatgtagtacccttacaagtattccttttcttcggggtctgccaatagaagtattgatctctgagaggaaagagagttgctgctattatcaatcagttcactgatatttctttcttcagtatgggtggctactgtaaaaagttgagagaattacaaattcaagaatggaaaggatattacatcaactataagtgaatgaagaagaaagtcaagagatatggagaacaaatggaggttggagctcaaaatcgccataatgttctaagagacttctcaatgctgctagacattcagatagaaaaaattgttttatttctgcttgaacaacaaggagtacttgcacataagctgtcaaatattggacaagaacaccatactcttttccagcagtcaaatagtataaacatctctgaacttcaagagcatattgag

SEQ ID NO: 210957 - DNA, 348 bp, Glycine max
catatcaatgggttcttcttatattacaacatggtccgccaccatgaccatgggtggaaccgtgcttctgctaacggtctttgacgactgctactccctagacatggcgataatctcaatacaacagtgcccacgcgcgacaacgccggcacgtcgcgcaccgaagacgaacataagtacatgaactagctgtggctcgcgaagcacgggaaggagtgcaatgcgcccggcgagaaggataagcactgccagatctctaaggacatacctgccatgcattgacgaccacaactgctacataagagcgaacctacaaactccgactgaactcatgcggatgtctgacca

SEQ ID NO: 210958 - DNA, 356 bp, Glycine max
ctccccacattgtaagcaaattaaaggggcatgtgaatttgggacaaatccaaatattgctggtgcattggcacataatctacaaaaccttgaaaactaacagcgatcaaatatgttcgccattcggaatttgaatacaaatacggggcatcgattatataaccctatgtacaaagcccatgtctgactgaaatttgatacagaacattatctattttgtctcataagaaaacgcgaaagacctttttgccccctccaccattatctgaagaagggggaagtgcatccacctggagctttaagccttccctttcccttttacttcataactggatgcctctgcacggtcacatttc

SEQ ID NO: 210959 - DNA, 493 bp, Glycine max
aacttgcctcgcctctttctattttttattgctttttcgtattttcggtattagaaaacaaattaaccagagagaggcgcttgccgtaacgctaattgtgaaagaatatgcaaccaacatccaacggctctgattcgcaagcgacggagcagcggacgccgccgccccagcggatgccgatgcagtacccggcagcggcgatggtaatgcagcaccacatgatgccgcctgaacattacgctcctccgccgtcgcagccctacatggcctaccaccactaccaacaacagctgccgcacgccctgcacgcgcaccatcagggatccagtgccgagaacaagaccagttgggtcggcgatcagatcattggatggacgaagattatcttcaccggtggttcgcttccaacggcgagatttcctcaatgaaagttattcgcaataagcagactggcctatcagagggttatggatgtgtggaattctaattacat

SEQ ID NO: 210960 - DNA, 452 bp, Glycine max
gcttaggagaatagaagaggagcaggaggcatcaccattgccacaatggttaaaggtcgccaaggagaacgtgtaagactctacgtcaggggttcaattcttggatacaagaggtccaagtcaaatcaatacccaagcacctccctaatccagattgagaatgtaaactctaaggaagaagttgcgtggtactgtgggaagcgcatggcttacatctacaaagcgaaggtaaagaagaacggaagccactatcgctgcatttggggtaaggtcaccaggcctcatggtaacagtggtatagttcgagctaagttcaagtccaatctgccacctaggtcaatgggtgcaagggttagagtattcatgtatccaagcaatatatgagattctcaggattcgtgtgtcgtggtgctagtttgtcagagtatttgaagggatttgattttgcgagt

SEQ ID NO: 210961 - DNA, 112 bp, Glycine max
cccaaatacaattgttggggttggcttagaagtgtccctccatttccatccacctttacagctatacttgatcttgttcttcggtacagatgctcctctatggtggacgtgt

SEQ ID NO: 210962 - DNA, 381 bp, Glycine max
tttcgttcttttttttttttttttttttttttttttttttttttttttttttttttgggggtggggttttttttttttttttttttttttttttttttaagaaggggggtttgtgattatagcaaaaaaaatatgtcccccctttttgtagaagggggaattatccgaggcctccccggcttttgacaaaagagaaccgggggggagaaatttattgcgggggccgccccccttaggaggaccgccctttggagcgcattccccgttctgatgggaaaaaaaaagggggggtggaatggagagacacctgctcgcgggcctgttgggcaaggaacatccacggggggggccttagtcttttaccctccccggccaaaaagg

SEQ ID NO: 210963 - DNA, 453 bp, Glycine max
tttcgttcttttttttttttttttttttttttttttgtttttttttttttttttttggtgtttgggtttttttttttttttttttttttttttttttttagaaaggggggttttttttttttgagaaaaaaaattgggccccctttgtgtggaaggggaaagcctagagaactcacccccttttttgaaaagagagaaacctggggcgggctggttcaacccgggcccccccctcaaagtagtccccccccaagggcccactgccaatgttttgggaaaaaaaaaaaggggggaaatgggggcgccattcttagagggacgcttttgaaaaaagaaaccaaccatggggggcagatgcttggggatatcccttggaaaaatccacaaccatgtgcccccaaaggggggacacaacacgattgtgttgggtggccaaattttcaagttccgggg

SEQ ID NO: 210964 - DNA, 529 bp, Glycine max
cttttctctatagctccgtccaaacatgactctccgcaaccaccaagagctcttgggtgctcttgcaattctatattttcttgccacctcactcccttcagtttcagctcatggcccatatgcatgggatggggaggccacatataaattcactacttaccaccctggccaaaactacaaaggtttatccaatgtcaaaaactacttccaccatctcggctacatccccaatgcaccacacttcgacgacaacttcgatgacaccctcgtatctgccatcaaaacctaccaaaagaattacaacctcaacgtcaccggcaagttcgacatcaacactcttaaacaaatcatgacaccccggtgtggcgtccccgacataataatcaacacaaacaaaaccacatcgtttggcatgatctcggactataccttcttcaaagacatgccgcggtggcaagctggaaccacacaactcacctacgctttctccccggagccaaaacttgatgacactatcaaaagcgcgatt

SEQ ID NO: 210965 - DNA, 507 bp, Glycine max
tttctgtctttttttaatgtaaatgctaaaacattatatacattacataaattaaggtaaatggtggcacatttattcattatcatatatgcatcacctagtatcagctggtttattcttaattaagagaaaacttatatacattatctcacatgctatttttgctgctcttgaattagaataatctcacctcgataactttcaaaagcctttaatgcaaattaccgaaataaaactctagttctagtacaaacaacacctagctataataattaggggttgataccatagagctttcgaatcccgtctatatcatcttgcgctagattcaccttcctagttcgaggtggtatagaaggatacatgatggctcttaagtccgacgagaggcctaatccgagcaagtgcccgatctcgtgcactgccacagattcaaggtcaaacgcacttgtcaccggcgatttggtgacatcggcagacgccacccaatattcgggggcgtcaaag

SEQ ID NO: 210966 - DNA, 520 bp, Glycine max
gctcaatgaacctatagaggttttaattactgagtggaatactgggggcctgctaacaaggattgagggtttgcgagctttcctacccaaagctgagcttgtaaaaagagcaaatagctttactgaattgaaagaaaatgtggggcgctgtatgtatgtacaaattactcagatagatgaaactaaaaacaatttgatacttagcgaaaaggaagcttggcaaaaattgtatcttcgtgagggaacacttcttgatggaactgtgaaaaagatcttaccgtatggagctcaaattaagctaggaaaaactaatagaagtggattgctgcatgtttctaatatctctcgagctgaagttacttctgtcagtaacatactttctgttgatgagaatgtcaaagttcttgtggtgaagtcaatgtttcctgataaaatatctcttagcattgctgaccttgagagtgaacctggcctttttctatcatataaagagagactatatatggaggctgatatgatg

SEQ ID NO: 210967 - DNA, 552 bp, Glycine max
gccttgctcattcatccatcaacttctcatcatttattaaacaggatttcctgggcattctgtgtatatctagaagctgtctcagtcctgccccaactgcgggtcatgcagaacaccaagattgttgaacctttcacagctcattatgtatttgcattgggtgttgcaagattcttgagctgcgctcattgggttcttcaggtgttagatagccgtgggcatttgctggtggccttggggtatggtttatggccatcaatggttcttatctcggaaattgtccagaccttcatcttagcagatttctgttactattatgtcaaaagtgtcttcgggggacaacttgttctacgtcttccctctggagtggtgtgattgaagatctgctttggtgtgtactgtcacatttgattttaacttaatcaggctttatggctggttacccttgttcgagtacattttgtggtgacacacttgtttggttccttggtggaaatgaaaggtggggatgaaagatactaaatatattatgtttacggtactggtatatat

SEQ ID NO: 210968 - DNA, 456 bp, Glycine max
agacagcaaggttgcctgcgaaacatgcaccaaaaccaacttggtcatggtcttcggagaaatcacgaccaaggccaatgttgactacgagaagatagtgcgtgacacctgcaggaacatcggctttgtctcaaacgatgtgggactggatgccgacaactgcaaggtccctggcaacattgagcagcagagccctgatattgctcaaggtgtacacggccacctcaccaaaaaacctgaagaaattggtgctggtgaccagggtcacatgtttggctatgccactgatgaaacccctgaattgatgccattgagccatgttcttgcaacaaaactcggtgctcgtgtcaccgaggttcgcaagaacggtgcctgcccttggctgaagcctgatgggatgacccaagtgaccggtggagattacaatgacaatggtgccagggttcccggttcgtg

SEQ ID NO: 210969 - DNA, 512 bp, Glycine max
tggaaacgaacatgtcgtggcacttgttactgctggagaatcatacaagggcgtggatgatctagtgtgctacacttggggtaacaacagtcatggtcaattaggcttaggggacacaaagaataggccaagaccacaagtggtgaaaacatttgatcttgaatccccttgggcaatatatgaggtagcatgtggtgccttccacactgctttgcttactcacaaaaagaggcacagtgacacattagaaagcacatgctggacctttggccttggggataatggccaactaggtcgtggcacaacacaaagcacatcacttcctgaacctgttaaggaattgccacaaaatgtgcatcttgtttctgttgactgtggcttgtttcacacttgtgttgtttcctctgatggggatgtgtggtcatggggaatggagaaaggtctaggcttgtgttctgatgatagcaatggtggaacacattctggtgatgctctttctccgtttcttatct

SEQ ID NO: 210970 - DNA, 524 bp, Glycine max
  unsure (1)..(524): unsure at all n locations
cagcgttcaagatgcagatcttcgtcaagaccctcacgggcaagaccatcactctcgaggtcgagagctccgataccattgacaatgtcaagtccaagatccaggacaaggagggcattcccccggaccagcagcgtctgatcttcgccggaaagcagctcgaggatggccgcactctttcggactacaacatccagaaggagtccaccctccacttggtcctccgccttcgtggtggtatggccaagaagcgcaagaagaaggtgtacaccacccccaagaagatcaagcacaagcgcaagaagaccaagctagctgtcctcaagtactacaaggttgacggcgatggcaagatcgagcgtcttcgccgcgagtgcccccagcccgagtgcggtgctggtgtcttcatggccgncatgcacaaccgncagtactgcgggaagtgccacctgacctacgtcttcgacgaggccaaataagcgcatcgncaccggngcacgcgacacgatcgataacgagttacg

SEQ ID NO: 210971 - DNA, 379 bp, Glycine max
gtgaagtccatgacaagtttgattgattctagatgtccgacgttgtggtgaaacctattcagctcctcccatatatgccttgatgccgtaactcgttatcgatcgtgtcgcgtgccccggcggcgatgcgcttatttggcctcgtcgaagacgtaggtcaggtggcactttccgcaatactggcggttgtgcatggcggccatgaagacaccagcaccgcactcgggctgggggcactcgcggcgaagacgctcgatcttgccatcgtcgttaaccttgtagtacttgaggacagctagctcggtctccttgcgcttgtgcttgatcttcatgggggtggaggacaaccttcttctagcgcttgttggccataccacca

SEQ ID NO: 210972 - DNA, 501 bp, Glycine max
  unsure (1)..(501): unsure at all n locations
attccacaagaactctccaaggatcctccttcccacgagattctttggtgggaaaaatccaagaggtttgaaatttgaaggcagggaagatggattatttcaatgcaccaggaagaaaccatctctttgttccagggccggttaacattccggaccagatcatccgggccatgaacagaaacaatgaggactaccgttctccagcaattccagctatgacaaaaactttgcttgaggatgtcaagaagattttcaagaccactactggaaccccatttctcatccctacaactggtactggtgcttgggagagtgctctcacaaacacactgtctcctggggatcgaattgtatcgttcctgattggccaattcagcttgctttggattgatcagcagcaacgcctgaagttcaatgttgatgttgttgagagtgaatggngccatggtgctaagcttgatgttctggaataaagattgctcaaatactcacacactataa

SEQ ID NO: 210973 - DNA, 368 bp, Glycine max
acacctttctctccacaccatttcatagacgaacctcacgacaaagatgacgactggctcttcgatcaaaatggtttgcttcacagaatacaaagggagcagatatggccaagccaacagagccaccaccgagagaggcaaactcgaacgcgaccaagatctcttccgcgttacagtttccggactctgcggaacagatctccactaccgcaccgcatatatggcgacaggacactagggcgcgggtgtaattgaagatgtcggaccacaagtcacatacatgaagaagggcgatcgtgtaggctgccgctacctgcacaactgcatgcgacactgacacgaatgtctcaaaggcaatgagacgtact

SEQ ID NO: 210974 - DNA, 538 bp, Glycine max
acaccttcctctccacaccattcaaagaagaacctcacgaaaaaaatcacgacttgctcttcgatcaaaatggtttccttcacagtatacaaaggcggcaaagatggcaaagtcaccaaagccaccaccgagaaaggcgaactcgagcgcgaccaagttctcgtccgcgtcacagcttccggactctgcggaacagatctccactaccgcaccgcagatatggcgttgggacacgagggcgtgggtgtaattgaagatgtcggaccacaagtcacatacatgaagaagggcgatcgtgtaggttggggctacctgcacaactcctgcggacactgccaggaatgtctcaaaggcaatgagacgtactgtcctgagcgtgccatgtacgccatggcgaacacggaccagggttcttttgctagccacgctgtttggcgggaagcatacctgttcaagattccagactcgctgagtgatgatgcagctgctcccttgatgtgcggtggtgccacagtctttcacgcattgcatgcataca

SEQ ID NO: 210975 - DNA, 508 bp, Glycine max
  unsure (1)..(508): unsure at all n locations
cttctcttaaaagttattaagagcttttgcttttctttctgcgcgcttttcccaattaagtagttcttccttttctcaaagcaaaaaaaatgttcatcgagagtttcaaggttgagagtcctaacgtgaagtacacagagactgagattcagtccgtgtacaactatgaaaccactgaacttgttcacgagaacaataatggcacttatcagtgggttgtcaagcccaaaactgtcaaatatgaatttaaaaccaacacccatgtccctaaactagggttaggtaatgcttgtggggtgggggggaaacaatggctcaaccctcactggtggtgttattgctaaccgagagttagtttcatcttcaattcctaatcattaacgttttaatttatttcttcttcttcttattttntgtggctatggtaatggctataaaataatttaagggtaaccatgtatgtatgtgaaatatgtttctcacttctcaagggtatttcatgggcaac

SEQ ID NO: 210976 - DNA, 363 bp, Glycine max
aagcacaaaatacttcgataactttatattatttgacatgcatgcatagcataaatagcctgctctcaaattagtcagcaggaacaaagatagagagatccaacgatctttaaatttaacgtttgccataaatatataacagaaaagagggtatgggatatgagttaagggttgatctcattcaaatacactgtcgcagaccatgactctgaacactttgaacttcacttgtactacaggatcatgttgttctcaggagctaatccaacacaagcccttaggaagttcttgagcatagctcgctgctatgacagtgcataaaccactggggtagtccgaagaaccagaagggccttgttcaag

SEQ ID NO: 210977 - DNA, 569 bp, Glycine max
  unsure (1)..(569): unsure at all n locations
agagtatctggtggaggcatattattctcgagtcgcagaaatagagaagacaaagttaatggttcctgtccctcttgatgtagaactgaagtctaaggtttgttcttgtaaaagacagtggggagcaagttggtttgagcaattttccatattattttcaagaggattcaaagaacggaggcatgactactttagctggttaagaatcacccaagttctagccactgcagtcatcttaggattactctggtggcaatcagatgctaaaacacctaaaggtttgcaagaccaggccggactgcttttctttattgctgtgttttggggattctttcctgtgttcactgcaatattcacatttcctcaagagagagccatgctgactaaagaacgaacaaccgatatgtacagactaagtgcttatttcgtggctagaactacaagtgaccttctactggacctggtgctaccagtgtttttcctccttcttggttatttcatggcccaattgagactcggntcaaggcgttttttctttagattcttaccgttttctctgatcatagcag

SEQ ID NO: 210978 - DNA, 456 bp, Glycine max
caacactgaccctatatttcgcaacaacacgctcacatgaactgatggtgggtacccaggggggctttggttcaatccacttggctggggaagtggaactgctgacaagatgatggcgttgagaacactggacatcacgaatgggaggttggccatgttggctgtgatgggggcatggatccagcacatttacactggcactggtcctattgacaacctatttgctccccttgcatatcctggtcatagctactatggttgctgctttcactccgaagtgagaagggttggaactactgtatgagtgcaagccgctgataaacattggaaaacttgtgcaactaagttgtggggcataaatgtgtttaggggggagttcgtatggctgcgtaagcttgaagaatggtacgtctagtgacatgcacagattgaatatcctatgtacaaattcctatt

SEQ ID NO: 210979 - DNA, 413 bp, Glycine max
attatgggaaaaaagaccattgtattgccactcttatgctcaattttgaataggaaaaacaccatatctccatgcaataattgggaaaacgtcctagccctccgttgactgaacatagactgaaaattggcccatcacatcagatcatcaacatttgatggacactactctacacccacattcgagaacttccgaatataaaaccgccctcttagatcatccaaagcctcacagtttatggaaacacgtttcctttcgaaactcccagtttggcctatgtgaagaagatccttccctggtcgcgtgggcagataataggttataaccaaagacacctgctgatcatctatgccaccagccaggatgtcagtgggaactagacctggggaagagcccgagcaccattcccgcat

SEQ ID NO: 210980 - DNA, 271 bp, Glycine max
caacactgaccctatgtttgccaacaacatgctcacaggtactgatgctgggtgacccaggtgggctttggatcgatccactaggctggggaagtggttctcctgtgaagatcatggcgctgagaacataggacatcatcaatggtaggttggccatgtcggctgtgatagcggcctggcttctgcacatttacactggttctggtcctatcgactgcctctgtggtcaccttgactaggctgtccatgctactatgtatggtggtttcac

SEQ ID NO: 210981 - DNA, 468 bp, Glycine max
tttctgccagcctcaaaaaagacttgctctgcctctgccactctatgagtaggactacactgccatggctgccttagtctccactgttggagctgtcaacggagcttcactgagcttgaacagctgtggagctggagcttcagttcccagttcagccttctttggcaccagctcgaagaaggttatcgcctgaagggtccctaacctcaagattccttgtggaagtgtcacaatcgttggcgcggaaatagagattgatgatagacagctgacagacattgacagatggaaaggtcccgcctatgatgcttcatacgaccagcaagacatcgcaggagggaagggtgcggttgattccctcttccaagcgtcccacgattctggaactcactatgcaatcatgagctcgtatgagcaccttaacactgagcattaacagtaccacttggataacaacatggacaggtt

SEQ ID NO: 210982 - DNA, 382 bp, Glycine max
aaacatagcacacattgtaaaatgaagaccatgtagccaaaaattatacaggataacaatccaatctgaacaagagaacttattttattatctgaactgttagcttctctccaagtggagaatgcttaggctctcagggtgtgtataagcaggttccatcatgacttcttgcaggtgggtcgaagattgaggcattcggatcagtgcaaccttcaggaacgggaatgtggacttgctgagctggttcgccatacaaaggtcctctgatgatggaatcttgagtaggatcaccaagagcagcctcttgcaagtacttgtgtgccagtgggactctgttcacattctcttgtcctcggacgagcatgtgaccatactccaagag

SEQ ID NO: 210983 - DNA, 505 bp, Glycine max
ccctattgtaatttctgccagcctcaaaaaagacttgctctgcctctgccactctctgagtaggactacactgccatggctgcctcagtctccactgttggagctgtcaacggagctccactgagcttgaacagctctggagctggagcttcagttcccagttcagccttctttggcaccagcttgaagaaggttattgcctcaagggtccctaacgtcaagatttcttctggaagtttcaaaatcgttgccgcggaaaaagagattgatgagaaacaacagacagacaaggacagatggaaaggtcttgcctatgatgtttcagacgaccagcaagacatcacaagagggaagggtttggttgattccctcttccaagctccacaggatactggaactcactatgcaatcatgagctcttatgagtaccttagcactggacttaaacagtacaacttggatacaacatggacggttttacattggctctgttttatggacaagc

SEQ ID NO: 210984 - DNA, 486 bp, Glycine max
cttgttctccgagctctccctttcgtcggattcggagcgtgagcagcctcatcaaggttggacgaatcgagccggtgatggtgctccgtgtcgacaaggaaaagggttacatcgatctcagcaagcgcagggtctccgaagatgacatccaggcctgcgaggagaggtacaacaagagcaagctcgtccactccatcatgcgccacgtcgccgaaaccctcaacatcgatttggaggaactttatattcacattggatggcctttgtatcgcaaatatggtcatgcttttgaggctttcaaaataattgtgactgatcctgatactgttttaagtactctcactcgtgaagttaaggaagttggccctgacgggcaagaggtgactaaggtggtgccagctgtatcagaagaagtgaaggattctcttgtgaagaatattagaagacgaatgaccccccaacccttgaaaattaaggcagatattg

SEQ ID NO: 210985 - DNA, 496 bp, Glycine max
ttccttcgtctcttttgtttcttcctttccttcaccacttttcccttttcattttcaggataacaaaacaacactccttgcaggattaaacttcacttcaattgaactaacctatctgtgggttttttgtagattgattcaattcaatggcttcagtaatgctcagtggaactgaaaagctcactctcagaaccctaaccggaaacggcttaggtttcactggttcagatttgcacggtaagaattttccaagagtgagttttgttgccaccactagtgctaaagttcccaactttaggagcttagtagtacccaagtgtagtgtctctgcttcgaggccaacctcgcagccaaggttcattcagcacaaaaaagaggcgttttggttctataagtttctctcaattgtgtatgaccatgtcattaaccctggccattggacctgagacatgaaggatgatgcccttgaacccgctgatctcaatgacaggaacat

SEQ ID NO: 210986 - DNA, 505 bp, Glycine max
ttccttcgtctcttttgtttcgtcctttccttcaccacttttcccttttcattttcaggataacaaaacaacactccttgcaggattaaacttcacttcaattgaactaacctatctgtgggttttttgtagattgattcaattcaatggcttcagtaatgctcagtggaactgaaaagctcactctcagaaccctaaccggaaacggcttaggtttcactggttcagatttgcacggtaagaattttccaagagtgagttttgttgccaccactagtgctaaagttcccaactttaggagcttagtagtacccaagtgtagtgtctctgcttcgaggccaacctcgcagccaaggttcattcagcacaaaaaagaagcgttttggttctataggtttctctcaattgtgtatgaccatgtcattaaccctggccattggaccgaagacatgagggatgatgcccttgaacccgctgatctcaatgacaggaacatgattgtcgt

SEQ ID NO: 210987 - DNA, 494 bp, Glycine max
tttcgttctttttttttttctattttcattcgaattcattttatttatatattaataggatattgaaatgaaataaaaagatattaaaagatactaattataagaatttgaaagtgaaattataaagttattaaatgattaatgaatttttttctacctgttcctgtagtaaaaagagttccatttgttcttgaatagcttccttcaaaaggacttctgcttccccagtgaatgtcttggtagaagatatgatctctttgaattgaggtttattcgtgtttaagtaagcacgtaactcaacaagaaatttccttacctgtccaatttctaatgaatcaagataaccattcgttccagtataaatagttattatctgttcttccacggtaagaggagctgattgggattgtttaagcaactcgcgcaatcgatgacctcttgcttattgattatgagtagctttatcgagatcagaagcgtattgcgcaaaagct

SEQ ID NO: 210988 - DNA, 546 bp, Glycine max
cagccaaggactggagaggtggaagagctgcttcatttaacatcattcctagcagcactggagctgccaaggctgttgggaaagtcctccctgctttgaatggaaaattgactggtatggcattccgtgttcccaccgtggatgtctctgttgttgacctcacagtgaggctggagaaagaagcttcctacgatgaaattaaaaatgctatcaaggaggaatcagagggcaagttgaagggaattcttggttacactgaagatgatgtggtctccactgactttatcggcgatagcagatcaagtatttttgatgcaaaggctggaattgcattgaataagaactttgtgaagcttgtttcttggtacgacaacgagtggggatacagctcacgtgtcattgatcttcttgtattcgttgccaagaagtctctttaaggtgttacttcaaagtagctagtcttcacattattaccgtatgtttatgtttagctgcgatttatgtcttgctcgagcaaaaatgagagtcttgataaatcgtttctga

SEQ ID NO: 210989 - DNA, 542 bp, Glycine max
caacactgaccctatctttcccaacaacaagctcacaggaactgatgttgggtacccaggtgggctttggtttgatccacttggctggggaagtggttctcctgagaagatcaaggagttgagaacaaaggagatcaagaatgggaggttggccatgttggctgtgatgggggcatggttccagcacatttacactggcactggtcctattgacaacctctttgctcaccttgcagatcctggtcatgctactatttttgctgctttcactcccaagtgagaagggttggaacaactctatgattgcaagccttggagaaacattgggaaacttgtttaactaagttgtaaggcttaaatgtctttaggggggagtttttatgttggtgaaagcttgtaaaatggtacttctattgtcatgcacagattgattattcaatgtacaaatacctatttaagtttagatgcatttaatgtaaattcaggaagtaatcacaggttttgcatggatgatagggctgcaacatatctgatagtactag

SEQ ID NO: 210990 - DNA, 323 bp, Glycine max
ccgggggggtaacaggaccatttaatttcccgtgctagttactattaaatatggggggagccctttcatccatgcaaaaactgggattacttcctgaatttacattgactgcatctaaacttaaataggtttttgtacattgaataatcaatctgggcttgacaatagaagtcccatttttcaagctttcaccaacttaaaaactcccccctaaagacatttaagccttacaacttatttaaacaagttttctattgtttctccaaggcttgcaataatagagttgatccaacccttgtcacttgggggtgaaagccgcaaaa

SEQ ID NO: 210991 - DNA, 432 bp, Glycine max
caaaaacctaaactgactcagtcctacgatacgattctcttccgcgctcccttggcttgaactccacggcgcaaatccgaggagttagggaaaccctaattcattcctctttggttctgctatctctattcctctaacaccagggatggcaggtttggctcctaaaagatcgcaaactgatgctcggcaatacgattctaagatgaatgaattgctttccgccgatggacaagaattgatcacttcatatgacgaagtctatgatagtttcgatgcaatgggccttcaagaaaatcgtctgagaggcatatatgctgacggttgtgagaggccttctgcaatccagcagaggggaattgttccttttctgcagggtctggatgtgattcagcaagctcagtctggaactggaaagacagcaacggtctggtc

SEQ ID NO: 210992 - DNA, 500 bp, Glycine max
aagcaaataaacaaattttatagaatccattataaaaataaagtcaggtgtattggaactctaatgctaaaatttgaaaaagaaaaacaaagagcacaaaataataattggcaaaaagtaatagccctctgatgacttaacaaagaatgaaaattaacccatcagagcagatcagcaacatttgatggcaactcctctacagtcacattgtagaacttttgaatatcagacagcattcttgcatcatccaaagtcacaaagtttatggcaacaccttttcttccaaaacgcccacttcgtcctatgcgatgaagataattttcaggttgggttggcagatcatagtttataaccaaagacacctgctgtacatctataccacgagccaagaggtcagtggtaattagaactcgagaagagccagagcgaaattcccgcatgatgatgtcacgagtgttttggtccatgtctccatgggtggctgagactgtatggtcatt

SEQ ID NO: 210993 - DNA, 464 bp, Glycine max
ccctattgtaatttctgtcagcctcaaaaaagacttgctctgcctctgccactctctgagtcggactacactgacatggctggctcagtctccactgttggagcagtcaacggagctccactgagcttgaacagctctggagctggagcttcagttcccagttcagacttctttggcaccagctcgaagaacagtattgccataagggtccctaacgtcaagatgtcttctggaagtttcaaaatcggtgccgcggaaaaagagattgatgagaaactgcagacagacaaggacagatggaaaggtcttgcctatgacggttcagacgaccagctagacatcacaagagggaaggagttggttgattccctcttccaagctccacaggatactggaactcactatgcaatcatgagctcttatgagtaccttagcactggacttaacagtacaacttggataac

SEQ ID NO: 210994 - DNA, 393 bp, Glycine max
  unsure (1)..(393): unsure at all n locations
aacattgcacacattgtaaaatgtagacaatgtagctcaaaattatacaggataacaatccaatatgaacaagataacttattttattatctcaactcttagcttctctccaagtggagaatgcttaggttctcagggtgtgtataagcaggttccatcatcacttcttgcagttgggtcgaagtttgaggcatttggatcagtacaaccttcaggaacgggaatgtttacttgctgagctgctttgccatagaaagttcctctgttgatggaatcttgattagcatcaccaagagcagcctctttcaagtacttgtctgccagttgtactctcttcacattctcttgttcttggacaagcatgttaccatactccaagagctngctcaaagt

SEQ ID NO: 210995 - DNA, 550 bp, Glycine max
aaactccctgtagttggtgaccagaaatgggtagtatggatatgttccttcaatgtccccatggcacccggtaagactcgctccatagtttgcagtgctcgaaacttcttccagttctcagtgccagggccagcctggtggcaagtcgttcctagatggtatgagcattggacttcaaacaaggtatatgatggagacatgattgttcttcaaggccaagagaaaatcttcctttcagaaaccaaggaaggtggagacattaacaaacagtatacaaacatcaccttcacaccaacacaggcagatcgctttgtcttggcatttcgaaactggctaaggcggcatggcaatggccaaccagaatggtttggcaacagcagcgaccaaccattgccatcaactgttttatcaaaacgtcagatgttggatagatttgaacagcacactctcaagtgttcatcatgtaaagcagcatatgagggattccaaacatgggcagaagtcctaattggtacaacagttgtgtttgtgcaacatcagggatcccatc

SEQ ID NO: 210996 - DNA, 379 bp, Glycine max
catcaaaatactagtgtacatgtatttttgtcttcaactctatttacaactaactagtagaagttcctttggagggaagtgtttaatcaatttcggcatgcacgtaatccacgaattcaaaattcttttggagttgatttagggcaaaagttatggctgcactgacaattgcgagtccagccaaaagtacacgcaactggacatctgatgggatccctgatgttgcacaaaacacaactgttgtaccaattaggactttctgccatgtttggaatccctcatatgctgctttacatgatgaacacttgagagtgtgctgttcaaatctatccaacatctgacgttttgataaaacaggtgatggcaatggttggtcgct

SEQ ID NO: 210997 - DNA, 511 bp, Glycine max
cttgttctccgagctctcccgccgtcggattcggagcgtgagcagcctcatcaaggttggacgaatcgagccggtgatggtgctccgtgtcgacaaggaaaagggttacatcgatctcagcaagcgcagggtctccgaagaagacatccaggcctgcgaggagaggtacaacaagagcaagctcgtccactccatcatgcgccacgtcgccgaaaccctcaacatcgatttggaggaactttatattcacattggatggcctttgtatcgcaaatatggtcatgcttttgaggctttcaaaataattgtgactgatcctgatactgttttaagtactctcactcgtgaagttaaggaagttggccctgacgggcaagaggtgactaaggtggtgccagctgtatcagaagaagtgaaggattctcttgtgaagaatattagaagacgaatgaccccccaacccttgaaaattaagggagatattgaaatgaaatggtttcaatttgatgga

SEQ ID NO: 210998 - DNA, 371 bp, Glycine max
cttgttctccgagctctcccttcgtcggattcggagcgtgagcagcctcatcaaggttggacgaatcgagccggtgatggtgctccgtgtcgacaaggaaaagggttacatcgatctcagcaagcgcagggtctccgaagaagacatccaggcctgcgaggagaggtacaacaagagcaagctcgtccactccatcatgcgccacgtcgccgaaaccctcaacatcgatttggaggaactttatattcacattggatggcctttgtatcgcaaatatggtcatgcttttgaggctttcaaataattgtgacctgatcctgatactgttttaagtactctcactcgtgaagttaaggaagttggccctgacg

SEQ ID NO: 210999 - DNA, 518 bp, Glycine max
tgagaattgacgtggatttctcaagtccagatgcagcttcacaagtgggactactgcataaggaaattgttggaaaagctatgatttacaagttgtctgaagctgttgaagaaggagatggtgctaactttgttaaggtgttgaagcaacaatgtgaggaaaataagctacgtttgtctgatgtttttgataaagtcaccctagcaggtcattcactgcttcatgtggcagcagatatggggcaaaaaagtattgtgcaggtgctttgtgatctctttcctttgcttctaattaggagaaatgtaagaggtgacactccacttcatgttgctgcgaggtctaagaaatatgagacagtcaagttgattctctcccaatatgccacatagaagtcaacatatgatgagatgaaagataaaaagatagcaagagaaacaaatgaatgtgggaatactcctttgcacgaggctgtctacagtggggatgttgatgtggctaaagagaatttcgaccaggat

SEQ ID NO: 211000 - DNA, 472 bp, Glycine max
tgtgtttgtcacgagacccatagtgctgccaaattatagtaactctctttctctatctgaagaagaagaagttctgaagaagcatgtgtggaggtgctatcatctcagacttcattggtgtgaagcgtggccgcaacctcgccgcgcaggaactgtggtccgagcttgaccctttctctgacctccttggcttcgataccaccaccaccaccaccaaccaaccaccccttccagacaaaaaagtggtgtcatcatgtgagaagaagaagaagaaaagtgtgagtgcagaaaagaagagtggtgggcgagctcggaagaacgtgtacagaggaatcaggcaaaggccgtggggcaagtgggccgcggaaataagggacccacataagggcgtacgcgtctggctcggcaccttccccaccgtcgaggaagccgcccgagcctacgacgacgccggcaagcgcatccgcggcga

SEQ ID NO: 211001 - DNA, 440 bp, Glycine max
aaataatgtacatgatgatattactgcttcattgacacattatatcatttatactgggcacaatctctatctgaccgggaattaactgaacagtgactgtagtgatgtgccgatcataacggctctgccacgaggtgtgagagtcattgaactagatttatggccaaattcagacgaagatgatatcgaatgtgttcatggaaggactcttaccactgatgtggtcacttatccaatgatcgaagtccataatagagtatgctcgtggtaaatctcagtacccactcagtatgactttataagatcacctgacttcagaactgtaagctaaagctgtagagatggcagctcatgtatttggagaattgatctattatactcagaccgattatatgatggaattccgattaccgggatcattgaaaggtcgaattgttata

SEQ ID NO: 211002 - DNA, 528 bp, Glycine max
gctcctgaatctgaaaggagatgatggtttcagaatgaatgaagtgctagtatcattgtggtatttaatgggcttgtggccattggtatatagcatgctcttgcttccaaccggaagaagaagctggtttcatatcttccatttgttgctctacagctcaaaaaacaatattcctgtatggccattcctgatactttcatgttttggtggtgcatatgttcttcttccatatttcgtactttggaaaccgccagctcctcctgtcgaagaaactcagcttaaaacatggcctttgaatttcctggaatcaaaagtaactgcaatgatatcacttgcggcaggggtagccatcataacttatgctggtctagctggacaagatgtgtggaaagaattttaccagtacttcagggaaagcaaatttatccatattacgtccattgattctattatactttccacatttgcaccgatgtgggtttacaacgatatgactgctcgaaaacggtttgacaatgttcttggctc

SEQ ID NO: 211003 - DNA, 563 bp, Glycine max
gaattcgaggctcctgaatctgaaaggagatgatggtttcagaatgaatgaagtgctagtatcattgtggtatttaatgggcttgtggccattggtatatagcatgctcttgcttccaaccggaagaagaagctggtttcatatcttccatttgttgttctacagctcaaaaaacaatattcctgtatggccattcctgatactttcatgttttggtggtgcatatgttcttcttccatatttcgtactttggaaaccgccagctcctcctgtcgaagaaactcagcttaaaacatggcctttgaatttcctggaatcaaaagtaactgcaatgatatcacttgcggcaggggtagccatcataacttatgctggtctagctggacaagatgtgtggaaagaattttaccagtacttcagggaaagcaaatttatccatattacgtccattgattctattatactttccacatttgcaccgatgtgggtttacaacgatatgactgctcggaaacggtttgacaaaggttctaggctccttaccatatattgataccatttta

SEQ ID NO: 211004 - DNA, 507 bp, Glycine max
caaacatttaagcagatagatcaaagttttgagaagaaagaaacaatggcgatacattgtgggttctacagtgtgaatggggggtttaagatatctgatgaagataaaagttacatgcaaggttgcaaagttgttgtatctacttgtgcatttggcggtggagatgatctctatcaaccgatcggagtgtctgaggcttcgcttaagaaggtttgctatgtagcattctgggatgaaatcaccctgaaagcgcaggaattagtggagcgcagaattggggaaaatggatttattggaaaatggcgtgttgttgttgttcgggatcttccttttgcggaccaaaggttgaatggtaaaattcccaagatgttaagccatcgtctttttcctcaagcaaaatactcaatttgggtagactccaagtcccaattccggagagacccactaagtgtgttggaagcactcctttggcgctcaaattctttacttgctatatcagaacatgga

SEQ ID NO: 211005 - DNA, 477 bp, Glycine max
gaagggctatatagcataaacatttgagtcttcattgcacaatgtcgacctcttccattaacgggtggtgcctctcttccatctccccagccaaaacctctctcaagaaggccacattaggcccttctgtcttcgcaaccgttagcactccttcttctccttcttcttcttcttcttcttccttcccttctctcattcaagacaggcctgtctttgctgcccctgcccccatcatcaccccaactgtgagagaggatatggcaaaggaatacgagcaagctattgaagaactccagaaattgttgagggagaagagtgaactcaaagccacagctgctgagaaagtggagcagataacagcttctctgggaacatcatcatctgatggcatcccatcatcagaagcctcatacaggatcaaagctggtttcattcacttcaagaaggagaaatatgacaagaatccagctttgtatg

SEQ ID NO: 211006 - DNA, 575 bp, Glycine max
tctccatcttcatcactcccatggacaacgacacaaacacaacaccaaccaccacctcagaaccacaaatagcacacgattttcccggtctcatccgtgtcttcaccgatggtcgcgtccaacgcttcaccggaaccgacgtcgttccaccctccaccactccccacattacatccaaagacatcacactcctccaccctcactccgctactctctccgcacgcctcttcctcccaacaccacaaaccaccagccgccgcaacaacaacctccctctcttaatctacttccacggcggcgccttctgcgcctcctcccccttcaccgcaaactaccacaactacgtcgccacaatcgtcgccgaagccaaagtcgtcgctgtctccgttgactaccggctagccccggagcaccctattccggcagcgtacgaggattcatgggctgcactacagtgggtggcgtcacaccgtaacaaaaatggacaagagccttggttgaatgagcatgcagacttcggtagggtttttttggctggggacaatgctggtgctaacatagtgcataacctaact

SEQ ID NO: 211007 - DNA, 466 bp, Glycine max
ttttctttcttttttttttttttttttttttttttttttttttttttttttttttttttttttttgttttttttttccccaacaaaggcctaaaataaactttttcacaggttttatttggcaattttgggaaaaaccccccagggacccaaaattccccgggcatttaaattcctaggggttgcccatatttaaaaaaacccccaaagcataacagggtaaaaaagaaaaagggcttgggacccctgggaaatgggggtttaaataaaaaaaacctccccccccttcgggatttgaaaacccaaggttttaaaggggcccacccggttgagaaaatgcccccttgggaaaactcccccctaaggggcccgaaaagtggggggcccttaaggcccccgaaggaacgggtcctggttaaccggggcattcaatgaccccggggggaacccatctctatggggcaaaa

SEQ ID NO: 211008 - DNA, 515 bp, Glycine max
gatcggaagatgcaataatatattcaagtaacaagaatacaatttggtttacatattttgcctaaaaataagtgcacgagatagatcaaacatatgcaactttacctcagcggagagaacatttctgcaattaaaatttcagcctaccatatcacaaggcaacatcgttgtgccaagacctctaatatgatgaagggccagtaatatgatgttgtacaacatttataacttagatgttccaaaaacggtttccgagctaatcaaaccgctcccattcttgagttactttggtggaagacgggttatcggatggagcatccaagctttccattccagagtcaaaggtttcccattgggttgtaactttgacagcattgctactgttgctaaaagggttgagcgttcttgcctttagagaatctaagttatccacaaggttctgcacacgaatcacctatttaatggtggaaaagcttgtggcaggccgtcacagcagtaatccatataattgcatt

SEQ ID NO: 211009 - DNA, 504 bp, Glycine max
attttggatgcggcaccaaatgctgttcacaagctttggaaatggcttacaaatgaccggaacactactgggaaggccactgcgcgtattcaaccacaactatggcaaccatctagaggaatactgatgactaatgatataagtgattctaacccagaggatgctgtgtcatgtactgcactgtcagagactgactcatatgttatgtctgcttcaggggggaaaatgtctgtattcaatatgatgacatttaagacaatgactactttcatgccacctgcaccagctgcgacattccttgcatttcatgctcaagacaataatattattgctattggcatggaagactcttccatacaaatctataatgttcgagtggacgaggtcaacaccaagctaaaaggtcatcagaagagaattactggtcttgactgttctcatgatctaaatgtgcttgtctcatctggagctgactctcagctgtgtgttatgagcacagatgga

SEQ ID NO: 211010 - DNA, 463 bp, Glycine max
ttttttttttttttttttttttttttttttttttttttttttttttttttttttttttttttttttgggctttacaaaatccttgcattaatgggcaaaataaaaccgaatttcaaaatagctaactttagctgaaaaaaaaaaaatcttttcccactaattttccggtttttttaaaaaaatcctccccccattaagggtggcccccagaaaaaaaaattttacccatgacccttcattttggaaccccccagcccaatttacccccgtaatcctatggggggaaaaacaaactgggccaatccccccgtttggaaaccccttataacccggggggaatgggtcaatttgatttggcctaaccttcaaaaaccttcggttcgaagctttccttttgaaaccctatgggggcccccgggaacgggatcttttgccaaaaaaacaccccctcaaaggtccttat

SEQ ID NO: 211011 - DNA, 431 bp, Glycine max
  unsure (1)..(431): unsure at all n locations
aaaggagagaggctcagatatgtaagccaatcatatgtattttatggagttgagaagggtcaaactacggcatatgaggaagggttaatcaagtaattatacagcagctttagggagagagaagagaatagtaatggcagaggtggacagagagagaatccatacacattgatgatcccggtggatctagtagtggatcagcaatatcagtggccgcacatttggtggcagggtcccttggtagtgagactgatgggtccattatatgcccttcaggttctaactcaatagtgggcattaaaccaacagttggcctcactagtatagcaagggtagttgcaatcaccccattacangacacaggtggaccaatttgcaggactggattagatgctgctcttgatcttgaaaccattgcacgcatcgacatc

SEQ ID NO: 211012 - DNA, 514 bp, Glycine max
agctaaatagacacacttcaaattttattgccatatatggtttttgtcagagttcctgatagaaggacatgacaatacttaatttactcttttagatggataattagtcttggccatcattaaacaaacaaacacttggctattcaattccatcaaaattctgacaatctttttgtaacggttaaacctccaactttcggagtggtgggggcttcctgatcaaagttgcttgctcaaaggaataagcaatttggatgagctttggttccgagcctttcaaacctccaaagataattccaaatggtgcacccttttcatatcccgctggaacagttactccaggataacctccccttgcaagtatactagcaaagaatgaaaaaggtaccaccattgcgtcaaggttatttgttatcattaatttctcaaatccaatatgtgacaatcttgccatgtttagcactgctttcttcagttccctaactccatttggcttttgagctaccagcatgag

SEQ ID NO: 211013 - DNA, 441 bp, Glycine max
gggaatcgagggaaaatgagaccttcacttctgtttcactgctaaggcttagacttgcagtgcacacgcatttgctgatgctgctctcaagatgataatctatttgcgagttgacgatggaaacactatcactgctgctacagatgaaacagccacattacctgatgacgattctccttcccaagatatagctgaaggaaagcctgtctccttcagagatacatctcttgcacgagatgtttatagtgcgattactgctggatcacatgggaagagcccttatctgacacaccctagctttaacacgtgccagactgagcatgatttgctaagggacttgtgtaggctatcatcaagccatctatcactctgccgccagtggatcccacttggatcttgacaatgaagctgaatgcgacatctgacatgatgcctgagaca

SEQ ID NO: 211014 - DNA, 392 bp, Glycine max
atacgaattactttttttttttttcctgtgattggatgaaacttaagagcaggggattatcatcattgtcacatatgatgaagcaatattcaacaagtgcaagaactgtatgaataggaataagagtttatgtacaacgggaaatgaaaatagttggcatttgaacacattatgctgtatcagctgcttgttcttcaacagcctgtgatgctgggagaagggtgcaaatgagggtgcggtcaccgtacacattattaacaacgtctgtggtaggccagaactttgcagtacggatccaaggtgctgggaaggctgcatattccctggagtatggatttgtgcatgcatcagccatgagcagtgatggcggatgaggggcgcccttaagtaca

SEQ ID NO: 211015 - DNA, 439 bp, Glycine max
agaagatggctttaggtgttcctgctcttccgttgacatacgtggctcacgttctggcagttgttgccagcgtcttggtcgtggtctgggtcgtcaatttcaggggtggcttggcttgggattctgataacaagtccctcatcttcaacattcatccagttcttattgttattggcttactagttcatgggggtgaagctattataagttacaaagcttttcccctaaagaaggaagtgaagaaattgatacaccttgttttccatgccatcgcattaatacttggaatagttggaatttatactgccttcaagtttcacaatgaaagtgggattgccaatctctacagcttgcattcatggcttggaattggggttattgtcctttatagcattcagtggatatatgggtttgggatctttttcttccctggtgggac

SEQ ID NO: 211016 - DNA, 439 bp, Glycine max
agaagatggctttaggtgtttttgctcttccgttgacatacgtggctcacgttctggcagttgttgccagcgtcttggtcgtggtctgggtcgtcaatttcaggggtggcttggcttgggattctgattacaagtcccttatattcaacattcatccagttcttattgttattggcttactagttcatgggggtgaagctattataagttacaaagcttttcccctaaagaaggaagtgaagaaattgatacaccttgttttccatgccatcgcattaatacttggaatagttggaatatatactgccttcaagtttcacaatgaaagtgggattgccaatctctacagcttgcattcatggctttgaattggggttattgtcccttatggcattcagtggatatatgggtttgagatccttttcttccttggtgggac

SEQ ID NO: 211017 - DNA, 490 bp, Glycine max
atggactcctaatattggattgcatcatgtaatggtttggttgttattgttgtttgacctgagtaggtcattactagtggaaaactgagagctctgagagccaagtccatgaaattcaaggatggatacatgatttcttttggacaaccagtcaaggattatattgactcagtagtgagacacgtgctactaagatagggtgctcttggtatcaaggttaagatcatgcttgattgggatcctaaagggaatcagagtcctaaaactccctttcctgatcttgtcacgatccacactccaaaggaggaagaatacaagtagcctccagctgtattggcaaatgatattgagtgaaagcttgtgcaaagattaaagagtaaagtctgtggatctacatccaacaaaaccatgctgcttgacagttcatgttcaagaaagagagcttgcatcacggaatagtcttcgtggttatatgcacttagttgacttg

SEQ ID NO: 211018 - DNA, 573 bp, Glycine max
  unsure (1)..(573): unsure at all n locations
atggactcctaatattgtattgcatcatgtaatggtttggttgttattggtgtttgacctgagtaggtcattactagtggaaaactgagagctctgagagccaagtccatgaaattcaaggatggataacatgatttacttttggacaaccagtcaaggattatattgactcagtagtgagacaccgtgctacttaaaataggggggctcttgggtatcaaggttaagatcatgctggattgggatcctaaggggattagcagtctaaaactccctttgcctgatcttgtcacgatccacactccataggaggaagaatacaagtagcctccagctgtattggcaaatgatattgagtgaaagcttgtgcaaagattaaagagtaaagtctgtggatctacatccaacaaaaccatgctgcttgacagttcatgttcaagaaagagagcttgcatcacggaatagtcttcgtggttatatgcacttagttgacttggcaggaagctattaaggtaacaggtaaaggatgtgtaaaggtcatctntttactacaccagaacagtggggacaact

SEQ ID NO: 211019 - DNA, 483 bp, Glycine max
gaagggctatatagcataaacatttgagtcttcattgcacaatgtcgacctcttccattaacgggtggtgcctctcttccatctccccagccaaaacctctctcaagaaggccacattaggcccttctgtcttcgcaaccgttagcactccttcttctccttcttcttcttcttcttcttccttcccttctctcattcaagacaggcctgtctttgctgcccctgcccccatcatcaccccaactgtgagagaggatatggcaaaggaatacgagcaagctattgaagaactccagaaattgttgagggagaagagtgaactcaaagccacagctgctgagaaagtggagcagataacagcttctctgggaacatcatcatctgatggcatcccatcatcagaagcctcagacaggatcaaagctggtttcattcacttcaagaaggagaaatatgacaagaatccagctttgtatggtgaac

SEQ ID NO: 211020 - DNA, 566 bp, Glycine max
  unsure (1)..(566): unsure at all n locations
ctttagccgaggtcaggaggagcactagctaagttcacaatttcaaaatggctaggggactaaagaagcatttgaaaaggctcaatgctcctaagcattggatgcttgacaaactgggtggtgcatttgcgcctaaaccctcatctggaccacacaaatcgagggagtgcctccccctcattcttattctgcgaaaccggctgaagtatgctctgacataccgtgaagtcattgctattctgatgcagcgccatgttcttgttgatggcaaagtcaggactgacaagacttaccctgctggtttcatggatgttgtttcaatcccaaaaacaaatgagaacttccgcctgctctatgacactaaaggccgattccgtcttcattccatcagggatgatgaggcaaagttcaagctctgcaaggttaggtcagtacagtttggccagaaaggtatcccatacctgaacacctatgatggtcgcaccatccgttacccagaccctctcattanggccaatgacactgttaagctggatctggaggaaaacaagattgtcattttatca

SEQ ID NO: 211021 - DNA, 542 bp, Glycine max
gagatgagatcatatgaaaattataaccgattctttcctttgtttgggctactggccatccgccggaagtttcgggtttaataccgatattttagcaacaaatctaataaatcttagtgtagtgttaggtgtattggttttttttggaaagggagtgtgtgcgagttgtttatttcaaagaatagattggatccaaccaaactgcactttttagttataactaagaaaatgtgcataatcccgcgaattacttgtgaaaattacttctgaattaatgaaattttttcaataatttaagaaaaaatatttaagaactatagcatttcgcgatttattggtaattcactttgattctctattaaccaataattttggactattaccatggttaaagtgaatagtttgaagtctagacgcagtgtagtactctatgtaccactatgttaatacagaaatgaaatggtttcgataaaattattagatattttcttcgatatagaacactcatgtcgataaaaatggtttgatcctatttacttacg

SEQ ID NO: 211022 - DNA, 533 bp, Glycine max
cattcgaattcattttatttatatattaatattatattcaaatgaaataaaaagatattaaaagatactaattataagaatttgaaagtgaaattataaagttattaaatgattaatcaatttttttctacctgttcctgtaggaaaaagagttccatctggtcttgaatagctaccttcaaaaggacttctgcttacccagtgaatgtgttggtagaagatatgatttctttgaattgaggtttattcgtgtttaagtaagcacgtaactcaacaagaaatttccttacctgtccaatttctaatgaatcaagataaccattcgttccagtataaatagttattatctgtacttccacggtaagaggagctgattgggattgcttaagcaactagcgcaatcgttgacctcttgctaatagattttgagtagctttatcgagatcagaagcgaattgggcaaaagcttctaatactgcgaatttgctaattccaatttaattaccagctacttgttcatggtttaatttgag

SEQ ID NO: 211023 - DNA, 354 bp, Glycine max
gctgttagcggcttgaaccctggttcgttcctgacactagccaaggggtatgaaagtggagggtattatggtcaatggagcgctatagggaggacagctgtcacgacgaccttggctgggagcactgcggctctgaccaccttgctcagcaagcggatattggatggccactggaacgtgattgacgtgcgtactgacagcttgccggttacgctgccattacatccggctgtgccgtacgggaaccgtgggccgcgactgagtgtgggtttgtggcggcgtgggttctgacagggcttaataagcttgccgcgaaggtagcttacgatgatccgtgggatgctgcgcagcttc

SEQ ID NO: 211024 - DNA, 424 bp, Glycine max
ggctctcgcggtttgaaccctggttcgttcctgactataaccgaagggtctgacagtggagggtattatggtcaatggcgcactatacggaggacagctgtgacgacgacattggctgggagcactgcggatctgactacgttgctcagcaagcggacattggctggccactggaacgtgattgacctgcgctacggcgcagcttggcggctacgctgccattacataccactgtgccgttgtgcaaccgtgagccccgattgtgcgtgggtttgtggcagcgtgggttttgatcgggcttaataagcttgccgcgaaagtagagtacgatgatccgttggatgcggcgcagctctcacagcgggtgctgagcgtggaggggactcttcacgggattgtttgcgaagacagagtacgtcgagga

SEQ ID NO: 211025 - DNA, 557 bp, Glycine max
cgaccttgcgattcagcgcatcattgaaggcgattttttactagcatggcagcaataatgttgacgactatgaatattcctctgcacacttcggtttgggttaattcccggcggaagagttggtgctgctacgcctcactttcgcagccagacaggaaggagatccgtctcggtttgcccagcaaaggtcgcatgtccgctgacaccctcgaacttctcaagaattgtcaattgtcagtgaagcaggtcaatcctcgtcagtatgttgctgaaattcctcagctatccaacctcgaagtttggtttcagaggcccaaagacatcacaagaaaattgttatctggagatcttgaccttggtattgctggactcgatactttcagtgaacatggccagggtagtgaagatcttatcattgtccacgaggctctcgagtatggtgattgccgtttatcccttgcgattccccaatatggaatatttgaaaatgttaattcagtggacgagcttgcaaaaatgccttcatggacagaagaaaagcctctacgagttgctac

SEQ ID NO: 211026 - DNA, 601 bp, Glycine max
tggtaattaaagagacgatgagttgattcgagatggggaacaactgaagatggggaggattattggcttcttgcaaatcagtggaatagtgaatggggagatgatggttacttcaagatccgaagagggacatacgaatgtgggattaaagaggatgtaactgctggtttgccttccaccaaaaacctcgtcagagaggtgactgatatggatgctgacgctgctgtttcattcagaataatttgtgtgtaactgcagctgatcggcctattaaagagatattagaaaaggaaaaaaaggagctggcttattgacattggaggatttgcaaagaaagtgaaaagcactactctatcttcagctacatgtttatcaatgagttcatcccaacactggaaggagaccaaggaatttgctacacacatccggaaaatcttccaggtgctaagaaagatgggagttatgtccatttgtttcacagaacaatcaatgcatatgctactgttcaacgaaagcatcgaaagattcatcatcaacagggtttgactggtaattgcccgtttaatgataaattccacttatgcatgcagaaaaataaaaa

SEQ ID NO: 211027 - DNA, 456 bp, Glycine max
  unsure (1)..(456): unsure at all n locations
ctcttgctgaaatgctttctttctagaaagtttgttcaactgtcccattattggcgttagctatgctacccactggagcaaaagagacccaattacgtgagagcaacagtcagaaggttcattcttaaccaatagaagaggccatgaatcagaatccagaagcaatggaaaccctaatatctaaagtttttatgaatatctcttccttgaagtcagcttatattgagcttcaagctgctcatactccctaccgaccctgataaaattcacactgctgataaacttgttattagtgagctgaaaaatctgtctgaactcaagcatttctacagggagaacaacccataaccagtgtgtgtttcttcccaagactcacgtntagctgcagaaattcaagaacaacagagccttctgaaaacttatgatgtcatggtgaacacgtttcaattttatatg

SEQ ID NO: 211028 - DNA, 583 bp, Glycine max
tataaatatactggcgttctttgttaatttcatgaacaaaataatacgtgcatacatagctatctagctagcaagtgggacaagagatatatatacgtggtaccctagagtgccattctgtagtttatttctgctcaccaaggcttatcacatcacaatttgtgcattgcctcgtgtcctttttcttctttgcttgccaaaaatcttacacacacaggtatctagcaaatgggttctcaccagcaagaaccatggctattggagaatgggaaaccgagggtgttgaccaaggagaataggcatggccgttctgcacacagcatgtcctccacgtctttgcgcaagaagtctagccgaactcttgtctccaagctttcatgtgccacactcagaagcattcttttaaatttgcaagaggttattcttggtaccaagctttccattctcatccctgccattccagctgccatcattgccgagtgctatggctttggaagaacctggattttatattgagcttacttggacttacaccacttgctgaacgtgttgagcttatcacagaacaagttgccttttacac

SEQ ID NO: 211029 - DNA, 525 bp, Glycine max
tataaatatactggcgttctttgttaatttcatgaacaaaataatacgtgcatacatagctatctagctagcaagtgggacaagagatatatatacgtggtaccctagagtgccattctgtagtttatttctgctcaccaaggcttatcacatcacaatttgtgcattgcctcgtgtcctttttcttctttgcttgccaaaaatcttacacacacaggtatctagcaaatgggttctcaccagcaagaaccatggctattggagaatgggaaaccgagggtgttgaccaaggagaataggcatggccgttctgcacacagcatgtcctccacgtctttgcgcaagaagtctagccgaactcttgtctccaagctttcatgtgccacactcagaagcatccttttaaatttgcaagaggttattcttggtaccaagcttttcattctcatccctgccatttcagctgccatcattgccgagtgctatggctttggagaccttggattttatattgagttacttgac

SEQ ID NO: 211030 - DNA, 508 bp, Glycine max
cgaaggtggttttatcaaacccccttctctctcagcactggctgctgccacgtgtcttcccgatcctgactcttccgtttctgtgctcttggccggttcgggtccttctcttcatcaagctgcttcacatgctgcttcgtgccacccttcaatctccaaggtgcttgtggcagattcagataaattcaagaaccctctggcagagccctgggctaaattagtccatttggttcaccagagtggtggttactctcatataattgctgctgcaagttcttttgggaaaaatgtcgtgccacgtgcggctgcccttttagatgtttctccaattactgacgttactggaatttctgattccaatacttttgtgaggccaatatatgctggaaatgcactctgtactgtccgatatactggtgccaatccttgtatattaacgattagatccacatcttttcctgttcctcagaattcagttgactcaaaatctaatgaggcttcaatatct

SEQ ID NO: 211031 - DNA, 541 bp, Glycine max
  unsure (1)..(541): unsure at all n locations
gttgccattctcatcctcctctgtctctctctctccaccattgccatggatccttacaagctccggccatccagcgccttcaattctcccttctggactacaaattctggtgctcctgtttggaacaacaactcctctttaaccgttggagctagaggtccaattctgcttgaggattatcatcttgtggagaagcttgcaaactttgacagggaacgtatcccagaacgtgttgtccatgccaggggagctagtgcaaagggtttctttgaggtcacacatgacatttctcacctgacatgtgcagatttccttcgagcccctggagttcagacgcctgtaattgttcgtttctcaactgtcattcatgagcgtggtagccctgaaaccttgagggaccctcgaggttttgccgtgaagttttacaccagagagggtaactntgaccttgttggaaacaaccttcccgtcttctttgtacgtgacggcatgaaatttccagatatgngtcatgctcttaacccaatcccaagaaccacat

SEQ ID NO: 211032 - DNA, 522 bp, Glycine max
agcagcgtaacatgccgaaaaggtatataaatataaatactaacacatacaaacggcatttattgagatagctcaacgagttgcatgcatggagttatgggtacacaactaaaattgcaagaaatggataagttctttcaaattgatcgaaaatcacatccttatcgtactctttgcacgtctgcaactctaacaatcattctggggttggcaacaacattaaatatttggcctcatgctcagacgagatgctatcttttggcctagagaacggtcagcctgagaccagtaagatatccagacactgcggatttcatgggtgacccgtgggtcagataaagcatcaacccatcggcgattaaatctatcttgcctgtcaagtgcccaagatcggtatctatctacgggctgcttaagatggtctccttctaattccacacttttcacgccttacactgcagatagcaggaggtatggggaacgtttctgcatgacgaacaggatcataccttgaaaggaagt

SEQ ID NO: 211033 - DNA, 539 bp, Glycine max
ataatggtcatcatcatcattggtcaatactagcaagtgatcatacacaatccaagtttcaaagttctatgtagtctcactctcacatcatcttagtaaattataataactctggcctgctcacctaccactctatatacaaaggagtcaactcatttgatcggttacatacccttacaagggcttgtgtcctaattaaaatgctctcaaagggtcaattaaacaactacaaagtactacaaatcctcattcctcatcacactcaaaagccaacaaaaaggggtgcaattaatggtccaagcaagggcacaacaacaaaatatatatccaaaaaaaaaggattttttaggggtcaattttgcaaagtagtgtgcactaatttggtctagccatgccgagcgcccatgaagtaattgaagtcatgatgttggacccttagttgcttcaaccatgaatctgccacgctcaatagtgagactagtctgtcttggtccataccacaattccctgagacccacacacttccttgcatcttatac

SEQ ID NO: 211034 - DNA, 417 bp, Glycine max
accaaactaaatactctggattaaaatgatttgtatggctacaaatacaaaataatccacacaacataatcttattaacggaacacaagtcccctgccacatagattctgtttaaagacatggaatatcttcaattgaagtgagtccttacgaccataccgagtatcatgtacatacattgcaggtcccacaaacaccaattcattaacgaaggacatctccgagttttctttactaatttgcagaactagcataccttatagccacacttaggcctataacacttccagcatttaatgtatacatgttgagaacatgatacactgtcgacttaaactggctaggaacagcactgcttgtggattctgaatacatgttcaaacaggtttcattttcccatttataaatcttatatat

SEQ ID NO: 211035 - DNA, 479 bp, Glycine max
aagaaaaaagaaagttctaattattaattaattatatctatatatatatatatacagatagatattctatatcttttatcttaattaatatttgacccctccttataatgtgttatagttctctttatttttaggaacttatccattccttttttaatgtgcccgacaatccgaaagaattctgggggaggggtcatttcgtttttgatctagaataaatagagcttcaagaaatgagagaattaagaatacccacgagaaacactaatccaatccataatgatgtaccggaaaatacaacatttttgttattcgaccaaccttcaggagaagcaaatacaacaggtacactaatcaataaaataaatgaaatagcaattaatgcaaaaacagctaattggaaagcaatagtcatgtttctaatcctccaatttaccaacaaaagaactttaccatttgatcccccaaccccttgatcc

SEQ ID NO: 211036 - DNA, 506 bp, Glycine max
  unsure (1)..(506): unsure at all n locations
cgaccttgcgattcagcgcagcattgaaggcgattttttactagcatggcagcaataatgttgacgactatgaatattcctctgcacacttcggtttgggttaattcccggcggaagagttggtgctgctacgcctcactttcgcagccagacaggaaggagatccgtctcggtttgcccagcaaaggtcgcatgtccgctgacaccctcgaacttctcaagaattgtcaattgtcagtgaagcaggtcaatcctcgtcagtatgttgctgaaattcctcagctatccaacctcgaagtttggtttcagaggcccaaagacatcacaagaaaattgttatctggagatcttgaccttggtattgttggactcgatactttcagtgaacatggccagngtagtgaagatcttatcattggccacgaggctctcgagtatggtgattgcccgttatcccttgcgattcctcaatatggaatatttgaaatgtaaattcagtggacgag

SEQ ID NO: 211037 - DNA, 593 bp, Glycine max
  unsure (1)..(593): unsure at all n locations
cgaccttgcgattcagcgcatcattgaaggcgattttttactagcatggcagcagtaatgttgacgactatgaatattcctctgcacacttcggtttgggttaattcccggcggaagagttggtgctgctacgcctcactatcgcagccagacaggaaggagatccgtctcggtttgcccagcaaaggtcgcatgtccgctgacaccctcgaacttctcaagaattgtcaattgtcagtgaagcaggtcaatcctcgtcagtatgttgctgaaattcctcagctatccaacctcgaagtttggtttcagaggcccaaagacatcacaagaaaattgttatctggagatcttgaccttggtattgttggactcgatactttcagtgaacatggccagggtagtgaagatcttatcattgtccacgaggctctcgagtatggtgattgccgtttatcccttgcgattccccaatatgggatatttgaaaatggtaattcagtggacgagcttgcanaaatgcctcaatggacagaagaaaaggctctacgaggtgctactggttcacctatctggggcctaatttatgaaagaga

SEQ ID NO: 211038 - DNA, 532 bp, Glycine max
ctttttgtgaggattccaaagcatggcttcccttgcagcatccactgctgctgcttcccttggcatgtcagaaatgcttggaaaccccatcaacctcagtggtgccacaaggccagctccatctgcctctagccctgcctccttcaagactgtggctcttttctccaaaaagaaggctgcacctccaaaaaaagctgcagctgctgctcctgccaatgatgagcttgccaagtggtatggtcctgacagaaggatcttcttgcctgagggtctcttggaccgatctgagatcccagagtacttgaccggagaagtccccggagactatggttatgacccatttggtcttagcaagaagccagaagatttttccaaatatcaggcatttgaattgattcacgccagatgggcaatgcttggtgctgctggattcatcattcccgaggccttcaacaaatatggagcaaactgcggtcctgaggctgtttggttcaagactggagctctgcttcttgatgggggtaccttgaac

SEQ ID NO: 211039 - DNA, 537 bp, Glycine max
ggagttgtaaattaagagcatggctgcacaagctcttgtatcatcatcatctcttaccttctcagccgaggctacaagacaaagtcttggaccaagatcactccaatctccatttggcttctcaagaaaagcctcctttcttgttaaggcagctgctactccccttgtcaagcaaggatcagacagacctttgtggtttgcatcaaagcaaagtctttcctacttggatggcagccttccgggtgactatggatttgaccctctgggactttcggaccctgaaggaacaggagggttcattgagccgaaatggctagcatatggtgagataatcaatggtcgttatgcaatgttgggtgcagttggtgcaatagcacctgaaattctaggcaaggctggtctgatccctcaggagacagcactcccatggttcagaaccggtgtgttcccacctgcaggaacctacaactactgggcagactcctacacactgttcgtgtttgagatggcactgatgggatttgcagagcacagaag

SEQ ID NO: 211040 - DNA, 506 bp, Glycine max
gactggtgagagctgttctttatgaagctgcaaagaagagagagatgagatacgatgacataaagaaaattgacaaaggaataagacgacacttccatgatgatatcactgtggttgtaatctatcctgatcaccatgcaggctcctctaagcaaactgctgttggctatacaactgccccagttgatattttttccctaaatgcggatgggatgcttggtacagttgcctaagagtgaaattgcttcaaaggatcatacactgacattatttggggcaaaaattatttataggtgaagattaatattgttggtaaatgaagggaattcttgagaaaaatatacaaaaaattactgcatagatatagtagctgggagttgctgacagattctttctggtgcagatatgcatttgtatagttgtgaagtttattttttgggtttgaaggtcataaattttgtggtatttccaaaggaagaaattttaaacacctttgactgggtagc

SEQ ID NO: 211041 - DNA, 471 bp, Glycine max
gactggtgagagctgctctttatgaagctgcaaagaagagagagatgagagacgatgacataaagaaaattgacaaaggaataagacgacacttccatgatgatatcactgtggatgaaatctatcttgatcaccatgcacgctcctctaagcaaactgctgttggctatacaactgccccagttgatattttttccctaaatgcggatgggatgcttggtacagttgcctaagagtgaaattgcttcaaaggatcatacactgacattatttggggcaaaaattatttataggtgaagattaatattgtcggttaatgaagggaattcttgagaaaaatatacaaaaaattactgcatagatatagtagctgggagtcgctgacagattctttctggtgcagatatgcatttgtataggtgtgaagtttattttttgggtttgatggtatcaaatttgtttctctttgga

SEQ ID NO: 211042 - DNA, 528 bp, Glycine max; identical to SEQ ID NO: 211002

SEQ ID NO: 211043 - DNA, 542 bp, Glycine max
gctcctgaatctgaaaggagatgatggtttcagaatgaatgaagtgctagtatcattgtggtatttaatgggcttgtggccattggtatatagcatgctcttgcttccaaccggaagaagaagctggtttcatatcttccatttgttgttctacagctcaaaaaacaatattcctgtatggccattcctgatactttcatgttttggtggtgcatatgttcttcttccatatttcgtactttggaaaccgccagctcctcctgtcgaagaaactcagcttaaaacatggcctttgaatttcctggaatcaaaagtaactgcaatgatatcacttgcggcaggggtagccatcataacttatgctggtctagctggacaagatgtgtggaaagaattttaccagtacttcagggaaagcaaatttatccatattacgtccattgattctattatactttccacatttgcaccgatgtgggtttacaacgatatgactgctcgaaaacggtttgacaaggttcttggctcctttccatatcatt

SEQ ID NO: 211044 - DNA, 441 bp, Glycine max
ttttcttcctttttttttttttttttttttttttttttttttttttttttttacatgggtttgctggcttttgaatatacaaactgaagctgttaaccaattacaaaaagaacgcgtgcaaacgcacaacacaccgaaggcgccaagcgaaacaccaacgaacccatacaacaacagcaaaacacacattcatgaagagcacaaacactcctaggacacccccatagataagtacacaacgtctgatacccacgaaccagcaagccaaaggcgaggcgaacaccggagagcatgtactcaacggagcaacagcatgaactacagaccgaaggccctcccatacagctccataaaccagcccatgcccataaacagctgattggccctcaaaggcagaagcaaccacatcaatgctcacatgccgaccataacgataagcat

SEQ ID NO: 211045 - DNA, 355 bp, Glycine max
ttttcgttcttttttttttttttttttttttttttttttttttttttttttttttttgcttttttggttttttttttttttctttttctcttttttgttttttctttttgatctctttttgaaaaaatccggggcaaacccctcctgccccccaacaaggggcccacccaccggggggctctagacttccaaggaaacccctgtcaacggggtgccctacggggctgcaaaaacggggccggcgcgaccgctgaagggcgccccccgttccacaggggcatctcacacgacccaccccaccggcgccggaatctccccccgggccggggcccccttcccaaaggggcccccacac

SEQ ID NO: 211046 - DNA, 561 bp, Glycine max
ctccgcatcgtcggcaagtactttcccgcaactgttgtgagtgcggagcggctcaagcggtatgtgttcaacaaaatttgcagtgagttgcctgaggggcccttctgtattgcttacatgcacagcaccgttcagaaggaggataattcccctggcatcaccatcttgaggtggatctatgaagaacttcctgctgatttcaaggacaggcttcagactgtgtatttcgtccaccctggctttcggtcccggctagtcatcgctactcttggccgctttttcttgagtggagggtaactcatctatcaatgctgaccaaaaaaaaaaaaaactcatctatcaatttttcttaacagaaatgaacatccaaaagcattctatttaggagtatcatttaggtcgtgtttggataaacttctttcaagagaagcagaataaaaaagtaaaatgaataaagcttctataagtttaaatcaatttatgcacttcagcctttgaagaagtttgatgaaagagttaatgtaaaaaatgaagtgcataagttgatttaaattctgagaa

SEQ ID NO: 211047 - DNA, 507 bp, Glycine max
ctgaaattaagagtgcaattcatgcattgggcgttgaaactgttatctttgatgatgagctgtcagctgggcaattgcgcaacttggagaagatttttggtggagatgtgagagtttgtgatcgaactgctctcatccttgatatatttaatcaacgagcagcaacacatgaagcgtctttacaggtttcattagcacaaatggaataccaactacctcgtctaactaaaatgtggactcatcttgagcgtcaagcaggaggaaaggtgaagggaatgggtgaaaaacaaatagaagtggacaaacgtattctgcgcaaccaaattggtattcttaaaaaagagctagaatctgttaggaaacatcgaaagcagtaccgtaacaggcgtttctcagtacctgtggcagttgtatccttggtgggttacacaaatgctggtaagagtacacttttgaatcaactaacaggagcagatgttcttgccgaggataaattatttgcaactt

SEQ ID NO: 211048 - DNA, 536 bp, Glycine max
gctgtggttcgtggctttctggggcagcaacaacttgagagtgcactcactggcatggacttggtaatcatacctgctggggtaccaaggaaacctgggatgacaagagatgatttatttaaaataaatgctggaattgtgaggaccctttgtgaaggaattgccaagagctgccccaatgcaattgtcaacttgattagtaatccagtgaattccacagttgctattgctgcagaggttttcaagaaagccggtacatatgatccaaagcgactactgggtgttacgacccttgatgttgtgagggcaaatacttttgtggcagaggtacttggagttgatccaagagaggttgatgttccagtggttggaggtcatgctggtgtcacaattttgcctcttttgtcacaggttaagcctcgcagtagcttcactgcagaagaaactgaatacctgacaaatcgcatccaaaaggcggaactgaagttgttgatgcaaaagctgtgaaggttctgaacactattcatggcatatgc

SEQ ID NO: 211049 - DNA, 555 bp, Glycine max
ggtaattgttttcaatatttttaaaataaaaatagcgaagagaggataggctcattacataaaaaattggtaaatttcccataagtaattgagtgtgagagccaaatgaatcgaaagattcatgtttggttcgggaagagatcctagacattttgaaatgaatggaaagagagtctactttcattaagtgatttattagataatcgaaaacagaaaatcttgagaactattcgaaactcagaagaattacgggaaggggccattgaacagctggaaaaagcccaagcccgcttaaggaaagtcgaaacggaagcagatcgttttcgggtgaatggctattctgagatcgaacgagaaaaattgaatttaattaattcaatttatacgactttggaacaattagaaaattacaaaaacgaagccattcattttgaacaacatagagtgattaatcaagtccgacaacgtggtttacaacaagccttacaaggagctctatgaactctaagagttgcttgacaacgagttacattacgtactgtcagtgctatattg

SEQ ID NO: 211050 - DNA, 436 bp, Glycine max
attcgaattcattttatttatatattaatattatattcaaatgaaataaaaagatattaaaagatactaattataagaatttgaaagtgaaattataaagttattaaatgattaatcaatttttttctacctgttcctgtagtaaaaagagttccatctgttcttgaatagcttccttcaaaaggacttctgcttacccagtgaatgtcttggtagaagatatgatttctttgaattgaggtttattcgtgtataagtaagcacgtaactcaacaagaaatttccttacctgtccaatttgtaatgaatcaagataaccattcgttccagtataaatagttattatctgttcttccacggtaagaagagctgattgggattgtttaagcaacttgcgcaatcgttgagctcttgctaattgattttgagtcgcttt

SEQ ID NO: 211051 - DNA, 521 bp, Glycine max
caagcttgagagtaacttcctcaaggaacatgccttggaaatatataatgaagatcatgcaggatacatggatacgatgaacaaggttcttagtgctcatttacgtgcttatataccagcattggagaaactacaattgcatatagcaccatatcatgactgaactggcgtagagacttttaacattcggcctattcataagaccaagggaaccactgaacaatcgatctgctgcattagctcttggggataggattaatatattgcaggataatgctgaacctgtattacttcctcatatagctcaagcccgatcccatagacatccatatgaggtcctattcacgagcttgcataagctgctgatggatactgctacttcataatgttacttgtgtcatgatttctttggacaagaatctatattttctgaacattgtccaggtccattacgtgacattgatgagcacttcaagtctatacttccaaattgatatgatgctatatgtctcatgcttatg

SEQ ID NO: 211052 - DNA, 374 bp, Glycine max
tcttattatttcagttttgcatatggttcgaatttgctaatagctccaatgggtactattgttgaagctgatgacacatataccaagatcctatgaagatggccaggcttttactatggcatggtgcacatgctcaatgacataactgctgcttgctggctcacctatttattattgaccttgacagatattggactttcacctagcatacagatgctccacagaagaggagaatgaacaagttactggcttagattattaactatacagctctggcatagcacggtagagacgacacaactccaagaccccatggagagaatgcagctgatgtgatgctttcatgtcccgttgctgatggctgtgtcccatac

SEQ ID NO: 211053 - DNA, 352 bp, Glycine max
cgattttagttcttgtctactgtactgttgggatctcacggggtcacattcacccagcggggacatttgggatcattttggctcgcaaggtgtctatgatccaagccatcatgtacatggaggctcagtgcttaggtgctatctgcagagttggattggctcacgcattttccaatttctgacttcaacatgaaacggagaggggctaattccctcgctgctaggtacagcacaatgtactcgtatgagactgctgacaccatcggaacctttgctgagatctacagtgctgtctgtggctcttgccacacgaggaacgccagatagtcccatgtgccggttttggctccac

SEQ ID NO: 211054 - DNA, 450 bp, Glycine max
aaaagcatgaatgtaattaaaattaaaatttaacattttccataaatatattttgagtacagagatgacagctgaagagaataacttaaaagaaaaaaatgacacactaaagggaagaacaccacagaggaaagtgcaaaaggctccccctgtcatgaaagagactttaatctacacttatccacaatcttgaagacataatcgagagggtcaaagaaacgttgcaaaacacaagccaaaagcattcccaattattattaaacttgccatatcaacctccatctctccaattatcttctttccactagagccatcataaggaagagaaagacaactcaattatgggggttactcctgaatgatccaagagccttagctgcacctgctcttaagatgaactgatggtagaaggctgcaatggctgccccaaaaatggtcctacccaaaaga

SEQ ID NO: 211055 - DNA, 401 bp, Glycine max
cgccgacagtattgttgatctgagcggacatatgttactcccaggatttattaacacccacgttcatagctcccaacaaatggccagaggcatagcatacgatgtggatttaatgacctgtctgcatgagcgcatgtggccttacgaatcgtacatgagcgaacaggattcagccctatctactttgctttgagggattgaactcattcactccggcgtaacctggtttgcggaagctgggggccagcatgtttctgggatggctagaccagatggcttactgggtgtgcgagcttgcttgacccaatcaaccatggactctggccactgattgcccccatgctgggtcactcgaaccactgaccaatgcattcagtctcaaaatgacaatgatcacaggt

SEQ ID NO: 211056 - DNA, 431 bp, Glycine max
gatgaatcagagcaagtacactctagatgctgtcttaagtgaactctcatgcccgttgttgctgctttggggtgaccttgacccatgggttggtccagccaaagcgaatcgaatcaaagagttctatccaaaaactactcttgtgaacttgcaggctgggcattgtccacatgatgagacaccagagcttgtgaacaaggctttattggattggttgaccaccctcactcctgaagtgactctccaaacagtttgaacgcgtatgattttgtaaagccaattgaaaacaagttcttgattaagttttgagtttcaaatagttaatagtagttatcagtatacgttgtgtacaaagaattgggtaaaggatactcagaatagagaaaaatcacagcaagaatactttatgatcattgttctacttcttctgc

SEQ ID NO: 211057 - DNA, 506 bp, Glycine max
agaaagggttgacggacagagaacccaccttttgttgtattgcaaatccatccgctctgccaccaggtgaatggaaggaagtggcggtggctgtgcttcaccgtctgcaccggtgaagcagtatttgcacgatttctcgaagctgtttcagtactatctggataaatccactccacattccacgtacagatggattgggactttcgtgatagcatccatctacgttttgcgcgttgtttatgtgcagggtctttacattgtctcttatggactccgaatctaccttctgaatctcttgattggttttctctcccctttggttgatcctgagctcgatccctccgactcccctttgcttacaaccaaaggctccgatgagttcaaacccttcattcgccgccttccggagttcaagttctggtattctatcaccaaggctctctgcatagcgtttgtgatgacctttttttccctggctgatgttgctgtcttttgggctatattac

SEQ ID NO: 211058 - DNA, 474 bp, Glycine max
tgtggttttcatcgtcttccttctcttatatttctttttttttttttgtcgtcgccgcacgccgaaacaatggccggaaaaggagagggtcctgctatcggaatcgatctcggaaccacctactcttgtgtcggtgtgtggcaacatgaccgagttgaaatcatcgccaacgaccaagggaacagaacgacgccgtcttacgtcggcttcactgataccgagcgtctcatcggtgatgcggctaagaaccaagtcgccatgaaccccatcaacaccgtcttcgatgccaagaggttgattggtcgtagattcagtgactcctctgttcagagtgatatcaaattgtggccttttaaggtcattgctggtgctgctgacaagccaatgatcgtgggtaactacaagggtgaagagaagcaatttgctgcagaagaaatctcttctatggggctcaataagatgcgtgagattgct

SEQ ID NO: 211059 - DNA, 446 bp, Glycine max
cacacgggcaaaacaattagtatcccatccaacaaaaatcataaaagttaaaattcaataaaaaagcatcaaataagttttaaacagataaatggatgaaagcaactacacatttagtccacttcctcaatcttggggccagcaccacttccaccagaaggagcagcataatcatcctcggctgccccagcaccagcaccacccatgtcaggaccagcaccaccttggtacatcttggcaatgataggattgcagatgctttccaattccttcattttgtcctcaaattcatctgcttctgcgagctggttgctgtctagccactggatagcttgctcaattgcgtcctcaatcttcttcttgtcagtaggatcaagtttctcaccaattttgtcatccttcacagagttcctcatgttgtatgcatagttttccaaagcattctt

SEQ ID NO: 211060 - DNA, 466 bp, Glycine max
ttttcttttttttttttttttcacacgggcaaaacaattagtatcccatccaacaaaaatcataaaagttaaaattcaataaaaaagcatcaaataagttttaaacagataaatggatgaaagctactacacatttaggccacttcctcaatcttggggccagcaccacttccaccagaaggagcagcataatcatcctcggctgccccagcaccagcaccacccatgtcaggaccagcaccaccttgggacatcttggcaatgataggattgcagatgctttccaattccttcattgcgtcctgaaattcatctgcttatgcgagctggttgctgtctagccactggatagcttgctcaattgcgtcctcaatcttcttcttgtcagtaggatcaagtttctcaccaattttgtcatccttgacagagctcctgatgttgcatgcatagttttccaaagcattct

SEQ ID NO: 211061 - DNA, 348 bp, Glycine max
  unsure (1)..(348): unsure at all n locations
cgatcttcaaactggtatactgcactgctgcgatctcaaggagacacattaacccagcggtgacattaggactgatactggctcgcagggagtctctgatccgagccatcatgtacatggtaactcaaagcttaagtgctatgtggagctttgccatagctaaggatttgcagaacgcttaactgaccaagtatggtggtgaggctaactccctacctggtggtacaagccangtactgcattgggcgcagagattatagcaacctttcgtatggcctacactggctcgtgtgtcactgactccaataggaatgccagagattcccatgtgccaagctcaggtttcac

SEQ ID NO: 211062 - DNA, 469 bp, Glycine max
aaaagcatgaatgtaattaaaattaaaatttaacattttccataaatatattttgagtacagagatgacagctgaagagaataacttaaaagaaaaaaatgacacactaaagggaagaacaccacagaggaaagtgcaaaaggctccccctgtcatgaaagagactttaatctacacttatccacaatcttgaagacataatcgagagggtcaaagaaacgttgcaaaacacaagccaaaagcattcccaattattattaaacttgccatatcaacctccatctctccaattatcttctttccactagagccatcataaggaagagaaagacaactcaattatgggggttactcctgaatgatccaagagccttagctgcacctgctcttaagatgaactgatggtagaaggctgcaatggctgccccaataaatggtcctacccaaaagatccaatggtcatcccatg

SEQ ID NO: 211063 - DNA, 494 bp, Glycine max
tgatcttaatacttgtctactgcactgctgggatctcagggggtcacattaacccagcggtgacattagggctgtttttggctcgcaaggtgtctttgatccgagccatcatgtacatggtggctcaatgcttaggtgctatctgtagagttggcttggctaaggctttccacaagtcttactgcaacaagtatggtggtgggtctaattccctcgctgctgggtacagcacagggactggattgggtgctgagattataggaaccttggttttggtctacactgtcttctctgccactgacctcaagaggaatgccagagattcccatgtgccggttttggctccacttcccataggatttgctgtgttcatagttcacttggtcaccataccagtcactggtactggtatcaaccctgctaggagtcttggagctgctgttatctacaaccaagataagccatgggatgaccattggatcttttgggtacga

SEQ ID NO: 211064 - DNA, 566 bp, Glycine max
aaaagcaggaatgtaattaaaattaaaatttaacattttccataaatatattttgagtacagagatgacagctgaagagaataacttaaaagaaaaaaatgacacactaaagggaagaacaccacagaggaaagtgcaaaaggctccccctgtcatgaaagagactttaatctacacttatccacaatcttgaagacataatcgagagggtcaaagaaacgttgcaaaacacaagccaaaagcattcccaattattattaaacttgccatatcaacctccatctctccaattatcttctttccactagagccatcataaggaagagaaagacaactcaattatgggggttactcctgaatgatccaagagccttagctgcacctgctcttaagatgaactgatggtagaaggctgcaatggctgccccaataaatggtcctacccaaaagatccaatggtcatcccatggcttatcttggttgtagataacagcaggctccagactcctagcagggttgataccagtaccagtgactgggatggtggccagtgaaccatgaacaca

SEQ ID NO: 211065 - DNA, 520 bp, Glycine max
agaacactgaagctaaccgccaggcataccgtaccctccttgtgacagttccaggacttggtcagtacatctctggtgccattctctttgaggaaactctctaccaatccacaactgatggcaggaagattgtcgacgtgctcctcgagcaaaacattgttcccggtattaaagtcgacaagggtttggtaccccttgctggttccaacgacgagtcatggtgccaaggtcttgatggtcttgcctctcgctcggctgcatactaccagcaaggtgcccgtttcgccaaatggcgtactgttgtgagcatccccaacggtccctctgctctggcagttaaggaagctgcctggggtctggctcgctatgcagcaattgctcaggacaatggattggtcccaattgtggaaccagagaatcttgcttgatggggagcatggtattgacagaactttttgaagtagcaaaaaaggtctgggcaaaggttttcttctaccttgctgagaacaatgtcttttga

SEQ ID NO: 211066 - DNA, 568 bp, Glycine max
gcaactaacgttttcttcaaagacgttatcgtcggggttgaaagcgctcgtgccggcgctgaagacattgatagttgacaagaatctagggtttcctgtgttctcggccatagatgaccttttcgatgaaggcctttacttgcctcctctaaaaggtatcaggagtatcttgcccaggctcgttaggcatattaaggatattcaggaagacattctcctttttgatcctcccgcaacaatgaacaaggacagatttttctggttaagggacgaagaatttggaagacagactctcgcgggtcttaacccttgctgcatccaattggtcacggaatggccattgaaaagcaaacttgatcccgaaatttatggccctgcggaatcagccatcactaccgaaatagttgagcgggaaataagagggttcaatacggtggaagaggccataaaacagaagaaactgttcatcctggactaccacgatttgttgttgccattagttaaggatgtgagagaacttgaaggcacaacgctatatggatcaagggcattgttcttctaacccgcg

SEQ ID NO: 211067 - DNA, 551 bp, Glycine max
  unsure (1)..(551): unsure at all n locations
agaggaggtgccaaaattgttcattgtagctgaatgagcaagtagtggaaaagctaaaaagcacattctgagaaagaaagatatgggtgcatactgcaacggcaacgtttcgttgtcaccatcctacgacgtcgcttcagcccaagatcccaggttctgcaagcacgttcacgacaacgtccatggcaatatttatctcgattcccttagtttgaagttcattgacactgagcagtttcagaggcttcgcgagttgaaacaactaggttttacaaacatggtttatccaggtgctgtgcattccagatttgagcattctcttggcgtgtattggcttgccagtcaatgtgtggaaaagcttaaaacttatcaaggcttggagcttgggattgatagatttgatattcaaacagtgaaacttgcaggacttctgcatgatgtgngacatggcccgttcagtcacttggttgaacgcgagtttcttccccaagtattagtggttctgattggcacatgaacaatgtcatccattggttgatatatggtgatga

SEQ ID NO: 211068 - DNA, 539 bp, Glycine max
gacaaggtggaccccttcgatcagcgcctctccaagtggcacaactgcgccctgtccaacgaacccttgagagagccctgcgtgatcgataaattggggaatatcttcaacaaggaatctctggtggaagcgttgttagggaagaagcttcccaaggaatttgggcacatcaagggtttgaaagatatgattaatgttcagctttctgcgattcctggagcggaggatggggcaaagtttcagtgccccattgcagggcttgaatttaacggaaagtataggtttttcgcgctgaggaattgtgggcatgttttgagtgccaaggctctgagggaggttaagtcctcttcgtgtttggtttgtcacaaggagtatgctgacttggataagattgtgctcaatggaagtgatgaggaggttgtaattttgcgggagaggatggaggaggagaagcctaagattatggagaagaagagttagaaggttatgcataataatggtgatggtgtgagcttggaaaggactatgttgagtgggac

SEQ ID NO: 211069 - DNA, 485 bp, Glycine max
ctcgagccgaatcggttcgagcggctcgagcctacttctacttccctttggtctcaaaccttatcccttatcctcccaaaaccaaaccatgtctacctccgcagcttctctcgcactcccaaccctcactctgcgaactcgacaacctctctgttctccccaatgcttctcctcgtccctctccctcacccctaactccaaacccatttccatttccgccgttttcctcaaaacaacgctgtcgtcgtcgtcgccgttgtcgctggcgtctcgcttcgttccccatgtctctgtgtcggagcaggaggaggacaccttcagcgacggagacggccccagcttctcccgcgaccttaagctctttgtcgggaatctccccttcagtgtcgacagtgcgcggatcgcggagctcttcgagagtgcggagaatgtggaggtggtcgagggtattcatgagaagactactgggaggagcagggggtttg

SEQ ID NO: 211070 - DNA, 465 bp, Glycine max
aaccaatatatatttgagacatctacttctatagtgaaaatacggactacaaatcagttacaaatgacaacaatcaaatttggaacatacatttaaacttcaagagacactgatatattctcctctgtcagatattgaaactgtgtgtacatctagtctcaatgcatgtaagtgtatttcttgtccaaactgattgccaatgacatcttgcagctgtataactcccaagtcccaactaccgaaatcctctctcgggtatagatgaaaagcttcagaaccgcttgggcttggaatctgctaatgagactcgtatagctctgccattcaagtccacaccatctaaggactgaattgcacttttgacctcatcagggctaccgaaagtcacgaatccaaagcctctagatcgggcacttttcctgtcatagattaccctagctttcaagaccttctttcctagttcac

SEQ ID NO: 211071 - DNA, 589 bp, Glycine max
ggagggccaagcaacaacgcccacgtggccgcgcatgtgcgacacgtgccgctccgtcccctccaccgtcttctgccgctcccacaccgcctttctctgcgccacgtgcgacactcgcctccacgtctctctcacgtggcacgagcgcgtgtgggtgtgcgaggcgtgcgagcgcgccccggcggcgttcctctgcaaggccgacgccgcctccctctgcgcctcctgcgacgccgacatccacgccgccaaccccctcgccagccgccaccaccgcgtccccatcctccccatcgccgccgccaacaacaacaacaacgacgacgacgacgttgctgacgttgacgacgaagacgaaaccgcttcatggctcttgctcaaccctatcaagagtgctactgtccctaacaccaataacaataacaataataacgggttcttgtataacggtgaggttgatgagtatttggaccttgttgataattgttactcttgtggtgataataatcacttcgcttcagctgctgctactactgatcattacgctcagcaccaacatttcgctggtgtttctcagaaaagtatgctg

SEQ ID NO: 211072 - DNA, 536 bp, Glycine max
  unsure (1)..(536): unsure at all n locations
ccgacctcaccggcttgcctatgtcgaatgcttcattgcttgatgagggtactgctgctgctgaagcaatgtctatgtgtaataatattcagaaagggaagaagaagaccttcattattgcaagtaactgccaccctcagacaattgatatttgcaagacaagagctgatggttttgatctcaaggttgtgacagcagatcttaaggacattgattacaagtctggggatgtttgtggtgtgcttgtgcagtaccctggcactgagggagaggttttggactatggagagtttgtgaagaaggctcatgctcatgaggtgaaggttgttatggcaagtgatttgttggcactgactgtgttgaagcctcctggggagtttggggcagatattgttgttggctcggctcagaggttcggggtgccaatggggtatggagggcctcatgcagctttcttggccactttacaagagtacaagaggatgatgcctgngagaatcatcggggtcagtgtcgatttttccgaaagaccgctt

SEQ ID NO: 211073 - DNA, 510 bp, Glycine max
cttctggcggtggcaccaaatgctgttcacaagctttggaaatggcacagaaatgagcggaacactactgggaaggccactgcaagtattcgaccacaactatggcaaccatctagaggaatactgacgactaatgatataatgagatactaacccagaggatacagagtcatgatttgcactgtcaaagaatgactcatatgttacgtcggctacagaggggaaaattgctgtattcaacatgatgacatttaagacaatgacaactttcatgccacctgcaccagctgcgacattgcttgcatttcattctcaagacaataatattattgctattggcatggaggactcttgcatacaaatctataatgccagagtggacgaggtcaaaaccaagctaaaaggtcatcagaagagaattactggtctagccttttctcatgttctaaatgtgcttgtctcatcaggagctgactctcagttgagagtctggagcacagatggatggga

SEQ ID NO: 211074 - DNA, 499 bp, Glycine max
agatgtaacattttaaatctgagtttattagtagaccaaagatcctatggtggctctttctccctcactacacaaactatactatacagcaagttgcaaatattgtacaagaaagcagaagggactgcagatgaactgccgtatgaattgaaatttccatacacattggaggtcaagtggtggtaaaggagaaggaaattaacacatgtatgttcaatgcggcttcaacacctcactttctctcaacagaaaagtggtagtgtaatttccacctccttgcttctagtctaattgctttagatatgaattacccagtctgaggtagctgcctccaattcagcatttggtgagactgaggatgcctttgcaagaaagatgaactgtttgttataccattttccttttctacaaattggcctgagtaactagtaactgggggagaccatactggaactacaccttcatccctttctctcctgggaccacttgaagatctact

SEQ ID NO: 211075 - DNA, 532 bp, Glycine max
gaaattaaactgtacgtttatcaaattaaccgagtatatatagctttatgtatggaattaagcattaattgtgtactatataatagttttgtacgtagctagctaaaagaaaaaaaaaagactaatcttaatttcttcttgattatactcaccattttaatcctcaattcctcaaatgaagaatatatatatatcctaccctgccaagtcatgtagaagctgtgctcccatcaaattcctgtaaggcaggttttgtccttcaccatcgaaaagagagtactgaactggttgacaatcttcaatttggtcccttggatagtacagtgaactctgtgttgctggcgggaacgctaggctcaccccatgttgctgtaaccctagcgtcaaagacaccccactctggttgttgttcccattctgatcattacttccgtaagaaactatacccgaggagtggtgtgtgtatgatgaaaaatcaagctccactgacccaaagcactgttcgtggcccttttggtcgttttggtaatct

SEQ ID NO: 211076 - DNA, 514 bp, Glycine max
aggacaaaaggaaaaggcaccaaattcaatttaagtggacactgtaactcaaaattatagaggaagacggtccaatatgaaaaatatagtaagatcatctcaaacttagcatcttctctttgcacctaagacattgagaatgctaagaatgttacacgcaagttccatcacaacttctagcacttggattagtacaacaaccttcacgaacagaaatatttacttgccaagtttgctttgcctccaattcaagactggaagaaagttcccctctgaatagcatcctcgttagcatttccaagagcagcctcgttcaagtacttgtcagccaattggactctcttgacattctcttgttcttggacaagcatgttaccatacagcaagagcttctccagagtcatcttgggctgctcaaaggttggaggtccatcttttgagttcacaagcttcttcccaacactgtcaacaccaacaccagaaatccacttcctcacttcatcatcatatactc

SEQ ID NO: 211077 - DNA, 494 bp, Glycine max
cacgcgtgcaatagctcgtgaatgtcggctcgaggtacgattggctgattgatagtcctttgggacgccgtaggataaccgaacgccgaagcagtggccagtaacggagagggtgctgctgtacgaaccgatctgggaaccacctactctcgtgtcagaagcgtggcaacctgaccgatatgacatcattgtcatcgacctctggaacaatacgactccgtcatacctgccttatactgatacccagcggctgaatgctgatgcagatgataaccaggatcacatggacctcatcgacacctggttcgatgcctctaggttgataggtcgtagactcagtgactgctctgctcatagtgatctcaaagtgtggcctattaaggtcattgctggtgctgctgactagccaatgatcgctgttaactgcaagggtgaagcgtagcaatatgatgcggaaaaattatcttctatggagcatcataagatgcgagaga

SEQ ID NO: 211078 - DNA, 501 bp, Glycine max
  unsure (1)..(501): unsure at all n locations
tgatcttcatccttgtctactgcactgctgggatctcagggggtcacattaacccagcggtgacattaggactgtttttggctcgcaaggtgtctttgatccgagccatcatgtacatggtggctcagtgcttaagtgctatctgtagagttggcttggctaaggctttccaaaagtcttacttcaacaagtatggtggtggggctaattccctacctgctgggtacaggacaggtactggattgggtgctgagattataggaacctttgttttggtctacactgtcttctgtgccactgacctcaagaggaatgccagagattcccatgtgccgggtttggcttcacttcccattggatttgctgtgttcatggttcacttgtacaccatcccagtcactggtactggtatcaaccctgctaggagtcttggagctgctgngatctacaaccaagataagccatgggatgaccattggatcttttgggtacgaccattta

SEQ ID NO: 211079 - DNA, 354 bp, Glycine max
ctttctccttttttttttttttttttttttttttttttttttctttttttttaaacacttgtattgagactttatatttcatctttcaatataattcatttctctacacttttagaaagccttatatctatatctaatacacctacaaagctttgccaagataaaaaatacactgcaggcaaaattttcatacacgtttagcataattcattctcccccaaaaaatctttggcacacctttatattatccccggattgcaacaccaagaggagccgcatccataggtataaacttctcaatttctacacccttgctgatggactgggttccataggctgaaatgtgcactccaa

SEQ ID NO: 211080 - DNA, 546 bp, Glycine max
cattcttcatcacttcattcaacatttctccccttagcttggatcaccaatggctgctgcggttagtgctgcagtctcttttccatccaccaagtctacctctcttccaagcaggaccttcctcattgccccagagagagttgtgttcaagaaggcttcattgcaaaacagagatgtttctagcagtggacgggtagtttccatcagagctcaagtcaccactgaggcaccagccaaggttgaaaaagagtccaagaaacaggatgaaggtgtggttgtgaacaagtttaaacccaagaccccttacattggtagatgcctgctcaacacaaagatcactggggatgatgctccaggagaaacttggcacatggtcttcagcaccgagggagagattccttacagagaaggacaatcaattggggtaattccagatggtattgacaagaatggcaaacctcataaactgagattgtattctattgctagcagtgccattggtgattttggagaatccaaaactgtttctctatgcgtgaaaccgct

SEQ ID NO: 211081 - DNA, 478 bp, Glycine max
gaagttggattcatctatattgcatcatccctcaaaaatagtactagtaaaactggcaatgaagttgttcatgaacagtataaaaatcgtcaaagaaaaattacagggtcgtcatatatctacacaacgcaggagggttgatagacttgctgcagcataaagtaggagatgatatttgtgcaagtgaacagaaattaatagacttcgacattccattgctctgctttcttcaattgcctcttgtactcagtccaatcaatgccatctttggcagccaatgacaccataatgtcatcaattcccttttccattccttttagtccacacatgtacacaaaagtgttatccttcttcagtaattcccaaagctcttctgcgtattgagccattcgggtttggatgtacatcttctcccctttctcgtttgtttgctctcgactcacagcgaagtcaagcctgaagttttcaggacttttct

SEQ ID NO: 211082 - DNA, 551 bp, Glycine max
  unsure (1)..(551): unsure at all n locations
aagaatttaagtcagaggttatagatgacacccagtgcagatactgaggagtcagaagtattaagtccaaggagaaatcttgaggaggaatatttgacctatgaagccaagattattaccaccttcagtgtagtggataacataaaacagcagttttatgctcaacaggggagaatttccaggaaagatgaagacagagttcaagagctgtttgaagccattgaaaagttactaactcaatttgagtctatagagagaccaattcttgaaatagagacccatgcaaaggctgaaacaccaccttttgagaaaaagtctgatgctactccttcaggttctgctccaactcaaggtgccgagctttcaaagccagaaacggatgagctgccaaaatcaccttcagttaagacagaccagatattggatcatgaagctgaattagctaaactggaatctgagtttgggaaggttagtcaggattattcaactgaggaaattggtgcatgggaaattgatgagcttgaaagagaatngagcaagtagtaggttga

SEQ ID NO: 211083 - DNA, 521 bp, Glycine max
  unsure (1)..(521): unsure at all n locations
ggttttcatggtaacttgataagttacttgacccaagagctgaacatgccattggtagctgcctcaaacacactgacaaactttggaggaacatctagcttcacccctctcattggggctattatagcagattcctttgctggacgtttttggaccattaccgttgcttctctcatttatgaactgggattgattagcatcactgtatcagctatactgccacaatttcgtcccccaccatgcccaacacaagctaattgccaagaagccacatcctcacaactgtggatactctacatctccctcctcctcacatctgttggatcacgtggcattagaccatgtgttgtgcccttttcagcagaccaaattgacatgaccaaaagtggtgtggcatcaagaaagtggaacatcttcaattggtactttntcagcatgggcttcgcttctcttagtgctttgaccattgaggtttacatgcaagacaacatgggctggggatggagccttggaattccatg

SEQ ID NO: 211084 - DNA, 486 bp, Glycine max
aacgaggaatattaaaaagcagtccctgctcacatatttgcattttgtagcttaagattttaataacatctcaaaaaccaaaatattgaaacatttgcaagcaaaagccaatgcggacacctgatattgtaacaatgatattgggagaactggcgataattcactaacacaaatgatttaaaaataaacatttctaggatgtccctcattgatacataaaaactcatagcaaccaaaaagtactaactgaatgaaattcataacaaaatttgaaaattgcacatgatataatgcctatgatgcacttttcttcagcttagcaagctcttgcctaacaacagctgccctcttgatcttggccaacattatcttgaacctatcaaagtcattaagggatgccctcctgttctgcacaatcagttttctgccccaagaactcttttcccatctgttcttaacatcagcagcctccatggcttgaatgag

SEQ ID NO: 211085 - DNA, 476 bp, Glycine max
  unsure (1)..(476): unsure at all n locations
gttctattctctgaacaatggcgtctctctctcacctcaacaaactcctctgcatgcccccgctcaactcttcaccctctatttcgccaccacgcagcagcgtcggaatttggaccaaacctgtcggaaggccgaggctactggtgcgtgtccgagcggtcacgagcgacgacgagtgggggccggagaaggaggaggcgtacggcggcggcgtagcggtggaggagaaaccgacgaagtcggagacggagacggagaagctgaagaaggccttggtggattcgttttatggcaccgatcgtggactgaaagcaacgagcgaaacgagagcggagatcgttgaactcatcacacagctcgaggccaagaaccctaaccctgttcccaccgacgcctngactcttctcaacggaaaatggattctcgcgtatacatcctttgcaggtttattcccattggtgtcaagtggaacacta

SEQ ID NO: 211086 - DNA, 436 bp, Glycine max
cacattgacatcatcagccatggctgcctgcgtctcctctgtcggagctgtcaacagagcgtctcttcaacctgaatggatctggatctggaacttcagctcccagtacatacttctttgggaccagctggaagaaggctcttgcctcaagggtccccaactgcaaggaatccgcgtgaagcttcagatagttgttgtcaacagaagatagagattgatgagacccacacagaccgacatcggacagatgcgaaggatcttgcctatgatatctcagacgaccagcgagacttcacaacaggagagggtgtgcttgacgtccattcccaagctgcacaggacgctggaactcactatgcagtcatgagcttctacgagtgcctcagcactggacttcgcagtacttggacatcaaaacgtatggattctacattgc

SEQ ID NO: 211087 - DNA, 481 bp, Glycine max
accatacccgctgctgtagcattatacacattattattactcttgctcccgtcaagataaatctgaccccttcccctgttcccacctacgtatataggatattttaagaaatgaacatctctcttagtagtgggatccggggaaagaataggaaaggttatttctttatatttttgaccaggaacagggcctaccacaagaatatttttttttgtaggacgatagttttgaaaagacagattgcctatcttctctttaatctcaggcgaaatacgatcggggggtgccaattcaaaaccttccggtaaaataagaacagcccccacattcaaagctccctttttaccattagcaagaacttgtttcacttgcatatcataaggaattcgaacaactgcttcaaatacagtatcaggaaataccgcttgtggaacctcaatatccacgggcttattagctaaatggcaattggcacagacaa

SEQ ID NO: 211088 - DNA, 517 bp, Glycine max
tggcaaggtaactttctaatttgcacatcttgccttcttcactactctaatttgttcttcctaaactaatggattgagtatactgatacaataaacagacagtagcactggttggagaaagtggaagtggaaaatcaacagtgatttcattattacaaagattttatgacccagactcaggtcacattacactggatggaacagaaatccaaaggatgcaagttaaatggctgagacaacagatgggcctggtgagtcaagagcctgtgctgtttaatgacaccatccgagccaatattgcatatggaaaagcagacgcaaccgaggcagaaattataactgcagcagaattggcaaatgctcataccttcattagtagtttgcagaagggttatgacacgttagtaggggagcgaggagttcaattatctgggggacagaagcagcgtgtggcaattgcacgagctatagtgaagagtccgaaaatattactactagatgaagccacaagtgcact

SEQ ID NO: 211089 - DNA, 593 bp, Glycine max
gcaaactcgttaatttacagaataaagaaatcatgcttggtaatgttcacaaattcaaaggaatctgatccaaattatagcttcatcaacagccgatctatatggcttacaaatttatatgatacttgcacttaatcataaaaatacaacagcaagcattaattactcagaaataagattcaacctaactacttgctcaattctctttcaagctcatcaaattcccaatcaccaatttcctcagttgaataatcctgactaaccttcccaaactcagattccagtttagctaattcagcttcatgatccaatatctggtctgtcttaactgaaggtgattttggcagctcatccgtttctggctttgaaagctcggcaccttgagttggagcagaaactgaaggagtagcatcagactttttctcaaaaggtggtgtttcagcctttgcaggggtctctatttcaagaattggtctctctatagactcaaattgagttcgtaacttttcaatggcttcaaacagctctttaactctctcttcatctttccttgaaattctccctcgtgagcataaaactgctgtttatgtatc

SEQ ID NO: 211090 - DNA, 464 bp, Glycine max
gcatccattaacctttagttgtgtatacacaaaataaacttctttggtatgttttggtagcaaaagtggtaaccacttgatacacctacgattcaatgttcacactagaggtctcagaagcttgagcttcaacctgaacctgggaaacttccggaggtgggctttcaggttgaacagatgaggatagttcagcctcacttggcacagacacttgagtaatttccggcggcgtgaatttgttgatgtagtaactaagtgatggtccagagtattgagccgtctggatctgaggaggagcattcttaccaacttgtagcagtatcgacgatgctgctgcaatcgatatcagagcaaggccttgaacaattgctgctgtgttctcagctccatcagaagaagagccagcagttcctgaacttatagcactttctgccacataaactgctggctcaactgaatatatg

SEQ ID NO: 211091 - DNA, 440 bp, Glycine max
gcttgtttacttgtcaggcggtgcgggaattgcagccctggattgccaaggatgatgattcaggtcagaagatgtggagaatcaatcagcggattgtaaaattgactgtggaacttatgaggaatcatgagactgcagaatcattggtaattgtggcaagttcatcagatttactactgcgagccacagatgggatgctggttgatggagaagcttgcactttaccacagctggagctattggaagcaacagctagagcagttcagccagtgctcgagtttggagaatctggattggctgtggcagatggcctttcaaacctttgaaagtgtcggctctcatctacaattagatgtctttctcattcaagtgcacatgtccgagctctgagtatatcagatcttcgtgacattctgcatactggttctatcagatgtagt

SEQ ID NO: 211092 - DNA, 546 bp, Glycine max
gcttgtttacttgtcaggcggagcgggaattgcagccctggattgccaaggatgatgattcaggtcagaagatgtggagaatcaatcagcggattgtaaaattgattgtggaacttatgaggaatcatgagactgcagaatcattggtaattgtggcaagttcatcagatttactactgcgagccacagatgggatgctggttgatggagaagcttgcactttaccacagctggagctattggaagcaacagctagagcagttcagccagtgctcgagtttggagaatctggattggctgtggcagatggcctttcaaaccttttaaagtgtcgcctctcagctacaattagatgtctttctcatccaagtgcacatgtccgagctctgagtatatcagttcttcgtgacattctgcatactggttcaatcagatgtagtcctaaaccttcgagattaaatggcacccacaacccttcttatcaatacttcaatttggatgccgttgactggcaagctgacttagaaaaatgcttgacttgggaag

SEQ ID NO: 211093 - DNA, 384 bp, Glycine max
tttttttttttttttttttttttttttttttttttttttttttttttttttttttaaaaaaaaaaaataaaaaaaaaaaaaaaaaaaaaaaaaaaaaaaaaaaaaaaaaaaaaaaaaaaaaaaaaaaaaaaaaaagaaaaaaaaaaaaaaaaaaaaaaaaaaaaaaaaaaaaaaaaaaaaaaaaaaaaaaaaaaaaaaaaaaaaaaaaaaaaaattataaaaaaagaaaaacaaaaaaaaaataaaaaaaaaaaaagataaaaacaaaaaaaaataaaaaaattaaaaaaaaaataaagtataaaaaaaaaaagaaaaaaattaaaaaaaaaaaaaaaaaaagaaagaaattaaaaaggaaaaaggaaaagaaaaatttataag

SEQ ID NO: 211094 - DNA, 513 bp, Glycine max
aagattctggctgtggcaccaaatgctgttcacaagctttggaaatggcatagaaatgagcggaacactactgggaaggccactgcacgtattcaaccacaactatggcaaccatctagtggaatactgatgactaatgatatatgtgatactaacccagaggatgctgtgtcatgttttgcactgtcaaagaatgactcatatgttatgtctgcttcaggggggaaaatttctctattcaatatgatgacatttaagacaatgacaactttcatgccacctacaccagctgcgacatttcttgcatttcatgctcaagacaataatattattgctattggcatggaggactcttccatacagatctataatgtcagagcggacgaggtcaaaaccaagctaaaaggtcatcagaagagaattactggtcttgccttgtctcatgttctaaatgtgcattgctcatctggagctgactcctcagtgtgtgttaggagcacagatggatgggaa

SEQ ID NO: 211095 - DNA, 238 bp, Glycine max
aaaggaaaaggcaccaaattcaatttaaggggaccctgtaactcaaaatttttgaggaagacggtccaatttgaaaaatttagtaagatcatctgaaacttagcatcttctctttgcacctaaaacattgagaatgctaagaatgttacacgcaagttccatcactacttttagcacttggattagtccaacaacctttacgaacagaaatatttacttgccaagtttgctttgcctt

SEQ ID NO: 211096 - DNA, 504 bp, Glycine max
  unsure (1)..(504): unsure at all n locations
gtctcaatcttgtatcaacataactgaatctcagcctcgctttttcttctcggataagtacatacatacatagtgtttttttcattaattatcatgcagaacagcctaataacaattgacaaaataacatgaaatagagtggaattgtggaaaacatgaaagaagaaagaaaatgatgattttgatgatgagagaactcaatttggctgcgttgctcgatcgatatatgtatatatattatggcaggttcaattcctaagcttttgcagctactggagtctcagccttgctggctattagctgctcatatagatctcttatcttcaaaccaactatggtttggaagagacctgttccattgttgctgccgggaaaatcagcatgcttcaacatctgttgagtaacctctccatagaactttgtagagaggttgcttangtggctctcaacgtatattagttcatctagtctgtcaaattgccatccatttctacaactgacacc

SEQ ID NO: 211097 - DNA, 498 bp, Glycine max
  unsure (1)..(498): unsure at all n locations
ctaggggagtgatgctgggtcctgaccagcccgtgatcctccacatgcttgacattcctccagcagcagagtcgttgaatggggttaaaatggaattggtggatgctgcattccctcttcttaaaggtgttgttgctacaaccgatgtggttgaggcatgcactggggtcaatattgcagtgatggttggtggattccctagaaaagaaggtatggagaggaaggatgtgatgactaagaacgtctccatttacaagtcccaggcttctgcccttgaaaagcatgctgctgccaactgcaaggttcttgttgttgctaacccagcaaacaccaatgcattgatcttgaaagaatttgctccatctattcccgagaaaaacatttcttgtttgactagattggaccacatagggcactgggccaaatttctgagagactgaacattcangtttctgatgtanagaatgtcattatcttgggcaatcactcatcaaccca

SEQ ID NO: 211098 - DNA, 513 bp, Glycine max
gatccaaaattcaatatgcggcccatggtctaattccatgactaaaactgtaaagctcaaatatactatcctcctaaaaggattagatgttgaaatacaagtaattccaatgaaagacaaactctctcgagtgatagttccttggtatcttagaaggagcattattcaaaattgaagctacacttctgtgggcaaaccatgggaacctactaacaaggacagtagccaagaaggagcgatggtctctaatttaggcatgagtaagccaatgccttctcctcagaaagctcttctgcggtcaagtccaacttcttccttgagaactcatcaatgggaagtccttgaactattgtccattccccattggcacaagtgacagggaatgaatagatcagtccagctggaacattgtaggaaccatcagaatatactcccattgacacccaggtgccctgaggagttccaagaacccaatctctaatatggtcacaagcagcactagcagctgatagt

SEQ ID NO: 211099 - DNA, 537 bp, Glycine max
gagaagaacttcatgaccctgcccatcatcaaggttcctctcattcttggtatctggggaggcaagggacaaggaaaatctttccaatgtgagcttgtctttgccaagatgggaatcaaccccatcatgatgagtgctggagagttggaaagtggaaatgcaggagagccagcaaaactgatcaggcagagataccgtgaagccgcagacttgatcaagaagggaaagatgtgtgctctcttcatcaacgatcttgatgcaggagctggtcgtcttggtggaaccacccaatacactgtcaacaaccagatggtgaatgccaccctcatgaacattgctgataaccccaccaatgtgcagcttcctggtatgtataacaaggaagagaatccccgtgtgcccatcatcgtcaccggtaacgatttctccacactctatgcgcctctcatccgtgatgggcgtatggagaagttctactgggcaccaacaagggatgaccgcattggtgtctgcactggaatttttcgcaccgattca

SEQ ID NO: 211100 - DNA, 539 bp, Glycine max
  unsure (1)..(539): unsure at all n locations
ggacaaaaggaaaaggcaccaaattcaatttaagtggacactttaactcaaaattatagaggaagacagtccaatatgaaaaatatagtaaaatcatctcaaacttggcatcttctctttgcacctaagacattgagaattctaagaatgttacacgcaagtcccatcacaacttctagcacttggatcagcacaaccttcaggaacagaaatatttacttgccaagtttgctttgcctccaattcaagattggaagaaagttcccctgttaatagcatcctcgttagcatttccaagtgcagcctcgttcaagtacttgtcagccaattggactctcttgacattctcttgttcttggacaagcatgttaccatacgtcaagagcttctccagagtcatcttgggctgctcaaaggttggaggtccatcttttgagttcacaagcttcttcccaatgccgtcaacaccaacaccaganatccactttctcacttcgtcatcatatactctggccctcagtgcaccaaagaaatcaatg

SEQ ID NO: 211101 - DNA, 546 bp, Glycine max
aaagattttatccaattgaaattttaataatgactgggataaacttaagaattcaattattgaaattgaataagtaaacaatttaattggattggtcgaatggtatcaaaaaaatggagtactaactcccatttcttatttattattgaattaaccgatcaacttgctttgttatcgaacatttctttttgatttcaaaaattttccggaaaaaatttgaatctatctttatatgcgaatcaatcctactacttatggtcctgaagtttctgcgcttgaaaaaaaaaatctgggacgtatcgcccaaataattggtccggtactagatgtagcttttcccccaggtaagatgcctaatatttacaacgctctgatagttaagggtcgagatactgttggtcaacaaattaatgtgacttgcgaagtacagcaattattaggaaataatcgaattagagctgtcgctatgagtgcgacagaaggtctaatgagaggaatggagtgattgacacaggagctgccctaagtgttccagtaggtggagca

SEQ ID NO: 211102 - DNA, 430 bp, Glycine max
aggtattccgatattcgggccccttaacttggtatgaaaacacattggtagcctttactcggggcctaactcggctaaaagctagatttgccccaattggttggcttttgccttccgccttattcaaaatagcttctggtatttcaagagtttgctgggctttttggggaacaatggcactacccttttccggattatttactaaaacaggggtcccattattgggtattctagcaaaaccgcccattaaagccattggtaaccattgggctttaaaaaaacgttttttcaaaatacctatttttacgggtggggcaataggcccctgatttgggaaaaccccaatttggccgctattaggagataaaaggagttccttcactttcgaatcccaaacaattcgattgggggtgcagtcacaaagatttaa

SEQ ID NO: 211103 - DNA, 566 bp, Glycine max
  unsure (1)..(566): unsure at all n locations
cgtgaagccgcagacttgattaagaagggaaagatgtgtgctctcttcatcaacgatcttgatgcaggagctggtcgtcttggtggaaccacccaatacactgtcaacaaccagatggtgaatgccaccctcatgaacattgctgataaccccaccaatgtgcagcttcctggtatgtataacaaggaagagaatccccgtgtgcccatcatcgtcaccggtaacgatttctccacactctatgcgcctctcatacgtgatgggcgtatggagaagttctactgggcaccaacaagggatgaccgcattggtgtctgcactggaatttttcgcaccgattcaattgctgaacaggacgttgtcaagattgttgacacctttcctggacaatccattgatttctntggtgcactgaaggccagagtatatgatgacgaagtgaggaagtggatttctgggtgtggtgttgaccgcattgcgaagaagcttgtgaactcacaagatggaccctcacccttgagcagtccaagatgactctggagaagctcttgacgatggtaacatgc

SEQ ID NO: 211104 - DNA, 385 bp, Glycine max
cagatggcggaagtatggtcttaaggcagttaaaaatagtcctttccctaggagctactaccggtgcacaaacagcaaatgcacggtgaagaagagggttgaacggtcttccgaggacccaacaattgtgattaccacatatgaagggcaacactgtcatcacacagttggatttcctcgagggggaatcattagtcatgaagctgcatttgcgggccagttggctccaacaatgtcacagttttattatccgattcaattacccagcagagagaatgatgataataataataatactttgagcactatttctcagccatgccaagcacaggatgaaactggagaaggatcaagtgttatgatgccagctgatggatcggcaccg

SEQ ID NO: 211105 - DNA, 391 bp, Glycine max
gcgcagttagttgacggcgataacccgcaccaatacactcacagcgaggatgtgctactctgtgtgttgcctatgtttcatatctatgcgctcaattccattttgctctgcgggattcgttccggtgcggacgtgcttattttgcagaagtttgagatcactactctgttggagctcatcgagaagtacaaggtgacggttgcgtcgtttgtgccgcccatcgttttggcgttggttaagagcggagagactcatcgctacgacctgtcgtctattcgcgctgtggtcaccggcgcggcacccttaggaggggaacttctagaagccgttgatgctacgctaccacacgctacttttggacagggatatgggatgacagaagcaggaccac

SEQ ID NO: 211106 - DNA, 438 bp, Glycine max
acagatcgtaacaacttgctgaattttaatgtgttcatgctgtaattcagagtctggtctccaatatatacaacattataagttacacaagaataaattcatgcaatacttgcatattatatatatatattgataacgagatataaaattggaacaaaaaccacaacaggaagggcctgtggtacggtaagtaaaacagccacgattttcctctgtcacaattatggacctaattggccaccaccaaaccttcgttaagtcttgcagttaatacctttcgcagaattttgcctgagggtgctttaggaatagagtccgtgaagaaaactctacctattctcttgtaaaaaaccacctgttgtgaaatgtatttcttgatttcatcctcggcgatctcagaaccatttgaccttacaacaaatgcaactggaatttccc

SEQ ID NO: 211107 - DNA, 569 bp, Glycine max
  unsure (1)..(569): unsure at all n locations
ccttctccaaaaccatccaactctcatgttcgaagaaaacatacacaatctcttcaaactctaattttcttttcctttcatttaatttcctcaatggcggcttccgtcgaccagcgtccgtaccccggcctccacaatggcgtcgttcggcccctcaaaccaggcccggatatcccgcgtcccaagaagctaccccagccgccgccgccactctcggattcctcaagcgacgaagaagaagacaccaccttgaacttgaaggacctgattcgcaagggaacaacggaagttgaatcctccattttcgacccgcgcgacgatggaacctctgaccactggatccaacggaactcttcccttgtccgtttaacgggaaagcacccgtttaactcggagccacccctccctcgcctcatgcaccacggcttcatcaccccggtcccccttcactacgtccgcaaccacgggccagtcccccgggcccgctgggaggactggaccgtggaagtcacgggcctggtcaccaggcccacatgcttcaccatggagcaaactctncacgatttccc

SEQ ID NO: 211108 - DNA, 480 bp, Glycine max
gtgctcaagacaattctcgaaaggaaaggaccccctacattttcatgtgcggttgaaacgatatctaaaactgaatgccgagttcatcatagattatatgcaactgtggatgccattttggcaggaaaacctccattatttgaaatccgtcaatgggatgattctgacaacgagttgccaaaatatgctccattgcccgaagaacatcttggagaaacttctgacttaactaacaataatatcacgagttctgacaatgaacctagtgaggatgataaagatcacccacgtacttggtccacgatatggagtaccagtggacctgtgatgacgaggagttcaccaatgcaagtttatacttacaagattcttgaagctgatctgctacaagtggccaaggtaatggggcttgaagatgtaatagatgtgactgatgacattggaactgctgaagcaattctagcatccagttctgagata

SEQ ID NO: 211109 - DNA, 428 bp, Glycine max
agttattccgatattcggacccctcaacttggtatgaaatcacattggtagcccctactcggggcctaactcggctaaaagctagatttgccccaattggttggcttttgccttccgccttattcaaattagcttctggtatttcaagagtttgctgggcttcttggggatcaatggcactacccttttccggatcatttactaaaacaggggtcccattattggttattctagcaaaaccgcccattaaagccatgggtaaccattgggctttaagaagacgtattctcaaaatacctatatctacgggtggggcaataggcccatgatttgggaataccccaatttggccgcttttaggagataaaaggaattccttcactttcgaatcccaaacaattcgattggggggcaggacaccaagattt

SEQ ID NO: 211110 - DNA, 197 bp, Glycine max
ggacaaaaggaaaaggcaccaaattcaatttaagtggacactttaactcaaaattatagaggaagacagtccaatatgaaaaatatagtaaaatcatctcaaacttggcatcttctctttgcacctaagacattgagaattctaagaatgttacacgcaagtcccatcacaacttctagcacttggatcagcacaac

SEQ ID NO: 211111 - DNA, 534 bp, Glycine max
aatcagtgtttcttggaggctttacgttttggcagtacagaacttgtgcgcatactattgcagattgctcaaagaaacagcttggatgttgatgttgacttggcgttgggttttgcctcccattatggcaagataggaactatggagtgcttggtggaagagggaaatgccatagcctttttgggccctttgatgagagctgctgagaggggttgcatgcaagttgttgagtggtttgtgcagaggggttgccgagacatggaactatgccttgcccttacagctgccacttctagctgccaagttcacattgcagcttatcttctgccgcacgtacctcagcaggtccttgcagcacttagtgttgaaattcttaaggccgctggtgagcgcagcggtggatctcttgatggtgtagcatttcttctccaatctgacttcttaggtgatcctgcagctacttatgctgttgcagatattattgctaaatcagaggatgatgctgttgcccctgagttgaagacttttcttaag

SEQ ID NO: 211112 - DNA, 401 bp, Glycine max
atccagcagcacctacatccctagagatgagaactttggtcacttgaagtcatcagatttccttacatatggaataaaatccatagctcaaaccgttttacctacatttcaatctgcatttggtttaaatgccgagtttgataggtttgacgacgtgcgtggactctttgaaggtggaattcatctccctacagatgcactcagtaaaattagccccctaccagtgctcaaggaaatcttccgcactgatggtgaacaagtcctcaagtttccaccacctcatgtcatcaaagttagtaagtctgcatggatgactgatgaagaatttggaagagagatgcttgctggtgttaatccatgcctaattgagtgccttcaagtgttccctccaaagaagcagc

SEQ ID NO: 211113 - DNA, 545 bp, Glycine max
gacatagagaaatttgatttgacattcatagatcagaatatcagacttacatacgggtgaacatgatacgggtgaacatgataggagcacaatactatacataaaaactgacacaacaccctattagatatgaaaaactagatagcatccaattacaaaacttaagcatacataagaaaattatgcacacataagtttgcacgtttatttgtcaatgagaggtacgttggaaggaaagaaaaccacacaccacacaccacacactctcattagatagagatgctgttgggaattcctctgaaagtaaggccttccccactggtaggaagaagcacagtgtagggcatctgcgccggtccattacggttcctaaggcttgaattcttgttcctccctgagattttgtcctcaatttccttcagcttgtttccaaacttcttaaaggcttgaattgcctttgtgtcatcagtccaatttggatggtccctctgtccaaggtagacctcatcagaagcatgccttgacaatatctctatcactggtag

SEQ ID NO: 211114 - DNA, 569 bp, Glycine max
  unsure (1)..(569): unsure at all n locations
agcaaaagcaagaagaactagtctaagcagaaatggcctcttcagtgatggcatctgtggccctcaaacctgcccctttcactgttgagaagtcctcagttagaggccttccctccctctcaaggaactcctcttcattcagagttgtggccagtggtggcaagaagatcaagactgacaagccttatggaattaatggtggcatggctttgagggaaggagttgatgcatctggcaggaaaggaaagggaaagggcgtttaccagtttgtagacaaatacggtgctaatgtcgatggttacagtcctatctacgacaccaaggactggtctccaaccggtgatgtctacgctggcggtacgactggcttggctatctgggctgtgactctacttggtcttcttgctggtggtgcacttcttgtctacaacacaagtgctttggcgcaataaactttgcaaatcgatgttntaagctcanacttagtccatgtaactatctaaaaatgaagaattattcatgaagtactttgtggatcgtgttccttctggtctataatgtgtgatgtg

SEQ ID NO: 211115 - DNA, 529 bp, Glycine max
cacatccacacatttatagaacagaaggaacacgtatccacaaagtacttcgatgaataattcttcatttttagatagttacatggactaagtttgagcttaaaacatcgatttgcaaagtttattgcgccaaagcacttgtgttgtagacaagaagtgcaccaccagcaagaagaccaagtagagtcacagcccagatagccaagccagtcgtaccgccagcgtagacatcaccggttggagaccagtccttggtgtcgtagataggactgtaaccatcgacattagcaccgtatttgtctacaaactggtaaacgccctttccctttcctttcctgccagatgcatcaactccttccctcaaagccatgccaccattaattccataaggcttgtcagtcttgatcttcttgccaccactggccacaactctgaatgaagaggagttccttgaaagggagggaaggcctctaactgaggacttctcaacagtgaaaggcgcaggtttgagggccacagatgccatcac

SEQ ID NO: 211116 - DNA, 510 bp, Glycine max
ggacgaatacgccaaacaaacacttgactcagccacccaattcatatggggggtcttgcagcgaaacgctcctgctgatagaaaagatatacaaaaaataaacttatttgtggaggacagggttgagccaaatggtgttgcagcatatacaagcaaggatgagattcatgtcattgccaaatatgttaatgactatggtggggatgtgaagacagagatcacaggggtgctgcatcatgaaatggtccacgtttggcatgtggaatgggaatggtcaggctgcaagtggattaattgaaggtattgcatactatgttaggctgaaagcaaactatgcacctagccactggaagaaagcacgggagggacagaaatgggaccagggttatgatgatactgctcgaggctggactattggaatactctcaaaagtgggtttgtggcacaattgaacaagcaaatgaggactggttatagtgatcaattctttgttcagttactgggcaagac

SEQ ID NO: 211117 - DNA, 529 bp, Glycine max
aaaaatatagaaatagttttttcttgaacttgtaaatttttggcgtacacatgacttacaaatcagaatcagaacatccattccactataacttactataagttgcaactttaaatatttagagttgatacaagcctacaatagagattgcgacatactagtcgcttatttttaaattagcaagctcttagccatttacctagggtatattgccatacttagccttgtagtcttgccaaagctgatcaactgtcttgcccagtaactgaacaaagaattgatcactataaccagtcctcatctgcttgttcaattgtgccacaaacccacttttgagagtattacaatagtccagaaaacgagcagtaacatcataaccctggtcccatttctgtccctcccctgctttcttccagtggctaggtgcatagtttgccttcagcctaacatagtctgcaataccttcaattaatccacttggagcctgaccattcccattccactggccaacgtggaccatttcatgata

SEQ ID NO: 211118 - DNA, 443 bp, Glycine max
cttgaggccttcaatttcacccttcacacgtggtggtggtgttgttcttcttctcttcccctttctttatcttcttctgagcttgtttaagctctctctatttgattccattaacatatattatcacaatgtgtggtattcttgctgatcttggatgttctgatgactctcgagccaaaagggtccgcgtgcttgatctctctcgcagattgaagcaccgaggccctgactggagtgggctccatcaacatggtgactgctttatagcacatcaacggctagccatagttgatcctgcttctggggatcaacctctctttaacgaggacaaatccgtcattgtcactgtgaatggagagatttacaaccatgaagagctcaggaaacagatgactaatcacaagttccgtactggatgtgaatgtgatgttgtcgcacacctg

SEQ ID NO: 211119 - DNA, 455 bp, Glycine max
gaactgataatagaaacacttttattaagacttcaaatcacagcattcaagataatacaatacgctacacttttagaaagccttatatctatatctatacactacaaagctttgccaagataaaagtacactgcaggcaaatttttcatacacgtttagcatagttcattctcccccaattattctttgtcacagctttatattatccctggattgcaacaccaagaggagcagcatccataggtataatcttctcaatttctacacccttggtggtggtctgggtttcataggctgaaatgtgcactccaagtgctgctctaccagaaggatcaaggttgttagaccaagcagcatcccactcaacagctttggctgtgctacatgcaacacttgctcctccaggaacggtgagcctagctgagttctgagggaagaacctctcaagatcattc

SEQ ID NO: 211120 - DNA, 476 bp, Glycine max
atgctggctatggcagcaaatgctgttcacaagctttggaaatggcagagaaatgagcggaacactactgggaaggccactgcaagtattcaaccacaactatggcaaccatctagtggaatactgatgactaatgatataagtgatactaacccagaggatgctgtgtcatgttttgcactgtcaaagaatgactcatatgttatgtctgcttcaagggggaaaatctctctattcaatatgacgacatttaagacaatgacaactttcatgccacctgcaccagctgcgacatttcttgcatttcatcctcaagacaataatattattgctattggcatggaggactcttccatacacatctataatgctagagtggacgaggtcaaaaccgagctaagaggtcatcataagagaattactggtcttgccttttctcatgttctagatgtgcttgtctcatctggagctgactc

SEQ ID NO: 211121 - DNA, 510 bp, Glycine max
aaacacactcattgcacatagtaatgcgctgtatttaagtgaataaaatattacatactagttcacaaatgcaaaaggacattcatcagccaaatattcgagactcttacagttctcaagaaggcgcgtcagcatagggtgagtggcgttagaactcacaatttcatgcttaacggcccaaggaacagccatgaaagctactggaaaaggatcaactctaataagaaaaacaattttcttacctctcccaagtgctgagcgaatccttttgaagatatctgaggagcgattgttaactgcagaactaatccaagcagcggtgggtaaaccaccacgtacactaccacatggaacatttacaacgacagcttctggggggaattgactcacaggataaagacaatgcacaagaattggtaaccaagaattcactggagaattcccatcaaagaattcttgagtgttagccaacacaagcttatcatcgaaaacaatcttgtttggaaaagc

SEQ ID NO: 211122 - DNA, 480 bp, Glycine max
gtactggcaatcagacgctcagtgcatcgcgttcctcacctacgaatgctgctcgtggctgtcgcggcttgaaccctggttcgttcctgactctagccaaagggtctgaaagtggagggtcttatggtcaatggcagcgctatagggaggacagctgccacgacgaccttggctgagagcactgtggttctgactacgttgctcatcaagcggacattggatggccactggaacgtgattgacgtgcgctacggcctagtcggcggctacgctgtcattacataccgctgtgccgtagcgcaaccgtcaggcgcgattgtgtgtgggtttgtggcggcgtgggttttgatcgggcttaataagcttgccgcgaatgtagagtacgatgatccgttggatgcggctcagcttcacggcgggtgcggagcgtggaggtgtctcttcacgggattgtttgcgaagaaagagtacgtggaggag

SEQ ID NO: 211123 - DNA, 570 bp, Glycine max
gtgtgtgttgcagtaagtacccaaatcaatgttcacactcacttctccttcttccagggccttacccatggattctcttcccaaattgcgccacccttctccatttcccactcccttatcctcttccctctccttccgctctttaccgccaccccattttccttcgtcgtcgtttaggttaccctccatcagagcctcctcctcaccctgccaaaacgaccccgcttttcgcaccccgagaaacacgccctccctcccccccctcctccaaaccctaacctccttcctctcccccctcctcgaaaccacctgcatcgtcatcgccgccgccgccttcttcttcatgcgcttccaccacacgcccgccgtcatcgccgctccgctcacttcccccgccgcggaaaccgacaccgccttcacccaggaggaagccgagaggcttctcgaagagcgtctgagcaccaaccctcgcgataccgaggcgctccacgcgctcatggaggtcaaaatcaaagcgcgtcagatggacgaagcgttcgaggttttgaaccgtctgattgagctcgaacc

SEQ ID NO: 211124 - DNA, 520 bp, Glycine max
  unsure (1)..(520): unsure at all n locations
tttctttttttttttacaagttaattgaagaaattcaatttgtttaatcaaattccccaaccccctctctttttatttgttcactacgtattatatgcaataaaatattatatggcagaaatattctaagttggaaaaaatagaaactaagatataggatttttcaggaaggggttaaaaaagattattttattgatatttttagaatatttctatttcgacacaaacaagaaggaataggaatcggactctaggaaaagacaaaaaatcccccctagagtaccttttccatattttaattgattttgtttcaaattatctatctatatagatatctattttatgtttagtatcgaatccaattttattgtattttacaatcgaaatttctataatagaactctctattatagaaaaatgaaatctgaaaaaaacagtgtcataaccataatattcgaatttattggngggttgaaaaaacaaagtcaaatagtcttcctgacaatatccatactcgagt

SEQ ID NO: 211125 - DNA, 449 bp, Glycine max
tcctttttttttttttttttttttttttttttttttttttttttttttttttttgttttttggtttttaaaaaaaatattggctctttattacccgggtcaagacattaaatgggatttaaggggaaaataaaatttttggggcccctaactaaatgggtttatttaaatggaactggtaccggaaagttcggcacaacatttccatagttttttaagatattttcccccagccaaaaaaaaggggtacatgccaaccattttggagcctaccgggggtttaaccctgggaaaaacccgaaattgggccatggcaggaatgcaaattttttcaggaaggaaaaaaaacttcttagcaaaagggatggggcctggggttggtttggcaaaaattggggggaaacaacccggctttatacattttgaacccccgaactttgattcttattt

SEQ ID NO: 211126 - DNA, 605 bp, Glycine max
  unsure (1)..(605): unsure at all n locations
ccttaagcctagcatggttacacctggagccgagtccaaggacaaggccagtcctcagacagttgctgattacaccctcaagctccttcacaggagaattccccctgctgtccctggaattatgtacttgtctggtggacagtctgaggttgaagctaccctcaatttgaatgccatgaaccaatctccaaacccgtggcacgtgtcattcttgtatgccagagcccttcaaaacactgccttgaagacatggggaggccgtccagagaacgtgaaggcagcacaagatgcactcgcattgcgtgccaagtccaactcactcgctcagcttgagaagtacactggtgagggtgaatcctaggaagccaagaatgagttgttcgtcaaaagctactcctactaagatgtttgcagtgaatatgatacttgctaggcagcaacaccagcagttacagtaggtgttgaccgacgatgaagtggaagactaatttgtctaaaatgtaatgttcttatagtcctggagactgattatgttatggctnaatgcacctttacagcttaataaaccttctgcttgagtttgtactaaaaaaaatgaattaaaa

SEQ ID NO: 211127 - DNA, 531 bp, Glycine max
aagtacacaactcatagcaaaaggtttattaagctgtaaaggtgcatttaaccataaacaaaaatagtctccaagactataaaaacattacattttagacaaattagtcttccacttcatcgtccgtcaacacctactgtaactgctggtgttgctgcctaacaagtatcatattcactgcaaacatcttagtaggagtagcttttgacgaacaactccttcttggcttcctcggattcaccctcaccagtgtacttcccaagctgagcgagtgagttggacttggcacggaatgcgagtgcatcttgtgctgccttcacgttctctgggcggcctccccatgtcttcaaggcagtgttttggagggctctggcatacgagaatgacacgtgccacgggtttggagattggttcatggcattcaaattgagggtagcttcaacctcagactgtccaccagacaaaaacataattccagggacagcagggggaattctcctgtgaaggagcttgagggtgtaatcagcaact

SEQ ID NO: 211128 - DNA, 503 bp, Glycine max
  unsure (1)..(503): unsure at all n locations
gctatacaaagtccatattacttacaagtatacaaagcccatatacttacaagtaggatggtgacacataaattgagatgacaccaattgtgtgtgatagtgattacatatgacttcaagatcatttgtggaagaacatcacaatttgctaaatgataaatttgtcactctcacaagaactgctattaatgatctcccattgctggaacaataaatatgattttcaggcatacctcaactcaggcgttacttccttccggtaacgtaatcaatcttgtagttgaatcatattccattgcagttccacagttggagcatttgacagtgttggtggaaccaccatttgaaattgagagtatagtcccaaagaaagaggtattttcagtaccgcagttcggacaaggaccctttaaaatacaaagtcttttacaatggcatntgttagtgacagagctatccacacaatgaggggaacagcagcaaaccaagtgaaaatgaaacta

SEQ ID NO: 211129 - DNA, 339 bp, Glycine max
aataaaaaaaaaaaaataaaaataaaagaaaaaaaaaaaaaaaaaataaaaaaaaaaaaaaaaaaaaaaaaaaaaaaaaaaaaaaaaaaaaaaaaaaaaaaaaaaaaaaaaaaaaaaaagaaaaaaaagaaaaaaaaaaaatgaaaaaataaaaaaaaaattaaagaatataaaaactaaagcgtaaattaataggggaaaaaaaaagaatacagaaaatgaaagaaattgcataagaagaacacaaaaaaaaggaaacaaaataaaaaatgaaaaaaacagaggaaattaaaagataaatcaaaaaaaagaaaactttaaaagaaaacgaaatggaaa

SEQ ID NO: 211130 - DNA, 457 bp, Glycine max
gttgaaatggtttgttttcttaaacaatgttaaaaataaaaaaattacaatatttaaagttcaagcaaatattctactaaatataaactaatcataaaattaaaatttgtcatgttctattctataccctgtggcatgcaccaatggttcatctggaaaaacaaacttaatccctgataaatttgcccttgagcatcgatactatgcccattacattaacttctgtaagtgatgtaacaaaattacagtatcttgtcagccatgaaacaacactcacctcacatgtacccattccatcggctctttcagtctaaggcctgccccgcctcaagctgcatgatggacatttatattgctttatgctctcagcctttgcaggggtaatcttaacacactttccatggaaccacctctcacatatgtcacagcaaatccaaaactcatcagcgttgtaatt

SEQ ID NO: 211131 - DNA, 470 bp, Glycine max
aacaatatgaaaagaacactacattaccaaactaaatccactgcatcagaaggcaatgtatgtctacatataaaaatgttacgcacaacagagcttctggacgggaaaaagttccccagccacacaaatcttgtttaaaaaaaaaagaaatattttatatcaatttattataaacgttaataacattcattatcaagtccattacggatcccatcagcaacaaatcatgaaggaaggacatcaccgagttttctttactcttctgcagcactagcagcactaagatccacactcaggtcaataacctttccagttatcaatgtatacatgttgagaacatcatccacggtcgactcaaagtgagtagtagcatcataacttgttgatacaaagcagttgtccaaagtgggttcattgaccggttcatatctgtcatagatatcaaaaaatatctcatcaacaggtcctag

SEQ ID NO: 211132 - DNA, 423 bp, Glycine max
ctgctgaaggtatgaatgctctagtcatagccggataggccattagcgtgcatacatgtaactggcccgtctcaacacgttcgtacaaacggacgaaccggaattcgagactaccttcaccacatatatgatattaaaccaaggcaataggccctagatcgtatacactgcagagactggcggattacttatattgcgataggacgttctatgacacagttacactggccatgggaaccctaacttctactggaaacgaccaggcatctacccatgcatactatgtggtcctacagcgaccgacacatctcttgatccggtcgacgagtacgagcctatgcaacccgtgctgtactaagacgcttccggcgcgagacaacgaaactgtgcctagacgctgacgacgacctcgaggagtccttg

SEQ ID NO: 211133 - DNA, 548 bp, Glycine max
tgggtccgtttcgtaaacccttccttgcatttctctcggttgttctatttctgggtctctatgaggcagcagcagaacagactcagactcacaagagtacttacattgtacacgtggcgaaatcggagatgcccgagagcttcgagcaccacgctgtgtggtatgagtcgtcactgaagaccgtgtctgactcggcggagatgatttacacctacgacaacgccatccacggctacgcgacgagattaaccgctgaggaagcgcgtttgctccagcgccaaacggggattctggctgttttgccggagacgaggtacgagcttttcacgacgcgaacgcctttgtttctcggacttgacaagagcgccgacttgatccccgagtcgagttcgggaagtgacgtcatcgtcggagtcctcgacaccggcgtctggccggagagcaagagcttcgacgacaccggactcggacccgttccgagcacgtggaaaggcgcgtgcgagacgggaacgaatttcaccgcgtcgaactgcaacagacagtgatcg

SEQ ID NO: 211134 - DNA, 485 bp, Glycine max
  unsure (1)..(485): unsure at all n locations
gcaacaaaagttaaatttattaatagtagtaataatagtaacatattaaatactataatcactagccaatcaagacacacccctcttcgagtgagtgatgaaccttgcaatttgcatcaacctttttcaagtttcaaccccaattaaccgaaattggggatccaaccaggtgcttcccatcggaccattctacccttccaaaagcgttttctgtatgctgtggcgaacccgatgacgaaaacgtgacggtgaacgttttcttctcgttctccttgaaactcaacacttgcggttctaccgagattttaacggacgcagtgtctgacgtcacggaagctttgtaagttcccgcgggccccacgttagtgagagtcctcgtgtgcttaaccacgctccctgatgattcanacaacaccgcanacgaagggtagttgaggtcggtcacactgtactgcttgcccgcgtcgcactggaattttctcttg

SEQ ID NO: 211135 - DNA, 343 bp, Glycine max
aatgagattcaagctctcctacatacttcgactttctactcttggccgcctacctcgatcagatatgcaacttggcttagccatgctctgcgccagatccgttcgagccaagaacactatgaacatgatgctaaccaacgagctggacgctgccgacagcggcctctactactacctatgcggcttcgacttcgctaccgatgcacgtgattcagattctggtgatcgctgggtgggtgagagcgaccatggtacccttgaactgggggtcagaataaactgaagctgtggaggatttgttcataggatgagcttgctgagatggacatgactcggcatagag

SEQ ID NO: 211136 - DNA, 506 bp, Glycine max
ataaccaccatcaccatgttcacggctagtaaactagccttcacattaacaccacctcgtccatgcactgcacccttgacaccaatctcttcagcttctggtgttcacctcattcagttcaatggcaggcacttatgcctccgccaaaggctgtctctactttctcctatggccactgcagatcaacaagggaaagttgaagaatttgaagatgattcaaatactgttgatagtaaaattctcccatattgtagcatagacaaaaaagagaagaaatcaattggtgaacttgagcaggaattccttcaagcactgcaagcattctattatgagggaaaggctatcatgtcaaatgaagagtatgataatctcaaggaagaactcatgtgggaaggaagcagcgttgtcatgctaagttctgatgagcaaaaattcctggaagcttcgatggcttatgtgtcttgaaaaccaattatgagtgacagagagtttgatgagttgaaact

SEQ ID NO: 211137 - DNA, 506 bp, Glycine max
  unsure (1)..(506): unsure at all n locations
gctatacaaagtccatattacttacaagtatacaaagcccatatacttacaagtaggatggtgacacataaattgagatgacaccaattgtgtgtgatagtgattacatatgacttcaagatcatttgtggaagaacatcacaatttgctaaatgataaatttgtcactctcacaagaactgctattaatgatctcccattgctggaacaataaatatgattttcaggcatacctcaactcaggcgttacttccttccggtaacgtaatcaatcttgtagttgaatcatattccattgcagttccacagttggagcatttgacagtgttggtggaaccaccatttgaaattgagagtatagtcccaaagaaagaggtattttcagtaccgcagtttcgacaaggaccctttaaaatcacaaagtcttttacaatggcatttgttagtgacagagctatccacacaatgaggggaacagcagcanaccaagtgaaaatgaaactaaa

SEQ ID NO: 211138 - DNA, 332 bp, Glycine max
caagagtctaatatttcaatttgaaaaccaaagatgaaatatcgaaatgtaggcaaggggtcaaggttgacaccattgaacgctagctggatcctgcccttatggcaatccatcgcctcatgaataaagcccatgagtagtaacgcatcccagtcagttatccaacgcacctgctatggatgagatgcaccgaagacacagacgatatcattaatggaaagatgcgtgctcaaaaccacatcgattaccaagcttgtgctcagcgtgttgttggaacaagtcaatagactgcaatctactaaatggtgaatggcactctcatgagcatcgtt

SEQ ID NO: 211139 - DNA, 546 bp, Glycine max
  unsure (1)..(546): unsure at all n locations
aggagctcttctccattggttcttcatctgcatgcacacacttgcatagttttggaaaccaagaatttttgaagggtagcatcaacaagaagttctggaaatggagatcaccaatgtcagcgagtatgaagctattgcaaagcagaagttgccaaagatggtgtttgactactacgcatctggtgcagaggaccagtggactctgcaggagaacagaaatgccttttccagaattttgtttcggccacgtattcttattgatgtgagcaagatagacatcacaactactgtcctgggcttcaaaatatccatgccaatcatgcttgccccaacagccatgcagaaaatggctcatcctgagggagaatatgcaacagcaagagctgcatctgctgctggaacaatcatgactntgtcttcatgggctacttcaagtgttgaagaggtagcttcaacaggacctggcattcgcttttccagctatatgtgtacaaggacaagaatgtggntgctcagcttgtgagaagagcttgaagggctggattc

SEQ ID NO: 211140 - DNA, 490 bp, Glycine max
cgtcgtggcaactgcgtttgagcacgcgtgctcacgctcgaatgctgctagagcggtattcgttcagttatatatatgggtaggatttgctaatagctacaatgggtactattggtgaagcggaggacacatatgccaagatcctaggaagatggccagccttttactatggcatggggcacatgctcaatgacataactgctgcttggaggtgcacctatataggattgatcttgacagatattggactatcacctagcagacagaagctgcaacgaaaaggacaaagagcaagttactggtttagattattaactaaacacctctggcgtagcagggcagtgaaaacacaacttcaagaccccatggagagaatgcagctgctgtgatgctctcaagtcaagtggctgatggatatgccaccatacttgatggcgaactgatagacacgtgtggacactttaagatatggcatggtgctggatcttta

SEQ ID NO: 211141 - DNA, 413 bp, Glycine max
gaactgttactgcgacagttcaagcacgcattgcatcacctacgaatgctcctaatgcgattcgagctcttctctactctactgttcgttcctctcctcgacggctccgacgtcttggggattactccatgcactgagtctaaacaggtatcgatgcttaagacgctgttgaacaagaagcttgagtccgctgttaatctatgcgaagcaggcatcgatcactgacttgcacagattgctagcgatgacaatacgaagaggaggttcgacagctactcataactacagaagctgtgctgcgtcgatggcgtgccttatctgatccttagcggagacctaacgcagtgtgtgcagtacattcaccacggcatactataacatgccatgtctggaagtatcggctatactggtca

SEQ ID NO: 211142 - DNA, 501 bp, Glycine max
  unsure (1)..(501): unsure at all n locations
gaattggaagatgaggttgattgtggttcacatgcattagattacatcatatcatgtaccatttataaaaaaagtaattacaaaaagagcgcgtaaagatcccatccacatacaaattctccaggctttcctccaatgtagccatccaccctctcttatctagacatccttggcaatgaggtcgccgttgatgagttctctgtaggcagcaacgggccagctgaaacccctgaagagcaagcgagaagccagaggaacatcgatgatgatctccttcatggtgggtttcttctcgtccctgatcgcaatcaggtagctccgacccacccagccgatccatcccgagatgtacaggaatagtattccgggtgtgatgaactcaccccagtgcctctggtctccgctcacgatcaggtgcggcaacccatcgccgncgcacagcaacccctgcttcgcgtagttgtcgaacctcctcttcgtcttcttcacgctcgccttaat

SEQ ID NO: 211143 - DNA, 387 bp, Glycine max
ccaaggtaaaaattttattgcccaatggaaaggcaaaaaaaattgaggggtttgtttttcattccaagtttaaaaaaaaaatgatcccccaagggttgtacagcttgtagcgggaaacagcctccaaaattcccttgggctggaccatacctgataattaaattcccattgaaaatttgggtgggtctaacttccatttgtgggcaacaatgtcagccaaatccaaaaccctttgggagtacccccattcattggaatcccaagcaatgacctttaccatgttatttcccatgaccctggtcaacgaggagtcaacggttggggacccattagggcacctgaagtcaacggacccaaggggttatttccacacaggaaggattccct

SEQ ID NO: 211144 - DNA, 606 bp, Glycine max
  unsure (1)..(606): unsure at all n locations
tgcaattgaagttgaagtcttgcccttctctcttcaactccaaacacaagacatgatcatccatggctgcctccgtctacactgtcggagctgtcaacagagctcttttgaacctgaatgggtctggacctgcggtttcagctcccagatcatccttctttgggagcagcttgaagaaggttattggctcaagggtccccaacacagagatttcctctggaagcttcaagattgttgctgtagaagagaagaacgagattgaagagacccagcagaccgacaaggacagatggaagggtcttgcctatgatatctcagacgaccaacaggacatcacaagaggaaagggtttggttgactcccttttccaagctccacaggatgctggaactcactatgctgtcatgagctcctacgagtaccttagcactggacttcgccagtacttggacaacaacatggatggattgtacattgctccagcttttatggacaaactngttgttcacattaccaagagcttcatgaccctgcccaacatcaggctcctctcattcttggatctgggaggcagggacaggaaaattttcaatgtgagctgctttg

SEQ ID NO: 211145 - DNA, 568 bp, Glycine max
  unsure (1)..(568): unsure at all n locations
gcttaaatatgattccatgctgggaacttttaaagcagatgtgaaaatactggacaatgaaaccatcactgttgatggtaagcccatcaaggttgtttcaagcagggaccctcttaagcttccttgggctgaacttggaattgacattgctattgagggaaccggagtgtttgtggatggccctggggctggtaaacacatccaagcaggtgccaataaagttattatcactgctcctgcaaagggtgctgatattccaacttatgttgttggtgtcaatgaaggggactacactcatcagatctctaacattataagcaacgcttactgcaccacaaactgtcttgctccctttgtgaagatcctggatgaagagtttggaattgtgaagggaaccatgacaaccacacattcctacacaggagaccagaggcttttggatgcttcacaccgtgacttgagaagagccagngctgcagcactgaacattgtcccaaccagcactggagctggcaaggctgtgtctctagtgttgccacagctgaagggcagcttaatggatagcgct

SEQ ID NO: 211146 - DNA, 430 bp, Glycine max
aaaaaatacccttttaatcaatttttgggcgatattcatgaatttcagtccccccaaaatttattattggctgcaaataatggtaaactttgaaaatttttccttaaacaccgtttgaacaaacaatttccttttttttcacatgatacgttaacccaagggaaagagtaaaaatggtttgctgctgggaatgggaatcatcaaatcaaaaaaaggggctctcccttattcaaatactttggattcctcattaacagggtttgtctcgcaaaattcctccaagggggctccactccctggtttaactgcccctggccacttgcttgctactaggggggccaaattcaccaccctttgggtgtaaccccatttattggcattccaagcaaccaccttaaccatgttatttcccatgaccattgtcaagggg

SEQ ID NO: 211147 - DNA, 427 bp, Glycine max
gacagaatcattcattgtcagggatcacagaggagaattgtacaagaagcaccatcctcctagtctgtctgatgaagtttggagattggaaaaaataggcaaggatggagctttccacaagcgcttgagtcgggaaaagatccttactgttagagagtttctcacacttctcaatctggatccagcaaagctgcgcagtatactgggcactggtatgtctgcaaagatgtgggaagtaactgtggagcatgctcgaacttgtgtacttgatacaacgaggcacgtgtacttcccttctaattctcaagaacctggtgtggtcttcaatgctgtgggacaagtgacaggactgctttctgaatgcgagtatgtcacagtagaaaagctgactgaaactgaaaaggctgatgctcagaacttagttact

SEQ ID NO: 211148 - DNA, 501 bp, Glycine max
caacatcaattttatatctgatttgatctcgagtaggaagatgtacacattatctattatctatatatacaactagttacatacatatagagaactaaggaaaatccaggtcatgattcatttgacaattcatccctctgctggcgcattcgtgctgcccatgacatattccctccaacatccttgctgttacttcttctcttcagctctgacagttgagatttccacctgactttccattcacttttttgttcaaccacctgatcgtgataattatagcgtcgacgagcgttgaaggccaagttaatgcccctggccatgtccttatcgaacatagctcttcgggaaggatcagataaggtttcgtaggcctactgcacctgaataaacctcttggtgtactcttcgacccgacccggaggcgacacgtcagggtggtactttcgggcgagttgcttgtaggcgttcttgatctccgttaccgaaaccgattcgggtatg

SEQ ID NO: 211149 - DNA, 395 bp, Glycine max
tttttttttttttttttttttttttttttttttttttttttttttttttgggttttgggttttttttttttttttttttttttaaggccaaaaaaaaaagaaacaaaggaccaaaccccaataaagccacaaaccaaaagatccccaacaaacccgggtaaacaaaaaaaaaacataaacccccccaatataaaaaaaccaacgcagaaaaacaaggccggggaaacacaaaccgcaaaagtcaaaaaaaggggcaccttgagaagccaaccaagggaacacccatcgggggagaaaccccccgggaaaaagagggcccaaaaaaggaccagagacggggaaaccccccccgagggaaagggcccccacgggcaaaaaaaaaaaagagccccccg

SEQ ID NO: 211150 - DNA, 339 bp, Glycine max
ggatcttaattcttgtgtactgcactgctgatatctcaagtggccacagtcacccagaggggacatacgtgctcgttttggatcgaaaggtgtttaatgacccaagccgtcgtgtgcatggacactcaaggactatgagctatctggatattcaggatgattgatgctttccacatgacttactccaacatgtataggactagggctagattactgtctgctgagtacaggacaattactggatagtgggctagcaccattgtaacctttgataccttctacactgacggctgtgccactgaccccatgacgaatgccagagattcccatgagccggtt

SEQ ID NO: 211151 - DNA, 494 bp, Glycine max
gagcagaaaaggcatttatatatattacataacttatataagtgatttctatgtcttgattatttggtagcttacatcatccccaaatgcaggcaaaattttgaatagcctataaaagcgtgatgcctatgtatgtcttaatcacatgaataatcatcatcccaaaaatgagaatcaaaagaaggaaattagatgaaaagaaaacatgtaatgctacaaaatgaagttgttttactttactgcttcacaccttaggacgtgcttcgatcccttgaagcagcagataataatttataagaaaatgaaaatgcaatggttatcctattctgtgtccctaaagctttcactagtcagccacattttcttctggatgataaaaacaacttcgtcaccatcttggacagagtcagaactggaatcaattgcttcccagtgcaaagcacttaggtacttctttataaaatcaatcactggctgtttatctcggatgatca

SEQ ID NO: 211152 - DNA, 536 bp, Glycine max
attgtaagttcagagatgatatagaagaaagtgtaaggtttaagaataatctccaatgaaggacaaatagtagaaacggaggttatgttttttttctctccgagggatggatggatgaagaacttccaaaagcgcaagagtataatgcagcttttacaatgattttcttacaaccttgaataacctctatcgtcttcgtattgctccatgaattcatcattgaactttttgaaactatccataatatcaggcatgtcttcctcagctggtaaaatagttgtcctcaaatggaacaccccttctttctgaccaaatcctgaaccaggaacagtggatatgccagtggcttccaaaagcttgaggcagtagtaaacatctggaacctttccagcctgtttagcagcctctaaagctcttggcggcaagcgtatttgagggaatgaatacatggcaccttcagtaaaattacaaaccacatttctgcaactgttgaatccatcagtcattatccttgctcttcttctcagtgattcaag

SEQ ID NO: 211153 - DNA, 562 bp, Glycine max
  unsure (1)..(562): unsure at all n locations
attttccctccacctcttccttcttcctcacaatggctctgagcttcaacaatcgaagaatccctctcgctcttcgcattttccttctgttctccttattcttcagcctctcaccgaccttcgctcaggattctctcgttcagaacgcgaaggaagattccggcggatctgtggatctcggtcgccgcgccaaaattgcattgcatgacatagagaatgattcgatcctttctcttggcttggactccaccggtcctggactcttcgacgcatttttcgcgagttcttcgatgatccttgtcagtgagattggggatgagacgtttataatagcagctcttatggctatgcgtcaccctaagtcaattgtcttgtctggtgctctcagtgctctgattataatgacagtactttctacagggcttggcaggattgtgccaaatttgatttctaggaagcatacgaatagtgctgctacagttctttatgctttctttgggtaacgttactggacatngcattgagatcatcagattcaaatcctcacagaagaaaagaatgg

SEQ ID NO: 211154 - DNA, 523 bp, Glycine max
aattgattggtttatttcctctcaggaatgtgttcccaggacttattgtgttttaaatccacaaaatccttttgtgttgaataggtggatggggaaactgactttcccccagggcacttgccgaagtgttaagagaatgcctatttctatagggggaggagctggcgcaaagaatgctattctcatgaatatgccaaatgctgctctttcaatgtggagatattttgttggagatctcgactttgaagcttctaagatgacttctccctacattaaatgtacagtctctttcttcatagcatttggaaatttggctgatgacaccatcaattctgaggcttttccccacaagctggtgcagtgtggagagattcaggaaaaagatgtattgaaatcttcacaagaggaatttcttacagcttggtcaactcaggtgcgtactgcaacaactctgttggctgatgggtgtccatattagtatgctatggtgcatgatagttcagcgtctacaataccaggtgat

SEQ ID NO: 211155 - DNA, 410 bp, Glycine max
aaaataactcacacttcacacatcattacgacaattaaaagaggtgtggaaattttcaaatagacagagcatactcaacaagagggtcatgtctaatttcctttattgaattaaacaaacgaacaaacgaaagaaaacacaaattccagatcatgcagaggattccgcattttcagaagatctggcagtagcctgtggaacagaaaaagctggcataagagtattaccagcaatttcaaaatcttgagaaattcccaagagaatatcaaaaactgtagactgtttgggattgtcaataaggaaactcaagtgccatgaagtttgatttgcccactcagaactccacatttcaaaaccattattaggaccacatacctctattgagaagatcaattcccaggaatgtggtt

SEQ ID NO: 211156 - DNA, 416 bp, Glycine max
aattgattggtttatttcctttcaggaatgtgttcccaggacttattgtgttttaaatccacaaaatccttttgtgttgaataggtggatggggaaactgactttcccccagggcacttcccgaagtgttaagagaatgcctctttctatagggggaggagctggtgcaaagaatgctattctcatgaatatgccaaatgctgctctttcaatgtggagatattgtgttggagatctcgcctttgaagtttctaagatgacttctccctacattaaatgtacagtctctatcttcatagcattcggaaatttggctgatgacaccatcaattgtgaggctcttacccacaagctggtgcagtttggcgagattcacgaaaaagttggattgaaatcttcacaagatgaatttctta

SEQ ID NO: 211157 - DNA, 493 bp, Glycine max
  unsure (1)..(493): unsure at all n locations
aaaataacacacacttcacacatcattacgacaattaaaagaggtgtggaaattttcaaatagacagagcatactcaacaagagggtcatgtctaatttcctttattgaattaaacaaacgaacaaacgaaagaaaacacaaattccagatcatgcagaggattccgcattttcagaagatctggcagtagcctgtggaacagaaaaagctggcataagagtattaccagcaatttcaaaatcttgagaaattcccaagagaatatcaaaaactgtagactgtttgggattgtcaataaggaaactcaagtgccatgaagtttgatttgcccactcagaactccacatttcaaaaccattattaggaccacatacctctattgggaagatcaattcccaggaatgtggttccgattttgtccacttacatgcatcgaaatgctctgtactgttgctgnttgttaaaaacacttgtaccaatgaggcccaatca

SEQ ID NO: 211158 - DNA, 393 bp, Glycine max
cctcggggaattccaattccacattttcaagaaataaggaggcaaaaatgttcatatatgaattggaattatttgttttcttattaggcctatcctgaagccaaaggaaatgagatcggaattcctcggggaattccaattccacattttcaagaaataatgaggcaaaaatgttcatatatgaattggaattattcgctttcttattaggcctatcctgaagccaaaggaaatgagatcggaattcctcagggaattccaattccacattttcaagacataacgaggcaaaaatgttcatatatgaatcggaatcattggctatcttattaagcctatcctgaagccaaaggatatgacatccgaattcctcggaggtaccgagctcgaatt

SEQ ID NO: 211159 - DNA, 396 bp, Glycine max
ggcttgctagactgccatatacgaaaacgggttaccggtttttcctttggctccaggataggcctaataagaaaacaaataattccaattcatatatgaacatttttgcctccttatttcttgaaaatgtggaattggaattccccgaggaattccgatctcatttcctttggcttcaggataggcctaataagaaaacaaataattccaattcatatatgaacatttttgcctccttatttcttgaaaatgtggaattggaattccccgaggaattccgatctcatttcctttggcttcaggataggcctaataagaaaacaaataattccaattcatatatgaacatttttgcctccttatttcttgaaaatgtggaattggaattccccgagg

SEQ ID NO: 211160 - DNA, 469 bp, Glycine max
gtttgttgttgtaactcgttcttcttcttttgttgttctgtgtttgtgtttgttttttctctcacctgaaaatgtcttgctgcggtggtaactgtggttgcggaagctcctgcaagtgcggcaacggctgctgaggctgcaagatgtacccagacttgagctacactgagtcaaccaccaccgagaccttggtcatgggagtggcacctgttaaggctcaatttgagggtgctgaaatgggtgtgcccgctgagaacgatggctgcaaatgtggaccaaactgctcctgcaacccctgcacttgcaagtgaggtgttgggagagcaagcttcaagcagagatagcccttaattaggaataatgataaactattaatgtgtagctaaaaacttatgtattatgtctgtgatggttttcgtgcactctggtgttttgtgttaaacaaacatccttagaataaagtggtcat

SEQ ID NO: 211161 - DNA, 475 bp, Glycine max
catggccttctttgctaactcataacctgcaaagttcatagcacctagaggagcaatccaaaagaacctgggtactgctcctttgaacaagccaaggggtccctcatgttttagtatggagaaggctatcaaggtcattgacacagatcggccctgtgcagtcatcattctagttttcatgacatcaaacggcgttgtaacaacagccgccaagccaccagataaagctccaacagcaattgtttccaagggaccgagttcccgctctagtagtcgttctgcaacctttttagattcagcataaagccccatgccagcaacataaaatggaacctcacggcacaaggtagctccggttccacggaagaaacccctaagaccatcctgctcccaagtcgcaacaaaagcctcacccacattgtcaaaaagaccagcctgtaacctctgcttcaacacttcacaggggatccgcaca

SEQ ID NO: 211162 - DNA, 502 bp, Glycine max
  unsure (1)..(502): unsure at all n locations
ccttaaggtatgttgctgactgttctcaagctgtagttgtacacatgtaactctgtcaacattttcagaccaaatccaacgttgtttctggcaaaaatggatgcattccgtttatcacattcatttatgctcagcaccaacatccacagcccctcctctctctgcacccttcgttccctctccaccaatccccgcaacaggtggttcaaggtggaagccaccgccggcggcagccagaagaagaacaataacaaggccttcgacgcggcggcgttcgaggcggagcgacttgccctcgacgcagaggcccggcgaaccatggcggacgccgncgacccgaaggcctggaaatggataatccggaagagaatatgggatatgatggaagctcgcaactttgccaacaaccctcggaccgttcaccaccgcattcccaatttcgttggcgcctcttgtgctgctgaaaagatgacggagctagatgtgtttcaggatgcacaat

SEQ ID NO: 211163 - DNA, 397 bp, Glycine max
aatggctctctagcgaagcctgcctttacttcatcaaggaactgcgcgatcttcgtatctatgacgtaactgactggagcatcagatacatgtgtactctgacaactggtcgtgacctcgattgctagcttaacaagcccactctttctcggtaccagaattctgtttctgactactgtggaagacttgtacagcagattaaccatgcaatggctgatgatgcacagcaggacgggccagccatatatgaagcctcataactgaacgattggaggcctatgagtggacgaagattaacaccgaggatatctcccaaggacttatacgctaacccatagtgatataaccgctaagctcaccttggcactctcttagagcataaataattctcagctgc

SEQ ID NO: 211164 - DNA, 508 bp, Glycine max
  unsure (1)..(508): unsure at all n locations
cgcccgcgtagtcgaagctcatgcacgcgatcctcacctacgaatgctgctcgtgcctctcgagataataatgcctttattacacttaggggctgtacgatctgggcatcgggatccttagggactggtacacctgacatacatcgcgcactgtcacaactgtacgtgaactatattgtaaccttaacaagcattcgatcccccacaccacagtcatgcttctccctactaanggacgatacgcatccggaagacagagcaaacacaagcggacactgtcgtacggcggctcgggccatccatatatgaacccccacaactgaacggactgcgcctaggagtggaagagaatcatcacccaggttatctattacggacttagacacgtacccataaaggtagaaccgctcagctcatcttgacaatctctcataccataaatcagactcagctgctccggtgggccaacagactgtatccggacgatgtggaggcacagaggaagaag

SEQ ID NO: 211165 - DNA, 529 bp, Glycine max
gctggatgttacttccatgcacgctgccacgccggaagctggctcgaggcctcgacatggaattgtctctgttgctccgccaacgaccttgacccactcatcaacgacaccgccggcgccaactacctctgcgcacaattcgattccatttctagaaagctcgccgaaacaactctacgcgcggcgacaacacctaccttctgaactcagcgtatcttgacttcgccatgcagctcggcttcgacatgctctgcgccggctccgtcagagccaaaaacaccatgaacatcatgctcaccaacgtcctcgacgccgtcgccggcggtctctactactacctattcggctttgcattcgccttcggcggactctccaacggcttcatcggccgaccaaacttccgcctacgagattacccgatgggctcctatatctccagcttcttactctaccagttggtcttagccatcgccgacgcaggaatcaccatctctcccttcggcgactacagcttcttgctctaccagtg

SEQ ID NO: 211166 - DNA, 563 bp, Glycine max
ggctcgacaaaacaagaaaatgttcaagtgagaactgacaaaacttgtatgataacgcgctaacttattgtgcacttcttcttgttcttcttcttcaatatcttggttctttgatatcattgtattgagcaaacaatgggagttgcagagagagaccctcttgcacaattgagtttgcctcctgggtttaggttttaccccacacatgaggagcttttggttcagtacctttgcacgaagggtgctggccatcattcctctcttgcaatcattgctgaagctgatttgtacacgttagatccatgggctcttgcaggtaaggcagagtttggagagaaggagcggttcttttctagcccaagagacaggaagcacccgaatggctcacgaccaaacagagtcgcgggttctgggtatcggaaagccactggtacagacaagatcatcaccactgaacgtcgaaaagttggcatacaaaaagcacttgatatctacattggcaaagcacccacaggctacaaaaccaattggatcatgcacgagtatcgccttctcgattcttc

SEQ ID NO: 211167 - DNA, 426 bp, Glycine max
agggaaacgaacatgtaagatatgtccacaaatacttgactggaacaaggctccaactctgcttgatgcacttggccagattagagagcccgagaggccctttgacaagccggtgaggcttcccctgaaggatgtgtacacgagtggatgtatcggaactgtgccagtgggacgtgtcgagaccggcgtattgaagcctggaatggtggtgacttttgcaccagctggactgacaactgaagacaagtctgtggagaggcaccatgaatctgttacagaggcacatactggtgacaatgagggattcaatgttaagaaatggagctgttaaagatttgcagcgtggttatgttgcctcatctcaaaggatgacccttgaaaggaggctgctaacttcacagcccacgtcatcatcatgaaccaccc

SEQ ID NO: 211168 - DNA, 499 bp, Glycine max
atcaatttctttggtgggagatatacctcatggcctaccaaaattttctgttccaaaatcttttgagtatgcacagtccttaattccaactgctcttctcataactggtgtggctatattggaatcagtgggaattgcgaaggcattagcagcaaagaatgggtacgagttggattcaaatcaagagttgttcggtcttggtgtttccaatgttcttggttcatttttttcagcataccccacaacaggatccttttcaaggtcagctgtaaatcatgaaagtggtgcaaaatctggtgtatctgggattgtttcaggaattataatgacctgtgcacttttgtttctaacaccattatttgagtacatacctcagtgtacccttgctgccattgtgatctctgctgtgataggtctggtagattatgatgaggccatttttttgtggcgtgtagataagaaagattttcttctttggaccattactagcactacaaca

SEQ ID NO: 211169 - DNA, 480 bp, Glycine max
aagagaatccgaggcgaagagaagagaaaaattaagatggaggggaaggagcaggatgtgtcgctgggagcgaacaagttcccggagagacagccgattgggacggcggcgcagagccaagacgacggcaaggactaccaggagccggcgccggcgccactggttgacccgacggagtttacgtcatggtccttttacagagcagggatagcagagtttgtggccacttttctgtttctatacatcactgtcttaaccgtcatgggagtcgccggggctaagtctaagtgcagtaccgttgggattcaaggaatcgcttgggccttcggtggcatgatcttcgccctcgtttactgcaccgctggcatctcagggggacacataaacccggcggtgacatttgtgctgtttttggcgaggaagttgtcgttgcccagggcgattttctacattgtaatgcaatgcttgggtgctatttgt

SEQ ID NO: 211170 - DNA, 453 bp, Glycine max
aatttctttggctctgtgctttgagtccgagtctctcccacagcgacaccatccatcttctttcacattttccactacgttagggttcgtcttcatttcgaattgaaggattcaacaacttagcaaaccacgccatggcaactctgcaatctctgccaccttctttccgtccatcaatcccacccccaaattcccactctttcccagccactccctttaactattcccccaaattgattgcctcaaagggtgtcagcgttaccctcaagaactctatcacttctcccagggtttcggtttccaattcggagtatagtccccaaattgcggaaaatctcggtgacgttaccattttcaccgctgccggcgagccagtaaggttcagtgatctctgggatcagaaccagggagtagctgtggtggcaatgttgaggcactttggatgcatttgct

SEQ ID NO: 211171 - DNA, 335 bp, Glycine max
tatgctggtagtggggctcgagctcgggcactgtttgggctgcgaatcatgcagagaacagccatggaggacgttcgcttctaccgaaactatgggaaaaccttcaggaagcctggtcggtcgtccgagaaggagcgtttggacgccgagttcgagctggtcagtgagtacagacttcgttagaagagggagttgtcgagggttcagtacgctctcagccgtattcgtgtcaacgccagaaatcttttgaccctcgacgagaagaacccgcgccgtatcttcgagggagaagcccttctgctgagaatgttccgttaacgacttctcgatgagac

SEQ ID NO: 211172 - DNA, 521 bp, Glycine max
cggttgaagcgaggaacagatcttgatggcagagtcgattggattcgagagcctcgactccctcgtggacgccacggggcctaaatcgatccgcttgagggaaatgacattcgggaaattcgatgctgggcttacagagagccagatgatagagcacatgaaggacttggcctcaaagaacaggggttgtaagttctacattggcatggggtactataacactcatgttccaccagtgatcctgaagaacataatggagaaccctgcttggtacactcagtacacaccttaccaggctgagatatctcaggggaggcttgagtcattgctgaattaccaaaccatgatcaccgacctaaccggcttgcctatgtcgaatgcttcattgcttgatgagggtactgctgctgctgaagcaatgtctatgtgtaataatattcagaaagggaagaagaagaccttcattattgcaagtaactgccaccctcagacaattgatatttgcaagacaaagagctgtg

SEQ ID NO: 211173 - DNA, 503 bp, Glycine max
ctcgagccgcatagcgttgccattctcatcctcttctttctctctctaccattgccatggatccctacaagcaccggccatccagcgccttcaattctcccttctggactacaaattctggtgctcctatttggaacaacaactgctctttaaccgttggagctagaggtccaattctgctggaggattatcatcttgtggagaagcttgcaaattttgatagggaacgtatcccagaacgtgttgtccatgccaggggcgctagtgcaaagggtttctttgaggtcacccatgacatttctcacctgacatgtgcagatttccttcgagcccctggagttcagacgcctgtaattgttcgtttctcaactgtcattcatgagcgtggtagccctgaaaccttgagggaccctcgaggttttgccgtgaagttttacaccagagagggtaactttgaccttgttggaaacaacccttccgtctttctttgacgtgatggcatg

SEQ ID NO: 211174 - DNA, 507 bp, Glycine max
  unsure (1)..(507): unsure at all n locations
cacaggaatagtaggctgtgcaggactgaagccaacagttgcagcgatagaagcagggaaagacatagctttggccaacaaagagacattgattgctggaggtccttttgttcttcctcttgctcagaagcataatgtaaaaatacttccagctgattcagaacattctgccatctttcagtgtatccaggggttgccagagggtgcacttaggagagttattttaactgcatctggaggtgctttcagggattggccagttgataaactgaaagatgttaaagttgctgatgcattaaaacatcctaactggaatatggggaaaaagataactgtggactctgctaccctttttaataagggtctagaagtaattgaagcacattacttgcttggagctgactacgatcatattgagattgtcattcatccacaatcaatcatacattcaatgattgaaacacaggattcatctgttcttgcacaaatggngtggcctgatatgcg

SEQ ID NO: 211175 - DNA, 432 bp, Glycine max
aggagctcctctccactggttcttcatctgcatgcacacagttgcatagttttggaaaccaagaattcctgaagaagggtagcatcaacaagcagttctgaaaatggagatcaccaatgtcagtgagtatgaggctattgcaaagcacaagttgccaaagatggcgtttgactactacgcatctggtgcagaggaccagtggactctgcaagagaacagaaatgccttttccagaattctgcttcggccacgtattcttattgatgtgagcaagatagacttgacagctactgacctaggcttcaaaatatccatgccaatcatgattgccccaacagcctttgagaaaatggctcatcctgagggagaatatgccacagcaagagctgcatctgatgctggaacaatcatgactttgtcctcatgggctac

SEQ ID NO: 211176 - DNA, 473 bp, Glycine max
aaaggtaatcagccatgtttttttagagggaatatttcatatcaatgtcatggtaactaaaaaaacaacatagagaaagttaataaatttctcaaaattaagaatatacaatgagtgaattaatgcagcagcagcagtagtcacacaagtatcatcatataatgcttaaaagaaattaagcatagagttttccaaatacaaccttaaatgagttctccaaaaaggaaaagaaaggaggttcatgaaacacatatagaactgtttcctccattgttctgcaccacattatacaaacttggctcaaatgaggagcaaatttttcataatcttggcaatgcgcggggaagaatgcgaggttggtcccaatcagtgacaatgtgatcacgagtgatatccttgagtgaggtgcaaccactcaaggccatggttagctcaaactcctcacgtagcatccgcagcacgtttcttacacc

SEQ ID NO: 211177 - DNA, 359 bp, Glycine max
tggggcgcgagtccgtgccctgtatggactggctactatgcatatcaatggcatggaggaccttgaagttataccgacactatgacaaaacccttcaagaagcggcggccgccgcccaatgaggatcgtccaggacgcaattaagctgctgatcggtgactgcaggcgttccagcttgagtgatctgcgtagattacagctgctctaaaacctggtcgtagcaaccccctagtgtgtaatgcgtcatccacgggcagaaccagaccgcttacgaggcggaagcagcacttctgctgacggtggtgcctaatgggcgagccaacgaaccttagatgcggcgtgatcactgcccgtttgtc

SEQ ID NO: 211178 - DNA, 359 bp, Glycine max
gcaggctcgtacctatgacgcacgctgcacgcgctcgtaatctcggtatagctctcgcggttgacccaatgcgtaactaactaggaaccgcgctcattcgcctcatggggcgtgacaatgttcataataagtcccgatcaagctgagatatcctaattgaacgctcaaggatatcagctgtcttaccacggctactgcagacctgtgtacacacgctcacactagccaaggacatccacaacacgcgtctgctgatccgtcagagatacatatgcatctgattactgatcgcaaacgtgctatacttcataaagcgtcttgactcgcagattcacattgacttatgcctgacctctcca

SEQ ID NO: 211179 - DNA, 530 bp, Glycine max
  unsure (1)..(530): unsure at all n locations
ggttcttgaaccctttgatgagaacatattcaactttaccaaagttgggcatgatgaggtcctcttccaattagaagctagcgaggatggacaagtccatttctttcacaaatgctccagttgatgttgacaatcctgccaactttgttgccatgactgtcagttctattgagtatgggcatgttcggctgattccgcgcattttcgagtgtctgcctcaaaggattgaccgtgagagcttnctccttgcacttcacatggcagtggaagctgataattcatattttcgattgggttacaacagtttgggtgctgatacaaccattaaccatctacacttccaagcttattatttggctctgcccttcccaattgagaaggcccccactaagaaaattgcaagcttaaatggtggggtgaagatatctgaactgttgaagtatccagatagaggtctcgactttgatggtggcgatacgctggaagattcatcaaatgttgttcagatgcctgatatgtcttcagaacac

SEQ ID NO: 211180 - DNA, 449 bp, Glycine max
aaggactggcgaagatattggctgaaaaggagacagacaagatattgggagtgcacattatggcacccaatgcaggagagcttattcatgaagcagcaatagcactacagtatgatgcatctagtgaggacattgcacgtgtgtgccatgcacatccaacaatgagcgaggctgtgaaagaagccgcaatggccacttatgacaagcccattcacatttaaaaggagccggttgctacttcttgttttcatttttgtccaagaattttacaatgacttggagatgatacatcctgtgttaaatttagattcaggtttttaaatgcaaattagccccttgtttacttgtttgcataataagaggaatgattgcgttgttcttatccttggtgaataatatatatatctccccttctctctgggacaaaaaagaaaaacaaaaaacaaaaa

SEQ ID NO: 211181 - DNA, 496 bp, Glycine max
gtaaaaagcaagtaacattaagttggattgggatacacaagataattcacattatctgaagtacattgcaataacatatacttcaccaaacacaaatctaaaaactctcaaaagtccacaagtcatccttttctttcatgctcacttgccggggacgaagttggtggcgtaggcccaggcattgttgttgactgggtccgcaaggtgatcagcaaggttctccaatggacccttaccggtgacaatggcctgaacaaagaacccaaacatagagaacatggccaatctcccgttcttgagttccttcaccttaagctcagcaaaagcctctgggtcatcagcaaggcccaatgggtcaaagctgccaccagggtagattgggtcagtgacctcaccgaggggcccaccagcaatacgataaccctcaacagcacccattaggataacttgggtggcccagatggcgaggatgctctgggcgtggacaaggcttggg

SEQ ID NO: 211182 - DNA, 496 bp, Glycine max
ttctactccactgttactcgtgccagatttgaggagctcaacatggatctcttcaggaaatgtatggagccggtggagaaatgtttgagggatgctaagatggacaaaagaagtgttgatgatgttgtccttgttggtggttctaccagaattcccaaggttcaacaactgctgcaggacttctttaatggaaaagagctttgcaagagcattaatcccgatgaggctgttgcatatggtgcggctgttcaggctgcaatcttaagtggtgagggcaatgagaaggttcaggatcttctcctcctggatgtcacccctctgtctcttggtttggagactgccggtggtgtgatgactgtcctgatccctaggaacactacaattccaacaaagaaggaacatgttttctcaacatactctgacaaccagcctggtgtgcttatccaggtctttgagggtgaaagagcaaggaccagagataacaatttggtgggca

SEQ ID NO: 211183 - DNA, 392 bp, Glycine max
aaacttaatcgatcatcactttacttcactaatacatcatggcagacgagacccagaacaagtatgagagctctgaggttgaggtccaggatcgtggtgtttttgactttctcggtaagaaaaaggatgaagaagacaagcctcatcctcaggaggaggtcatcgccaccgagtttcaaaaagtcactgtctcagaccaaggagagaacaagcacagactcttagaaaagcttcaccgatctgacagcagctctagctcttcaagtgaggaggaaagagaagatggagagaaaaggatgaagaagaagaatgataagaaagggctgaaagagaagatcgaggagaacatagagggtgatcatcatcatcacaaggatgaggacacatgtgtc

SEQ ID NO: 211184 - DNA, 468 bp, Glycine max
cagtacatatttaatttctttttacttcaaagaaggaaacctacacaaacttttttttttgtaaatggaagagataaatacacaataataaagtaaattaagtatgcatcaagaaacaccaaagaaacccacaaggctgtcatatgatgaaatgaaaacaaagcacaccacaatcatgcatctccaaccaacaaaaaagccttgtctcaatcttaaatatcaatgagcaccactctccttttccttttccttttcctcctctgtcttggagtgataaccaggaagcttctcttttatcttttctaatatacctttcttctccttggcctctccttcatgatgagcaccttcaccatgctccaatgatgcaacaggtggtggtggaagaagagtagtagctgtggcctcctctgtcttcttgtgccctggtagcttctccttaatcttgtcgaggaaccccttcttttc

SEQ ID NO: 211185 - DNA, 470 bp, Glycine max
gctcggtaatggtgtcgagagggagacatcctgattgagaggtccacaaaccttgactgggacatggggacaactgtgcttgatgcactcgaccagattagtgagcccaagaggccctgtgacaagcccctcaggctgccccttcaggatgtgtactagactggaggtattgtgactgtgccagggggacgtgttgagaccgagagtcttgaagcctgcaatggtggtgactatatgcaccaactggactgacaactgaagtcaagtatgtggagatgcaccatgaatcgattacggaagcacatcctggcgacaatgacggattcaatgataacaatgttgctgtaaggacttgagcgtggctagggaggctcatagctaaaggatgaccctgcataggacgctgctgactttacagtccaagtcatcatcatgaaccaccctggtcagaacggaaatggctatgcccc

SEQ ID NO: 211186 - DNA, 311 bp, Glycine max
tgagagcatatggaatgacggttcacactaccagttacctttccaagtggaagaaaggaaagcttgttggtcggagaacattggggcatgtttacctgcgaatcaatagagatagaggccaagcgagtgcactgaatgaaggtaagagatgcctgtgatgacagctcagaaatggagtgccgacgacaatttatggaggggatccatgagctcgatgcgtgtggacagtcatacatagatgagtgcattgggagtgacttgagcgcataaacactttgcgttcatttggaatacgtctttggtggttgtat

SEQ ID NO: 211187 - DNA, 527 bp, Glycine max
cgcacggcatcgtgacttctcatgcacgcatgcgcgcgctcggaatctgggtcgagcatatactgaacatacgcagcgatcctatgtttaatgcggctcgtgtcaccggagccagcgtcgctattgaatcatgggaggccgtactcctactccagcgggggtataccgtccataccacacggcaagacatcatggatgaacccgagactgaacatgtgcatgctaggagaagagctaagagtgcgccacattcagttgaaatggacattgtagacatggacttcatagccgctgccataatgggatgctccggcagtaatgcacctcgcatgtgctaacatcgtcggtcatgtcgaagatcctgagaagcagatactgtagccggcgataaaaggaacagttaatgtgtcgaacgctgcgaatgaagcttgagtagagcgcgtggtggcgactgcgtcgagctcatccattatgccaagccctaactggccagctgataagattaacgcagaagagtgctggacaga

SEQ ID NO: 211188 - DNA, 529 bp, Glycine max
gccagcgaactcgaagctcatgcacgcgttcctcgcctacgaattctgctcgtggctctctagatattaatgcctttccttcatcaaggtactgttcgatctttgaatttcagtcctcaaagattggaacaacaggaacatgtgtactctcacaactgttcctgtgctcccttctaagcttaacaagccttctctttctccgcaccacaattctgtttttccctactgtggaagacgggtcgggaagaagaacaaagcaatggctcctgttgcaaggctgctcgggccagccatatttgaagcctcaaaactgacggttttggtcttaggagtggacaagaataaacacccaggaaatctcccatggacttatacgctaacccatagtgatataaccgctgagctcaccttggcaatctctcagaccataaataattctcagctgcaagggtggtacaacagatttcaaaaggaccaagtggtggcacagtggaaaaaggtgaaaggaaggatgtctctgcacgttcac

SEQ ID NO: 211189 - DNA, 459 bp, Glycine max
cttggccgtcctttttttttttttttaagtcattaatataccttagataaaatacaagctccacaatgaaaatacacatttacccttctttcacttggtcttttgaagggcagtgatggaactgccatccccttggatggaatcatacctgcgaaaaaggtacgccacaatcaaagccgaggtgagtgtgacaacgtcctaacccgggcactgtttattggacacactgtgcgaccctgtctgaggttcattggaccaatacatgtagttcaacaactgggcccctttctcttgggtgaaccggtccggcttgaaccggtccggttcgtcgaatataacggagtccctcatgactagcttctgaaagccgcacagcaactcgaccttcttgacttgtaagaccttgttgatcgaactcaaccggaagtcctttcgggctctactcgtctggagtggaac

SEQ ID NO: 211190 - DNA, 432 bp, Glycine max
tggcgatggcaatggcgcttcgcaggctttcatcttcaattgataagcctcttcgccctctcttcaatgcgggttccctctactacaagtcgtctttgcctgatgaagctgtttacgacaaggagcgacccggagttacatggccgaagcagttgaatgcttcacttgaggtcgatgatcctgagattgctgatattattgagcttgagaaagctaggcaatggaaggggctggaactgataccgtcagagaatttcacttctgtgtctgtgatgcaagcagttggatctgtgatgaccaacaaatacagtgaggggtaccctggtgcaagatattatggtggaaatgagtatattgacatggctgaaacactatgccaaaagcgtgccctggaagcgttaaattggatcccgtaaatggggagtgaacgtg

SEQ ID NO: 211191 - DNA, 458 bp, Glycine max
gtctctgaaaactaagaagaatgaacaggtttccttaatgatctcgttcgcaactgtgaccaccgtcaaccgtgccgcagccatgtatggattgctccattcaccgatcataaatccactgctagcttccgcacgaggagatatcaacgtgacagaagctccattgctagcatcggagacaaagtacaacgcgtgcaaggacgaccgccacttgagaagaagaagttcgagactctttactagttgcaagacctcgatgatgcccaattggcataggaagtacaataccttctaaagaaacgatggcttactcgcttggaactatagttggagctcggatcctgaaccgtgagcacaacacgtcacctgcatactatgatggacgctactggaccatgtggaagctgcctaaggttggctgcactgatgcttctcacgtgatgcaggatcttcaagag

SEQ ID NO: 211192 - DNA, 532 bp, Glycine max
ggacagcgagacatgacctatatcgcacgcatgcgcacgctcggaatgcctggctacgaggtgactctgagaatacataggaatgcaatgtagaatgcgacttgactcgcatacgatctaccatgacgctacctatgtgtacacaatctgtactaatccgtagcctggaagcccggcataggtctgccaacatatcacgcgatcatcaagatccaatgggctgggtattgccaccaggtaagaccgctcgatgacatctagcctgcattgctagctaccgtgagctagctcaacagctgcaatggtgaccaccaattggctagaagaatccgagactctttcctactggccagacctataagatgcccaattggcctaagatgtcgaatacctgctaccgaaaagatggattccgtgcttggaattcgagttggagcacagattctagtaccgggagcacaacaggtcatctgcatactaagagggacgctactggaccatgtggaagctgtctatgtatggctgcactgat

SEQ ID NO: 211193 - DNA, 427 bp, Glycine max
gcttgcgtgtccgttggtaattatagtctgccgtctatcggtttgcatggctgggatgcctctctttcagttctgtgtgcttctgtgccaagagattccatgtctggttcacaaatctgcataattcaatacgcgatgaccggcatctgattgaccgcaggctgcataactttagagaacatgctgagaaagcatatgttgtaaaaacttttacaggggagcacgaagctattttactaggtacaggtttaaaccaacacgatcacgaagcagatgttggactacggctgaggcacgtaaattaacaggtgggctgaattgcattttcagggatgaaggccactgtgtatgttgtgaagccctacgctgacatggttcatgaatcactgatgtatactctacactggcgttgcgatagttataatac

SEQ ID NO: 211194 - DNA, 481 bp, Glycine max
aaggtaaatttgtcacatttattcattatcatatatgcatcacctagtatcagctggtttattcttaattaagagaaaactaaaatacaatatcttacatgctatttttgttggtcttgaattagaataatttcacctcgataactttcaaaatcctttaatgcaaattaccgaaataaaactctagttctagtacaaacaacacctagctataataattaggggttgataccatagagctttcgaatcccgtctatatcatcttgcgctagattcaccttcctagttcgaggtggtatagaaggatacatgatggctcttaggtccgacgagtggcctaatccgagcaagtgcccgatctcgtgcactgccacagattcaaggtcaaacgcacttgtcaccggcgatttggtgacatcgccagacgccacccaatattcgtcggcgtcaaagtggcacctcccatcagtgggagccaatg

SEQ ID NO: 211195 - DNA, 491 bp, Glycine max
gccaaagcatggcttctctctcttgctccgccaacgaccttgccccactcatcaacgacaccgccgccgccaactacctctgcgcacaattcgattccatttctagaaagctcgtcgaaacaacctacgccgtcgacaacacctaccttctgttttcagcgtatcttgtcttcgccatgcagctcggcttcgccatgctctgcgccggctccgtcagagccaaaaacaccatgaacatcatgctcaccaacgtcctcgacgccgtcgccggcggtctctcctactacctattcggctttgcattcgccttcggcggcccctccaacggcttcatcggccgcccaaacttacgcctacgagattacccgatgggctcctctatctccagcttcttcctctaccagttggtcttagccatcgccgacgcacgaatcaccatctctcccttcggcgactacagcttcttcctctaccagtgggccttcgacatc

SEQ ID NO: 211196 - DNA, 319 bp, Glycine max
gttgcttaccggttcatactgtacgcctggcatgccagcggcagaatcatcttgtgtcaaccttggcatgttggccgcgcctatgatccagggcatcaacctgggcggatctacaccgagttcgtgcatcagcatgcccatatcggtgaggtggcggattctgcttcccgatgggtgctatagcgtgtacccagagcctcgtgcacttaggactgttgagatgccggagctagtgcagcatcatcgtcaatcagcgattaacgcaattcgagcacgatttgaacgaatcgggattgatggggcacatcggtatctgatt

SEQ ID NO: 211197 - DNA, 494 bp, Glycine max
tcaagatggatcaagacagttctattgggaaagttttcaagttcacacatgttctggctgcctccttcgccggttcagttgccgccgccgccgcctcaagctaccggcgggcaccgtccacggtggtgggagagcagaagaaggttattcccgagctacgtaggacggaatctgggcgtctcggggagatggaaaagttctcccactatgttgcaaggcaaatggggtttgaagatgctgatgaggttccagagctatgcatattggcccaagagtatttgaaaaaatccaaagggtgcgatgaaagcatctttgaatatatttccagtggcaatgtggagaacactgattctctatatgcgaaattagttgacgagttagagagatgcatcctcagttatttagcatttcactggaaccaagctacatctggcattagtcaggttttgggagtggagtctcatcaaaaaaaaaagcttgagggaattatattg

SEQ ID NO: 211198 - DNA, 393 bp, Glycine max
actatctaacacatccttcaaacattttttcaatgaatttaataacttgttgaaaactgcaaaatcaagaaagagaatgattaaaaaaaaatgctcaaaactcaagagtatgttacataatatatgcaggcaacaatattggttacatttttcggatggatttctctattttctgaatagattccttcaattttgtctgatcacttggccttgaaggtgacataactatatcattccaaacagaaccaggttccattatggggctgggttctttgtgaagttcgtagatggaatcagcttcagcattcaaactgcctaacgtttccaagcacttgatctcttcacgatccactagtagattgtgatcaccatcctttcaccctataagctttg

SEQ ID NO: 211199 - DNA, 420 bp, Glycine max
gacctgttgcaattatcggcactgacaagctgactgctttagaggcaagagatcagactatcgtaaataaccctattgaagctcatataatcgctgaagttgcataggaatcggtaaagaatggactcggctgacagcacatcggcataattactacatataagacacaggcaaacctaatacggaatgctgcttccatgacttccttggagactcataccatagacaaataccagtgttcatatagagactgtatattaacatcgcttggaacgcctaccgcacacccgaccagctgtgcagcttctatgctaggatactggcacaggataaatgcggctcttacttgcgctaacaaaacgttgatcatagttggatcgcggagaactctgatgagggttccgctattgaaacttctca

SEQ ID NO: 211200 - DNA, 445 bp, Glycine max
ctcgagcaccatagcgttgccattctcatcctattctttctgtctctaccattgccatggatccctacaagcaccggccatacagcgccttcaattcttccttctggactacaaaatctggtgcttctatttggaacaacaacttctatctaaccgttggagctagaggtgcaattctgctggaggattatcatcttgtggagaagcttgcatattttgatagggaacgtatcccagaacgtgttgtccatgccaggggcgctagtgcagagggtaactctgaggtcacccatgacatttctcacctgacatgtgcagatttgcttcgagcccctggagttcagacgcctgtgattgttcgattgtcaactgtcattcatgagcatggtagccctgaaaccttgagggaccctcgatgttttgccgtgaagttttacaccagaga

SEQ ID NO: 211201 - DNA, 402 bp, Glycine max
gtgagtgcagtctgagctatgtgctcgcatgcacgcgctcggaatgtctgctaattgcggctacgacgcatgaggcgcgagccgtgtccaagtccatattattgtcctgctgaactacgcgttgctcgtgagctgcgctgcttagcgaccaggatcatcgcaatgcctatgaattactaccttctgtactacaagtgactagtgctaactattgggaacaccaacatgctgtttaaccgttggagctagaggcgcaatgctgctggcggattatcatcttgtggagaagcttgcagcttttgatgaggtagcctatgccagatcgtgtcgtacatgctaggggcgctagtgcatagggttactgtgaggacacccatgacatggctcacctgacctgtgcag

SEQ ID NO: 211202 - DNA, 201 bp, Glycine max
agggagacaacatgattgagatttcctcaaacttctgctgtgccagggggaccactgtacttgatgcacgataccagattaagtactgactgaagcattgtgacagcaacgctatgcgttgacacttataatgcgactacattggatgcattgcgactgagccacggtgacccgttgagacccggatagtccattctggaa

SEQ ID NO: 211203 - DNA, 584 bp, Glycine max
cgtcgtctccgcgtgcgtgacctatatcgcacgcatgcgcgcgctcggaatctgggtagtgcgattgtgacccagagttgcttgacctggctggcaatgggagcttggttgtggttcagaagaagaggttcggtcctgtcccttcttggaggaccgaattcgtcgaacctggatccatttggttgattggaaccacccatgtgtctgagggttccgctatggaagtggaacgcgtggtgcgtgctctgaagcctgatgatgccgctgttgagctctgcaaaggcacgtcagcacaagcactcatactacattattattcagattctgtgccgagctcgacataagccttctaggcattcttgtttacaagttattgagtttaaagaaaatgtcaaagggtgaggtaaaaactgatcattagggtggaaacaaatacatcattttcatgagaatatgagatatcgattcctatcctccgcatgggaataaaaatggcttaaaacatataagaatgttacagagtgtccatgacgaagtcatttcctacccttaaattgaggatcaagatagtccttcattttatg

SEQ ID NO: 211204 - DNA, 492 bp, Glycine max
aatagaatccattatttatatataacaataaactactatatacacatacaatgtattctagtttagtcccctaaaacacgagcaagttattctgggtgtcgtagcccaacttctccaaattcggctggactgcaaattgaatcataggtggtggtccacaagtcaatgccaaggtatcaggagatgcatttggaatatgctccgtcaggatactttcagtgatgaatcccacactgtattcccacccttctcttatgctttcttgtatcacgtaccacaccttcaacctatcatacttcttagcccactcatcaagctcttccttcagcaatatatcatcctcggttcggttcgcgtaaaccacatgcatctcggtgcagtcctctggatcctttagaatggcttgaaccacttggtaaatgggtgtgattcctgtgccaccagccaacatggctagcctcgtggcaaaccttggtttcccatgaacgagga

SEQ ID NO: 211205 - DNA, 456 bp, Glycine max
  unsure (1)..(456): unsure at all n locations
cccacccgtagtttctaccaccttcagtcacggcgtaatacactaaccaacccaccatgtcgctgcctgcttgtcccgccgaacaactggcccaacttctcggcccaaacaccacagacgcctccgccgccgactcccttatctgcggccagttcgccgccgtggacagcaagttcgtcgacacggccttcgccgtcgacaacacctacctcctcttttccgcctacctcgttttttctatgcagctcggcttcgccatgctctgcgccggctccgtccgcgccaagaacaccatgaacatcatgctcaccaacgtcctggacgctgccgncggcggcctcttctactacctcttcggcttcgccttcgctttcggctccccctccaacggcttcatcggtaaacatttcttcggcctcaaggacatcccttcatcctnctacgactacagctact

SEQ ID NO: 211206 - DNA, 506 bp, Glycine max
  unsure (1)..(506): unsure at all n locations
gcagagtcagagacagagacgcagccatggggcggagacctgcgaggtgttataggcaaattaagaacaagccataccccaagtcacgtttctgccgtggtgttcctgatcccaagatcaggatttatgatgttggtatgaagaagaagggtgttgatgagtttcctttctgtgtccatctggttagttgggagaaggaaaatgtttcaagtgaggccctggaagctgctcgcattgcttgcaacaagtacatggccaaatttgctggaaaggatgctttccacttgagagtcagggtgcacccattccatgttcttaggatcaacaagatgctttcgtgtgctggtgttatccaatccattattgagtgaaaattctgtcactttatttttaattaattaattttttccgttttatacagcttctgtactttgctntccctttatcttatactttaattgcacttttaggatggatattattggataataatatttttctgtccc

SEQ ID NO: 211207 - DNA, 285 bp, Glycine max
ggtaagaaaaaaaaaaaaaaaaaaaaaaaaaaaaaaaaaaaaaagaaaaaaaaaaaaaaaaaaaagaaaagggaaaaaaaaaaaaaagaaataaaagaaaaggaaaaaaaatataaaataaaagaaaagggacgtaaattcaaaccgggaagggggaaagaagacccagaaaacaaaatggggatgcaaaaaaaaaggaaaggggaggggcgcgacctttattggaaagggaaacgttacatgaaaagggaatgggcccgggcatgggccaaagcgaacggggcc

SEQ ID NO: 211208 - DNA, 575 bp, Glycine max
  unsure (1)..(575): unsure at all n locations
gacctgttatatttattgacactgacaagttgcctgctttagaggcaagagatcagaagattgtaaataaccctattgaagctcagataattgctgaggttgcaaaggaattggtaaagaatggaatcggaagtgaacacattggcattattactccctataattcacaggcaaacctcatccggaatgctgcttccatgacttccttggagatacataccatagacaaataccagggtagagataaagactgtatattagtatcttttgtaaggtctaccgaaaacccgacaagctgtgctgcttctctgcttggagactggcacaggataaatgtggctcttactcgcgctaagaaaaagttgatcatggttggatctcggagaactcttcttagggttcctctattgaaacttctcattaagaaggttgaggaacaatctggaattntaactgtgactaagaaggatatctatcgaaaaagtgagctcangagatgttctcaaatgagatgaatggaaattcttttacccttattttgagggttataatatatatcatcatacaaatctcat

SEQ ID NO: 211209 - DNA, 449 bp, Glycine max
aaggactggcgaagatattggttgaaaaggagacagacaagatattgggagtgcacattatggcacccaatgcatgagagcttattcatgaagcagcaatagcactacagcatgatgcatctagtgaggacattgcacgtgtgtgccatgcacatccaacagtgagcgaggctgtgaaagaagccgcattggccactgatgactagcccattcacatttaaaaggagccagttgctacttcttgttttcatttttgtccaagaattttacaatgacttggagatgatacatcctgtgttgaatttagattcaggtttctaaatgcaaattaggcccttgtgtactagttcgcataataagaggaatgattgtgttgatcttatccttgttgaataatatatatatctccccttatctctgggacagaaagggggacaaaaacttataaa

SEQ ID NO: 211210 - DNA, 426 bp, Glycine max
aaggactggctatgatattgattgatgacgatacagacgtgatattggcagtgcacagtgtggcacctaattctcgagcgcctactcatgaagcatcattatggctacaggttgatgcatgatcaggggccactgcactgtatgcgccatgcacaggctgcattgcgagtggctgtgacagaagatcgtagtggccactgatgacgagcccgcatacatctaagcggagccagttgctacttcttgggtgcatgactcggctataatttcgcaatgacttgcagatgatacatcctgtgttaaattcacattcaggtctgcacacgcaagttagccccttgtttactctgttgcataatacgaagaatgatcgcgttagtgttatgctcgttgaatgatgtatatatctacccttctctctgggac

SEQ ID NO: 211211 - DNA, 546 bp, Glycine max
ggatctggaaactaagaagaatgaaatggcttgctgaatgatctcctgcgcagctgtgaccaccgtaaaccgtgccggtgccggcatggttgctccattcaccggcctcaaatccatggctggcttcgccacgaggaagaccaacaatgacattacctccattgctagcaacggtggaagagtacaacagcatgcaagtgtggccaccaattggcaagaagaagttcgagactctttcctacttgccagacctcgatgatgcccaattggcaaaggaagtcgaataccttctaaggaaaggatggattccttgcttggaattcgagttggagcacggattcgtgtaccgtgagcacaacaggtcacctgcatactatgatggacgctactggaccatgtggaagctgcctatgtctggctgcactgatgcttctcacgtgttgaaggagcttcatgaggctaagactgcataccccagtggcttcatccgtatcataggatttgacaacgttctgcaaatgcagagcatcagcttcatcgactaca

SEQ ID NO: 211212 - DNA, 351 bp, Glycine max
gtgaagttggagaatggaaggccgagcgcgagcgagttcgtagtcagcggaagcggaaacgcaattccgagttacgtcgtggcgccaaacgcgcgtgttcaggatttggttaaccgaaacgacactcgcctccggatattctccggcactgccaatccggctcttgctcaggaaattgcatgctacctgggcctggagctaggaaaaattaagataaagcgttttgctgatggtgagatatatgtccagctgcaagagagtgtcacggggtgtgatgtgtttcttgtgcagtccacatgtcctcctgcaaatgagaatcttatggagcttctcataatgattgatgcctgc

SEQ ID NO: 211213 - DNA, 523 bp, Glycine max
  unsure (1)..(523): unsure at all n locations
gaaagagcaagcaatcacaaacctcactaagcttctcactgatgaaaataggggagaggatctgtgcagccttctcactcagttgaggccattcttctccttgatacctaaggcaaaaactgcaaagattgttaggggaataattgactcagttgctaaaataccagggacatctgatctacaaattgcactctgcaaagaaatggtgctatggactcgtgctgaaaagcggacctttctgagacagcgagttgaggcaaggcttgcagcacttctgatggaaagtaaggagtattcagaagctttgactcttctttctggcttggtcaaagaagttaggagattagatgacaagcttcttcttgtggatatagatttgctggaaagcaagctgcatttctcattaagaaaccttccaaaggcaaaagctgcactcacggctgcaagaacagctgcaaatgctatttatgtgcccncagctcaacaaggtgccatagatctgcagagtggaatacttcatgct

SEQ ID NO: 211214 - DNA, 492 bp, Glycine max
  unsure (1)..(492): unsure at all n locations
ggcatttcttgtttaaatgggattgaagaagctgaagctcagtgtgctttgttgaattttgaatcattatgcgatgggtgtttcagttcagattcagacatattcctttttggtgcaaggacagtatatagggatatctgccttggtgagtagacaaccttgttttatcattggtgaattttctttgcattaagtatgttttcatacgactaatgatgagttgtttattaatgagttaggagatggtggatatgttgtttgttatgagatgacagatattgaaagaaaacttggatttggaagggactcattgattgctctctccttgcttcttggcagtgactattatcaaggagttcatggtctgggtccagagtcggcttgtcagatagtcaaatcaattggagacaaatatatttctaagaaatttgcttctgacggacttggatgggtcanaaaatgaaaaggaggtangaatgattacggccggat

SEQ ID NO: 211215 - DNA, 509 bp, Glycine max
  unsure (1)..(509): unsure at all n locations
atcaatagcagatcttggtggcacagagatagatttgagatttgccagctctaaggaaggacgtttgtttgtcattgttgctcctgttcttagattctctgatgatcttggtgacaatgctacaatagaaaaaattggacctccagagaaagtgatcaatgcatttggtccagaaatgattggggaaaatgtagaagggaaggttctgagcgctaatgtagcagaacatgaaggaagaacttactaccagtttgagctggagcctnctcatattttcattactgccaccgcagctggcaaccgcttatatttgtttggtgtaacaggcagcggtcttcagtggaagagacactacgatgatttgaagaagatagctgaatcttttcgggttgtataactagaatcttctgcgaacccagagataattgaaatgcagctttctatatttgtattgcagtacaacaaagaaggttgttccctctactttgtctgactgggattatgtgaat

SEQ ID NO: 211216 - DNA, 533 bp, Glycine max
aagaagaaacaagcattaatagaatttttatttctcacacaataaatacaagagattctgcaaactgaaaaagggatttcttactaaagcaaactcaaacaagaacaacttccactcatttggcatctaccgtagtagaacaggatcaaaagcagctctctgatagaacacacgtatgtattatattgaacatcttgcacagtggttcatttctcacagctattgcaacttaaaatacttgcaaagcttctgcaaattccaaactttctttttctcccttctttatggatatgacaaagtgatcagatcatgaaacaataatcaatccattgaatttgaatctgatttttggtttggatcgatgccaccattcttcatcttaggaagggacaacaaataggccaaagcctactaattaagcgcttaaaactgcattagtggttggtttaagtgtgatgttagtaacatcagcttgattattaaagggtgttctttgtacgaagaagcatgccccaataacaatgtagcacagc

SEQ ID NO: 211217 - DNA, 133 bp, Glycine max
gaattcgtaaattagccgcccttggatgtaccaaatttcatgctttttgtaggagtgcgtaggttttaaaaattttctgatgtatctttcatgtgtttgttggttttgtttaatataggaaatattctgttac

SEQ ID NO: 211218 - DNA, 496 bp, Glycine max
aacaatcaataacaagtacattagcaagtattcaagccaagtacatcagcgagtatataaaaatccaaaaactcgatccccctccacaagagaaaacatcaaaagtccaaaaaagagctaatgctcctccaacaagtaacaccactggtttcagaaaccgatttattcagacctctcattttttgctcgagcaagacactaaatcgcagctaaacataaacatacggtaataatgtgaagacaagctactttgaagtaacaccttaaagagacttcttggcaacgaatacaagaagatcaatgacacgtgagctgtatccccactcgttgtcgtaccaagaaacaagcttcacaaagttcttattcaatgcaattccagcctttgcatcaaaaatacttgatctgctatcgccgataaagtcagtggagaccacatcatcttcagtgtaaccaagaattcccttcaacttgccctctgagtcctccttgatagcat

SEQ ID NO: 211219 - DNA, 516 bp, Glycine max
  unsure (1)..(516): unsure at all n locations
atgtcgaggagttcccagacattctgagcatctctgagatcgagcttgacgttcggagagacgctgtgctcggtgttcattccgctcataggaatagtcgaagctttggttttcacattcgccagttgcttcgatttccaatctcccaagaagaataagaaacattcttctaccttcgatgacattctcaccctcgccgaggattctccatttagtgttaatgaaatcgaggcgttgcatgagttgttcaagaagttgagtagttctatcattgatgatggcctcatccacaaggaagagctcgcattggcactgttgaagaccaccactggcgagaatcttttccttgacagggtgtttgatgtcttcgatgaaaaaagaaacggcattatagaattcgaggagtttgtgcatgctctcagtatctntcattcttgcactcctctgganaaaaaaattgattttgctcttagatcgtatgacttgagacagacccgatatattgagcgagaagaa

SEQ ID NO: 211220 - DNA, 456 bp, Glycine max
aacaaaaacccaaactggaattaatccgaaagcactcaattaatgggtccaataatacccagtttttgacagggcatccttccataccagggtccactaatacagaatttgtcacttgctttgcaaatccttttttgcacctactttagccacgggcacactaaccactggtattagccacaatggtaaacacaaccatggtatttacagccaatcaccggcaataaattgcctgatcaatttgggggggaatctgctttatttcagttccaagttcttggtcaatcctatataaattaaagcgatcctcataggtaatcaagttcactggtaaacccaggtgcccaaaccttcctgaacgaccaaccctgtgcaaataagtctctgcgttcttgggaaaatcaaaattaataacaacgttaactgcttgaatatctattcctctagtaaaaagat

SEQ ID NO: 211221 - DNA, 440 bp, Glycine max
cctatcccaaactttcttgtgtttctgagattcaattccccgttttgttttttactctttagactctccgccacctgaacattacccatccatctcatagcactcaccccagaaaagcaccgtcacttgttcgtttcaacgttcttctattgatacgttaatgctttttgattcctttcagatttttctaactaactaactatctgtgaatcaaagaaatttcagtgtacgtttcgtctgattctttgggatactgcttgagctcgatgggagatgtggctaaggaccttgcagctgggactgttggaggggcagcacagttgatatgtggacacccctttgacaccatcaaggtcaagctccaaagccagcctgcaccactccctggtcagcttcccaagtattcacgtgcatttgatgctgtcaagcagacaatagca

SEQ ID NO: 211222 - DNA, 558 bp, Glycine max
gccgaaatctccgagctcagatgacgtggacacaatttgcaccagcatctggtcacagatcaaggctaagaccggccggtcatacagcgccttcaactacactggtcctgcaaacgccgagaacgcgctcttcttgttcggcagcgatccaggacttttcagcgcagaattcgatgcagccagtccttcggacttcttctccagtgtcggtcttatcacgccggtcctgtaccggccgtggcttacggagcgtttgactgagagcctaccaaagagcatcaagaagatcgcggtgcttgagcaaatcaagaggaagacaacgaaatggggcccaattctgctcgatctgctcatgtctctcaaggccagctcacagggtgcttcgccactgattgtgggctatcaattgggttacattgagtactcgacagtgacacaagcactcagcggtatcttccaaaatttgacctcaaaggccccaatccagaatttgaagattggtgcgcacgacgccccttcgaagacgagggtgccaccagcagccagcgtggaaacgcg

SEQ ID NO: 211223 - DNA, 508 bp, Glycine max
  unsure (1)..(508): unsure at all n locations
aaaagaacaaaaatcttatttagttgtaaagcaataaaaatatacagataaatgaagaggtgaaagaaagagagaaaaaaaatcaatgatatagaattctaatatgtaaaggtctatgggttatctcataaaaggtagtgtaataaagcatcaatctaaatcaattcatatctatttatatatgaattaatttataacgtaaacaaattaagagctctgaatcaataaaaactgagaatattgattcacgaaaaaacaaatcaatattcgaaaaaaaaaaagattattaattttaagatatgagaaaggctccattgtcgaattcagacctaaccattaatcgagaagtgatgggaacgacgaaacctgcaaatacttaagattttattaaaaacaaatcttaatgattcattaggtgggatggcggaagaaaccaaanagcaatcctttttttaagagttgtgccctacattacatctgaatttgattggatataaaagagtaaata

SEQ ID NO: 211224 - DNA, 412 bp, Glycine max
acgtcttattatatatatatctatctatattgtatatatagatatattgtttaggtcatcaagtattaatctgaaataaataagaattgctgcttctaatacttataataattactacaaattctaataattactacaaaagggatatatgttagataaaatacattaattaatctatttcacaaaaaactaatgtatccatagcacacgatcgtattataatacctctggtgctaatgaaactattgtagtgaaatgtaactgtctcaattctccgggcgattgcacaaaacattcaagccccttctggatacacttcttgatcaacgacaactgtcacacttttctaatgcttaattattataccgcagctacggtagagttctttacaagtactttcaatttcagctct

SEQ ID NO: 211225 - DNA, 483 bp, Glycine max
  unsure (1)..(483): unsure at all n locations
aaatgcactattcatggatgtaatatcttctggcttggacagctccacgactgttcaaattatcaagtgtctcagacaaattgttcacattctagatggaatagcggatatctcattattgcaaccagagccagagacatatgaactctttgatgacattagcctcctctctgatggtcaaatagtataccaaggacctcgtgaattcgtccttgaattttttagaatctaagggtttcagatgtcctgagaggaaagccatcttccttcaagaaaatatcagatatatctatattccatgacatgtgacttcaaggaaggatcagcagttcccgttgataagagaaagaaccacccagcagcattaactactatgaagtacggggtaaacaagaaagagcttttgaaagctaacttctctaaggagtatttactaatgaagaggaatgcatngggttacaatttcaagctatctcaagtttt

SEQ ID NO: 211226 - DNA, 515 bp, Glycine max
aaaaaaaacaaaaaacactcttcctttaattagaaacaaattaaataattacatataaggattaaaccaaaaagtggcttaggggagaaattaaaataaaatcagggggtctcggggaaaactttttcctctaaaaatttgatgaaacgttcatcatacatcttgggttcaactactgatattgtcatagggtcaaattgcagcgatttgtatgcatgctcaattttctttctcagattatagttctgcaatatatcaattacgcccatgtagaggacaacatcatatacctcaaaaagctctacttcttttgcctccacctcctcctcaaccttccgagtagcttgagctggcatgttcactccaagctgcactcgcaaccttgcagtaccaggcagtagaagatcaacttcattatcacccatggagtatgccctcaatgtattccctctaatgtggggtccaggtgccgtgttgactttacttggttcgtgggaaactaatagtaagccttt

SEQ ID NO: 211227 - DNA, 501 bp, Glycine max
gttttctcaaactgcttgaggtcaagtgggaggacagggataatagcatcagaggaggaagatgtgccagtggcagtagaagagagttattctggaaactacattgtggtgtttgacccacttgatgggtcatccaatattgatgctgcagtgtcaactgggtccatttttgggatatacagccccaatgatgagtgtcttgctgacattgatgatgaccccacccttgacacaacagaacaaggatgtattgtgaacgtgtgccaacctggaagcaaccttcttgcagctggctactgcatgtattctagctcaataatctttgttctcacacttggaaatggagtgtttgtgtgtacattggacccgatgtatggcgaattccctgtgactcaggaaaacctccagatacctagagcaggcaaaatctatgcattcaatgaacgtaattatcagttgggggatgagaagcttaagacatatattgatgatctcaaggac

SEQ ID NO: 211228 - DNA, 566 bp, Glycine max
ggtatcagtgagaaagaagggtttgaaatttactgacatgattgcttctcttggcagaaatattgccagaatgaacaaaattatatccaatttgaaacatgttcaaagttatacaaaattcttgttcaaactgatatgaagattgttggcatcacttttttctttgcacaaaaggacggagggggaggggggtataaaaagaattcttccttaaaacctgattgtattgctttggaagttttgattgggcatagttttcatacacaagtaaacctcttgcattagcttatcgtttaagccaagtacttttccaccttctctacctcttcaacgctcccaatgtacagtggcacacgttgatgaatctctgttggttgaatgtcgagtattctttgatggccatctgacccttttccaccagcttgttctacaatgaagctcataggagcacattcatacaggagccttagtttcccattcttgcttttcttgtccctggggtacccgtaaatgccaccatatagcagtgtcctgtggaaatcttctaccaagctaccaatgtacct

SEQ ID NO: 211229 - DNA, 496 bp, Glycine max
  unsure (1)..(496): unsure at all n locations
cgagaaagattagtaagtcttcttaagaaaccacacatacaatatgaaattcttgacaagcatggtttcggcgacaaaagcttatcaagaatggagaaagaatgtgtcgagattgatataaagtatgaaggtttcatcttgcgtcagcaaagccaacttcaacaggtggttgctcaacaacatagaccacttcctgaagacttagattactatgcaatgacaacattgtctcttgaagctcgcgaaaaactttccaaggttaggcctcaaaccattggtcaggcaagcagagtagggnggggtgagccccgctgatatcactgctctactcatcgtgatcgaagccagacggaggaaagctcaagaactaaggaggtacaaaatgatgaatgccattcgagcaaattcccaagatgaggtgcctgaagtttctttgactgagaaagtcagctcttgatgaagcttccatgtcactttgatgcccgactattctatc

SEQ ID NO: 211230 - DNA, 515 bp, Glycine max
  unsure (1)..(515): unsure at all n locations
ctcttttgctgcatcagaggagttgtaaattaagagcatggctgcacaagctcttgtatcatcatcttctcttaccttctcagcggaggctgcaagacaaagtcttggaccaagatcactccaatctccatttggcttctccagaaaagcctcctttcttgttaaggcagctgctaccccccctgtcaagcaaggatcagacagacctttgtggtttgcatcaaagcaaagtctttcttacttggatggcagccttccgggtgactatggatttgaccctctgggactttcagaccctgaaggaacaggagggttcattgagccgaaatggctagcatatggtgagataatcaatggtcgttatgcaatgttgggtgccagttggtgcaatagcacctgaaattctaggcaaggctggtctgatccctcaggagacagcnactccatggttcaaaacgggtgtgttcccacctgcaggaaccctacactactgggcagactnctacacactggtc

SEQ ID NO: 211231 - DNA, 461 bp, Glycine max
ggaccaattgataattagtcttcctctaatttagtatatcactaaaattgcaatatatcatgtatctcattttcatacatacaaaatagaaatccagttttttcttttcctttttaatatcctctctggcacgatattgctacatctgttagcaaatatggaatacaactcaatgtgaaatggttgggagccagttttaaaatgatcccattatctatgctcttggccactggggactcactacctcaagtgtgctaaagattaatcgcattctgctagcaacaactgacggtttctcagcctgacccatcacagccgtctgttctaactgaagagtctttacaggaagccttcaataaaaacatagtaagcaatactgtgatgtctagtaggctatcgtttacttgtaaacttgatgcaaatccgctagattagagaacgattctggtagataatattct

SEQ ID NO: 211232 - DNA, 481 bp, Glycine max
  unsure (1)..(481): unsure at all n locations
gaccaatctcaaaactattaccattataaggataacagggtactcccttctcacgttgatgccgaacttgccaatgctcaagcttggtggtacaagccggactatattatcaacgagcttaacataaactccgtgataaccacgccttgccacgaggagatcttgcccatcaactcatggactactcagatgccttatttcatcagaggctatgcgtattccggtggtgggagaaaggtgacacgtgttgaggtaaccctggacggaggtgaaacgtggcaagtgtgcacactggactgtccggagaaacccaacaaatatggaaagtactggtgttggtgtttttggtctgtggaggttgagggttttggacctgctcggagccagngagattgcggtgcgtgcttgggacgaggccctcaacacccaaacctgaaagctcatntggaatgttatgggcatgatgaacaactgctggttc

SEQ ID NO: 211233 - DNA, 538 bp, Glycine max
gcaaaacatatatatgcttgagcaggtttaattttgaataaactgtttgctatgaatacacaaggacaaggaattaaatgtctgagaacatagccacacaattcaataccattcatgtggtaaaattcaccattttgacttaaatctgtagtaaaggaaaaagtgagacgccacgctacttccagtgtggatttgcaataccctataaaatgtatcttgtacgtacaaaaatctcctgagacagccctctataaggcgtacttaaacaaaagctttcactatgaatggactttacaattctgccgcttgttaccacagtgtcataagctggaacgagcataccaatgatacaaattgttcaatcaatgcccaaacttgaataaggttcaattccacctgagcaatcatcatgaacacgccaaacagtctcgcccagaaggtttgccaccgacaagacagttaattgagggaaatagttctgttctgccactggaattgcattagttatgataacttcttggaacaaaccacttgacaa

SEQ ID NO: 211234 - DNA, 451 bp, Glycine max
  unsure (1)..(451): unsure at all n locations
gacaccatgtgttttgaggcttttccccacaagctggtgcagtttggagagattcaggaaaaagttgtattgaaattttcacaagaggaatttcttacagcttggtcaactcaggtgcgtcctgcaacaactctgttggctgatgggtgtccatatttgtatgctatggtgcatgatagttcagtgtctacaataccaggtgattttgtcattggtgttaagttgacaaccataaacaatatgtgtgcatatgggctcaatcctggtatttcaggttctcgtcttttgggcaccattcctcagtctatttcacagcaaactgtttggaatcaaatggcaacagtgagaacaccattgaattttgattctagcaagcagagcttttgtcaattttctattgaccttctcagtggagggattctagtggacanaactggagattggatcacac

SEQ ID NO: 211235 - DNA, 537 bp, Glycine max
gctgtgctaattgttttttctccttgaatttgataaaataattattgattcttacagtgtacaagtcagagcgtattttatagtacaaacataattctgtgacttgcgtgtatgattatgcaacatataattcggcttttccatcaatgaatagactcatgaactcttcaccatccacagtttctttttctatgagaagttgagcaagcttgtgaaggatatcaatgtgagttgagataatatgtgttgccctagaatatgctctctctaccagttccctcacttccgcatccactacatccgcagttgccatggagtaatccttttgcgatgacatctgttgacccaagaatggatttccaccaggtccaccaatggcaacttgtccaatttttttgctgaatccaaatctctcaaccatctgccttgccactcgtgaaacttgcatgaagtcgtttgatgctccggtggtgacattttcctggccaaaaataacctcttcggcaacccttccacccagggcaacagccatctgat

SEQ ID NO: 211236 - DNA, 539 bp, Glycine max
  unsure (1)..(539): unsure at all n locations
tttagatgctactactgtactatcaagaggattagcggccaaaggtatctatccagcagtagatcctttagattcaacctcaactatgctccaacctcgaatcgttggtgaagaacattatgagactgcgcaaagagttaaacaaactttacaacgttacaaagaacttcaagacattatagctatccttggcttggacgaattatccgaagaagatcgcttaaccgtagcaagagcacgaaaaattgagcgtttcttatcacaaccttttttcgtagcagaagtttttaccggttcgccggggaaatatgttagtctagcagaaacaattagagggtttaaattgattctttctggagaattagatggtcttcctgaacaagccttntatttggtaggtaatatcgatgaagctactgcgaaagctacgaacttagatatggagagcaatttgaagaaatgactttaaatctttgaggactgacccccaatcgaatggttgggattcggaagtgaagaaatattttatctactaatag

SEQ ID NO: 211237 - DNA, 221 bp, Glycine max
gtcttagtctttacgttttttggccccctaaacttggtttgaaatcctattggttgcccttacctgtgtccttcctcgtctaaaagctagattagcctaaattggttgtccattgccttccctctttattaaaattccttccggcttttcaagagtgagctctgcttcttggggatcaatggccctaccctttttcggatcatttaccattaacagcgaac

SEQ ID NO: 211238 - DNA, 464 bp, Glycine max
  unsure (1)..(464): unsure at all n locations
tatagcccaagccctatacaaccaaaccctaacacacacccatttgattcagtttccatggctagcctcaaggttgcatttttggctgcagtgctctgcatggatgtggtgagtgcacccatggcacatgcagctatcacgtgcgggcaggtgacgaatagcctgatcaattgcatcggatacctacagaacggaggaacgccgccgtcgggatgctgcaacggagtgaagagcctcaatgccgacgccaagaccaccggcgaccgtcagacggcgtgcaactgccttaagtcggccgccagccaaatctccggcttcaaagccaacaacgccagctcgctccccggcaaatgcggagtctccatccactacaagatcagcacctgcaccaactgcgctaccatcaaggtttgaagagaaagtcatggacgcangantaccgaaactactcactagcatatgag

SEQ ID NO: 211239 - DNA, 577 bp, Glycine max
  unsure (1)..(577): unsure at all n locations
ctcccttcctcttgcagagtttgccggttccattctctctatacccactcacctctcattcgttctggtcaatcaatcattcattcattcctattccttcttctttctcttccaattccaaatcacgatccttcgttttccctctctagaaccttcctttttcctctttccgtgtctgtctgtctgtctctctcgtccccatggcttgcgatctcgaagcaaaagccaaagaaggcctgcgtcgagaaccacttcgaactcgccgtggaccttctttctcaggccattcacctcgaacccaacaaagccgaactctacgccgaccgagcccaagccaacatcaaactcaacaacttcactgaggctgttgctgatgctaacaaagcaattgaattgaattcttctctaccaaaagcatatttgcggaaaggtactgcgtgcatgaagcttgaggaatatgagactgctaaggctgctctagaggtgggtgcatcattgtctccagacaactcanggtttgctactttgatcacagaatgtgataagctcattgcagaagatcttataccatacctat

SEQ ID NO: 211240 - DNA, 518 bp, Glycine max
gatagatgaattatatagtcagttatattaatagaaagcagagcttaaaagggacagtaaaacagaaagttgcaatatattcaccaaagacaacagccttgtcctctcaaccaacaaccatgaattcaggtcctagcgaagacggacacacctcatgaaaataaataaaaaattaaagaaaataagtatctttagttcagcagttaagctaaccaacaaaaacaaaccaaagtataatctcacaccaaaatatgtataacattgatccagaaaatgtcttaatattcccatttcttcaactccatgccatcaggagcacttccctctaccttctttgatcccacttctttccagtttgtagacagcactgtcccattagactcaacaaaagactttttcattgccctccttgtatcctcatctgcatcttgatatatttcacggaaaaatttgttcaacgcagcatcgccatcaagcttttcgtctttctcctctttcttgacttgagcttcaatctt

SEQ ID NO: 211241 - DNA, 512 bp, Glycine max
aattgtagatgtgcgcgaatgcatgctgaatgagaatttctacctttctatacattccttgccatgtcctctcgtgacaaccgtctcggttgtgtcccagttttcgcgccgtcctcagatactgcccgcttggcgatacagcaacacggccttttcatccccacccaccgcaaactgcttgctgggcccaagcgagcctatctgcacatctgcaggctgccagtcgaatgcccaggcgggcgcggcgagggtggtcgtgtacacggcggaccgctgggcgatgtcccatagtttgacattcttgtccgcacccgtagacccgagcaatcgtccgtctgcagagaggtccaatacccaactctggtggccctgcataattgccacggcgccttcgcctggtcgggagcccgagccggatcggatgtcgtgcaggacgatacgggtatcgtctgacccagagtatagccactgagagtcctcggaccaagcgatagaccgcgccggcatggcat

SEQ ID NO: 211242 - DNA, 473 bp, Glycine max
  unsure (1)..(473): unsure at all n locations
cttctctctatcacatttttcttacaagatggcagcatcatcagcatgccttgtagggaatggtttatctacacggggtaatagaataactcttaagaaggacttcaatggaagaagatatctctactcatcttggagattttcattattgaacaacaataaggcatcaaaagcattttccataaaggcatctttggagcaaaggcaagaagaagggagaagggggtttctgaaactgttgcttggaaatctgggagttggtttgcctgcactattgggaagtggcaaagcttatgctgatgaacaaggggtttcatcctccagaatgtcttactccaggtttctggagtatttggacaaggacagagttaaaaaagtggatctttatgacaatggaaacactgctgtntgtgaggcttgttcgcccgagttggggaaccggtcacagtatgttagagttcaactccctggac

SEQ ID NO: 211243 - DNA, 531 bp, Glycine max
  unsure (1)..(531): unsure at all n locations
ttttgatgtaatcagtggtagcacatcaaagtcatgggaaaggcttgatgctggtggcatcatttctcacacatttgagctggaggcaaaatcaaagggagtatttgctggtgaaccagctgtcataaagttccgtgttcccacaaaggctgctttgcaggaggcatattcaactcccatattgcctttggatgttctttctgatagacctcccgagaagaagtttgaatgggctaagaggttgctggctaagtatggatctctaatctcggtgatctccatcatgggcctgatcatatacttggtagcttcaccatcaaaatccagcgcaaagggaagcaagacgaagcgttaatcattggcaaattagagcatttgcaatcagacactatggaggctagatcatgatattctgatggtggtcagttattacatagttggactnttttgaatgaatggttcaatgagttagtgagagaacagattaatttcttggacgcatagcctaaacaagttgttctggttctcact

SEQ ID NO: 211244 - DNA, 502 bp, Glycine max
  unsure (1)..(502): unsure at all n locations
attaataaaaaatatgcatttaaatgtgtatataatgcaagacaaagagcaatgaaggtgtcccacacttggattacgtttgtctctgaacaaatattcaaacttataagatacatgaaccatgtaggggcttatccaaattaaaaaacatgaaccctgtatgtatcaaaaggaaatagaaaatacttgtgtttaacagtttatttgaaactcgtagttgcgaagctcaacctaaattccgcaggcggcatttattatgaatgagagaatgagataatgctaattattgaaacgttttccttctacgcagcggaggtaaagttgaagttagcacacgtagttcggcttccatagagcaaagagctgaatcccaatcttgaagtagccaaatcgaactgcacaagattatcctccagctgatatcctccaatcactatcgaagtcctcggattctcacctncattcacaaacccaaggcatagcaccttatcatcgctcacac

SEQ ID NO: 211245 - DNA, 459 bp, Glycine max
ctccgaccgggttttttaagccttccaacaacgccaactcagcaaccggttcggtctggggtgaagtgttttgatgtttgggatgagagttttgaggaggaaccggttatggagagggtggagtcagggaggggaataagggctaagatgtttgagaagctcagcaaggagaattcactcgacgcctcggcttcgcctccggatcttgggtgggtctcggagcttgttaagtgagaagccagtccttgtaaatatggcatggctgaagagaagaagacaagaagacaagaatctcttttttgtatagttagcttactattattattatcatcatcatggttttaaacagcattcctcaacgcaatcaaggtatttggattcactgtaatacacaatctgtaattgaggctgcgtcagtcgcaattacctaccatttaaaaaaaaaaaaagaaagaaaaa

SEQ ID NO: 211246 - DNA, 464 bp, Glycine max
ctggaatccacgaaaccacctacaacagcatcatgaagtgcgatgttgatatccgtaaggacttgtacggaaacgttgtgctctctggaggtacaactatgttcccaggaattgctgatcgcatgcaaaaggagctcactgccctcgctccctcaaccatgaagatcaagatcattgctccccctgagcgcaaatactccgtatggatcggtgggtccattttggcctctttgtccaccttccaacagatgtggatctccaaggaggaatatgacgagtctggtccctccatcgtccacagaaaatgcttctaagcgtttccccattctagtgtttcgcacctagcaatattcatgtattttttgaagtgtactttattctgtatgttttaggaattatattcatcttgttagggctgtatatatacaattcaacgatttgaaataaactacctgtcgtgaggc

SEQ ID NO: 211247 - DNA, 444 bp, Glycine max
gaccgaggaaaggaagcagtgattgaattggggatttagggattgtgtacagtaacaatgaatttcaagatggattccgatagcgcgaagctgttcgtaggaggcatttctcgcgacactaccgaacacgttctcaaactccacttcgccaagtacggcgtcgtttcggactccacaatctccgtagaccgcaccacccgaagccctagaggttttggcttcgtcaccttctccgacctctccgcagctgataaagccctccaagacacccacgtcatcctcggaagaacggtagaagtgaaaaaagcaattcccaggagtgaacaacatcaacaccaaaacccattacagagtagaggggggtgggtatctattataataataataataataataatgaatgatataataataatagtaatgactattgcagtgaccacaacg

SEQ ID NO: 211248 - DNA, 405 bp, Glycine max
ggctgttattgaactcaataaccctcgtgtcagaatcaacgcatccctcatcataactattacttacaattcaaagtgctcttaagttcatgaaggaagataattcttatgactagttgtagtgaacacagtcaacggaaatagtcttgaatataaaacaaacaagtatatagcataggcaaatctacaagagagatctttgataaacaaacaagcatagcataaatccacatggcagatctttgattcagattttttgagattaacaaaatcattcaaatgcccattggttttcccgacgaacttcctcttcctcctcaggggtgaagtcattcttaatgttaaaggtcttgcgaatttcctctggagtcttccccttgatcatgtcggctacagtttgacatg

SEQ ID NO: 211249 - DNA, 364 bp, Glycine max
ctttccagaagaggatcttcttccaacagtctaggcattcatactcttgaggtgctggaggcttgccaccgtaaatgtgttcacatacagctaatggtccatatccctgggatggggaggccacatgtgatgccactacacaccaccctgtccaaatctacccaggataagtcaatgtcaaatactacttacaccatcttggctacatccccagtgcagaacacttcgactactacttcgatgacgccctcgtatgtgcctacaaggcataccatctgactgacacacttgtcggcaccgtgatgcactacattatcactgttcaacgaatcatgacaccccggtgtgacgttcccgactatca

SEQ ID NO: 211250 - DNA, 413 bp, Glycine max
  unsure (1)..(413): unsure at all n locations
gtgctgttaattatgatatgttatatgtaatgtttatattattataaagatatctattatttgtattcatgatgtaaattaattattgttaaatttttaattaatttnnnnnnnnngtggtatatgatcgaaaacatttanngcggggacgacgagcacactagacggaggatgcccagncagaattataatttttgtttttgaaggtaataaaaaattgtagtttaattaattgaaatggattggatattattatatcttacttatgtataaaaaaacaattagggggttacattcatgcctcaaaaatattaaaaaaatttgaataaatataatattaatattaaataaatttaaaaaacataatttttatatttatttcaaaaacagttatttttaatgcttattaaaag

SEQ ID NO: 211251 - DNA, 494 bp, Glycine max
  unsure (1)..(494): unsure at all n locations
gctctttctcttcgcaacatcttccttttccatccaagcactctgctctgcctccttgtctggcattgcacccttaagaccattttccacaagaccgaagcctcagaacgtccattgacgcacatctggcagccatgtccaccaccgcagcaccggttacgggcaacccttcccaggcgagcagcgatggcctctctggcaaacgacacatccgtccgttcgctggctctagtaggcccatgagcccacctgcctcgcacactctcttccacccgaagacacgatgcttcgtatacggactgcagccccgtgccgttcagggcatgcttgatttcgacttcatctgcaagcgcaagcagccctccgtggccggtatcatttacacattcggcggccagttcgtcagcaaaatgtactggggaacaagcgagactctgctgcccgtttaccagaccaccgagaaggccatctncaagcacagcgatgtcgacact

SEQ ID NO: 211252 - DNA, 433 bp, Glycine max
ggacatgttctggtttaacattaaaatactttaataccgcacacagcttggggatgatgctacaggggaccccgcccctttgtctgggtttgtctaccacgctcaaaacgcctttttttggggccaacaagcttccaaaactggatttgccgttccattttttccaaatccgactttacaaggataccttaacacgacccttaggaccacctgcctgcagggggggcaaaaggtaggtgatgtcctcccaaggatgcctgtaaagaccaatcctcagccttttttgggcggggaagggagcaatcaaaccaatggggcgtccgaggacaaaaagtccgttgaggacacccattttcaggtagttttcggccttttcgggagtgaaagcgccaccgttgcgaacgagggtaacgaagcaaacagggatacagcc

SEQ ID NO: 211253 - DNA, 476 bp, Glycine max
  unsure (1)..(476): unsure at all n locations
cttgaggagtatcttggcaaactaaatcatgaagcaaaccaagaaccttgtgtgccatcgtatgttgagaatcatagtgaagaaaatttagcaccaaaacgatctctcagcaaagatattgaaagatcaaactttaggaaacaaaatgcttttgtggatataagaaggctaaaacgtttacatgatccaaggtctgctatagattcacagcagcaagttgaaacctccagtctctacctaattggcatattggcttctgtaaacattgcagtgtttctatttgaaatagcaagtcctataaggacttctgatttagagctgttttctattccactactatatggagcanagataaatcatttgatcatggttggagaatggtggaggcttgtaacaccaatgtttctggtacacaattgagaattggcatgcaggaatatttcacatggctgtcagttggttgggcccttttaaca

SEQ ID NO: 211254 - DNA, 447 bp, Glycine max
aagtatgtatatgtagtaataatttatatttatgaaatttcaaatattagtatgagcatggtacggacgactctctagtatacataatatgacacactaaataccaaaattgatagaatagtcgggcatcaaagtgacatggaagcttcatccagagctgactttctcagtcaaagaaactttaggcaccttatcttgggaatttgctcgaatggcattcatcattttggacctccttagttcttgagctttcctccgtctggcttcgatcaccatgagttgagcagtgatatcagcggggctcaccccccctactatgcttgcctgaccaatggtttgaggcctaaccttggaaagtttttcgcgagctctaagagacaatgttgtcattgcatagtaatctaagtcttcaggaagtggtctatgttgttgagcaaccacctgttg

SEQ ID NO: 211255 - DNA, 495 bp, Glycine max
  unsure (1)..(495): unsure at all n locations
aagcaatccgaaaatgttgcttatataccttctgttggaaacaaccaaactcccaaggtgaggaaaccatataccattactaaacaaagggagaagtggactgaggaagagcatcaaaagttccttgaagctttgaaattgtatggtcgtggctggcgccaaattgaagagcatataggtaccaaaaatgctgttcagattcgaagccatgctcaaaagtttttctctaaggttgtgagggaatctgagggcagcgctgagagttctatacaaccaattaacatacctcctcctcggcctaagaggaaacccctgcatccatatccccgtaaatcagttaactctttcaaaggacactgcataccaaatgaaacagaaatatctncatctacaaacctgttagttgcagagaacgacaccccatctncaaacctcgtgctatctacggntggttcggaagcatttgggtctcaatttcagagcagactaacagat

SEQ ID NO: 211256 - DNA, 466 bp, Glycine max
cattcgaattcattttatttatatattaatattatattcaaatgaaataaaaagatattaaaagatactaattataagaatttgaaagtgaaattataaagttattaaatgattaatcaatttttttctacctgttcctgtagtaaaaagagttccatctgttcttgaatagcttccttcaaaaggacttctgcttccccagtgaatgtcttggtagaagatatgatttctttgaattgaggtttattcgtgtttaagtaagcacgtaactcaacaagaaatttccttacctgtccaatttctaatgaatcaagataaccattcgttccagtataaatagttattatctgttcttccacggtaagaggagctgattgggattgtttaagcaactcgcgcaatcgttgacctcttgctaattgattctgagtagctttatcgagatcagaagcgaattgggcaaaag

SEQ ID NO: 211257 - DNA, 384 bp, Glycine max
atcacaatttgtgcattgcctcgtgtcctttttcttctttgcttgccaaaaatcttacacacacaggtatctagcaaatgggttctcaccagcaagaaccatggctattggagaatgggaaaccgagggtgttgaccaaggagaataggcatggccgttctgcacacagcatgtcctccacgtctttgcgcaagaagtctagccgaactcttgtctccaagcttccatgtgccacactcagaagcatgcttttaaatttgcaagaggttattcttggtaccaagctttccattctcattcctgccattccagctgccatcattgccgagtgctatggcttttgaaagaccttggatttttataatgagcttacttgggactaca

SEQ ID NO: 211258 - DNA, 493 bp, Glycine max
  unsure (1)..(493): unsure at all n locations
atgctatcaaggaggaatcagtgggcaagttgaagggaattcttggttacactgaagatgatgtggtctccactgactttatcggcgatagcagatcaagtatttttgatgcaaaggctggaattgcattgaataagaactttgtgaagcttgtttcttggtacgacaacgagtggggatacagctcacgtgtcattgatcttcttgtattcgttgccaagaagtctctttaaggtgttacttcaaagtagcttgtcttcacattattaccgtatgtttatgtttagctgcgatttagtgtcttgctcgagcaaaaaatgagaggtctgaataaatcggtttctgaaaccagtggtgttacttgttggaggagcattagctcttttttggacttttgatgttttctcttgtggagggggatcgagtttttggattttatatactcgctgatgtacttggcttgaatacttgctatgtactngntattgattgt

SEQ ID NO: 211259 - DNA, 549 bp, Glycine max
ggcaaaagtggcactaatgtggaaaccaatttgcgttgcttcacttatgaggaacttgaagaagctaccaatggctttgagaaagtgctaggaaagggagcttttggtattgtgtacgaaggagtcatcaacatgggttcccttactctcgtggcagtaaaaaggttgaacacttttctcttggaagaggttcaaaaggaattcaagaatgaactgaatgccattggccctactaatcataggaactgggtccgtttacttggattttgtgagactcaagacgaaaggttgctggtttatgagtacatgagcaatggaactttagcaagccttgttttcaatgtggagaaaccaagttggaaactgaggctacaaattgcaactggggttgctagaggacttctatatctgcatgaagagtgcagcacacagatcatccattgtgacataaagcctcaaaacatactccttgatgattactataatgcatgaatttcagactttggattggccaagattttgaacatgaatcagagcagaaccaacact

SEQ ID NO: 211260 - DNA, 382 bp, Glycine max
accacctccatcttcccccagtaacaacataacataacattcagagaaaaacaaaactatcatacccacatggatttgcaatgaaagtgagagagtccaattatgcgaacgctttgtgatgcttgtgagagtgcggcggctatagttttctgcgccgctgatgaggctgcactttgtcgtgcctgtgatgagaaggttcacatgtgcaataagctagctagtaggcatgtgaaggttggtcttgcaagtccaagtgatgtgccacggtgtgacatatgtgagaatgcaccagctttcttctattgcgagacagatgggaagtccctttgtttgcagtgtgatatgattgctcatgttgggtggtaaaagaacgcatggaaag

SEQ ID NO: 211261 - DNA, 489 bp, Glycine max
gcgttgctaatgcttctatggtaggaggggagactgaggcactgcagaagcttaaaaaatttgcagctgagtgtgcagctcagccacacaaggggtttaaggatggaacacagagtatatatggtgccaacttctcctgcaagatttctccgtggttggcaatgggatgcctttcccctcgcacaatgtatgaagaactgaagaagactgccggcagagtcatttctgcttcgtccaaccggaatgatggtggtaatggctcgtacagaactggaacaaattggttgatgtttgagttgctatggagggacttctttaggtttataacaaaaaaatacagtactgcaaagaaacagctggaagctgctccagccactgcatgtgctggtgcatttgcttaaactagaagttctagtgggcataaggaagtttgcatcagggtatgggttggctccctacgcagtcatggcagtagggtgctggatgaac

SEQ ID NO: 211262 - DNA, 499 bp, Glycine max
  unsure (1)..(499): unsure at all n locations
ctgctatttgtgggtataaatataatgtatagtatatatactactaagtctctaagtactaattgcattaattatacaccacaaccctccggcccctatataaacacgagctttctgtggtgcaccagtgtgctatcttattcttgtgcctcaagaaataggttagttccgagctgaaacaagatggctggtgataaacaaaaactctttaacagactgaagccattcataggtgtagtgttcttacagtttggatatgctggtatggatattctatccaaagctgcactgaacaagggaatgagtaactatgtatttgtcgtgtaccgtcatgtttttgcctttgttgtcatggccccttttgcactgatcttggagaagaaagtaaggccgaagatgacattntcaatcttcatgaagataatgattctcagcttgctagagcctgttattgaccaanatttgtattttttgggcatgaagtacaccacagcaacct

SEQ ID NO: 211263 - DNA, 575 bp, Glycine max
gttgctaatttcttgtcttatattaaaacttaccattcgacataccacagggctacattaaaaacctctactactacatcataattgttcaaacaacgatgaacctataaagttgttttcaaatgggcttctggacggttgaaagatcccagattgctgaaatttagattgaatttggtatgtttcctcatacttgttcatctcgaactatgtttcccgcgcctaagttactgagagtgatgacatcatgattagaatgctcctcctctactgtttgcttggatggcaatgtatgctttttagtaattgaatttgatgactcgtagtcattgcttttaccccacaccacaagatacagtcctaaaataattacaatagctccaaccacccttccaaggtacattatttcagccagaaagaaggagcccatgatagccacaatgaccatgcagagagggttaaaagttgttacaaagaccgggcctctatctttcatcactgctccttggatgtaataagccattcccgagcaaactatgccactgtaaacagcagcaagcagttttgtatccatt

SEQ ID NO: 211264 - DNA, 473 bp, Glycine max
ctcggaatagcggctcgagcggctcgaggttgcataacctacacgtgtcactttttgcgatgttatccattgctaccatagtaccaaaccctgcgtttgcaaccaaagaatgtgttttccctgccatcttcaacttcggtgactcaaactcagatactggtggcttggctgcttcccttatagcaccaacgccaccatatggagagacctattttcacagacctgcaggaagattctctgatggccgtctcgtcattgatttcatagcaaagagttatggtctcccttatctaagtgcgtatcttgattccctggggaccaacttctcacacggtgcaaactttgcaacatcagcatcaacaattagactcccaactagtattatacctcagggtggatgtagtcccttctaccttgatattcagtgcactcaattcagagatttcaagtctagaacacaattcattagacat

SEQ ID NO: 211265 - DNA, 516 bp, Glycine max
acactaaaaacagtttctcttttatacatactctctgttgtcatttgtcaacactacaaaaaatgaaaaagtaaggtagaatctttaatcattcacaaatatggagcaggctgcagagggcattctgtattctaagataatacatatgaaagatgttacatatataggctattcaaacagtggctggtactggagttgaaggagcaacacggttttcagctggaatttcaacaaactcagacaatatagcacggaattcatctccgctcagagtctccttctccagaaggacttccacaatcttgtcaatggcctcacggttgttccttatatgctccagtgcaatttcatatgcttcatctgagatcctcttgatggcagcatcaatgtcttctgcaagcctctctgacattgagttccttgccatcattctcatgatgacatccccaccttgtgctgatggttccataagtgaccaaggaccaatatcagacattccaaatgtggtcaccatct

SEQ ID NO: 211266 - DNA, 436 bp, Glycine max
aaatggtaggtaattgcgactgacgcagcctcaattacagattgtgtattacagtgaatccaaataccttgattgcgttgaggaatgctgtttaaaaccatgatgatgataataataatagtaagctaactatacaaaaaagagattcttgtcttcttgtcttcttctcttcagccatgccatatttacaaggactggcttctcacttaacaagctccgagacccacccaagatccggaggcgaagccgaggcgtcgagtgaattctccttgctgagcttctcaaacatcttagcccttattcccctccctgactccaccctctccataaccggttcctcctcaaaactctcatcccaaacatcaaaacacttcaccccagaccgaaccggttgctgagttggcgttgttggaaggcttaaaaaacccggtcggag

SEQ ID NO: 211267 - DNA, 565 bp, Glycine max
  unsure (1)..(565): unsure at all n locations
gcttgccccctccaaccccctttctttcctcttctcttattttcatttatttactttttttattgcttattttgaagggatcaatacaatataatggttcaaacatgctaacggtgtatgctcctagagctattctgaagtgtcatttacaccaagattcagcttctgctcaacaagcatatccatgcaagatcaataataatgctaatttggtgaattgtaatcctaaaccttttggcactccttgtagtaatatattgattcatagttcctcctctgggaaatgtgataagctacaaaagagccttcatctattccatcatgtcgccacacataaatggctgtgtgggttacaggattccatttcatctgatgatgagtatcngtcttcccgcaacatagccatcagcttgttcaggcgatacaggaacttcattgatcgtggtggagccgacaatctaaaagagttcatcactgccggngtaaatgcatatgcactangatgcaccgatgaaggatcagggaaagacttatggatatgaagaactttgggatcgaaattgat

SEQ ID NO: 211268 - DNA, 421 bp, Glycine max
gggggaagtcaaatggtttttggtgttgtacatggcattttttacagggccccaccaaggaacaaaatgtccacatgattttaaaaggttaaaagggtcttgagttttggcaacggaaagaatttgtaaaataacctttaatccattcaggggaacttgggactgggcaaaatgttgttgggcccgggggcagccaaatgatctaggggggtttggtatgggccaacacctgggacaagagcttgaacaaaggaacccaagattggcaacattgccaaccttccatttttcacttccttgggcttaaaaaccttcaagggcttttaatccttaccaaagccttgggggttgaaaaaagggcctcctggataaactgggttaccagaacctccaagacccttttctagtcctaggaagaatt

SEQ ID NO: 211269 - DNA, 568 bp, Glycine max
gaaatttttcctttgatattaaatctcgctctagattggaaaaagtttcctctacaaaagcacaatttgttagtggaaaaaccttcaaatatgatataattggtgctggttcacattcttcagaagattttcctgaaaaggaagatcaagaaaaacccaaaaagattgataccagattgagacaaagaatagatcctcaatacaatgaggttcaggctcagatggaaacaaatttgtttaaattgtctcttgatgatgttgaaactcctaaaggttccatgttggatcttaaaatttctcaatctaaaattgcacttcccaaaaacacagttggaggaaccattctgcgtagtgatctattggcaaattttttgacagagggcaattttagagcaagtgttgatttgcagcgcactcatcgtattaaaggaatgattaaaatggtggccacagttggtattcctgagaatacaggtatagcattggcctgtgctatgaatagttcttttagggggcgtgccagttctgatatttacaccatctgctctcaagactgtgaaatatggaa

SEQ ID NO: 211270 - DNA, 471 bp, Glycine max
aaaataacacacacttcacacatcattacgacaattaaaagaggtgtggaaattttcaaatagacagagcatactcaacaagagggtcatgtctaattccctttattgaattaaacaaacgaacaaacgaaagaaaacacaaattccagatcatgcagaggattccgcattttcagaagatctggcagtagcctgtggaacagaaaaagctggcataagagtattaccagcaatttcaaaatcttgagaaattcccaagagaatatcaaaaactgtagactgtttgggattgtcaataaggaaactcaagtgccatgaagtttgatttgcccactcagaactccacatttcaaaaccattattaggaccacatacctctattgggaagatcaattcccaggaatgtggttccgattttgtccacttacatgcatcgaaatgctctgtactgttgctgtttgttaaaaacac

SEQ ID NO: 211271 - DNA, 485 bp, Glycine max
  unsure (1)..(485): unsure at all n locations
attagagagagaaagagtgggagaaagccttagagagaatttttttcaaaaaagaaaaatattccttcttaattctacgtacgtgaggtgttagaagacacaacaatgaatttggcatagggtgttggcggaaacattgacaaatcccaagttctgtccgctgttgaaaagtacgagaagtatcatgcttcttatggaggttaggacgaggagaggaaagctattatggtgattcgtntcataaattctatgatcttgctactagctttcatgagtatggctggtggcaatctttccattgtgcacctagatggaaaggggaatctgttcgagaaggcattaaaagacacgagcacttgattgctttacaactttgcctaaagcctggacaaaaggttttggatgttggatgtggaattgggggaccacttagagaaatatcccgattcagctcaacatcaataacaagatttgacaataatgag

SEQ ID NO: 211272 - DNA, 513 bp, Glycine max
acaaataaagccttggtaatataaaattatagatgtaaaaaaagaaactcaaaacaactgaagtcacattggaaaggctaattgaaggcaataaattttacaacttttctccttgaattgcaataactcatttgcagcaccaccttattgaccaccaaaattaggctttcgagccaaaaagaagtacattggtgtgaaaatctctttctttccaccttcaagtagtccatctgctgccctttgtaagatttcttgaacttttagacttccccttggagctagtcgaacaaattctaaagcccttatcagacttcttgtgaaaaatcgtccaatagatgttagaggaaaggtactaagtgagaagtgacttgcatccaaatgaaagtaccaaggaactggagaattaactgcaagatctttctcccagattacctcaaaacctgcttgctttagagcttcaacacactttgtggtcaatctaatgtcaggaagtccatcaccaacctcaatttc

SEQ ID NO: 211273 - DNA, 578 bp, Glycine max
  unsure (1)..(578): unsure at all n locations
cggacggtggattgtgtccgacaaggaggattacaacggtgtctggaagcatgctaagagtgatgggcatgatgattatggacttcttgttagtgaacaagcccggaaatatgctatagtcaaaaaacttgacgagcctgtcagtcttaaggatggaacagttgatcttcagtttgagactcgccttcagaatggccttcaatgtggtggcgcatatattaatatcttcgaccccagagagcggatggaaaccaaaggaatttgataacgaatctgcatattctatcatgcttggtcctgataagtgtggtgctacaaacaaggtgcacttcattgtcaagcataagaatccaaagagtggggagtatgttgaacaccatctcaagtatccttcttgtgtcccatgtgacaaactaactcatgtatacactgcaattctgaagcccgattatgaattgcaaattttgattgacggtgaggagaagaaaaaggcacatttcttgtcttctgaggactttgagcctnctcttatcccttgcaagacaatccctgatcctgatgataagaaacctgaggac

SEQ ID NO: 211274 - DNA, 517 bp, Glycine max
gcgttaaaaacaggatccattaatagaaaaataaagacaaaaaataattgtacaacttcaactactagctcaaacactcaagtctccaaaaacaggagaagatctacacccctgaagcaaataatcttttctttttcttaaaaaaaaagggaaaaaaggaaacgaatgaaaacagagtgcacctaaaatgaaactaaagcccaaaatttatctgtagctgtggtgatgatagttgacagggcgccatttaaaagattcaaccatttcaatcttctcgccttggcctccgacgcggagcattagatgcttcctctttctctttggtttcttcattctctgcaccaccttggttattggaagcttctgtgcgttctggtttcttctccacctttgcaggtttcttgccaccaaatatgagcctgaagaaaattgacacgaagacaaccacaaccgctacaagaattccaatagtgagatttggctgtttctcagctttctcaatgagatcgtatatctt

SEQ ID NO: 211275 - DNA, 545 bp, Glycine max
atgccatcttatatgagtgtgttcaaacaataatgagtgttgaagataatggtggcttacgcgtgcttgcaatcaatatcctaggaagattcttgtcgcacaaagacaacaatatcagatatgtgggattgaacatgctgatgaaggctgtaactgttgatgctcaggcagtgcagaggcatcgtgcaacaattctggaatgtctaaaggattctgatgctttaaattcggaaaagagctcttgaacttgtttgtattctggtgaatgaaactaatgtgaaggccttaacaaaagagctagtagaatatctggaagtcagtgatccagatttcagggcagaccttactgccaaaatttgctcaatagtttcaaagttttccccagagaagatctggtacattgatcaaatgctgaaggttctgtctgaggctgggaactttgtaaaagatgaagtatggcatgccttaatgggtgtgataagcaatgcttctgagcttcatggatatacagtaagagcattatacaaggcatttaagatgtcagc

SEQ ID NO: 211276 - DNA, 509 bp, Glycine max
gatacaatattttatgccttgaaaagaaaaaattggttacgacattttcatacaggtataatttgtactaatggttacataaacaatctaagagggaaaaaaattctatagtgaagatgtgaagccaccgaatagacaactttgttccaaaaagtgacccggttaaatgcatgaaccatactgagacctcatgtgaaagaatggatcatgaatatttaacaagtgattataaagtgcggaaaatatataggctttgtgcataaccagatagaccactgaccaactggcctcataaatcacgaggaaaattattgatttgtccttcttcttgtgtctctttgccatttatcttgtatgctatctttatgcgcatgacaagagatttctttccgtgttggctattagtaactttcatattttgtgtgacggacccctttccactagcagggagagtattgccgctagctggatctaagttcaactgaagaaactttggaactgctgcctga

SEQ ID NO: 211277 - DNA, 471 bp, Glycine max
aagaatgttcaaattcagaggaagaagaggattctgaagcagaggttgaaggttcccccagctttgaaccagtttaccaaaactcttgacaaaaacctagcaacaagtctgttcaagttgcttctgaagtacaggcccgaggacaaagctgaaaagaaggagaggctcttgaaaagggctcaggcagaggctgaaggcaaaactgttgaagctaagaagcctattgttgtgaagtatggtctcaaccatgttacctacctcatcgagcagaacaaagcacagctcgttgtgattgctcacgatgtggaccccattgaattggttgtctggcttcctgctttgtgcaggaagatggaaattccgtactgtattgtgaagggaaaggcccgcttgggaacggttgtccacaagaaaactggatcccgtttgtggttgaccactgttaagaatgaagataaattggagttcagc

SEQ ID NO: 211278 - DNA, 563 bp, Glycine max
  unsure (1)..(563): unsure at all n locations
tcctttttgtttttttttgcggatatataaatggatggaataaaatgtttagtgaacaaaaagaaaaagaaaacatgagaatttgatattaagcctgttacaagaattaatcatcccagagctgatcttgtcatctcatatgccaagaaacatgctgcatttgcaggaacacttcgagccattgcaggaccaaaacccttatacaagcctttgaacccttctgtagctcgaatctttctgaatgcatcaaatgaaccagaaaattttgggtttctgagatcatctacttgaatcacactcttaataacatcagttgggtaaactaagaaccagaaggaagctccagccaagcctgcggcaacaatcagagaacctatacttagcccagaagtatcagtgcctcctgcaaacttttgctttaatgcttcgtatacaccaaacatgatagcattttcaggtatctcacgccccatagtgggaaccaagcccttgaaaagacctctgatgcccacttctgacttgagaacatgcctggcccatgcatgggtcctncatacttaaca

SEQ ID NO: 211279 - DNA, 473 bp, Glycine max
cacagaacatcgatgaataattcatgtatgcatacagctacaaatcgttgcttgcttttccgcttttatttcgtgaaaaagacgcaatgccatgctcctggcgaacaacaagcgccttgaacgcctcgctatgcaagtgaaatctctggcagcaggacggacaacctgcgtcgctcaaataccagaacagatccgcataccatctgcaatcacatgccagcccatctattcgtcatcctcttccagttcagcagtgttctcgtggaagtcctgcccgccgttcgtcgcaacaatgataccctttcggatgacaaagtcaccgaacctctcaccctcattcctctccaaagcatattgcttcaacatcggcttcaggatcgccagaatttcctcctccttgattgagcttcggtacagcttattcagtctgttgccgtggtagccacctccaggtacatgttgtaagcaccata

SEQ ID NO: 211280 - DNA, 451 bp, Glycine max
tagggctgaaccaattgtggaggctgaggttcaagtggagggtgaggttctagtggaggctgaggttcaagtggaaggtgagattgaagtggaggctgaggttgaagtggagggtcaggttgatgtggagggtcaggttcaggttgatgatgaaggtttgataaggttgaggtgcatgttgaaaaggaggctggtggtgtgggtgacatggaggttgttgctgactgtttggatgatattcatgttggggttgacacagttgatgatgatgtggggtctggcgaaagtgatgaggattatgttggggatgaggaagatgatgatgattgcagcgactgtactgaagattcaattagtgattttgcagaaaactctgcttggacaacatggttggagtacaagacatttactcagagtactgacgtcgattttgagcctaatctactggacc

SEQ ID NO: 211281 - DNA, 487 bp, Glycine max
acgttctattatatatatatctatctatattctatatatagatatattgtttaggttatcaagtattaatctgaaataaataagaattgctgcttctaatacttataataattactacaaattctaataattactacaaaagggatatatgttagataaaatagattaattaatctatttcacaaaaaaataatgtatccatagcacagtttcgtcttataatacctcgggtgctaatgaaactattttagtgaaatttaactgtctcaattcccgggcgattgcacaaaagattcgagttccttttggatttccttcttgatcaatgacaactgcagcattatcatcatactgaattattataccgttgctacgtttgagttctttacaagtacgtacaattacagctctgatcacttctgatctttctaagttcgtatttggtactgcttgtttgatacagcaacaacaatgtcaccaatataag

SEQ ID NO: 211282 - DNA, 508 bp, Glycine max
  unsure (1)..(508): unsure at all n locations
cggctcgagacaaggcagaaagcaagctcatcctagagttttaaaaatggcagcagcctcctccatggctctctcttccccatccttggctggcaaggccgtgaagctgggcccatcagcccccgaagtcgggagggtcagcatgaggaagaccgtcaccaagcaggcctcctccggaagcccatggtacggcccagaccgcgtcaagtacttgggcccattctctggcgagcccccgtcctacctcactggcgagttcccaggtgactacggctgggacactgctgggctttcggccgacccagaaaccttcgccagaaaccgtgagctcgaagtgatccactccaggtgggccatgctcggngccttgggctgcgtcttccccgaactgttgtcccgaacggggtcaagtttggagaagctgtgtggttcaaggccgggtcccagatcttcagcgaggggtgggctggactactgggcaacccaagccttgtccacgcccagagca

SEQ ID NO: 211283 - DNA, 472 bp, Glycine max
cttgacaaaagataaactctaatcctgctctccactatcaggattaattgctatattttcctttccatttatctgttgggtagaatattaggcgtaataacaaagttgtcttagtggtattcttctagtattatattagcaagccttctttttgttgtgggctaatattggactccatacaggttagagaaattgttgccattttggatcttgatgttcttttctatccttgtccaagaaatggcccaaatttccgtcaaaaggttctagagatgggtggcaaactgcagttcccctacatggttgacccaaacacaggcgcttcaatgtatgaatcagatgacataattcggtatttggttgacaaatatggtctgtgtcttcgtatatattctctattctggaatgtgcttatgccatgtagtcttttttcctggtgcatttcaatctataaaatataattacatatatg

SEQ ID NO: 211284 - DNA, 457 bp, Glycine max
gtcacaaccatggataattccaaccttcaacgtctcttcactctcttccttttttccctaattgcaccctctttggctcaacaatccttcagacccagagccctcgttgtcccagttaaaaaagacgcttccaccctccaatatattactcaaatcaaacaaagaacaccactcgtcccagaaaacctagtacttgacatcggtggccaattcctgtgggtcgattgcgacaacaactacgtctcctccacttaccgccccgcacggtgtggctccgcccagtgctccctcgccagatccgacagctgcggaaactgcttctccgacccaaaacccggctgcaacaacaacacgtgcggcgtcacgccagacaacaccgtcaccggcaccgtcaccagcggcgagctcgcgcaagacgtcgtcttccttcaatccaccaacggtttcaaccctatac

SEQ ID NO: 211285 - DNA, 460 bp, Glycine max
acatgtaacatgtattgggttgttatttcttatgagcaataactccttcatatacaaattacatgacaaatgattataattttggatacttaaataattgttatgagaattatcaagggcatggctattggtagcgtacgtgggactaaaatgaccccaatggaagcatatatatatatttggtaatttatacaacataacgacgaaaataatccaaccgagctggatgcttaagcttcatgaaagctttgacttcatgcttccggacaatttccctaaaaatattcaagttcccagcaatttctcccaatgttctgtcacccttgccatcaagtccatatctttgcctgatcactaggctctcctttggcttcagggaatcaagcacattatcaagagcaagtcttataacagcaagttgcctcctattatcaccattaacaccattaacatcagtaat

SEQ ID NO: 211286 - DNA, 530 bp, Glycine max
gttctgaggaagcttgttgatgatgcttccaagtttttgaacgataaggttaccaaggccgttgttacggtgcctgcttacttcaatgactcccaaaggactgccaccaaggatgctggtcggattgctggtctagaggttcttcgtattatcaatgaaccaaccgctgcatccttagcctatggctttgaaaagaaaaacaacgaaactatccttgtttttgaccttggaggcggtacctttgatgtctccgtgctcgaggttggcgatggagtctttgaggtcctctctacttcaggtgatacccacttgggtggtgatgactttgataagagaattgttgattggctggcttctaacttcaagagggatgaaggcatagaccttttgaaagataaacaagctcttcagcgtctcactgagacagccgagaaagcaaagatggagctctcaacattgactcaaactaacatcagtttgccattcataactgccacggcagatggacccaaacatattgagaccaccat

SEQ ID NO: 211287 - DNA, 463 bp, Glycine max
ccagggtacaaagcgagcatcaattcgaacctatgaaatccgtgtctaatatttgaaggaaacacgcacccactctccattgacaaaaattattaagaatttggaacagaagaaaacatataatgggggaaaaaatactaacatatactctctattggtaataactagttgcctgctcatttagagtcagtgaaatctgcatcaatgacatcaccgtcgggtcccttgcctgaggattctgaggggccagagtcggcaccgggtggtggtgttggccctcctgcgcctgcagctcctggttggttgtaaagggactgaccaagctgcatgacttcctgatttagtgcagccatggcatccttgatagcttgggttgaacccccagaaatggcgtctttaagctctcctagttttgcttcaaccttctctttcacagggccaggaaccttgtctccaagctctt

SEQ ID NO: 211288 - DNA, 550 bp, Glycine max
ttaagtattaaatatatgtaattaatatgtaattaatctcctcttctttatttcgtcttttatttcttcttttttttacaattgtaatagaataagttaggaaagagaaagaataagggttaatttggcctaattgaaattcggagtgaaactcgggatctcgtccaggcttccatggaattgaattaataattcaattccatttctattaatataaagaagtgaagccggaatttaaaatggaatgtatagggtgggggcaacaatatcataaaaaatacttagttaaaaaaacgaaaatactgtattgcaattgtattgcaattcgaaacgaaatatagttcgagatcattgtattatttttgtactatattaatcttaatcttaattggaacgaaatctttcaaaattggatttctaattcttaatttatattttcgttttttcgttcttttctttttcttagattataatccgaaaacaaaagagttaagtgaattaaaaacccaagggaggttcatggccaaagggtaagatatccgagtaattg

SEQ ID NO: 211289 - DNA, 543 bp, Glycine max
gcaacatataaacccaaattgaattgtcgtaattttcaaacaaaacatcaatcaatatttcattcaaatctcaattcaaaattggatttagaattcttaatttctatattttttttttcttaaaggagtagttctagcggttgactcgcttttttcaaattgtttttcattattaagaaaaggtgacatagattaaatacgagcttgttttatagcaattgttattaatcgttgttgttttaaggtcaatctatttacgcgtctggataatatttttccttgttcactaataaatcgactaattaaacccatgtttttataatcaattcggtcccccgattggatcgggggcaaacgcctaccaaaagatcgcttggattttatatagagtcgcttagatttttccatggtttatttatccctattccaaaaatcacatttattcaagaaatactataaagggtttgttcttttattctgactttcttatatatgttggtattttttaaattatgctggttatactgattttggatattttca

SEQ ID NO: 211290 - DNA, 554 bp, Glycine max
tttttgcaggcgcatccacagttggatgagatagagagagagaaggtgtgcagcgtgatggatccgttgaagctttcatacgaggcgcgtgtgcacgcgtcgcagaacaagcgattgccggtgcagattgtgctgcacgcgctttactacgaccagctacggctgaagagcggggcggaagagcgtgaagtggccactgagaagaatcagctttaaatggacgtgaactttggtgagggagaacgaggagttgagaactgaactaatgaagatgaagatgtacatttcggatttgcagcagaataagagcactaataatggcgcgaaccctcaggggcatggaacgacgtcgtctgctgcgaaccctaaccctaagaaggccacgttcttctcttccgtgtcgaaaacgctggggaagctgaacccgtttagaaacgggtcgaaggatacgacccatttggaagatgggaacgtggatttgaccaagcctccgaggagaaggttctctgagtcttagacgaaatttgaattgaataaagtatgagcatattaat

SEQ ID NO: 211291 - DNA, 520 bp, Glycine max
ccttaataacatatacacagtgtattaaacaattaatttacacactatgatgagaagttcgcaagaatcagaacagaacccagtatcatgaacattggcatgattcatgatcactaacaaacgcacgtagcctgaaaactataagaattctgcacatacacgacacaaattgcaaacacaaaaaaaataaaaaagaagaagaaagaaaccgtgatgaacctcgcataattaatatgctcataatttaattcaattcaaatttcgtctaagacacagagaaccttctccttcggggcttggtcaaatccacgttcccatcttccaaatgggtcgtatccttcgacccgtttctaaacgggttcaacttccccagcgttttcgacacggaagagaagaacgtggccttcttagggttagggttcgcagcagacgacgtcgttccatgcccctgagggttcgcgccattattagtgttcttattctgctgcaaatccgaaatgtacatcttcatcttcattag

SEQ ID NO: 211292 - DNA, 515 bp, Glycine max
  unsure (1)..(515): unsure at all n locations
taagaggccaacctggacccaaagttgtgctttccttcttgcggagcatttttcctattcttcattggggtcgtaattattcaccaaccaaattcagaaacgacttacttgcaggtcttaccattgcaagtctctgcattcctcagagcattgggtatgccactttagcaaagcttgatcctgaatatggactctatacgagtgtggtgccacctcttatctatgctttaatgggaacttcaagagaaatagcaattggacccgtggccgtggtatcgcttcttttgtcatcaatgattcagaaattaatagaccctgccattgatccaaatgggtatagaaagcttgttttcactaccactttctttgctggcatatttcaagctgcttttggactcttcaggttggggttccttgtggattttctgtctcatgctgctattgctggattcatggngggagcagctataataattggtctacaacagctgaagggactatttgggatcaatcat

SEQ ID NO: 211293 - DNA, 487 bp, Glycine max
  unsure (1)..(487): unsure at all n locations
ccagcctgaaagatgatataatgcgcttatatcaaccagttcatttactagttggaactccaggaagaatattagatcttgccaaaaggtgtttgtattctgaaagattgtgctatgcttgttatggatgaggccgataagcttctgtccccagagtttcaaccttctatagagcagctgattcattgtcttcctacaacccgtcaaatcttgatgttttcagcaacatttcctgttactgtaaaggatttcaaagataggtatcttcgaaaaccttatgtcatcaaccttatggatgagctaactctgaagggtattactcaattttatgcattcgtggaagagagacagaaagtccactgcctaaatactctattttctaagctgcaaataaaccagtctatcatcttctgcaattcagtgaatcgggttgaacttcttgccaagaaaatcacgggacttggttattcatgtntctacattcatg

SEQ ID NO: 211294 - DNA, 474 bp, Glycine max
tgcaattgaagttaaaagccttagccttccctacaactccaaacacaaagacatcatcatccatggctgcctccgtctccactgtcggagctgtcaacagagctcttttgaacctgaatggttctggagctggagcttcagctcccagttcagccttctttgggaccagcttgaagaaggttattgcctcaagggtccccaacagcaaggtttccggtggaagcttcaagattgttgctgtagaagagaagaaagagattgaagagacccagcagaccgacaaggacagatggaaaggtcttgcctatgatatctcagacgaccaacaagacatcacaagaggaaagggtttggttgactcccttttccaagctccacaggatgctggaactcactatgcagtcatgagctcctacgagtacctcagcactggacttcgccagtacttggaccacaaaatggatggattctaca

SEQ ID NO: 211295 - DNA, 480 bp, Glycine max
ataggtggggtgaagatatctgaactgttgaagtatccagttagaggtctcgtctttgagggtggcgatacgctggaagatttatcaaatgttgtttcagatgcctgtatatgtcttcagaacaacaacatacctttcaatgttcttatctctgactgtggaaagcaagtctatctgttaccacagtgttatgcagagaaacaagctcttggagaagtggatgctgagcttcttgacacccaagtgaatcctgctgtgtgggaaattagtgggcacatggttctaaagaggaagaaggattatgatgaggcatctgaaggcaatgcttggaggcttcttgcagaggtgtccctctctcaagagaggtttcaagaagtcaatgatcttatttttgaagccattggctgtggtgaattggaggatgtcaacgttgaaagtgtcaaagaagttgatgcagtcagcacaagcgaacaccctact

SEQ ID NO: 211296 - DNA, 348 bp, Glycine max
aggtattccgatattcggacccatcaacttggtatgaaatcacattggtagcccttactcggggcctaactcggctaaaagctagatttgccccaattggttggctcttgccttccgccttattcaaattagcttctggtatttcaagaatttgctgggcttcttggggatcaatggcactacccttttccgcattatttactaaaacagggatctcattattgggtattctagcaaaaccgcccattaaagccatcggtaaccattgggctttaaaaagacgtattttcaaaaaacctatatctacgggtggggcaataggcccctgaattgggaataccccaattt

SEQ ID NO: 211297 - DNA, 422 bp, Glycine max
gaaatcattctcccacctcttcgacatggacctcgtcgacaagaaggatgttctcgtcggagactttgtccccagcgtcgccttcaccggaaacatgagagtcggcgtttaccaggacactaccgaacctcaacattccaaggtgaagaactacatcatggatattctgaaaagaagctcaggcatatgggtatcagaactagaatcaaacctagacacactgtgggacaacatcgaagcatcactctcgaaatcctcatcagtttcgtaccttttcccgttacaacagtttctcttcacgttcctctgcaaagtccttgccggtgcagaccctgcacgtgaccctaaaatcgcagagtcaggctattccatgcttaatagttggctcgctcttcagctgctccccacagtcagcgtgggca

SEQ ID NO: 211298 - DNA, 520 bp, Glycine max
cagagaattcatcttggtattattaaaaatatagataccgtagtaattacatccatttttaaatttcaaatttctcccacaatatcgcgttattgaggggagagtcagagccatgaactttggactcagatctactcaaaagatgcccgatgcagacgaaatgctactctaagaataccaacacttgccttcgagaaaataatgtaaagcttccatattgaaataatgtatctgtcagttacaacagaacttcagaaggggaaccaaatcttgttcatccagcaccctactgccatgactgcgtagggaaccaacccataccctgaaacaaacttccttatgcccactagaacttctagtttaagcaaatgcaccagcacatgcagtggctggagcagcttccagctgtttctttgcagtactgtatttttttgttataaacctaaagaagtccctccatagcaactcaaacatcaaccaatttgttccagttctggacgagccattaccaccatcattc

SEQ ID NO: 211299 - DNA, 429 bp, Glycine max
aaatataactaatattctttagaataatcaaaaagaatattaaattcaaataaattttagatagaaaaaagacttaaaaaggaggatttgaaatgcgagatctaaaaacatatctttccgtggcaccagtagtaagtactctatggttcggggctttggcgggtctcttgatagagatcaatcgtttttttccagatgcattgatattcccttttttttcattctagttattgacacggaaaggggtgaagaagattatagatccaattaagtattaaatatatgtaattaatatgtaattaatctcctcttctttatttcgtcttttatttcttcttttttttacaattgtaatagaataagttaggaaagagaaagaataagggttaatttggcctaattgaaattccgagtgaaacctcggatctc

SEQ ID NO: 211300 - DNA, 499 bp, Glycine max
caatggagaagctggtaacgaaagccttcagatcattaaatactctccttataaaccctgcaccatgatatcattatcatcaccttggtttgttctaagagtgttttatgtgagagtgtgtggcattcaggttgatgaatccaccccagagtttctctctctcaaccatattcctcttagtcctgatacccttttagaggtgaatggtgttaggagcagcatttactctgatggagaagagtcttcagttctgagaagggatagagtggataagaaatctgaggaagctacctttgtgaacactgatagtatacgttttaccgggagcatgaagtttgaggtttatgataaggagaattgcattctctctgggggtctggagacgtctaatagcaatggttttgctggggaatcaagaagtggtgtgatgagatggagtatgaattgtcaaacagaaatgtcacctgggttgtgcttcttctagggaaaacatgttgct

SEQ ID NO: 211301 - DNA, 508 bp, Glycine max
  unsure (1)..(508): unsure at all n locations
gcaggcgcagagtagagcagctcagaagagggaaaacggcaccgccgccgtagaagaaaacaaccatggtgcacgtctccttttacaggaactatgggaagacattcaagaagccgcgtcgtccgtacgagaaggagcgtctcgacgcggagttgaagctggttggtgagtacgggcttcggtgcaagagagagctgtggagggtgcagtacgcgctcagccgcatccgcaacaacgcgcggaacctcctcaccctcgacgagaagaacccgcgccggatcttcgagggagaggcctgctccgaaggatgttccgttacggtctcctcgatgagacacagaacaagcttgattacgtnctcgccctcaccgtcgagaactttctcgagcgccgncttcagacccttgttttcaagtccggcatggccaagtccatccaccatgctagggttcttatcaagcggagacatatcagggttggtaggcaagtggtgaacatcccatctttc

SEQ ID NO: 211302 - DNA, 482 bp, Glycine max
cacaaaaacataatgtcactcaatattatctcaaacaaggaacggaaggatgaaaatgtataacaataaaaaaacaataaactaggtacgcaaagtaaaaggtggcataaggtctaatagcactagaaaaagacatgattaaaagtttaatcctcgtcttcctcatctccatctccacctgcggccttcttagcagcagccctttggtttcttctcttcactcttccagggcgaccaccaccaaggggacttgtaagtgaaaagtcaatgtgcttctgtgagtcaacccttaccaagaaagatgggatgttcaccacttgcctaccaaccctgatatgtctccgcttgataagaaccctagcatggtggatggacttggccatgccggacttgaaaacaagggtctggaggcggcgctcgagaaagtttttgacggtgagggcgaggacgtaatcaagcttgttctgtgtctcatcgaggag

SEQ ID NO: 211303 - DNA, 548 bp, Glycine max
  unsure (1)..(548): unsure at all n locations
atttgctctcgagtgttgatcgtgggaagcaaagtttggagacaatatgtctccttctgtcttataaaataaaatatcccaacaactttttccttctgaggggaaaccatgaatgtgcttctataaaccgcatttacggattttatgatgagtgtaaacgaaggtacaatgtgaggctttggaaagtgttcacagagtgtttcaactgcttgccaatggcagctctattgatgaaagaatactttgatgcatgggaggactctctcctgagttacacaatttaaatcagataaagggtttgtcacgtcctattgaagtacctgaaactggtctactatgtgatctcctttggtctgatcctagtagtgacattcggtgttgcagagaaaatgaacgcggagtttactatacttttggagctgacagggtgacagaattccttcagaagcatgatcttgatttgatttgcagggcgcatcatgttgtagaagacggatatgaattctttgtaacagacacttngaactatgttctcgcacctaattact

SEQ ID NO: 211304 - DNA, 447 bp, Glycine max
aagggatgtagaacatatatattctaaccaaccaagtgacaacattcacaatagtgaaataacttccaaatgacattcaaaggggtgatgcgttaattcactataatacaaaggaagatcgacaaagagaatattggaggactgaaggagaagaaaactaacccctcagtcctccatttgtatttggcaatattgtataagggacaactatgccagcagaagacagaagcattcagctatccctaaagggtaaagcggagataatatccagtattcctcatagctcttggggtggatcgataattggattggtccttcacattgaagcgaacactgataacacttcttccaagtcaactttggctatgcaccaaacatttactaattgtactcgcgctcatcaggtcatgctttagcaccaaaaaatgattgctggaacttggcttt

SEQ ID NO: 211305 - DNA, 561 bp, Glycine max
tgctgatctcatccatttttgggataagttccgcaaagctcctgagggttctctcaggaaaaatacagctcagaaacaagttttggaagcaatgtctcacagaatgcatgtagacaacagtgtaaaactgattgggaagcttttatttggcattgaaaagggtccagaagtactcaacgctgttagaccggctggatcggcacttggtgatgactggcactgccttgaaacccttgtgaggacttttgagacacattgtggatccttgtctcaatacgggatgaaacacatgaggtcctttgcaaacatctgcaatgtatggataaagaatgaacagatggctgaggcttcagcacaagcttgtgtcagtattccttccaatccctggagttctctgcaaaggggtttcagtgcataataactccctgtaatgtgcactagtaaagaccagagtatgattattgttacattatgttacatggttgtacttgtatatacatatgttgtcccacctttgtaaatacaattgggacactactaggattgagaagacggtcttta

SEQ ID NO: 211306 - DNA, 492 bp, Glycine max
aatattaaacaataattttggcatcataaattcttccggaataattatacaaaagtgaccagggaaaacccgatctgccagttgcccactgaataaaaacacacatcatattactatgtgttgtcatacatgcattgtaatgagtggatattccaaagcaattggtccctttatccctccttaatccttatgccgtaaatggcaccatcccttgtaaattgtaattgcttcttcagaaatagaattatacaaaggtagttgcaatatctatttgccaaactataaatgtaaagacccttcttcccaatcctagtagtgtcccaattgtatttacaaaggtgggacaagatatgtatatacaagtacaaccatgtaacataatgtaacaataatcatactttggtctttactagtgcacattacagggagttattatgcactgaaacccctttgcagagaactccagggattggaaggaatactgacacaagc

SEQ ID NO: 211307 - DNA, 525 bp, Glycine max
ctagactcttctttttctctaagtctaaggggtgccctgagatcactttgagcaatggtgaaggctgtggcagttcttggcagcagcgagggtgtcactggaactattttcttcactcaggagggaaatggtccaaccaccgtaactggatctcttgctggtcttaagcctggtctccatggcttccatgtccatgccttgggggacactaccaatggttgcctgtcaactggagcgcatttcaatcctaataacaacgagcacggtgcccctgaggacgagaatcgtcatgctggtgatcttgggaatgttaatgtcggtgatgatggtacgtctgatctattattttttcttctgtttcatctatttgatttgttaatgtcggtgatgatggtacgtctgatctattattttttcttctggttcatctatttgattagtgattgattccaactaatctgaaaagatcaaaaagcaacatatttatctgattccaaatttcaaatttctgattaattttacaat

SEQ ID NO: 211308 - DNA, 455 bp, Glycine max
ctacagaccggatgttcttgattcggcgttgttgaggcctggccggttcgacaggcaagttactgtggatagacctgatgttgccggcagagttaaaattcttcaggtgcattctagaggaaaagcacttgcaaaggatgttgactttgaaaaaattgcaaggagaacccctggattcactggggctgatctgcagaatctgatgaatgaagcggctattcttgcagccaggcgtgacctcaaggaaataagtaaagatgagatatctgatgcgcttgaaaggatcatagctggacctgagaagaaaaatgctgttgtctcagatgagaagaagaaattagtagcctatcatgaggctggccatgctctagtgggtgctttaatgccagaatatgaccctgtagccaagatatcaattatttcctcgtggcccagctggtggtctcacatttttt

SEQ ID NO: 211309 - DNA, 511 bp, Glycine max
  unsure (1)..(511): unsure at all n locations
gaaagtaaaaagagtgtaatgtaataatttaatatggtacacacacctacacgacaagtttcgtgagctgcagaattagaaaataagcaatacagacaatgaacaaggaaactaagaaataatatatgcaaaactagagattttctttgtgtggttgcatggatatatcaagcatcaagttgaagcctccccattcaagcgtattctcttaggacctttttcttcaccttggttgcaggctgttccgatcctgttttcattggcctctaccgaacatcttttgtaaggtttaaaccctgttggacgagtctttagctttcctggtccaagacctatgattagcagtccctcctcctcattgttatctttgacaaatagcagatttttctgcaccccatcacaattagaactgcatttcttgctttcaaggtcttcatctttgtagtctgtgttttggtcgttatccttgatgctgnctatctgattatcctcatttatcaaatcatgagta

SEQ ID NO: 211310 - DNA, 535 bp, Glycine max
  unsure (1)..(535): unsure at all n locations
tcctggaggcgctctcttcgattcagtttagcaggttgtgctgaggcttaattgacccttgaagcatatttcggagttttatcagagaacaaatgggatatattggggctcatggtgttgcagctctgcacagatataaatatagtggagtagatcattcctacgtggccaaatatgtactacaacccttttggagtcgctttgttaattttttccccctatggatgcctccaaacatgataactcttatgggatttatgttcttactagtgtctgcattgcttggttatatatactccccacaattggacacacctnctccaagatgggttcattttgctcatggactacttctgtttttataccagacatttgatgctgttgacgggaagcaagctagacgaacaaatttctcaagcccattgggggagctctttgatcatgggtgtgacgcacttgcttgcacatttgaagcattggcttttgggagcacagncatgtgtggaagaaatactttctggtgtgggttatatct

SEQ ID NO: 211311 - DNA, 511 bp, Glycine max
gctccgtccaaacatgactcttcgcaaccaccaagagctcttggttgctcttgcaattctatattttcttgccacctcactcccttcagtttcagctcatggcccatatgcatgggatggggaggccacatataaattcactacttaccaccctggccaaaactacaaaggtttatccaatgtcaaaaactacttccaccatctcggctacatccccaatgcaccacacttcgacgacaacttcgatgacaccctcgtatctgccatcaaaacctaccaaaagaattacaacctcaacgtcaccggcaagttcgacatcaacactcttaaacaaatcatgacaccccggtgtggcgtccccgacataataatcaacacaaacaaaaccacatcgtttggcatgatctcggactataccttcttcaaagacatgccgcggtggcaagctggaaccacacaactcacctacgctttctccccggagccaagacttgatgacactttcaaaagc

SEQ ID NO: 211312 - DNA, 490 bp, Glycine max
  unsure (1)..(490): unsure at all n locations
acggcgtctccctctttcccttaccttcccaacccacacgtgaccccatcctccccaaaccgtcacgcctcgtaacggtgcgcgcggaggtgaaagagacctccgcacccgccgccgccacatcctccgacgaaaagatccgcgaaatcctccgcaaccgtgactacgacaagaaattcgggttcagcgtggagatcgagtccttgacgatcccaaaagggctctcaaaagaaaccattggtctgatctcgtccctgaaggaggagccccactggatgctcgaattccgcctgaaggccttggataaattcctctccatgaaggaacccacgtggtctgacaacacttacccttccatcgacctccagaatatctgctactactccgcccccaagaataaaccctctcttcaatccctcaacgagcagaagcgcctcgccaacgtcgncgtcgacgccgtcctcgacagcgtctcaatcgccacaacgca

SEQ ID NO: 211313 - DNA, 496 bp, Glycine max
agcctaaaaccaccaatatattagcagttgaatcaagttgcaagaataccattgatcaccacaggcattggaacaaaacttgaatagtttagaaagaacagttcaaaaccatgatatctcaggcacagctttacctcaaaacaagaaacaaggatggcaaaattataacaagtcagaccatttcaaaaatctaaaatgtctaccaacacagataatataaaaaaaataacaaccgcaaggcctaaatatcagtagccattaataatttaatcttcgtcctcctcatctccatcttcaccagcagccttcttagcagcagccctttggttctttctcttcacacgtcctggacgaccaccaccaagtggactggtcagtgagaagtcaatgtgcttctgcgaatcaaccctaaccatgaatgatgggatgttcaccacctgtctcccaaccctgatgtgcctctgcctgatgaggactctggcgtggtggatggact

SEQ ID NO: 211314 - DNA, 510 bp, Glycine max
aggacagattgacccctcatgcctcatcagggcagccctcaacttcacaattcgagaacttatgtaaaatcgaatgccctccaatagtgtaataattggcttatgtctgtagtccattattacattattgaatgcctcacacatgttatttacttgcaaatcacactttgtgtttaccttaaaagcagaccttgtccaacaagcaggttataacttttgcagatcattccaagcttcttcatcataatttttaatctgcaacatggctttttgccagtcaggggtagttgttgctcgagctgccatccacatcaactctttcatgtgtgctcccgggtacttattcttccaatagccatacaaatgtttgacacacagctgatgttctacgttttcaccatgctctttgattacctcaaccaaaccctgcaaaaaatagcggaccaattgaatgaaagccatagttcatgttagttccaataagtatttaccttctgctggttagaaatg

SEQ ID NO: 211315 - DNA, 459 bp, Glycine max
gtcgaattcgaaatctgatctccaacgattgatctcggtagaggctagtgcactctccaatctgcaaaaatgcctctcagactcgaaatcaagcgcaagcttgcgcaaagatcagagagagtgaaatgtgtggatctgcatccaacagagccatggattctggcgagtttatactctggaactgtctgcatctggaactaccaatctcagaccatggccaaatcttttgaggttaccgagttaccagttagatcggccaagtttattgcacgcaaacagtgggttgttgctggagcagatgatatgtttattcgtgtatataattacaacacaatggataaagtcaaagtatttgaagcacatactgattacattatgtgtgtggcagttcatcctacccttccttatgtgctttcatcatctgatgatatgctcataaaagctctgggattgggaaaa

SEQ ID NO: 211316 - DNA, 511 bp, Glycine max
  unsure (1)..(511): unsure at all n locations
gttgcgaatttcttgccttatattaaaacttaccattcgacataccacagtgctacattaaaaacctctactactacatcataattgttcaaacaacgatgaacctataaagttgttttcaaatgggcttctggacggttgaaagatcccagattgctgaaatttagattgaatttggtatgtgtcctcatacttgttcatctcgaactatgtttaccgcgcctaagttactgagagtgatgacatcatgattagaatgctcctcctctactgtttgcttggatggcaatgtatgctttttagtaattgaatttgatgactcgcagtcattgcttttaccccacaccacaagatacagtcctaaaataattacaatagctccaaccacccttccaaggtacattatttcagccagaaagaaggagcccatgatagccacaatgaccatgcagagagggttaaaagttgntacaaagaccgggcctctatctttcatcactgctccttggat

SEQ ID NO: 211317 - DNA, 452 bp, Glycine max
  unsure (1)..(452): unsure at all n locations
tggtaaccctcttgcaggcattgacccagatgagattgttgatacacgaccttacaacaacttgttatctcaattcatcactgccaattcacgcggcaacccagccatgtcaaacttgcctaggaagtggaatgtgtgcgtggttggatcccatgatctgtttgagcatccncacattaatgatctggcttacatgcctgcaaacaaggatgggcgttttggattcaacttacttgttggtggtttcttcagtgccaagagatgtgctgaagcaattccacttgatgcatgggtctccgcagatgatgtaatcccactatgtaaagctgtccttgaggcctatagggaccttggcttcagagggaacagacagaaaacaagaatgatgtggttgattgacgaattggggatggaagtattcaggtcagagggtgaaaaaagaatgccaggga

SEQ ID NO: 211318 - DNA, 501 bp, Glycine max
gcctctaaaattagtttataatgttaaaataattcttaagcatttgccacaagaaaatgagaaatatatagcatacatctttgaagaaataaagtgtaacttagggactagcaaagaatgtacatgtcttatccaaaagtgtacatgcatatgatataatgcatgtctcatgatcatccctttttcttttatgtagaggacactgatacttttgttcagggacaatggtagatttagtaaagaaactaaaattgccaatggccataaagtttaatcttccccttcctctctattcctttggacagcaccaaaatgctttactagtatgtctaccacaataggcaccaagttcttgcaaggcacacccttcttatacacctcagctagatgtgaatcacttccaattctccctcccaggaaaatatccacaccttcagtggccttaccattctcatccctagccatgcaccccatgaaaccaatgtcagcaacttgcacctg

SEQ ID NO: 211319 - DNA, 571 bp, Glycine max
gtgcattgccagaatgggaatttaaaagttatcttgggtggcatgaacagggcgatggcaaactgttttatggtcttcatgttgataatggtcgtattggtggaaacatgaaaaagacattgagggaggttatcgagaagtataatttgaatgtaagaatcactccaaatcagaatatcatcttgactgatgttcgtgctgcatggaaagcgttccattacaaccacgcttggctaagcttggttggctgcaacctagatttgtagatcccctcaacataacagcaatggcatgccctgctttcccattatgtcctctggcaattactgaagctgaacgtgggatacctaacatacttaagcggattcgtgatgtttttgataaggttggcctgaagtatagtgagtctgcggttgtaaggataactggctgccctaatggttgtgctagaccatacatggctgaacttggactagttggtgatggtccaaatagctatcagattcggctatgaggaaaccataaacaaacatcattagctcgaagtttcatggacagggtgaagattcta

SEQ ID NO: 211320 - DNA, 592 bp, Glycine max
accgaatactcttcttcaatcaagcgaaggtggtctcacttgactcgattgcaagtgatccacgacacactgttcgcttcacaaaagcttcgaatccaattcctcagtaacatctgcaagaagtcttctccttcaccatgccaccaaagcctttagactatgggtcaataaatgaaaacgtgaagaagagtcaatatgctgtcagaggtgaattataccttcgagcttctgagcttcagaaggagggcaaaaagattatatttactaatgttggcaacccacatgcattgggacagaaaccactgagcttccctcgtcaggttgttgctttgtgccaagctccattcctacttgatgatcctaatgttggactgctattccctgctgatgcaattgcaagagctaaacactatctttcattggacctcggcggtttaggctcttatagtgactcccgcggccttccaggagtgaggaaggaagtggctgagttcatactcaggcgtgatggttatccaactgatccagaactcatatatctcactgatgtgccagcaagggggtgatgcagatattaaatactatcatcaga

SEQ ID NO: 211321 - DNA, 502 bp, Glycine max
agaagaaagtgtaaggtttaagaattatctccaaggacaaatagtagaaagggaggttatgtttttcttacaaaagcacaagagtataatgcatcttttacgataattttcttacaaccttgaataacctctattggcttcgtattgctccatgaattcatcattgaactttttgaaactatccataatagcgggcatgtcttcctcgtctggtaaaatagtagtcctcaaatggaagaccccttctctctgtccaaatcctgaaccaggaacagtggatatgccagtggcttccaaaagtttgaggcagtagaaaacatctggaacctttgcagcctgtttagcagcctctaaagctcttggcggcaaacgtatttgagggaatgaatacatggcaccttcagtaaaattacaaaccacatttctgcaactgttgaatccatcagtcattagccttgctcttcttcttagagattcaagtattccggtgctctccctaaca

SEQ ID NO: 211322 - DNA, 553 bp, Glycine max
cttcgctgtagtctctatgctcactccaccgtcgtatcgacacttccatcctacgtgattgtatggctgtgaaaccgtcgatcttatgctcatccaacacgcgcgggggctgtatctgcaccggcgtaatgtgccagtccatgtgtgcccacatgatgcgtgccggatacaacgtcactggcttcaacgcgtaccctctccaaggcccaatccatagtcgacatcggatggccacttctgcccatgcgctcacgccgtgagatccaactctgacgttgtcttcacgatcggcggctacccttccgacgtgcgcattgtactcctacagccttcctgcggagcggtctctgccctgcgacccggcggcgtgctcgtcgacatgacgacctccgagccctcgatcgtgaccatgatcgacatctgcgccatcggaacaggctgacactcaatctacgcaccatgatccggatgagaccgaagggctaagaacggaaccctagctatcttcgccgtaggggaagaagcgactgagaagcgtctggaaccgttgctg

SEQ ID NO: 211323 - DNA, 297 bp, Glycine max
gtaaaaacgaagggaaacaccatcatgaactatgtagaccgttgttttcaactggtacaaatttgcattttgaggtggacagcctctccttgttttcttttgtacactaatagctggtatatgtcgttctgacttctaaggttctcaagcattgatggatacatctgcatgtgttctgaaaactaattaaaaatgctcttacaattggtgtatgaatggcagttaagccagtaaaaaactaaaaatggatatggtcctcaaaataaaagatcactttacacctaaaaaggactaaaa

SEQ ID NO: 211324 - DNA, 504 bp, Glycine max
ggaagggcccacactgttgaagcacggcttcaatgatgctattgctaaagtaggtttggtcaagttcgtctcagatctcttctgggttggtatgttttaccatctctacaaccaggtggctaccaacacactggagagagtggctcctctcactcatgcagttgggaacgtactgaaacgtgtatttgtcattggattctctattatagtcttcgggtacaagattagcacccaaactggtattggaacagccattgcaattgctggtgtggcactctactcgttcatcaaagccagaatggaggaagaaaagcgacaagcaaaagcagcataagaggaaagtcgtcaacctggacgatgtcttgcactgtaaatcaccacaaatttgcttcagaataattgagtgactggctcagtgttgtactatccttgtgatagcgcccttttattaatccttctatttttgtcaaatattttctttctccttggtatggttcttctctc

SEQ ID NO: 211325 - DNA, 412 bp, Glycine max
accatatgtaaatatttctagcatacaattgggtaacattggcatcatctttctttgaacaaattctcttgtcagcttcatttcacatgatctgataaaattgcaacaaaaatactgatggacataactgggcaaaaatgaatgaatgcgctttgggcaggaaccataaccgtatgtatgtcattgatgggaggacattgcaccagttaattacaaattgccaacgcaagatgtgttccaatcctttgagacaatagctcctgtatctccaattcaaatttttaactcttttgatcagggcggaatgggcgtataaatgcataattgatctgccaaacttttacagaggctgtcacagtggcctctgcagcattgtgtgagcaagatcaacctatcacctccatatattgtc

SEQ ID NO: 211326 - DNA, 564 bp, Glycine max
  unsure (1)..(564): unsure at all n locations
agctcatagaaattctcgtcctcttcctacataagtcttctcttatcataaacgcgtgttgctcggataaggttgtgctgcggtgattcactcgtactttgcttaatatggcggttgagaagttgagcattgcaaaagatgtgactgaattaattggcaaaactccattggtatatctcaaccgcatcgtggatggctgtgttgccaaagttgctgcgaagctagaaatgatggaaccttgctccagtgtcaaagacaggatagggtatagcatgattgtagatgctgaggagaaaggactcatcacaccgggtgaaagtgtcctcattgagcctactagtggaaacactggcataggtttggcattcatggcagctgctaagggttataaacttattataaccatgccttcttcgatgagtctcgaaagaagaaccattcttcgagcttttggagctgagttagtcctcactgatcccgccaaggtatgaaaggagctgntcagaaggcagaagagattcgggataagactccaaattcttatattcttcagcaatttgaaaa

SEQ ID NO: 211327 - DNA, 467 bp, Glycine max
ccagcaaacatcttatattttttattaaatcgtagtcaattaacaaccaaacataaaccattttttatttttcagatccataagagaaaaaatagatacacaacccaaggagagaatgcaacttgaaaagcagcaaatggctcgtataacttcatattcaaggctcgaagaccatgctctctgcttctcgcttcacggattcaaagagcacagatgataaataacgctctccaaagcttgggaagaccgcaataatgagttttccagcattttctggcctctttgctatcttaattgcagcagctgcagctgcaccagatgatattcccaccagcaaaccttctttcaaagcaagaagtttagcagtttcaatggcttcttcacttgaaatttgaacaacttcatcaagtaaatcgacatccagaacaccagggatgaagccagcaccaattccttggatcttatga

SEQ ID NO: 211328 - DNA, 471 bp, Glycine max
cactgatctccattcccattccatggcttccactgaatcatcccctttcaagaaaattcagattcaacgggatgacactacattcgacgcatatgtggctggaaaagaggatgctcctggaatcggtgcgatccaggagtggtgcggtgtggattacgaaattaagaaccatgccgtgaagatttctcagcttgggaatgggtttaaagctcttattccatatgtatacgagagcaaggatgggctagatgtcgctgaagctcagcatttgacggatggtcttgattggcaaggtgctgcgctggatattgctgctaccgttaactggcttaaagcacatggctcacagaaagctgtagtaactggatgccgcatgggaggtgctctctctattgacagttctgtcttggatcacgaggatgacgcttctgtagcatcctatggagttgctgcttctaacttgctgaccct

SEQ ID NO: 211329 - DNA, 551 bp, Glycine max
  unsure (1)..(551): unsure at all n locations
gaaacacacactcaacaaaaaagaaatagaaaaaaagaaaacacaccattcttggtttgctaattaatgattttgggagtgcttggatttgtgttgcattatttaaaatcatgtttaactattaaaactatagggactaaaaatgtaagaatcatgccaaatgaataatttaacctaaaatttatttttaaccaaaatctattttactaaaccaatataatttaaaataaaatttgcaagacactcacttacttacagtttgccttgttcggagtttaaatttcgatttagacttaattttttacaatagaggttctattttgattcatataagatttttatattatatggtcatatattttatgatatattatctatttttttaaacatcttttcctttctcattattattgcttatttctcttaattatagaaattaattatacatatataaattatcatataataatattcactactattctaaaaatctaaactcaggttctaacttctaacagttaattnggaaaccaggcatagcttctttctga

SEQ ID NO: 211330 - DNA, 548 bp, Glycine max
ccgacgccgacgctgatgctgacgtcagtaccgaggaggccgaggccgcgtcatggctgctacctaatccaaagacagatctaaattcgtctcagtacttgttctccgaaaccgaaccggttccttacatagatctggattacgcggccatggatccgaagacggagcagaaaagttccgccaccgccgacggcgtcgttccggtgcagagcaacttcgagccgttcacctacggttacaagtacaacactactctctcacagtcacagtctcatatgagccagagtgtatcttctccgtcgtcgatggaagttggagttgtgccggacgggaacacgatgtcggagatatcgaactgcagctacagcagagtggcaccggtgacggtgacggcgcagatctcggcggcggatagggaggctagagtgttgaagtacagggagaagaggaagaaccgaaagttcgagaagaccattcgttacgcatcgagaaaagcgtatgccggaacgaggccaagatcaaaggaaggttcgcgaaacgcactgatg

SEQ ID NO: 211331 - DNA, 512 bp, Glycine max
  unsure (1)..(512): unsure at all n locations
cattttatgcaccggatgacaagaagtttccatcggtgaatctttgctatgctgcgggacgtgctggaggcaccatgacaggagttcttagtgcagcaaatgagaaagctgtagaaatgtgtgctgaagaaaagattagttatctggatatattcaaggttgtggaactaacttgtcaggaacatcaaaaggaattagtagcatctccgtcactcgaagaaattattcactatgaccaatgggctcgacaatatgctgctagtctgcataaagcttcaagtgtttgaatcccatatttctgacatattttagaagttggggctgtggtggattgctggcaactgctagcatattttgtaaatgtatatgttggttcatcaatcttgtaaaatgtaaaggggtagctatataaagtatatgtactcctaaaagggtttcaataaaagttctagcttcagaataccatgttttgagatgctaatgcaacctangcagtacttttgtaatgctat

SEQ ID NO: 211332 - DNA, 553 bp, Glycine max
aatcacttaaccacacaattaggaaaattatagcattacaaaagtactgcctaggttgcattagcatctcaaaacatggtattctgaagctagaacttttattgaaacccttttaggagtacatatactttatatagctacccctttacattttacaagattgatgaaccaacaaatacatttacaaaatatgctagcagttgccaacaatccaccacagccccaacttctaaaatatgtcagaaatatgggattcaaacacttgaagctttttgcagactagcagcatattgtcgagcccattggtcatagtgaataatttcttcgagtgacggagatgctactaattccttttgatgttcctgacaagttagttccacaaccttgaatatatccagataactaatcttttcttcaacaaacatttctacagctttctcatttgctgcactaagaactcctgtcatggtgcctccagcacgtcccgcagcatagcaaagattcaccgatggaaacttcttgtcatccggtgcataaaatgctcgagccgaat

SEQ ID NO: 211333 - DNA, 479 bp, Glycine max
tcgagtgaagagagaaatcgagcggttcgagggtaaggagggctttgagcgttatctcggttacctgcaagagtcgcatcgccactacgaactttccatcatccatgtgctcaagaagaacttttactcatatttgagtatggtgcgaccaactttcttgcaatatctccaaacacttcatccatttgagagcgtgtggggaaggacaagcatgtacttcaagacggagaggctgaggagagtattcacttttgcgagcatgtacatgggcatgagtcctttcgatgcaccaggaacttacagtttgctccaatacacagagttagctgaaggtatctggtatcccatcggtggcttccacaaggtggtggaagcactcgtaaacattggatcgccattgggcgtggagtaccactacgacagaccgataaaagagattcaattatcagccgacggcaaaagagcgaccggtgtcacat

SEQ ID NO: 211334 - DNA, 433 bp, Glycine max
gagttgataaaggggtactaattctatcgctacgctacagtctattaaacgccattacttccgaaacattgggcgaccccatctaatacgctctctgaaatactatccagagcagataagtcatgaccagagccaggatcacctgaacagattgccatactacactggtctgttgcacatccagcgggcttacattacgggcaccctttttctcgtcagggaagaacttcgggatctgggggggcaagccgagatgcttgaggacttgatcggggaccagtttcgcgccagcgagaacgattggtacacctgttcctggatgcgtacttgcgcccacgaagtacaggtccttaatgcttgggtgctgcgtctttggcctgaagctaagcacgttgaagaacgaatggctgagaccgagaatcgcgccgcggtc

SEQ ID NO: 211335 - DNA, 466 bp, Glycine max
ttcggctcgagcttgcatggcctcgtacaaggtgaagctcataaccccagaaggagaagtggagtttgaatgcccagatgatgttttcattgttgacaaggctgaggaagaaggcattgaacttccctactcgtgcagggctggttcttgcgtttcatgtgttgggaaaattgtgaaaggtgacgtggaccagtcagatggtagcttccttgatgatgaacaaatagaaagtggatgggttctcacctgtgttgctctacctaggtcagacgttgtcattgagacacacaaggatggagagatcgaatgatcgatatatatcataatgtaatcttgtccattgctcttctaatgccatctatctatgtcgtgttttgattttgttagagtgatttggcattggctagttagctagctgaaatcatcgcgagtttattaattacttttgtcatgtttgtggaaacaa

SEQ ID NO: 211336 - DNA, 517 bp, Glycine max
gttgggcttcagttcagagtattcctagaactgtggagcttgataggaagactggcagcaacttacttcagtggcctgttgctgagatcgagagtttgagattgagaagtgatgaatttaaaaatttgaaggctaaaccagggtcagtggtgtcagtagatattgaaacagccacgcagttggacattgttgccgagtttgagatagactagggaaatccttgacataattcctcaatccaacgaggaatacacgtgcagcaccagtggtggatctaaacaacgtggtgccttaggaccttttggtcttttggttttggcagatgaggggctttctgagtatactcctcagtatttttatgtcattaaagggagcaatggaaatcttaagacttccttttgtgctgatcaatcaaggtcttctcaggcaaatgatgtccgcaagcaaatcgttggcagcgcttgtccagttcttaaaggcgaaaagttctccttgcggatactggtggaccattcta

SEQ ID NO: 211337 - DNA, 508 bp, Glycine max
  unsure (1)..(508): unsure at all n locations
gctaatcatggctagcaaattggccttcacactgacatacccgcttccacttacaccaatctcttccttgtcctcctcttctgcttctcgactccaccttcttcaattcaatggccgccacatatgccttcgccctcggctatttctgttttctcccatggccacagccgatcaagacaaggttgaggaagatgctgccgttgttgatagtaaaatcctaccatattgtagcatagacaaaaaagagaagaaatcagttggtgaaatggagcaagaatttctacaggcactgcaagcattctattatgaggggaaggctattatgtcaaatgaggaatttgataatcttaaggaagaactcatgtgggaagggagcaccgttgtgatgctaagttctgatgagcaaaaatttctggaagcgtctatggcttatgtgtctggaaaaccaatcttgagcgacnaagagtttgatgagttgaaactcaggctaaagatggaagggagtgaa

SEQ ID NO: 211338 - DNA, 553 bp, Glycine max
aaactatctaggccagctttctcatcctcatctagtgaaattaattgggtattgctttgaagatgaagaccgacttctggtctatgaatttatgcctcgtggtagcttggagtatcacttgttcatgagaggctcgtattttcaacctctttcttggggtctccgtttgaaagttgctcttggcgctgccaaagggcttgcatttcttcacagtgcttgaacaaaagtgatataccgagatttcaagacctcaaatgtcttgctggattcacattataatgcacagctagctgatttggggctggcaaaggacagaccaacacgtgagaaaagtcatgtctccaccagggtaatgggaacctatggatatgcagctcctgaatatcaaaccacaggaaatctgagtgccaagagtgatgtcttcagttttggagtagtcctgctggaaatgttatctggcaggagggctgtggacaagaatagaccatcaggacaacacaatttggtggaatgggccaaaccatacttagccaacaaacaccaacttttgcgt

SEQ ID NO: 211339 - DNA, 452 bp, Glycine max
ctcatctttggatggtgaattccccatctgagttcctttgatctcttcgccttctctcaatttcttcttctctgatcccagcaaagaaaagaaaaaaaaaacaaactaaaaaaaacattagaaacaattgttttttttaaaaaaaaacatagctgcttggttttccctctttgctggattagatattttggttcagttttttttattgaggcttcaaagatccgattctcttagagatcgaattggcataacccacttcgtatctgattgaagcaccaactgggttctgtctgagattcaacataagaactgatggaatcggatcttggcaagctcttcattgggggaatttcctgggacaccgatgacgaacgtctcagagaatattttgggaaatatggagaggtgatagaggcagtgatcatgagagatcggacacaggccgtgctcgt

SEQ ID NO: 211340 - DNA, 534 bp, Glycine max
agtgaaattttaaaatgactgggataaacttaagaattcaattattgaaattgaataagtaaacaatttaattggattggtcgaatggtatcaaaaaaatggagtactaactcccatttcttatttattattgaattaaccgatcaacttgctttgttatcgaacatttctttttgatttcaaaaatttttccgaaaaaatttgaatctatttttatatgcgaatcaatcctactacttctggtcctgaggtttctgcgcttgaaaaaaaaaatctgggacgtatcgcccaaataattggtccggtactagatgtagcttttcccccaggtaagatgcctaatatttacaacgctctgatagttaagggtcgagatactgttggtcaacaaattaatgtgacttgtgaagtacagcaattattaggaaataatcgaattagagctgtagctatgagtgcgacagaaggtctaatgagaggaatggaagtgattgacacaggagctgccctaagtgttccagtaggtggagcaac

SEQ ID NO: 211341 - DNA, 501 bp, Glycine max
agttattccgatattcggacgcatcaacttgttatgaaatcacattgatagcctctactcgtgtcctagctcgtctaagagctagatttgcctcaattgtttgtctcttgccttccgccttattcaaattagcttctgctatttcaagagtttgctgtgcttcttgtggatcaatgtcactacccttttccgcatcatttactaaaacagtgatctcattattggttattctagcaaaaccgcccatcagagccatcgttaaccattggtctttaagaagacgtattctcaaaatacctatatctacggctgtggcaataggcgcatgatttggtaatactccaatttgtccgctattagtagataaaatgatttccttcacttccgaatcccaaacaattcgattgggggtcagtacacaaagatttaaagtcatttcttcaaattgctctccatttctaagttcgtagctttcgcagtagcttcatcgatattacctac

SEQ ID NO: 211342 - DNA, 546 bp, Glycine max
catttggggatccagaagtgttgattgcttcgagaaattggagcaaattggcgagggcacatatggtcaggtttacatggctaaagagatcaaaactggtgaaattgttgctctgaagaaaatacgaatggacaatgagagagaggggtttcctataactgctatacgagaaatcaaaattctaaagaaactacaccatgaaaatgtcatcaagctgaaagaaattgtgacttctcaaggtcctgagaaagatgaacaggggaagccagatggtaacaaatataaaggtggcatctatatggtctttgaatacatggaccatgatttaactggtcttgctgaccgacctgggatgagattcacagttccccaaattaagtgttacatgagacagcttttgacggggcttcactattgtcatgtaaatcaagtacttcatcgagatatcaaaggctcaaatcttcttatagacaatgaaggaaatcttaagcttgcagattttggactggcacgatcattttctaatgaccaaaatgcaaatcttac

SEQ ID NO: 211343 - DNA, 643 bp, Glycine max
ctcgagccgcacaccctaccatatcatatgaatcggcactctctttgaaaactgttatgcgttcaccggcgtcggaaaggtcgtccggttagggttccggccatcgctaagggcacggatcgtaaaatcttgtcgaagcttatatgctattactcatgttgagagggttattctctcgttgcaggagttattaggcaccatttttaccacttgaagtcagtcagcaacaatttttctgtggatttttcaggaatattttcacctgcaaaagttgaagcaaatgtctctgcagaacaaggtattttggatggtgaagggttctggacaaattaatgacagagagacaatatttgataatcctaccaaaattgaaccaaaacgacctcatcaatggtttgttgacactgctgaagtagattttcttccagacaagaaacaagctgtagaagatgcagatgaaaaatctagtcctggattctcaaatggtaatattgctccctgggagaacaatcccaattctcattcggtcccaaaccatttattggccattagtctggtctgaaccaggcctgtcaatttactgagaagatacttatatgtttggctgatgatctaatggagatcaagatgatcacaacaatat

SEQ ID NO: 211344 - DNA, 598 bp, Glycine max
acacaagaacataagctttatcgataatgtaatagataattctgtccaccaaagcaccttgtactgatttgtacataagctaacttataaagcttcgaatattttaagcaaggcatccaaaggtgcacattactaaaggttgcggagccgtataaagacacaggaaaaatggtaaaaactgacatatcttactatgcacactagaatctatcctaagttacgttttcacaaagggttgggacttataggttaagttcttcctttccataaatgcgttgaagctcccgtgttgctgcttgaaatgattctttccagttgcgaaatgctttttgatgaattggtgcaccaaaaactgtttgaattgtatcaaacaacaaactttcgggggtactcctcaattcctgtactatttgataaatagtcttcccattctcaaaataaatatgattgtttggatgttttgttttgcagccagcatgtctctcaaactcgtaagcattcagaacctttgatagttgcatgattggcacccacaaagatagccagagccttttataatttcacgaagtttctctcgtgacactgagatatactttac

SEQ ID NO: 211345 - DNA, 599 bp, Glycine max
  unsure (1)..(599): unsure at all n locations
caaccactcttaatttctctctgccttgctcatttacacacctctccaacctttcactttcagctttatttgaatccctctctctcctttccaaatggccagcgttgaggttgcacatcaaacaccaacaacagttccagaaaatgaaacaaccgaggtaatcaagacccaggaaacaaccccggaaccagtaccagncactgaagctcctgcaacagaacaagcagcagctgaggttcctgctcaagaagaacaacaagcaactgaggttcctgccccagaatcaaccaccgaagcaccaaaggaagaaaccaccgaagcaccaacaacagaaacagtagaaacaacaactacagaagaagccaagccagaggagcctaaagaagttgcagttgagaccgaggaggtggtgacaaaggagacagaggaagagaagccagcagcagaagagaaatcagaggagaaaactgaagaagtgaaagaagaagcagaagagcctaaagaaactactgaaacagaaacagaatcagcaccagcagcaaccacagaggaagagaacaaaccagcttggacagtggaaagcccaagtagaggttcct

SEQ ID NO: 211346 - DNA, 492 bp, Glycine max
aaaggaaatatcatttattcaaacctaaagaaacacaataacacatcatcacaaactcatgtaaccctgccaataaaataaaccctcatccctaaactccagcaccagcagcagcttgctcacttcaatacacaactcctagaatttctcatgtcaccacgtggtaagcacgctgatgtggagccaagtgttgggctcacacgtaggtataccctccataatacaaccaaagacttaaccatcatataataataatatattaataataaaggaaactaaagaaataaataaaaaaaaaagcttttcaacatgacatgcaaaatggtagacctaatgatccccacaactaggaccatttttaaacttgtttttctcactcacactggccataagtctaagcttcagttttctcaacaggaacctctactggggcttccactgtctcagctgggttgttctcttcctctgtgggtgctgctggtgctgattctg

SEQ ID NO: 211347 - DNA, 529 bp, Glycine max
ggtaaaccctgatgatgttgtgtttgggggatgggatatcagtaacttgaacctggcagatgccatggccagggccaaggtgtttgatatcgacctgcagaaacagttgaggccttacatggaatctatggttccactccccggaatctatgaccccgatttcattgctgccaaccaaggagaccgtgccaacaacgtgatcaagggcacaaagaaagaacaagttcaacatatcatcaaagacattaaggagtttaaggaaagcactaaggttgacaaggtggttgtcctgtggacagccaacacagagaggtacagcaacctagttgtgggactaaacgacaccatggaaaacctctttgcttccttggacaggaacgaggctgagatttccccttccaccttgtatgccattgcttgtgttatggaaaatgttcctttcatcaatggaagccctcagaacacctttgtcccacggctgattgatctggccatcaagaggaacagtttgattggaggagatgacttt

SEQ ID NO: 211348 - DNA, 356 bp, Glycine max
aagcccaaaagacggggataacttgatttttttttattacatacctgcatagatagcctgcttttaaataagtcggcgggaacaaagatagagagattcaacgatctttaaatttcacatttgcccgaaatttttaacaaaaaagaggggtttgggatatgagttaagttttgatcacatttaactacactatcccaaaccggtacttttaaaactttgaacttcacttgtactctaggatcatgttgttttcaggagctaatccaacacaagccctcaggatgttttccagcataacttggtggtttgacaacgcattcaccactggggtacccgggggaaccaaaggggccttg

SEQ ID NO: 211349 - DNA, 500 bp, Glycine max
cttttatcctataattttatcaattatgcagataagaaagactcatatatttatggatatagatccctatttcaagtaaaaaaaaaccaagtgatttcttctaattacaacacgtataaaaaagaattattggatatcatagataatctctttatcaagaattatatatcggaagatgcgattctagatatggaaaaaaatatgtatagaaagtattttgattggatgggaatcaatagagaaatactatatcgttccatatcgaatccagaattttggttcttttcaaaatttgagatattctatgacgcatataggggtaactcgcaggttataccaatcaaattactctaatgtttcttctaatgtaaatgataatgctagtgaaaatacaaagaacattactagaaagaacaaaaatgaatctgttgaattggagttagagactcgaaatcgggcaaaagcagaataccctgatcaacgaaatcttggatcatcta

SEQ ID NO: 211350 - DNA, 524 bp, Glycine max
  unsure (1)..(524): unsure at all n locations
cttgggaaataacaggtataattgaattttttaccataaaaaaattaaagtttttcccttctcttcgctttttacttttgatagatattttgattgatcagtaatagtaatgacactaattttgaattttttatataaatctgaatttacttaatttacttaagaattcttgatttttttacaatcgaattaattcttataaataaaaaaaatggaatccatgcaatttaaatagatataaaggagactttttttatagattcaccataaaaaatggtatacttaaaaaaaacataattttggggattctttttttatctaaggtatatatcagtgaattagtatcaatgccataccataatgcggngtctttatttatgttatgtatctatatctatctatatagatagatatagatattaatttgggcttctatttaccatataaatatgggaaatagaagacaaatttggattaacgaattttcattcgcggatacatatgtatccttactatactgaaac

SEQ ID NO: 211351 - DNA, 584 bp, Glycine max
ctccgttgcaaactctccgctcactccaccgccgcatccacacttccatcgtacgccacttcatggctgcggcggagcccataataagctcatccaacacgcgcgtgggctggatcggcaccggcgtcatgggccagtccatgtgcgcccacctcatccgtgccggctacaccctcaccgtcttcaaccgcaccccctccaaggcccagcccctcctcgacctcggagcccacttcgccccctcccctcacgccgtcgccgccaactccgacgtcgtcttcaccatcgtcggctacccctccgacgtccgctccgtcctcctccacccctcctgcggtgccctctccgccctccgccccggcggcgtcctcgtcgacatgacaacctccgagcccttcctcgccaccgaaatcgccgccgccgccgacgtcaaaggctgccactcaatcgacgccccagtatccggcggagaccgcggcgcgaagaacggaaccctagctatcttcgccggaggggaagaagcgacggtgaagcgtctggaaccgttgttttctcatttggggaaagtgaagtacatgggaggg

SEQ ID NO: 211352 - DNA, 442 bp, Glycine max
aaaaattgggcgttcgttcactgaacaagttctccattcataatattaggggtctagattacatccccaataatataaaaaagacactgctcattgcaataatcagcttcgggattgaaagtttttgttatgcgatacgattctgtaaactgcatagcattggcggggaagtaaagtaaagtagacgatgatggatccaatacaaagcttgtttaaaattttcttcaggtattggagggaggaagggtaacattgttgagtcgctctaggaccaaaataagagcctgagtacccaaattaccttccccatgagccctaagcgacacataaagttgttgcgccagagccaagccaggcaaagcaatccccattttctgacactccttcaagcaaatccccaaatccttaacaaaggggtttacaaaaaaccccggatccaaat

SEQ ID NO: 211353 - DNA, 479 bp, Glycine max
  unsure (1)..(479): unsure at all n locations
cctcgccctcgtccccatccccgctccaccctcctcccgccgcctccctcctccctgctggtcccccgatgaaaccctcgccctcatcgacgcctaccgcgacaagtggtactccctcggccgcggcaacctcaaggccacccactggcaagaggtcgccgacgccatcgcaagccgctgccccaacgcctnccctcccaaaacccccatccagtgccgtcacaaaatggagaagctccgcaagcgctaccgcaccgagatccaacgctctcgctccctccccgtttcgcgattcaactcctcctgggtccacttcaagctcatggactccatggagaaaggtccctcccctgttaaacccgaaaacgtttccgataatagtgataacgataacgaggatgatgacgatgatcaagatctgtaccaggagatcaaccacaacggccacatcaggagcttgaacaagatgtataggaatg

SEQ ID NO: 211354 - DNA, 529 bp, Glycine max
ggagagagattctgtcctctggttttatttaaacataaaaaaagacaagactacaaaatgaatatctaaagctactactacattcacgattcatccagcatcaacctaacactgataaacttaaaatcacaggagaaaaaaaaaaacagtggcagaatcaaagcaatatctaaacaaacaacaataccagaatcttacttactgagaccttaacaaaggttaaggctgttgtggcgacgacacagtcttggccttcttcttcttttccgaaatggccttggcaaatgcctccacaatccgctgttgcgattctagaatcatctcagtgcgcttcatctccatctccatccgcatggtctcaatctccctcgccatctccatcttcatctgttccgttctcacaaacccatctcccaaaaccttaatcgcagccactaactcccccaccgggtccctctccctcttattcccgagaataagggttagggtttgattcaaatgggggctgaatttctgattcccaaacacc

SEQ ID NO: 211355 - DNA, 527 bp, Glycine max
gaatgaggtctctttcttcctttctttaatacttattaattcatctttattatctgtctttctgtctttccccttttgtatttctgggttcgatattgttatcggttatttgtgcactgcttccgccggggctattcacgaatcatggctagggttttggctcagtctgttaatgtccctggtctagtggctgagcataggcatggtcagcaaaagggatcaggaaaattaaaaagatcgaccaaaatgatgagtgctttacggacaaatggattaagaatgtcaggtttctcagggcttcgtactttcaatcctttggatactatgttgagacctggcatagattttcattctaaggtatccattgcaacgtattcgcggcaagcaagagctaccagatgcgtgcccaaagccatgtttgaacgttatactgagaaagcaatcaaagtgattatgctagcccaggaagaagcaagacgtcttggtcacaatttttgttgcacagagcaaattctattgggtcttat

SEQ ID NO: 211356 - DNA, 499 bp, Glycine max
cgtaattgattggctagaagttcattaagtagaaaaggtacaagtaataatcatcattaaaaatagtgtccaagactatataaaccacaaacacaatttagacaaattaatgttggatccttgggttactgtagcatgtgtggcaagatgatcttagtaggagtaacctttgacgaacattccccgagtggcttcctcagattcaccctcggcagtgtactttccaagctgagcgagtgagttggacttggcacggaaaaggagtgcatcttgagcagccttcacgttctcagggagtccaccccatgtcttcaagcaggtgttttggagagctctggcgtaggagaaggacacgtgccatgggtttggagactggttcatagcattcaagttcaaggttgcttcaacctcagattgtccgccagacagaaacatgattccagggacagcaggtgggattctcctgtgaaggagcttgagggtgtaatcagcaacttgc

SEQ ID NO: 211357 - DNA, 558 bp, Glycine max
  unsure (1)..(558): unsure at all n locations
cccaagcccaaactaatcctcaaccacaacctcagatccaacaacaagggttcagtttagatttcgtgaagcccaccattctaaactcaaagcccatcaacaaagacgaaactttgactctttcaacaacctcttcttccttcatgtcctccgtcaccaacgacgccagcgtctccgacggcaagatcggacctttcctccctccctccgccgccaaaccccctctctcctccgcccaccggaaaaagtgccgcgacgccgccgcagcactctccgccaaaccctcctgccactgctccaagaaaaggaaatcacgcgtgaaacgaacgattcgggtgccggcgataagctcaaagatcgcagatatcccaccggacgagtattcgtggagaaaatacggtcaaaaaccgatcaagggctcaccttaccctcggtattattctattccttcttctatcttcatgctgaatcggtcaaagtcaaatgcagatctcaaagttctttctttnttcagaanaaanattaactatgattaaggtctatgataaaagatcgaac

SEQ ID NO: 211358 - DNA, 511 bp, Glycine max
tcgagttttagaaatgcatgcaaactgcagagaggatgttaaagtagctttagctggtgatattattgcacttgcaggtttgaaagatactattacaggtgaaacattgtgtgaccctgataatccaattgtgcttgagcggatggacttcccagatcctgttattaaggttgctattgaaccaaaaactaaagctgatgttgacaagatggcaactggtttaatcaagcttgcacaggaagacccttctttccacttctcccgtgatgaagagataaaccagacagtgattgaaggaatgggagaattacatcttgaaatcattgttgatcggcttaaaagagaatttaaggtggaagctaatgttggtgccccccaagtaaactacagggaaagcatttccaaaactgcagaagtgaagtatgtgcacaagaaacaatcaggtggacaaggtcagtttgcagatatcaccgtccggtttgaacccatggacccaggtagtggatatgag

SEQ ID NO: 211359 - DNA, 181 bp, Glycine max
  unsure (1)..(181): unsure at all n locations
aaaagagaaataaaaataaaaaaaaaaaaatcaaaaaaaaaaaagaaaaaaaaaaaaaaaaagagaaaaaaagaaaaataataagaataaaaaaaaaagaaaaaaaaaagaaaggaatatagaaacttaaaaaatataaaagggaaaaagacanaaaagaaaagaagaaagaagagaggag

SEQ ID NO: 211360 - DNA, 472 bp, Glycine max
agcagtttgtgctgatgaccctgagttccgccattacacagacatcaaggagcttcctccacatcggcttgctgaaatcagaagattctttgaggactacaagaagaatgagaacaaaatagttgatgttgaagactttctaccagctgaagctgccattgatgccatcaagtactccatggacttgtatgctgcttacatagttgagagcttaaggcactaacttctttagaaactgaatagccaattccaattatgtaaaatgtgaatgaaactccataaacattctgatttccgtgccgttctgttatggcactactgctgcctcggttcttgacacaacagtgtcaaaaactttctgctttgggatgcggctgtactgctactcaataatgagttcatttctagtattgaagagtcctttggttggtattggagaaatggtaacacatgaatgaattttcagttaagc

SEQ ID NO: 211361 - DNA, 515 bp, Glycine max
  unsure (1)..(515): unsure at all n locations
gataaaaaaagtgatgtaaaagattaatataaaaataaaataataaaataataaaaagaaaaaaattaaaaaataaaataaaaataaataagaaaaatttanannnnnaagggaatatattagnnagacacnaaannnnttaaagaggaaaaaacataaaaagagagaaaaaaaaaaagaaaanagataagagaagaaanaaaataaaaagagagaggaaaaagaaaagaagggggaagaaaagagaaagagaaaaaaaaaaagagaaaanagaaaaaaagaaaaaaaaaggaagagagaaaagaaaaaaaaaaaaaaaaaaaagaagggaaaaaaaaaaaagaaaaaaagaaaagaaaataaagaaaaaaataaaaaaaataaagaaaatataagaaaaaaattaaaataaattaaaaaaaataaaataaataaataatatataaaaaaaaaaaagtaaaaaaattaaaaataaaaaaaagatgtaaaaaatattaatataaaaaaaataaaat

SEQ ID NO: 211362 - DNA, 621 bp, Glycine max
  unsure (1)..(621): unsure at all n locations
aacgaaactcttgatcaccataaccatgtcaatggcaacaacatcccctcacaccgccctcttccaaaaccgcaccaaccctttcactctctcctccttcaaacccacatccatcaaatgcgccacccaactccatacccaagccccgcccctcacccactcccaagatcgcgtcttcaacttcgccgccggtcccgncacccttccagaaaacgtccttctncgtgcccaaaccgagctctacaactggcgcggatccggcatgagcgtcatggaaatgagccaccgcggcaaggagtttctctccataatccaaaaagccgaatcggatctccgcgccctcctgcagatcccccctgaatactccgtcctcttcctccagggcggcgccacctnccagttcgccgccgtccccctcaacctctgctcctaccccgactccgncgtcgactacgtcgtcaccggctcctggagcgacaaggccgccaaggaggcgcagaagtactccaagcccaccgtgatctggtctgggaaatccgaanagtacacaaagatcccatcttttcacgatttggagctgaatgagaattctgggatcttcatatctggccaatgagacta

SEQ ID NO: 211363 - DNA, 495 bp, Glycine max
catcctcattcaatttattgagattgagaatatactacatgttacatccagtaaaatatcacatgagactcaattcatacaaacttatagacttgtagtagtaatagtagagggtatatcaagaaatcaaaactaaactacttcacttgcgatcgacaaaggtaaagcgcaatgaaaacactacctgccgacccaaatttgaatatcaaacatggaacaagaaagtaaacaaaaagagacagcaaagatacctaactaaagaaagcaaaaaactgacaagagattgtgaccctttctgaataccagacaaacactttattagcataaaatcctttaggcattaggtttatgcaatgcaagtatttgtttcagattgaggttactcctttaggcatgccttgcctgaaaatccttcatgaaagccaccaacttctcaaccccagccaagggcatggcattgtaaatagaagccctcatacctcccactgatctatg

SEQ ID NO: 211364 - DNA, 461 bp, Glycine max
aaataacattttattacaaagtcctccatagcatacaataacaaagttacatggaaattcattaactaccactaacaataccgttatagccgggtcaaaatgctgaatttaaacaaaactaaagagatgaagcacatgtacatttatttttatttttatgaaacttagattgaaacaatacaacttaactatatgttgatgctttgccaagtgattctgcaatcttactggcaatacagtaagatgtagactgaatggttaccatggggttgacaccaactgcactaggcaaaacactcccatcacacacatacaagccttctgcttcccaagtctcaccattctcatcgagtgcaccttcttcttcagaggcacccattctacaacttgacatctgatgtgcagtggtaaacactgtccacacttcattccttgaccttggacccccaactattgtcaca

SEQ ID NO: 211365 - DNA, 555 bp, Glycine max
  unsure (1)..(555): unsure at all n locations
gacacaacaatgaatttggcaaagggtgttggcggaaacattgacaaatcccaagttctgtccgctgttgaaaagtacgagaagtatcatgcttcttatggaggtcaggaggaggagaggaaagctaaatatctctcaccatatcaacataattagcctctcacttcatctagtgaccaacttatgacgctggcgacatcgcgtgccaactgagcggtctgatcacgaggatggtaacggaaaaactgaaagaatagtgacttatgacatatgaagatcattaattgaagtaaataaacaagagagtgaattatatctgtatctctgctagatgcaaacacctgcattgctcacatctcttatgtcataatatatacatatcctcccttgatatatttgagtatacgatactttacttcatatctacacncctattaaaagaattattacctgactaatctttacactaccatacgtgagaaatacaagtgttaagggtaaagccatgtaaagtcctagctttaggcctttgagaaataactgtacttattaata

SEQ ID NO: 211366 - DNA, 352 bp, Glycine max
gaataacaaaaacaataaaaaaggggggggaaaaccaaaaaccctaacaaaaattaaaaagggaaaacataaaaaaagcccaaaaaaagggaaacaaagagataaaacaaccaaaaaaaaacacaagaaaaccacacggaagaacaacaaaaaataaacccaaggggggaaaaaataaaaacccaaaaaaaaaagacaaaaaaaagggggggaaagatatgaaaatctcagaagggggagaacaaaaagaaaaacttatggaagaaaagggataacaggaaaaaaagaagagggggagcctaggaaaacaaaaaaaaacaataaataggaaaagagaaaaccccaggaaaaa

SEQ ID NO: 211367 - DNA, 469 bp, Glycine max
cagctcttacttttttccgatttcttacacaagaacttttcaaggatgcttcttggtattagaccttttggaggtatgggttcgatatggttatcggttatttgcgcactgcttccatcattgctatgcacgaataatagctcatgtctttgcttcagggtcggaatgcatctgggatcatagcataccatccgtgagcagagccaatggggactacgcgactacagcgatcgcccctatggctgagagcttgactgacgatgggatgaagaatgtcaagaccactactgctacccactttctaatctctacatacgatgctgatacttgggagagtgctctaacatacacactgtattctgaggatcgaattgcatcgatcatgattgaccaactcacctagatctggattgatcagcatcaacgcctgaagttcaatggtgatgatgctgacagagaatgaagccat

SEQ ID NO: 211368 - DNA, 555 bp, Glycine max
atccaaaatgagaatagaatttggcaaaatgggaaaaatgaagttattgagtaaaaaaaacacaaagtaaacagtttctagcttggtaatcttaagccgcaaaatacaactttcctaaatgttgagggtatttgaaaaggtacctatctccagagagcaatggtgaaaggaatatacatgttgttgaagagggttaaaaaaaactagccacaaacaaccctactgtaccaactgcaccctaaatcgaaatttgcaactcgtgccaaccaatgggtccactggggaaattcgggttacccaaaaaccaccaaacaccgacaccgacagaacaacatctgtgtgacaaaattatctcaagcttgaagagattcctctttctccttaggagcgttaccctcttcttgctgttgttcctcttgctggttcttcttgagcattacttcgcagaaaaactgggtcaaaacggcctcgtagccgggcattttggcgtacccagggaaatagttgatatcaatgataagataacggttcccgtatcgagcgtctcttatgaca

SEQ ID NO: 211369 - DNA, 457 bp, Glycine max
cggtcgaggtttcatacccacatacccattgttggatttgaactagttttacttgcctcatggcccttcatataagcagcggttgttttactgtgatgtgtaactcaagagttcacagaataagagctgttgcttcagagggttctgctactcttaatacagttgtggaggagaaggtgaaattgggtggctctgatttgaaggtatcaagggttggaattggagcttggtcttggggtgataccacttactggaacaattttgaatggaatgataggaatgagaaggctgctagagctgctttcaatgccagtattgatggaggtctaaccttttttgacactgctgaagtctatggctctgggcttgctttaggagccgtaaattctgaggttcttcttggaagatatattaaggaaagaaaagaaaaggatccagacgttgagaatgaagtagc

SEQ ID NO: 211370 - DNA, 477 bp, Glycine max
catataaaagaaccatattatgtattttgtaaaataaataattaataataacaagagctatatcaatatacagagacagtacaactttacatttgatttaaaaggtgcatgctatattctagagtttttcaactggaaaaccaataacaggtttaatttctgaagccaaactacgcagctcagctacctcttcatcagttagtctccagccaagtgcacctatgaattcctcagcttgttctgctgtcttggctcctggaattgggacaacattgccttgtgctaccagccagttcaaggatacctgtgttggagttttatcatacttctctcctatttcactgatcttgttcagcaaaggttggagccttgttaggaattctggagtataaattctgcctcggggcccacttggtggtttatcaggagtgtactttccagtgagagcaccttgagcatatggtgaatatgcaatta

SEQ ID NO: 211371 - DNA, 492 bp, Glycine max
gtttggaattgtgaagggaaccatgacaaccacgcattcctacactggagaccagaggcttttggatgcttcacaccgtgacttgagaagagccagggctgcagcacttaacattgtcccaaccagcacaggagctgccaaggccgtgtctctagtgttgccacagctgaagggcaagcttaatggaatagcgctccgtgtgcctacacccaatgtttcagttggcgaccttgttgtgaatgttgagaagaagggtcttactgctgaagatgtgaatgcagcattcagaaaggcagctgaggggccgctcaaaggtgtattggacgtgtgtgatgttccacttgtgtctatcgacttgcgctgctctgatgtttcctgtactattgactcctccttgactatggtcatgggagatgatatggttaaagtggttgcttggtatgacaatgaatggggttacagccaaagagtggtcgatttggcacatctagt

SEQ ID NO: 211372 - DNA, 487 bp, Glycine max
  unsure (1)..(487): unsure at all n locations
gagaaagtgaaggtgcttcggcgactcctcgagacaccaggggttcaccaggggccagcctgtttcgacgctctgggtgcgaagctcatagaatccgctggcttcccctactgcatcaccagtggcttctccatcgccgcttccaggttggctctgcccgacaccggcttcatctnctacggcgaaatgctggagcagggccaactcatcacccaagccgtttccattcccgtcattggcgacgccgacaacggctacggcaatgccatgaacctcaagcgaaccgtcaagggtttcattgccgccggtttcgcaggaatcattctggaagaccagattgcgccgaaagcgtgtgggcacacgcgcgggaggaaagtgataccgagagaggagggcgttatgaagattagagccgtcgtggatgcgagaagagagagtgggtctgacattgtgattgtggcgcgcacggatgctcggcaagctgtgt

SEQ ID NO: 211373 - DNA, 540 bp, Glycine max
  unsure (1)..(540): unsure at all n locations
ctcacaaagattggtatcctgaacaccccttcatggtacactgctggagagttggagtacttcacagacactaccacactcttcgtagttgagctctttttcattggttgggccgagggtagaaggtgggctgatatcatcaagccaggctgtgtcaacactgaccctatctttcccaacaacaagctcacaggaactgatgttgggtacccaggtgggctttggtttgatccacttgggctggggaagtggttctgctgagaagatcaaggagttgagaacaaaggagatcaagaatgggaggttggccatgttggctgtgatgggggcatggatccagcacatttacactggcactggtcctattgacaacctctttgctcaccttgcagatcctggtcatgctactattggtgctgctttcactcccaagtgagaagggttggaacaactctatgattgcaagccttggagaaacattgngaaacttagttaactaagttgtaaggcttaaatgtctttaggggggagtctttatgt

SEQ ID NO: 211374 - DNA, 508 bp, Glycine max
acattaaatgcatctaaacttaaataggtatttgtacattgaataatcaatctgtgcatgacaatagaagtaccattttacaagctttcaccaacataaaaactcccccctaaagacatttaagccttacaacttagttaaacaagtttcccaatgtttctccaaggcttgcaatcatagagttgttccaacccttctcacttgggagtgaaagcagcaaaaatagtagcatgaccaggatctgcaaggtgagcaaagaggttgtcaataggaccagtgccagtgtaaatgtgctggaaccatgcccccatcacagccaacatggccaacctcccattcttgatctcctttgttctcaactccttgatcttctcaggagaaccacttccccagccaagtggatcaaaccaaagcccacctgggtacccaacatcagttcctgtgagcttgttgttgggaaagatagggtcagtgttgacacagcctggcttgatgatatcagcccacc

SEQ ID NO: 211375 - DNA, 538 bp, Glycine max
gatgatgattcttgacaggtaaaatggaagaataccagtcataactcaaaaaggatgcttttaagtattaattgcaaagaccttctttctgaacacaagtttgccaaaagactcggaagataacatccataattccatattatagaccaaaatgatcttacttacaaaatatagccactcgagatttatttcaagttcaaactacaaccactacaagagggaaaagcaacacaacacatccattcctcacaaaaccaggcaggctggcacagatcacctcattcttgtgtagaaagcacacagcgaaggcatcccccttcatgcaaaagatcaaaagccttgttgatctccgaaagtgtcaaagtatgggtaatgtactcatcaaccttgatttccttcttcaagtacttgtctacaagccaaggcacctgtgacctgctcttgaagccaccaaaagctgttcctttccagactcgtccactcaccaactggaaaggacgggttgatatttcctgccctgatgctgcaacacctacaa

SEQ ID NO: 211376 - DNA, 398 bp, Glycine max
gcgggcccggagggcctggcgggctgggagggcccatggacttcgggcggaacaagtccaagttccaggaagtccccgagaccggcgtgagcttcgctgacgtggcaggcgcggaccaagcgaagcttgaattacaagaggttgatgatctcttgaagaatcccgattagtacaccgggctgggcgcgaagattccgaaagggtgtcttttggtgggcccaccgggaaccggaaagacccttctggcgagggctgtggcggtagaagctggggtgccgtatttctcgtgcgcggcttcggagttcgatgaactttttgtgggagctggtgcgtcgagggtgagagatttgtttgagaaggcagaagggaaagcgccgtgcattgatttcattgatgag

SEQ ID NO: 211377 - DNA, 536 bp, Glycine max
gctgtgctaattgttttttctccttgaatttgataaaataattattgattcttacagtgtacaagtcagagcgtattttatagtacaaacataattctgtgacttgcgtgtatgattatgcaacatataattcggcttttccatcaatgaatagactcatgaactcttcaccatccacagtttctttttctatgagaagttgagcaagcttgtgaaggatatcaatgtgagttgagataatatgtgttgccctagaatatgctctctctaccagttccctcacttccgcatccactacatccgcagttgccatggagtaatccttttgcgatgacatctgttgacccaagaatggatttccaccaggtccaccaatggcaacttgtccaatttttttgctgaatccaaatctctcaaccatctgccttgccactcgtgaaacttgcatgaagtcgtttgatgctccggtggtgacattttcctggccaaaaataacctcttcggcaacccttccacccagggcaacagccatctga

SEQ ID NO: 211378 - DNA, 536 bp, Glycine max
  unsure (1)..(536): unsure at all n locations
agccgagcggccgccctttttttttttttttttagtatcaaattttggttttggttttgcatctataaataccatgtttgctctttcttctaagaacgtttacataaagaattagaagatatagctagacataaaactagaatatgcaacaacatcaacccagtctggaaaaagattcttcaatctctttactggatcaaccaacttttggtctaaaaccgctaggtccactcttaatgcttcagagctgttagcctctaaccagaaggtccaatttccatcgctaggtccactgagacggcatatatatgattgtggaccaccaccataggtttcggttcccggaagcaaattatctgcaaatgaccaacttgataaaggaccagtgatgttgagaaccgcaacccanacctcttccaaggaacctaaataaagctccaagtgaactcttctgggtcccttttcgggatttaaagatggattntgaacagacaatttgggaaagaattcatactgtttcaaaatatcatcccttt

SEQ ID NO: 211379 - DNA, 386 bp, Glycine max
gctgctcaagatctgggggagcagtggtcttattaatggatgtgcttcaattcaaatagtctcgcactagtcatcattcccttcgtttctgttgcttgcttggttgttcttcttcttcttgttgatcgtcgtggtcgttgaggtcttcaattcttcttttattattattccgttttcgctgattttagttttgtcctggatgcaatgcaggataaagacagggtcagtcagctattgttctctgcattttgttcccaaatgaaatgtctatgactttcgtcgtcaagttctagggtaacaaattttattgttgccttgcttgttattattatacttagaataaaaatgttctcgcatggacaagttcttttaaacgaaaatacgac

SEQ ID NO: 211380 - DNA, 527 bp, Glycine max
gggattactcgatccatttccatatcgatcatgatatatataataattcgagcacccatttcaaacgcatatccaatttttgcacagcagggttatgaaaatccccgagaagcaaccggtcgtattgtctgtgccaattgccatttagctaataagcccgtggatattgaggttccacaagccgtactttctgatactggatttgaagcagttgttcgaattccttatgatatgcaagtgaaacaagttcttgctaatggtaaaaagggagctttgaatgtgggggctgttcttattttaccggaaggttttgaattggcaccccccgatcgtatttcgcctgagattaaagagaagataggcaatctgtcttttcaaaactatcgtcctacaaaaaaaaatattcttgtggtaggccctgttcctggtcaaaaatataaagaaataacctttcctattctttccccggatcccactactaagagagatgttcatttcttaaaatatcctatatacgtaggtgggaa

SEQ ID NO: 211381 - DNA, 503 bp, Glycine max
acaagttaattgaagaaattcaatttgtttaatcaaattccccaaccccctctctttttatttgttcactacgtattatatgcaataaaatattatatggcagaaatattctaagttggaaaaaatagaaactaagatataggatttttcaggaaggggttaaaaaagattattttattgatatttttagaatatttctatttcgacacaaacaagaaggaataggaatcggactctaggaaaagacaaaaaatcccccctagagtaccttttccatattttaattgattttgtttcaaattatctatctatatagatatctattttatgtttagtatcgaatccaattttattgtattttacaatcgaaatttctataatagaactctctattatagaaaaatgaaatctgaaaaaaacagtgtcataaccataatattcgaatttattggggggttgaaaaaacaaagtcaaatagtctttctgacaatatccatactcga

SEQ ID NO: 211382 - DNA, 506 bp, Glycine max
ggggttgggcaccccaagtgctaattctggaccatcaagctgtgggagcctttgtcacacactgtggatggaattccacgctcgaagcagtgtcggcgggggtccccatgctcacctggcccgtctctgcagagcaattctacaatgaaaagtttgtgaccgatatacttcaaatcggggtccctgttggtgttaaaaaatggactagaattgtgggggacaacataaccagtaacgcgcttcagaaggcactgcatcgtataatgataggggaagaagcagagcctatgagaaacagagcacacaaactggcgcaaatggcaacaacggcgctgcaacacaatggatcatcttactggcacttcactgatttgatacaacaccttcgatccattgcaagccttcaaaattaactccccatgcctttaccctcgcaatcaactttgcctaataactacttcacatctcaatgcaaataaattgaattgaacaatagaaagaacaaa

SEQ ID NO: 211383 - DNA, 490 bp, Glycine max
caattcaatttatttgcattgagatgtgaagtagttattaggcaaagttgattgcgagggtaaagggatggggagttaattttgaaggcttgcaatggagcgaaggtgttgtatcaaatgagtgaagtggcagtaagatgatccattgtgttggagcgccgttgttgccatttgcgccagtttgtgtgctctgtttctcataggctctgcttcttcccctatcattatacgatggagtgccttctgaagcgcgttactggttatgttgtcccccacaattctattccattttttaacaccaacagggaccccgatttgaagtatatcggtcacaaacttttcattgtagaattgctctgcagagacgggccaggtgagcatggggacccccgccgacactgcttcgagcgtggaattccatccacagtgtgtgacaaaggcttccacagcttgatggtccagaattagcacttggggtgcccaccccctt

SEQ ID NO: 211384 - DNA, 475 bp, Glycine max
aggtggttctaggatcatcaaatcagtgtctgcagctcttggtacgaggttttacgccaaggttgcaacagggactgacatagtctctgccgcacccaatgtttctctccagaaagctcgtacctgggacgagggcctggcttccaagttctgcaccactcctctcaaagacatctttcaggaccagacagttgtcatctttgggctcccgggtgcatacacgggagtttgttcaaacaaacacgttcctgcttacaaggagaatattgataagtttaaggctaaggggatagattctgttatttgtgtggctattaatgatccgtacactatgaatgcgtgggctgagaagcttcaagccaaagatgctattgagttatatggcgactctgatgggagctttcacaaaagtttggaattagctactgatctctctggtgcattgctaggaactcgatctgaaagatggtcagca

SEQ ID NO: 211385 - DNA, 568 bp, Glycine max
  unsure (1)..(568): unsure at all n locations
ctttcatggtggagctgagccgcagctgcaacgacgtggagttcatcctggtgatgggcgacgagtcggagaagacgaaggagctcctgaagcgggagaaggtggagaatgtgcctcacttcagcttctacaagagcaaggagaagatacacgaggaggaagggattggtcccgacatgctggtaggggatgtgctatactacggggacaaccactctggtgtggtgcagctgcacaacgtggaggacgtgcagaagctcatagaggaccacaagctggatcacaagctcatcgtgctcgatgtgggtctcaaacattgtgggccctgcgttaaggtttatcctacagtggttaagctctcgaggcagatggactcggtggtgttcgctcggatgaacggcgacgagaacgagagctgcatgcagttcttgaaggacatggaagtcatccaggtccctacctttctcttcatcagagatggcaacattggaggcaggtacgtcggttctggcanaggggagctcattggacgaaatctcagggtaccagggtgtcgtgtcacttaata

SEQ ID NO: 211386 - DNA, 419 bp, Glycine max
gactataaagcaaagcaagttcctttttcaaaaagtttaataaacatgggtttggtgagctgaacttaatagaagtagaaataagtttgggttgtaagaaaattaataagggacacgaaccccttgggacctgagaatttccccaatgagctcccctttgccaaaaccgacggacctgcctttaatggtgccatctttgatgaaaaaaaagggggggacctggatgacttccatgtccttaaaaaactggatgcagcttttgttcttgtccccgtttattcgagcgaacaccaccgagtccatttgcctcgagagcttaaccactggaggataaaccttaacgcagggcccacaatgtttgagacccacattgagcacgatgagcttgggatccaacttgggggcctctatgagctttt

SEQ ID NO: 211387 - DNA, 513 bp, Glycine max
aaaccattatgttgttcatatggaccttgaatcaccgctagaggaaaggatggagattgcacatagaattgatagacaacatgtatacgctgaggttgggaacgtttatgtaatcacaatggctaacatggtgacttaccgaggaccaacgatggttgctaatactcttgatgcttgcgccattctgctcacgagaagtaaagactgggactggtctattaatcttagtgctatagactatgctcttgtgacacaggatgatctactatatactatttcagatttagatagaggccttaatttcattgagcacacatgtcagttcgggtggaagattgattaacgagcaatgccgttaatcgcagaccctgggctttacatgtcaaccaaatctgatgtattgtgggttaatcctaagagacctctgccaacagcatttaaattattcactggctcatcatggacagttttatcacacgactctgttgaatatgctgtatggggatgggacaa

SEQ ID NO: 211388 - DNA, 462 bp, Glycine max
ggctcgaggtacaatttacagactaggacatggactgagattcctaacatgtcccccggacgtagtagtaggggtcctgagatgcctgcaacagctgatgcaccacctgtggttgctgttgtaaatgatgaattgcatgctgctgattatgctgacatggaggttaagaagtatgacatggagagaaatgtgtggattaccattgggagactgccagaacgagcagtgtacaatgaatggctgcggtcttgcattcagggcatgtggagataagcttattgtcattggtggacctacgactcatggtgagggttttattgaactcaattcatgggtgcctagtgaagggcctccacggtgggatctacttgctagaaatcgttctggcaactttgtctatagctgtgctgtgatgggatgctgaagcattgaattgtcaaagttaacaacacattgtgatgc

SEQ ID NO: 211389 - DNA, 577 bp, Glycine max
cttccccttcttcgaatccccggcatgccactcaccaaccaacaccaatcattcccttccaatacccgccgcaaagccacgacggcgaaggcggagctcgggacggcggtggcgcggacgggcggagccggttaccaatctccgtccgtcgacgttcccacgcataaggtcacagtccacgacagacaacgaggaatcgttcacgagttcgtcgtgcctgaggaccagtatatattacatactgctgaggcccagaatattacccttgcattcgcctgcaggcatggttgttgtactagctgtgctgtacgtataaagaagggacaaattaggcaaccagaggcacttgggatatctgccgaattgagagacaagggttatgcacttctttgtgtgggcttcccgacctctgatgttgaagtggaaactcaagatgaagatgaggtatattggcttcaatttggacgttattttgcccgaggaccagtggaaagagatgactatgccttggagttggccatggctgacgagtaagcaatgcgagcaaagaatgtgaatattctgttacccttctttc

SEQ ID NO: 211390 - DNA, 535 bp, Glycine max
aagattgaacaaattacattaaattaatctttcaatatactcccctaaagctttgaaacatttaaacacgaacccgcatatagcatgaggctttacttagaattcacacaatagtatatatagatgggaaaaataaacaaagaccagataacatagtagatatatgaagaagaaaaaaaaggagaaaagaaggggaaacaaaatattcacattctttgctcgcattgcttactcgtcagccatggccaactccaaggcatagtcatctctttccactggtcctcgggcaaaataacgtccaaattgaagccaatatacctcatcttcatcttgagtttccacttcaacatcagaggtcgggaagcccacacaaagaagtgcataacccttgtctctcaattcggcagatatcccaagtgcctctggttgcctaatttgtcccttctttatacgtacagcacagctagtacaacaaccatgcctgcaggcgaatggaagggtaatattctgggcctcagcagtatgtaatatatac

SEQ ID NO: 211391 - DNA, 555 bp, Glycine max
gaaaaagaaaaaaaatagtcactaaatgaagtaattggacttataaatagataaatagattacccctattgaggtactttttttttaatgtttcttattatttttgattttattatcatttctttttaataccaactcgctctttattattttcagttactaatcctagttatttgatttatatactttttttatagtaaatacatgagatagaatattcaaaatggaatatttctattattttattcttcatccaatgactatacattcattatatttttgtgtaaatagaggaaaaactcgatggaaaaatggtggtttaattctatgttgtttaataggaagttagaatacaggtgtgaattaagtaaatcaatggatagtcttggtcctattgaaaataccagtctaagggaagaccctaaaattttaaccgatatagaaaaaaaaattcacagggatttggattatttagaaatggaggttttttttctagcgatctgaatactgtttctaagaatgatgatgatcattacatgtatgagactcaattag

SEQ ID NO: 211392 - DNA, 555 bp, Glycine max
  unsure (1)..(555): unsure at all n locations
actagtcggcggccgcccttttttttttttttttatttttttattcttatttatattattatataaagatagtctataatcactagaatttctatatatttatacttagtatataataattctagtgattatagctaagccaatatatatcataatataatatacccttttcttattcaaagaatttatggctatgccttatcatttttagtcaaagaaaagaaattatggaattgaaataactcactcagaacgccctttaaaagattacgcggtacgattgaatcaaataagcccttatggaataaatattcagctgcttgtgaaccttcaggtactgccttattcaatgtttgttcaattactcttttaccagcaaatgcaatataagcatttggttcggcaataatgatatcccccaacatgccaaaactagcagttacccccccagtagtgggagatgtaagtatggatacantagaataacttttatttntttgataatcatataaagcagaagagaatttagccattgggatcaagctcaaaacttct

SEQ ID NO: 211393 - DNA, 450 bp, Glycine max
  unsure (1)..(450): unsure at all n locations
tctctttcttcctttctttaatacttattaattcatcttttttatctttctttctttctttccccttttgtatttctgggttcgatattgttatcggttatttgtgcactgcttccgccggggctattcaggaatcatggctagggttttggctcagtctgttaatgtccctggtctagtggctgagcataggcatggtcagcaaaagggatcaggaaaattaaaaagatcgaccaaaatgatgagtgctttacggacaaatggattaagaatgtcaggtttctcagggcttcgtactttcaatcctttggatactatgttgagacctggcatagattttcattctaaggtatccattgcaacgtcttcgcggcaagcaagagctaccagatgcgtgcccaaagccatgtntgagcgtttcactgagaaagcaatcaaagtgattatgct

SEQ ID NO: 211394 - DNA, 478 bp, Glycine max
gaggcctaccaggtattccattaaaaactttaggtacattgacaagtaaaacatactatgactatggtttaaacaaattaagtacatagtattagcaaattaaccgcattatacaggaagcgtctctggcaaggattcgggggctccgctgctaccattgagcacaatcacattaccatcagaatcaacatccactataacagagtcgccctccttgatctctctggcaagcatcttctcagccatgctgtcctccaaaagtcgcattatggctcttcttagaggtctagctccataactagggttataaccttcctccaccactctgtccctgaatctttctgtcacttgaagttcaatatctttcaccttcagtctatcaaacacctctttgagcattatgtcagcaatctccttcacctccagttttgtgagctgcctgaagacaatcatttcatccaatctattcaaaaattct

SEQ ID NO: 211395 - DNA, 529 bp, Glycine max
ctcggaattcggctcgaggattttgtccatccaaaccttaaaaagattcagtgaagaacaacgttaatggcatctcttggtgtgcaagcagttcatcctcctccattaacatccacctccgacccacctcctctttttgatggcaccaccaggttgtacatcagttattcttgcccctatgcacaacgtgtatggatcgctcggaacttcaagggactaaaagacaagatcaatttggtccctataaaccttcaagacaggccagcttggtataaggagaaagtctaccctgaaaataaggtgccatccttggagcacaatggcacggtgttgggagaaagtcttgatttgatcaaatatgtagatgaaaactttgaagggacacctttgtttcccagagatcctgccaagaaagagttcggagagcaattgatatcccatgttgatacattcagcagagacctgttcgtttcattgaaggggatgctgtacagcaagccagtcccgctgtagatacttggagatgctc

SEQ ID NO: 211396 - DNA, 515 bp, Glycine max
aaactcttattcccactcagtggtgaatttgccaaaccgggataaccgtatccctattcaggaatacaatgttctcgttaagactccctattcctctcgttaaaacaccaccttctccctcttgttattattctcactattatcactatcgttatcgttatcgttgttatcatgctttccatcacccgttcccaaacacagagtcttatcgtctcgaagcgcggatccgccattgcgaagtgtcacgctgatagcgtgacacttcgtgatgacggagtctcgctcgcccaagagtcgttggagccacttccggcggaactcgcggcggagatgatgccgaagcatgtggcggtgataatggacgggaacgggaggtgggcgaaggtgaaggggctgccaccatcggcggggcaccaggcggcggtgcaatcgctgaagaaaatggtgaggctgcgttgcagctggggaattaaggttctaacggttttcgcgttctctacggataactgggttcg

SEQ ID NO: 211397 - DNA, 525 bp, Glycine max
aagaatataataagtctacaatatcatttatcttttttccaaatacctgttaacaagtctgtagatcaatatatatataaatatctttccatgttgctttcttatgcctaaatcatggcattgataactagcaaactactaatatttatgttgcttagtatctaattaatgtatatgtttatcaaggtatatcactatatattgcaaacaaatgtttatgaatgtcgaccaccatagcgtctttgtctttgttgaaatgaacttaatgcatctacaaactcatccttcccaaaatctggccagagttcccgattaaaataaagatctgtgtaggctaattgccacaacaagaagttactcactctaagctcgccactagttcgtattagtagatcaggataaggaaactcagtacaattagtttccaattcttgttcaataatgttttcggttatgtcatccaagtgaatgtgaccatctttgacttttttggctacacttttacatgcttgcacaacatcatat

SEQ ID NO: 211398 - DNA, 449 bp, Glycine max
cttcgatcgcaactctctttttcttccaaaagggaaaacgaatcttaaacttcacaagtgttagacagcgccatggcggatcggttgacgcgtattgccatctgcagcaacgacaggtgcaagcccaaaaagtgccgccaggagtgcaagaagagttgccacgtcgtcagaaccgggaggttgtgtattgaggttacttcctcgtctcaaatggctttgatttcggaaggaatgcgattggatgcagtattgtgttaagagagaccttgagaagctattcagattatcaacttgccgaaggacttggacagggatactactcatagatatggtcctgatactatgaagctgcataaggtgccgattacgaagcccggtccggtgcttggattggctgtgactaatgagatcgggaagctcaccgctcttaaagcttagggcgggaaact

SEQ ID NO: 211399 - DNA, 563 bp, Glycine max
  unsure (1)..(563): unsure at all n locations
aataacagaagttaaagaagagggtatttttactcgtaccagtacttttgagagtatcgtttatctggaaaccatagaacaggggtttattcccttgactcgtattgaagataatttgaatgggacacaaattgcacataaagctggcgaattatctgtatttttgggtgtaccacttttttactgatgagaatngaacttaattagaaattaaattgcacanaaagcttcagaattgtcctatttattttgtgtaccttttgaaatattttgaaaaaaaaaaaacgtttttttttttcaaaatatttccatttttatagatgaggcgttatttgatttcgaaatccgattattatattcctaacccgaagtgctccttggtgtattcataaaaagtaataatttttcttcgaatcttagcaattgatatcctttcgaaacaccatttttttcttcatttgaattgacagtgaattctttcgatttcttattcgatttatgtattcttttttctaaattaaacaaggcaaggactaactcccgaactgangtaaaaaaaatga

SEQ ID NO: 211400 - DNA, 517 bp, Glycine max
gtaggacgatagttttgaaaagacagattgcctatcttctctttaatctcaggcgaaatacgatcggggggtgccaattcaaaaccttccggtaaaataagaacagcccccacattcaaagctccctttttaccattagcaagaacttgtttcacttgcatatcataaggaattcgaacaactgcttcaaatacagtatcaggaagtaccgcttgtggaacctcaatatccacgggcttattagctaaatggcaattggcacagacaatacgaccggttgcttctcggggattttcataaccctgctgtgcaaaaattggatatgcgtttgaaatgggtgctcgaattattatatatatcatgatcgatatggaaatggatcgagtaatcccttcctttatacaagaaaaagcatttctagtttgcatggtctaatcattgatcctgaaaatttctacaataagattaagtaggtcactcgcatagttccctatccaagtcggagaacccctttttt

SEQ ID NO: 211401 - DNA, 511 bp, Glycine max
aagaaaatagtaccccaaagtcaatgattacgtacacaatataaaagggtaacaaatagaagttttaggtgcatagaatataaaacaacaatataatacaaaattttacatcttcaaagccacaaacctgggctgctggttcactaaaactttcacacagcctacttgtgaccttttctaagccatctatcagcacaagattgttcaacaattctcagtgcatcagcactgcagcttcttgcacaagaggctgtgtaacatgcacaaaatgctcagcttccctctccacctcttcccaacacttgtgtgcactcttcccttctttcattttcttcacaaaccccacaaacttcctccagttatttggttcaaacaaatgcgggttcattctcaggtaagtgaatgcacacatctctcttccaccagagtcaccatcaacatccaactgtgatgcccttatgatctgctcatgagcatactcatcgtaccgtggcagcgcattttcaccagc

SEQ ID NO: 211402 - DNA, 552 bp, Glycine max
tgttctgattatctggaagagagatgatccaatgacaacaaagacgaagaaaccgagcagcacaagaggctgatgaggccaaatcacttgctcaggcagctcacgcagagctgattgaagcacaagaagaggttgaacaagccaaggccaaatcaagcacattggaaagtagtttattggcagcacaaaaggagattgaagcagccaaggctgccgagatgttggccagagatgcaatcacagcattggagaagagtgaatcagctaaaggcaacaaacatgacatggactcttcctcaatggtgacactcacactagaagaatatcatgagctcagcaagagagcctataaggcagaggagcaagccaatgcgaggatcgaagctgctacttgtcagattcagatagcacgggagtctgaattaagaagcctggagaagttagaagaactgaatgaggagttgtctgtaagaagagaatctctgaaaattgcaactgggaattgccgcaaggccaatgaacgaaagttagctgtagaacatgaattaagaa

SEQ ID NO: 211403 - DNA, 530 bp, Glycine max
cggctcgagctcgagccgcttcaatttcatctttcttcacccgaaaatggaaaaggagcgacccgcatcatggagacccgacccgtttcacgcacggccgacgccgcgcgaccccatggagttcctgtcccggtcatggagcgccttcgccctcgaagtttccaaggcactgtcgtctcaacagcttccaccttcatccaacaacaacgttgtttgttatgttaataattctaatgcgtctataatactcgaagacatagctggtgaagtggaagagtctgctgcaactgtttctggcaaccctttctccttcgcatcctctgaaacctctcagatgatcatggaccgcatcatgtcccacttctttggtcagcaggaggtatcaccacgcacctcaggaagactctctcacagcagtggccctcttaatggctccctaacagatagccctccggtttctccttctgaaattgacgatttcaagtataaccgttccaacaacaaccacaacactgtcaacatgattaccg

SEQ ID NO: 211404 - DNA, 540 bp, Glycine max
  unsure (1)..(540): unsure at all n locations
cttatctgcacttatggtaacatatccttcaacccacggtgtttatgaggaaggtattgacgaaatttgcaatattattcatgataatggaggccaagtatatatggatggtgccaacatgaatgctcaggtgggactcacaagcccgggttggataggagcagatgtttgccatctcaatctccacaagacattttgcatccctcatggaagaagtggccctggcatgggacctattggtgtaaagaaacacttggcaccatttttaccttcacaccctgtgatagaaactggtggaattcctgcccctgacaaacctcaaccacttggtaccatcgctgctgcaccatggggctcagcactcatattgccaatctcttacacttacatagccatgatgggttctaaaggactcaccgatgcatcaaagatagccattttgaatgcaaactacatggcanaacgattggagaattattacccggttcttttccgtggagtcaatggaacagttgctcatgaattcatcattgacttgag

SEQ ID NO: 211405 - DNA, 480 bp, Glycine max
atacgaattactttttttttttttttcctgggattggatgaaacttaagagcaggggattatcatcattgtcacatatgatgaagcaatattcaacaagtgcaagaactgtatgaataggaataagagtttatgtacaacgggaaatgaaaatagttgtcatttgaacacattatgctgtggcagctgcttgttcttcaacagcctgtgatgctgggagaagggtgcaaatgaggttgcggtcaccgtacacattatcaacacgtcctgtggtaggccagaactttgcagtacggagccaaggagctgggaaggctgcatattccctggagtatggttttgtccatgcatcagccatgagcagtgatggtggatgaggggcgcccttaagtacattgttgttaatgtcaacctttcctttctcaatctcagcaatttcttgtctaatggaaataagagcatcacagaacctgtctaactc

SEQ ID NO: 211406 - DNA, 457 bp, Glycine max
attccgcaacagagagtcgaaaagatggcgcggttgatcacagtggtgtggtgcgcggtggcggtgctactgtgcgccacggcgggcgcgtcgtgggtggaggaggcggcgaacccgatacgaatggcggctgaggtggaggcctaggtaggtcgagtgatagggcagtgcccgcgcgcgctgaagttagcttcgttcatgagcagatccggaagaagtaaccgagctaggaaagatgatggataggggcgagagattctcgcgtgaccgcatgatcatccgatctcacagcatgaaccgattgccctacactctatctgatgatcattctgattgtcggacttgggaggagttcaaaagacacagactaggcgctgaccggactgctatgacactcttaacggtaagcacgaggtcactgacgctggtcttgctgccacgaaggactggatgaaag

SEQ ID NO: 211407 - DNA, 515 bp, Glycine max
cattcgaattcattttatttatatattaatattatattcaaatgaaataaaaagatattaaaagatactaattataagaatttgaaagtgaaattataaagttattaaatgattaatcaatttttttctacctgttcctgtagtaaaaagagttccatctgttcttgaatagcttccttcaaaaggacttctgcttccccagtgaatgtcttggtagaagatatgatttctttgaattgaggtttattcgtgtttaagtaagcacgtaactcaacaagaaatttccttacctgtccaatttctaatgaatcaagataaccattcgttccagtataaatagttattatctgttcttccacggtaagaggagctgattgggattgtttaagcaactcgcgcaatcgttgacctcttgctaattgattttgagtagctttatcgagatcagaagcgaattgggcaaaagcttctaattctgcgaattgtgctaattccaaatttaatttaccagctac

SEQ ID NO: 211408 - DNA, 516 bp, Glycine max
gactgatcctgctcctgctaccacttttgctcacttggatgccacaacagtgttatcacgacagatctccgagcttggtatctatcctgctgttgaccccttggattctacatctcgtatgctttacccccttattttgggtgcggatcactatgaaactgctcgtggtgtacagaaagtacttcagaactacaagaatcttcaagatatcattgctattttgggaatggatgagctcagtgaagatgataaattgactgttgcccgtgcccgtaagattcagcgattcttaagccagcctttccatgttgcagaagtcttcactggtgccccacgaaaatatgttgagttgaaagagaacatcaccaggtttcatggagtgacggatggcaaatacgatgacctaccagagcagtcgttatacatggatggcggtattgaagaggtcattgctaaggctgagaaaattgctcaggaatctgcagcgtcttaattacatacaacagccatgttctc

SEQ ID NO: 211409 - DNA, 414 bp, Glycine max
aaaccataagggccccaacggtttcaacccaaaaaaggaaaaatttcccgcccttggcccttttccccttttaaaaaaaccccccttaaaaaagggggggccgtgggcccaaaactttgcccctagttcatttcacaggggggaaccttaaaaggggggggggaaaaccgggcccatttttctccccaaaaaatggaaaatttggccgctgggccttgccaaaaggtcccaaatttttaaattttgcaattcccaaaaaggggtttaaagggaaaccgggggggggtgtgaaaaaaaaaccccggaaatcccttaggaattttctgacccttagcaagggccctttcaaaaccgccaaccttggaaaaccactgccctgggggggcatccttttgggcctccaacacaccccgg

SEQ ID NO: 211410 - DNA, 530 bp, Glycine max
gttaaaagccttagccttccctacaacttcaaacacaaagacatcatcatccatggctgcctacgtctccactgtcggagctgtcaacagagctcttttgaacctgaatggttctggagctggagcttcagctcccagttcagccttctttgggaccagcttgaagaaggttattgcctcaagggtccccaacagcaaggtttccggtggaagcttcaagattgttgctgtagaagagaagaaagagattgaagagacccagcagaccgacaaggacagatggaagggtcttgcctatgatatctcagacgaccaacatgacatcacaagaggaaagggtttggctgactcccttttccaagctccacaggatgctggaactcactatgcagtcatgagctcctacgagtacctcagcactggacttcgccagtacttggacaacaaaatggatggattctacattgctccagcttttatggacaagcttggtgatcacatcctgcagaacttcatgaccctgcccaaca

SEQ ID NO: 211411 - DNA, 515 bp, Glycine max
aagtggacactgtaactcaaaattatagaggaagacggtccaatatgaaaaatatagtaagatcatctcaaacttagcatcttctctttgcacctaagacattgagaatgctaagaatgttacacgcaagttccatcacaacttctagcacttggattagtacaacaaccttcacgaacagaaatatttacttgccaagtttgctttgcctccaattcaagactggaagaaagttcccctctgaatagcatcctcgttagcatttccaagagcagcctcgttcaagtacttgtcagccaattggactctcttgacattctcttgttcttggacaagcatgttaccatacagcaagagcttctccagagtcatcttgggctgctcaaaggttggaggtccatcttttgagttcacaagcttcttcccaacactgtcaacaccaacaccagaaatccacttcctcacttcatcatcatatactctggccctcagtgcaccaaagaaatcaatggatt

SEQ ID NO: 211412 - DNA, 532 bp, Glycine max
atgggttcttcttctattacaacatcgcccgcaaccatgaccatggctgcgatcgtgctcctgttcacggtctttgccgtttcctccgccctagacatgtcgataatctcgtacgacagcgcccacgcggacaaggccgccacgttgcgcaccgaggaggagctgatgtccatgtacgagcagtggctcgtgaagcacgggaaggtgtacaacgcgctcggcgagaaggagaagcgcttccagatcttcaaggacaacctgcgattcatcgacgaccacaactccgcggaggaccgaacctacaagctcggactgaaccggttcgctgatctcaccaacgaggaatacagggccaagtacttgggaaccaagatcgatcccaaccggaggctcggaaagaccccgagcaaccgctacgcgccacgtgtcggcgacaaattgcctgattccgttgattggaggaaagaaggtgctgttcctcctgtcaaagaccaaggaggctgtgggagctggtgggcattctcagcaatcg

SEQ ID NO: 211413 - DNA, 549 bp, Glycine max
aagcaaattaaaatagcatgtgaatatgggacaaatccaaatattgctgctgcattgtcacataatctacagaaccttgaaaactaacagcaatcaaatatgttcgccatttggaatttgaatacaaatacagtgcatcgataatataaccctatgtacagagccaatgtctgactgaaatttgatacagaacattatctattttgtatcataataaaatggtaaagatctttatgttacgtgcagcattatgtgaagaagggggaagtgcatccagctggtgctttagtccttcgtcttcccttttacttcatcattggctccttctgcacgttcacatttccttaaactgcttaagcactgctgaccttgttcttacgtccgaaggtccaatggggtttcgctggagtacgccttaatgccttcactccaaaggggttgttcttgctcctgagacaagttccagcgtaagtgttgcagatgggatagtctgcagggcagcaactgtagtggtcatcacagcaggaagcacccttcagaggacagcaa

SEQ ID NO: 211414 - DNA, 497 bp, Glycine max
  unsure (1)..(497): unsure at all n locations
tatagactatctttatataataatataaataagaataaaaaaataaaaaaaaaaaaaagaatctatataaatataaaaataatatatataaggtacaaatagtaaatcgaggtacccattttatgataaactttccttccattttagttcctctagtaggcctagtatttccggcaattgcaatggcttctttatttctttatgttcaaaaaaacaagattttttagatacagaaaacaaagtaaaattctggggttttttattccccaattataatactaaattcaaaaaaaggagagtaatgagtataatctttcgctcagacgatgtactgatatattctatggcggaggttcgaagaacaagcaatttattttgggcccgtttcactatgttaggttcattggggttatgggtcgttgcaatttccaagtatcttggtatggatntgatctttatttctgagaaaattagtgatttnttctttaattccggac

SEQ ID NO: 211415 - DNA, 514 bp, Glycine max
acttgcagttcgggagttagtccttgccttgtttaatttagaaaaaagaatacataaatcgaataagaaatcgaaagaattcactgtcaattcaaatgaagaaaaaaatggtgtttcgaaaggatatcaattgctaagattcgaagaaaaattattactttttatgaatacaccaaggagcacttcgggttaggaatataataatcggatttcgaaatcaaataacgcctcatctataaaaatggaaatattttgaaaaaaaaaaacgtttttttttttttcaaaatatttcaaaaggtacacaaaataaataggacaattctgaagctttttgtgcaatttaatttctaattaagttcaattctcatcagtaaaaaagtggtacacccaaaaatacagataattcgccagctttatgtgcaatttgtgtcccattcaaattatcttcaatacgagtcaagggaataaacccctgttctatggtttccagataaacgatactctcaaaagtact

SEQ ID NO: 211416 - DNA, 371 bp, Glycine max
attaataattaatttatgaagttgataaattttcagatatttagaatagattcaattgtctacgtcagcgtggaaatcctcatattaaaggaaggcaccaattactcaattggttattgctgttgcgcgagagaagagaggaacgaagactgagaaatggcgtcatggaattcatttccgcttgaagttacctacgaggctctgggttggctcgccttcgatacctggagcatcagtgtctatcctcaagtcatattgaattatcgcaggaagagtgtgggtggactcaactctgatttcgtggtgcttaatctgaccaagcacagttcctatctcatatacaacgcttctctctacttcagctatgctat

SEQ ID NO: 211417 - DNA, 478 bp, Glycine max
gctgcaaattgcccccaggaccaaggacactaccgctcataggaaacatgcaccaggttgttggctcactgccggttcatcactgcttaaaaaatttggcagataattatgggccgctaatgcatctaaaactaggagaggtatctaacatcatagtcacttcacaagaaatggcacaagagattatgaagacacgcgatctcaacttatctgataggccaaaccttgtatcatctacaatagtgtcttacaacggctctaacattgtcttcagccaacatggagagtcttggaggcaactacgaaaaatatgcacagtggagctactaactgcaaagcgcgtgcagtcttttcggtccataagagaagaggacgtggcagaactagttaaaaaaatagctgccactgcaagcgaagcagaagggtccaatattttgaatctcaccgagaacattcactcggcgacttttgggataac

SEQ ID NO: 211418 - DNA, 541 bp, Glycine max
atcttagaaatgttcattcatatgtcaagttaatcataaggaagtaacttaagttaatcatagtcattgtccaattacaaaatgctggaagtagtaaaagataaaacttaaatagtttatgacattaattgttcatacattttaaggttgacgagcaatgggaattaagcagaggtcattttcccttcttaaagtaattccatttgactccttcatgtcaagttcttcaatgttcattttgttgggaagcttccaatcaaagtggtaaagcaactgagcaagtggcaactcaatgttgggtatggcaaatgtaatgcctgggcatatcctccttccagcaccaaatgggataaattcaaagtctgtgcccctaaaatcaatggagctattaagaaacctctcgggtttaaaactctcagcttcagcccaatacttaggattccttccaattgcccaagcattgataatgaccctagtcttagagggtatctcatatccattgatttggcacctttctctacttactctaggaaccaacaat

SEQ ID NO: 211419 - DNA, 424 bp, Glycine max
atccagaataaactcaaatgttcatttaaaggatacagtgatgcttggtgctgattactatgaaaccgatgcagaagtggtagcactcttagctgaaggaagagttccaataggaataggacaaaatacaaaaatcaaggactgtattattgaccaaaatgctagaattggaaagaatgttgtcatagcaaattcagagggcatacaagaggctgacagatcttcagaagggtctgacatccgctatggggttaccattgcattgaaaaactcacatattggatatcgattcatcatataactaattcagaccggacttgtttgccccgatttaccactgaatagaggatgggaatgttatgaactgtatgaatcatggttttttttttaaagaaaagcattgatgacaatgggatgcccaaaa

SEQ ID NO: 211420 - DNA, 507 bp, Glycine max
actgcgtaaaaaatgtacttgagttaataattatgatatacaagtacaagctcagagaagttgtgctgaatttggaatatccatttcggcaacacattgtcatttaatgcttttctttaaaaaaaaaaacataattcataaagatcaaaacattcccatcctcaaattcatggtaaaacggggcaaacaaatcacgggcgaatttattatatgatgaatccatcttcaattactgagtttttcaatacaatggtaaccccagaacggatgtaaaacccttctgaagatctgtcagcctcttgtatgccctctgaatttgctatgacaacattctttccaattctagcatttttgtcaataatacagtccttgatttttgtattttctcctattcctattggaactcttccttcagctaagagtgctaccacttctgcatcggtttcatagtaatcagcaccaagcatcactgtatcctttaaatgaacatttgagtttattctggat

SEQ ID NO: 211421 - DNA, 281 bp, Glycine max
tgagaagagagataatggcgcagagagctcaaccagcgttggccaccacggatgttcctcacaagggagatattcattgaaagcaattcaatgttgaaacatccactgcttcttcctcacctgcaaaaccattgcttatttttacaccaaccgtgcctggcttataccctgtaatattgatctgccatggctttagtattcgcactagctactactctaagctcctagcccacatagtttcacatggattcatacttgttgctcctcatctgttcaccatt

SEQ ID NO: 211422 - DNA, 551 bp, Glycine max
ctcgagccgaatcggctcgagcaagagtggaaaagggagcttagactttcattcaagcctcaactccaggtgggatcgacagaagtgcggtcacacccgcaacggccgaaagtgcgagagccgaacggttgtggatatagaacggggcgttagccacggttctaggttgttagtccttcagtcgttccttcatcgctagaaacaagctaaatggagagattcctaaagatattaaatttccacctcaactggagagactagatatgcaatcaaattccttgaagggtgtgctcactgactatcatttcgctaatatgtctaagttagaccacttggagttatctgacaactctttagtgaccttggcatttagccaaaattgggtcccaccatttcagttgcgcttcataggattgcgatcttgcaagctaggtccagtatttcccaaatggttggagacacataatcaatttcagggtattgacatttcaaatgctggaatagcagatatggttccaaagtggtttgggctaatttagcattccgagaat

SEQ ID NO: 211423 - DNA, 473 bp, Glycine max
tttctttctttttttttttttttttttttttttttttttttttttttttttttttttttttttctgttttttttttattttgtttacttcctatcctttaattggggaaaaaaacccttgaaacccaaaaaacagaaggcctaaaaagaaaaaaccaaactattggccaaaagacccccaaaaaccccaaacaaaacccgggtatacattctgcaaaaaaaaaaaaaggggccccaaaagaggaaaaaccataacccaacccttaaagcccccaatttcggaaaacataaaaatttaataaaaaacacccctttaaaatggaaggggccaatgcaaaaaaaaaggtttcaaaaacaaagggggacaaaaacctggggggacccaaaaaccggggggcacccccagagggaaaaaaccccccaaaacatgctttgggggcaaaaaccacccgggaaaaaagcgcgatccccccc

SEQ ID NO: 211424 - DNA, 615 bp, Glycine max
  unsure (1)..(615): unsure at all n locations
gaaattctccgcaagcatgaacaatgaatcatttgtgcaccccgttggaaaagggtactctatgttggaagcatcgttttataatgtgagtggtgtgtatactactgatttccctgacaagcctccaatcatatttgatttcacaaaccctaaaattgctttggatacgaagtatttgtttacgccgccaaaatcgaccaaggtgaagaaactcaagttcaattcgaccgtggaggttgtgtttcaaaatacacaaattatgaatgcaaagccaccccatgcaccttcatgggtttagtttccatgttttggctcaagattttgggaatttcaattacaccaaagataaatacaagtttaatttggtgaatccaatatttcgcaacacgattgctgtgccagctggaggatgggctgttataagattcaaagctaacaatccagggatgtggtttgtgcattgccatgtggatgatcatcagttatggngactagacatggttttcgaggttgagaatggaccacttcttcaacttctcttccttcaccacctgctgatctacctaaatgtagctatatattttcctagagaatgcaatcacaaaatcacatgtc

SEQ ID NO: 211425 - DNA, 493 bp, Glycine max
ggaccctacagaagaagagtggaaaaagttcattgaaaagcctgaaagagcacttctgaagtgctttccttcacaacttcaagcaactagagtcatggctgtcttggacatactctcaactcattcaccagatgaggaatacataggagaaaagatggaaccatcatggggtgaagatcctgtcataaaggcttcctttgaaagatttagagagagactgaagaaactagaaacactgattgatgagaggaatggaaacacaaagttgaagaacagaaatggagctggcattgtaccgtacgagcttttgaaacctttctcaaagccaggtgtgactggaatgggggttccctgtagtatatctatttaagttgacaaagtcaaactgatattatgtgtgaagtatgatcctaaaccggtatgggtttttaatttaaacataagatagacacatagtcacataaactggtgcctaaaccaccagaatttccat

SEQ ID NO: 211426 - DNA, 492 bp, Glycine max
  unsure (1)..(492): unsure at all n locations
atggaaattctggtggtttaggcaccagtttatgtgactatgtgtctatcttatgtttaaattaaaaacccataccggtttaggatcatacttcacacataatatcagtttgactttgtcaacttanatagatatactacagggaacccccattccagtcacacctggctttgagaaaggtttcaaaagctcgtacggtacaatgccagctccatttctgttcttcaactttgtgtttccattcctctcatcaatcagtgtttctagtttcttcagtctctctctaaatctttcaaaggaagcctttatgacaggatcttcaccccatgatggttccatcttttctcctatgtattcctcatctggtgaatgagttgagagtatgtccaagacagccatgactctagttgcttgaagttgtgaaggaaagcacttcagaagtgctctttcaggctnttcaatgaactntttccactcttcttctgagggtcc

SEQ ID NO: 211427 - DNA, 505 bp, Glycine max
agctcaactcaaaatcaattgaagtaattcctcaacatgaaaacaaacatgtgaacatttacttgaaataacattagctgatatttcaagatgattcaggacaatccaacatgaagcattaacacacctgaagtagaatcttgccgagacacatcctcatctgccagcctccactgaaagacgcgaccagcctatcagaatcctcaggagcaaaaccaagctcaggcatcaacttactaatcttggcatcaacctcatccaagttcacattctgcgccctcctctgaagcaaatcgaactcatccaagagcctccccatgagctccaaatcattaacggcaccctcgagcgccttctgcaccttctccagcttccctgccaccttcatctcctccttgaatgcgttcatgaactcctccctcaccgtcctgctcggcgccacctcgaactcctggttcagaaacgcgattttcatgttcgccttcgccttcaccacgttcccgaa

SEQ ID NO: 211428 - DNA, 324 bp, Glycine max
tgccaagaagaagtgattgcatttgggcaattttgctagcacatgtgatcatcatcgtggttactcctttatagtagttttatccttgcagagtcttaggtgttttgtttaagttctatttttaagtttctgccgatttcatgtagccgtaactttcaaaactaggttcttgatcggcggtggtcaattttcattgctgattgcttttgatgagtactgttatctgctttgatggtaagaagagtctgagatatttcgaattgcacaagcagctatagggttttagtccatttccttcgctgatgagggatgttcttcgttgca

SEQ ID NO: 211429 - DNA, 363 bp, Glycine max
aaaccataaacagtttataaaacttcgttataaattaaatgcaacttaaaacatccctcagcagcaaaggaaatggactaaaaccctatagctgcttgtgaaattcgaaatatctcagactcttcttaccatcaaaacaaaaaacagtactcatcaaaaacaaacagcaatgaaaattgaccaccgccgatcaagaacctagttttgaaagttacggctacatgaaatcggcagaaacttaaaaatataacttaaacaaaacacctaagactctgcaaggataaaactactataaaggagtaaccacgatgatgatcacatgtgctagcaaaattgcccaaatgcaatcacttcttcttggca

SEQ ID NO: 211430 - DNA, 418 bp, Glycine max
ctcggaattgcgctcgagtcaagactgacaagccttatggaattaatggtggcatggctttgagggaaggagttgatgcatctggcaggaaaggaaagggaaagggcgtttaccagtttgtagacaaatacggtgctaatgtcgatggttacagtcctatctacgacaccaaggactggtctccaaccggtgatgtctacgctggctgtacgactggcttggctatctgggctgtgactctacttggtcttcttgctggtggtgcacttcttgtctacaacacaagtgctgtggcgcaataaactgtgcaaatcgatgctttaagctcaaacttagttcatgtaactatctaaaaatgatgaagtaacatgaagtactttgtggatacgtgatccttctgctctataaatgtgtggat

SEQ ID NO: 211431 - DNA, 536 bp, Glycine max
ggctcgaggcgctttactcgtcttggtggtaagcttccgaaaggagttttacttgttggtccacctggcactgggaaaacaatgttagctagagctattgctggagaggctggggttccattcttctcctgcagtgaaagtgaatttgaagagatgtatgttggtgttggtgcacgaagggtgagggatcttttttctgctgcaaggaagcgagcacctgctataatattcattgatgagatagatgctattggaggaaaacgaaatgcaaaggaccaaatgtacatgaagatgacattaaatcagttactggttgagctagatggattcaagcaaaatgagggcataattgtgattggcgctactaattttccacaatcattggataaggcattggtgagacctgagcggtttgatcgccatgttattgatcccaatccggatgtaaaaggaagacagcagattttggaatcacacatgtcaaaggttctgaacgctgatgatagtgatctaatgatcattgccagaggaacacc

SEQ ID NO: 211432 - DNA, 539 bp, Glycine max
  unsure (1)..(539): unsure at all n locations
ggctcgtgcttatctctctctctctctatctctcccgaattattgttcgttcgacccttttacttagtattccctgtttccggtattcgctcccttttttctgcattctggttttacttagatctctgtcccgcaccagatctggtgcagggtgagagggttgggttcattaattttgtatcaatcttccttctgagcggtaggcgtggggataccagagtcttttcgggaagcaagagagggttctctccgttttcaatagatctctcactgtcttcttttgagggggaagccggggcctcggcctcggcggctttcaaagcccccaccttcacagccctatcaacaaaaaaccctaaccctatttttttcttcattttctaattcttttttgatcgtcgccgccgccactagagatgcctgccctggcttggtgcgtggatgctgcagcacctcccggctatgcatntgccggtgacatctctnttcccgcgccggtcgcccttactggcgtacctncggccacgacagacgacagc

SEQ ID NO: 211433 - DNA, 556 bp, Glycine max
  unsure (1)..(556): unsure at all n locations
aaaagaacttgtccatgcgagaacatttttattctaagtataataataacaagcaaggcaacaataaaatttgttaccctagaacttgacgacgaaagtcatagacatttcatttgggaacaaaatgcagagaacaataactgactgaccctgtctttatcctgcattgcatccaggacaaaactaaaaacagcgaaaacggaataataataaaaaaaaaattgaagaccttaacgaccacgacgatcaacaagaagaagaagaacaaccaagcaagcaacagaaacaaagggaatgatgactagtgcgagactatttgaattgaagcacatccattaataagaccactgctgccccagatcttgagcagtaggaacagcagcggcaacatcgtcagccacaaaggaagacagagacagcagataaggcattctgtcaaaggtgcgagcaaggccagcagtcagaagcgctgctgcgttgtcgtggctgacatactcctgcgcgcggngcttggtgtctcaacatgagctcgggctgtgctgatcactcgagaaca

SEQ ID NO: 211434 - DNA, 579 bp, Glycine max
gggacatgttccagtccactttcccttgtgccgaattccatgcagcctctagggccatctgtggtggaccagtttacgttagtgattgtgttggaaagcacaacttcaagttgctcaagagcctcgctttgcctgatgggacgattttgcgttgtcaacactatgcactccccacacgagactgtttgtttgaagaccccttgcatgatgggaagacaatgctcaaaatttggaatctcaacaaatatacaggtgttttgggtctatttaattgccaaggaggtgggtggtgtcccgtaactaggagaaacaagagtgcctctgaattttcacaaactgtgacatgcttagcgagtcctcaagacattgaatggagcaatgggaaaagcccaatatgcataaaagggatgaatgtgtttgctgtatatttgttcaaggaccacaaactaaagctcatgaaggcatcagagatattggaagtttcacttgagccatttacttttgagctattgacagtgtcttcagtgattgtgctgtcaaaaaagttaattcaatttgcttcattggattagtgaacat

SEQ ID NO: 211435 - DNA, 486 bp, Glycine max
  unsure (1)..(486): unsure at all n locations
aaaacctacaacagaaaaatatgactcttattacttaaaaagagagtcaaacatcatagtatcccaaattcaccttcagggatcaaaataaaaactcaaccattgacaattttgaagcactaggccagggaacttgcactctcagcattttatcctcataatcaaattttacaactaccccatctagtttgcaactaactggtttctctgatgcaaacaccttcatctccccacaacccctaaccccaattttgaccacatctatgtggttgtcaaactccatggactgaatggcaccaccagtgttaagcatgttcactaatccaattggagcaaattgaattaacttttttgacagcacaatcactggagacactgtcaatagctcaaaagtaaatggctcaagtgaaacttccaatttctctgatgccttcatgagctttangttgtggccttgacaaatatacagcagacacattcatccct

SEQ ID NO: 211436 - DNA, 558 bp, Glycine max
gagagatgcaaaacattacattgagttttggaaacaggttcctccaaatgagccatatcgtgttattcttggtgatgtccgagacaaactgtataacacacgggaacgtgctcgccaattattagccaatgggacctctgatatccccgaggagacaactttcacttacgttgagcagttcctggagcctcttgaacaatgctatagatcactctgtgcctgtggtgacagacctatagcagatggaagcctccttgatttcctgcggcaagtttcgacatttggactctcacttgtgagacttgacatccgtcaagagtcagataggcacactgatgtcatggatgcaatcacaaaacacttagagatcggatcataccgagagtggcccgaggaaaagaggcaggagtggctcttatctgaactacgtggaaaacgccctctctttggccatgaccttcccaaaacagaagaaatcaatgatgttttggaaaccttccatgtcatttcagaacttccctcagacaacttcggtgcctacatcatatcaatggcaac

SEQ ID NO: 211437 - DNA, 525 bp, Glycine max
ataataatagtactatattcataataacaaaggaacagttatttgatattgttggaaatctctctagtagacataataggttataatgcttatacatccatgtcacaatcacaacacacatcgtataacaagaaaaacaccactgctatggcatcttaacctgtattttgcatgccagcagcaatacccttcattgtcaaaataagggtgtcctcaagaccaggagcatactcgcttttggggttaagtttaacaagctctgctgctggcttgcttgattccatgtagtcctttgacaagtgtggcctcaacttcacatggtagtcaggatcacggatccgcttcaatgtgtaggcttgcaacacattgagggttgtgatgtatgagtcacgaagacgaagtctttgcttcaagtaggggtctccttcaagaatatccttgtgcccagcaacctggaggagaaacctctttgtttcttcgaatttagatcttaaattctctccaaatggacgcagctcttctgat

SEQ ID NO: 211438 - DNA, 475 bp, Glycine max
ttgacaccttccctggccaatccattgatttctttggtgcactgagggccagagtatatgatgacgaagtgaggaagtggatttctggtgttggtgttgacggcattgggaagaagcttgtgaactcaaaagatggacctccaacctttgagcagcccaagatgactctggagaagctcttgacgtatggtaacatgcttgtccaagaacaagagaatgtcaagagagtccaattggctgacaagtacttgaacgaggctgcacttggaaatgctaacgaggatgctattaacaggggaactttcttccaatcttgaattggaggcaaagcaaacttggcaagtaaatatttctgttcctgaaggttgtgctgatccaagtgctagaagttgtgatgggacttgcgtgtaacattcttagaattctcaatgtcttaggtgcaaagagaagatgccaagtttgagatgattttact

SEQ ID NO: 211439 - DNA, 361 bp, Glycine max
agtaaaatcatctcaaacttggcatcttctctttgcacctaagacattgagaattctaagaatgttacacgcaagtcccattacaacttttagcacttggatcagcacaaccttcaggaacagaaatatttacttgccaagtttgctttgcctccaattcaagattggaagaaagttcccctgttaatagcatcctcgatagcatttccaagtgcagcctcgttcaagtacttgtcagccaattggactctcttgacattctcttgttcttggacaagcatgttaccatacgttaagagcttctccagagtcatcttgggctgctcaaaggttgggggtccatcttttgagttcacaagct

SEQ ID NO: 211440 - DNA, 347 bp, Glycine max
gaagttggtcaatgagatgaaagctgaagccttgaagactatagttggtcaaggaggtgagcctacagacaataacagtgtattgttgaccatgagcactttgacagaagaaggggtaattgctgaaaaaaatgcagcatgtgagaggttattggatcagagggtggagataaagatgaagtcacagaaaattaacgactgctagaataggtttcatgttgcagtaccaaagcctcgagaccagaaagaaaggcctccatgtattgctcatgcagttttagaagctaaagcttagcaagctggtgaaaaggaacagatgagcactgaaaaggatcttgaagatgaaa

SEQ ID NO: 211441 - DNA, 526 bp, Glycine max
agaaggaactaacttccaagttccaataacagcactcaatgttgagtcataaaattcaaacagcagcttccttgattcaaagaaagctgtaaagttgcaacttatagaatgacaagtttgataacaataataaaatgcagagatgtataagtaaactatgttgccagcacagaaccttaaactccaacaaaacacttacattaaataacaatttttttttggcagccctgaaaaatgccaacaggtgtcctctaaaatgcattaaacagcatcccctgtcctagcgtctctcagtttttccattggaacgcttcccagaaaacaagtgcttgggcttcagattaggtatgactctatcagcttctccacgacgggcatccttgtttctcttcttgacagatttctttgcaagtttgattgccttgaccttttgagcagaatccttgaagccttctccaggcacaacttcatgtggtgggcgtgacactgacctggaccgtgacagtgatctactcagacgctgttt

SEQ ID NO: 211442 - DNA, 499 bp, Glycine max
tagctctcgtgctcctctctctttctctctttctagttcgtgttcttcgtcgcaaatccgaagtaggatctctcttgttttttctctacgtttttcgcgatggcgtcgaagcgaattttgaaggagcttacggatttgcagaaggatcctccaacatcttgcagtgccggtcctgttcatgaagatatgtatcattggcaagctacagttatgggtcctgcagacagtccctatgctgcacgtgttgatctagtgactattcatttacctccagattatccctttaagccacccaacgttgcattcatgactaaagtgttccacccaagtacatagagcaacggaagcatctgccttgatatattgaaagagcagaggaaccctgctctaaccatctccaaggcgttgctctcactttgctccctgatgactgacccaaatcctgatgatcctttggtccccgaaatgcacacatgtacatgacagacaggaacaagta

SEQ ID NO: 211443 - DNA, 558 bp, Glycine max
ctaaatattcgacaatactgtcaatacaaggttaaaattttaaactttttaattgggcttacatttcactgttttaaaagtagcgtttgcattctgcaatacagacaacagaagaaatatttccccattcatcttcaactggaggggccttaatcgaagaccacaaatattcatacaaggctgtttggcctaaacactgaaagtaaaaatcgctctcttctctatgtcaattagcccatggcatatttctgggtccagcttcttgcagttgactcgtacttgttcctgtctgtcttgtacatgtgtgcaatttcggggaccaaaggatcatcaggatttgggtccgtcaacagggaacaaattgagagcaacaccttggaaatggttagagcagggctccactgctccttcaatatatcaaggcaaatgcttccattgctatttatatttgggtggaacaccttcgtcctgaatgcaaccttgggtggcttaaagggataatctggagggaaatgaatagtcactaggaaaacacctccagcatagggactgtctgga

SEQ ID NO: 211444 - DNA, 509 bp, Glycine max
gctgctattgctgcatctcagtcactggtattccaaaaagattcgcaaccaactctggcttcgacatctgctggtcgtgagaactggggagagaccaacatggctgatgctagccctaggactgatacttcaacagatgatacagaagacaaaaatcaaaggcctgaaagggatgaatccagtggatcaaaagataaatcagatcaaaagacattaagacggcttgctcaaaatcgtgaggctgccaggaaaagccgactgaggaaaaaggcatatgtgcaacaattagagagcagtaggttgaaactgacccaacttgagcaggagctccagcgatctcgccagcagggaatatttatttcaagtactggagatcaggcacagtcaatgagtggaaatggcgctatggcatttgatgtagagtacgcacgatggttagaagagcataatagacaaaccaatgagctaagggcttgcataaattctcatgctggagatattgaacttcg

SEQ ID NO: 211445 - DNA, 551 bp, Glycine max
  unsure (1)..(551): unsure at all n locations
ccgacaaatcgttgaacatcggagccagagattcagagcgggtaccaccgacgatggatactggcggaggcggagcatcacctacagccgccatgtcgcggtggaagttcgcggcgtggcggcagtaccagcacctgctggacaaatcgacgccgcacgtcggacgccggtggctggggttcgcggcggtggcgcttttgtacttgctgcgcgtgtactttgtggaaggcttctacgtcgtttcgtacggcttaggcatatacatcctcaaccttctgatagggttcctctcccctcaggtggaccccgagaccgcgattctcaacgccgacgaccctatactccccatcgccgcctccgacgagtttcgccccttcgttcgccgnctacccgagttcaagttctggtactcaatcacgaaggcattntgcattgcatttgtgatgactttctttagtggtgttgatgttcctgtgttctggcctatactcctcttctactgggtggtcctattctcacttacaatgaggagacagatatctcatatgatt

SEQ ID NO: 211446 - DNA, 477 bp, Glycine max
atctaaaattctcgttatttgattactagtactaattcaagaacgagagccattagcccacttatatagaaagaaatagaaaataaaggagtaaaagaaaaccctcagaaactccaattatatctccctaaactgaatcttttactagggcctaaaaacatccaagacatcccgttggtgtccacacaagacctcaaaagcaactttcttcagcttccatcaaatcctcagattgctccagctgaaaatttcagtcctctgaaactgaaaggcttgtggtttctggtggtgctctctttacatcatagcgctgatttccagatgaaaacggtaaatatttgtatttaatcatatgagatatctgtctcctcattgtaagtgagaataggaccacccagtagaagaggagtataggccagaacacaggaacatcaaacacactaaagaaagtcatcacaaatgcaatgcaaaatgcct

SEQ ID NO: 211447 - DNA, 509 bp, Glycine max
ctaaagttgcacaagatatggttgaggaatggtttgattgtgttgatgaggaggattcctttgaggaagtttctttaagtgcagcacttaatggtgttgagggtttggactatatggaaagaattcctcttgccacatctgagggttttcctcatgtgctttcacgcaaaaatggtgaaaaaggcaaaagaagatttgtttctggggatggtgaagagatgacattgatttcgggaaccagtgttgaagaggcttacaacaagctaatagttgaacttgagaaaagtgttcctacattggttggcattgaatgtcccaaggatgagaaacttcctcgtcgcaaaatttttgacaaacctaagacgcgctgcttcactattctccctatggagtttaatcttgtggtccgtcaaaagtttttaaattttgtgaggttcattatgaagaaaagggacaagcttaattgtcaaagtggaatcaacccatactccatggaatggactggtttg

SEQ ID NO: 211448 - DNA, 513 bp, Glycine max
  unsure (1)..(513): unsure at all n locations
aaacacactcattgcacatagtaatgcgctttatttaagtgaataaaatattacatactagttcacaaatgcaaaaggacactcatcaaccagatatttgagactcttacagttctcaagaagtcgcgtcagcatagggttagtggcgttagaactcagaatttcattcttaacgccaaaaagaacagccagtaaagctactggaaaaggatcaactctagtaagaaaaacaattttcttacctctcccaagtgctgtgcgaatccttttgttgatatctgaggagcgattgttaactgcagaactaatccaagcagtggtgggtaaaccaccacgtncactaccacatgtaacatttacaacggcagcttctgaaggtaattgacttacaggataaagacaattcacaaaaattggtaaccaagaatccactggaaaatttccatcaaagaaattcttggtgtgtagccaacacaagcttatcatcaaaaacaatcttgttggaaaagctta

SEQ ID NO: 211449 - DNA, 532 bp, Glycine max
  unsure (1)..(532): unsure at all n locations
aaagtcttccttcacacgcattctccttcccctgttttttcttcttctctgttctctgttctcttcctcacaacacaagccatgaaagctttcgtggctgtggctctgtttgcgttgntgttggtgtttgttgatgcgaggtttgtggtggagaagagcagtataactgttctgtcacctcataagctgagggcgaagcgcgatggcgccatcggaaacttcggtcttccggactacggaggattcatcgttggctctgtgctgtatcccaccaaaggctcccacgggtgtcaggtcttcgagggcgataagcccttcaaaattcactcttatcgtcccactattggtctccttgatcgtggagagtgttactttgccttgaaggtttggcatgccgaacagnctggtgctgcngcagttttggtgactgacagcattgaggagtctctgataaccatggattctcctgaggagagctctgatgcagatggctacatagagaagatcacgattccatcggctctgatagaga

SEQ ID NO: 211450 - DNA, 473 bp, Glycine max
  unsure (1)..(473): unsure at all n locations
attctatgcagaaaaattctgttatatattgcaatgttcacatgattatcctacagtaaaatactgatcttccttcgctgtcaaatggattcaaatccatatagccagttctgtttataatccgtctctgaagcggattatgcagtgtaacgggttcccttgactattttcagctcattatgtatgtcttacacggtgccttgttgtcgtaaaggttgagtttcagcatgaactacattattttgctggtccaatggcatgtattgtgacatgatagccatgatctcagagtccatgtatgaccggagcctatatttgtagaacacgtaaccagctagaccagcaccaacaacaactgctatgaccacaaaggcaaggaaccgtccaaattttgattcacttctttcgatacaagcatcttgntcctttatatataggagggtcccctagcatttacaatcgtaactacccca

SEQ ID NO: 211451 - DNA, 491 bp, Glycine max
tttcgtttttttttttttgtaaaaagcattttacattaagttggattcggatacacaggataagggacattatctgaagtacttcaccaaacacaaatttaaaaactcttagaagtcatttcgttctttgacgcttacttttcggggacgaagttggtggcataggcccaggcgcttgtgttgacagggtcagcaaggtgatcggcgaggttttacaatggaccctttccggtgacaatggcctgaacaaagaagccaaacatagagaacatggccaatcgtccgttcttgagttccttcaccttaagctcagcaaaagcctctgggtcatcagcaaggcccaatgggtcgaagctgccacctgggtagattgggtcagtgaccttaccgagggggccaccagcaatacggtaacctttaacggcacccattaggataacttgtgtggcccagaggcgaggatgctttgggcctggatcaagcttgggttg

SEQ ID NO: 211452 - DNA, 341 bp, Glycine max
atgtgactatgggtctattttatgtttaaattaaaaacccataccggtttaggaacatacttcacacataatatcaaaatgactttgacaacttaaggggatatactacagggaaccctcaaaccagtcacacctggctctgagaaaggtatcaaaagctcgaacgcgacaatgccagcaccaaaactgttgtgcaacttagcgttaacatacctctcatcaatcaggggccctagtttcttcagacactctctaaatctcccaaaggaagcctttatgacaggagccccaccccatgatgggtccaaaatctatgcgatgtatacctcatctggtgaacc

SEQ ID NO: 211453 - DNA, 457 bp, Glycine max
  unsure (1)..(457): unsure at all n locations
cgcccgaccagtcccacccatccctgtcgcgctcttcgtcgccatggctgctctgcgctcctctgctcgcctcgccgcgccgctgccgcgcgctgcgctgcgcctgccggcccgtcgtgcctacgccacaagcccggcgcctggcgcccacccgccgccgcagcagggtggctcgcgctcccagggcacgagcaagacgctaatcggctccgtcgcgctgctcgcggctgccggtggcgcgttcctgctcttcggcccggagaacaagcgcgccgaccttggcgtcggcccggacggcagcaacaagctgagcggcagcggtgccaaggcccagcgcgccgncacgtacaagggcgtgggccccagcctcgacgccgacccggncgactaccagacggtgtacaacgccatcgacgacaagctcgactcgaaccccgagtacgacgacggcagctat

SEQ ID NO: 211454 - DNA, 382 bp, Glycine max
gaaaaacaaaagagtagtggcctttaggtggtgaagaacaagagctcaaatcaaatcgaatcgaaaaaagaaagaaagatcatattcatggcgatggcaagcctggctcgacggaagggacacgccgacggtttgtccgcgaggtcgtcggtttgcctgacaagctggaggggattcgcgtccggatctgacgaaaacgacgtcctcgtcataggcggcggtcccggcggctacgtcgccgccatcaaagccgcgcagctcggtctgaaaaccacttgcatcgcatagcgtggcactatcggcggtacctgcctgaacgtcggatgcatgccttccaaggcacttctgcgttcttaccacatgtatcatgaggctaaacatg

SEQ ID NO: 211455 - DNA, 488 bp, Glycine max
agaacaacacaatcattcctcttattatgcaaacaagtaaacaaggggctaatttgcatttaaaaacctgaatctaaatttaacacaggatgtatcatctccaagtcattgtaaaattcttggacaaaaatgaaaacaagaagtagcaaccggctccttttaaatgtgaatgggcttgtcataagtggccattgcggcttctttcacagcctcgctcattgttggatgtgcatggcacacacgtgcaatgtcctcactagatgcatcatactgtagtgctattgctgcttcatgaataagctctcctgcattgggtgccataatgtgcactcccaatatcttgtctgtctccttttcagccaatatcttcaccagtccttcagcattgtcaattgccttagctctgctattagccatgaacgggaacttgccaacacggtattcaactccaagttccttcacctgctcctctgtcttcccaacagatg

SEQ ID NO: 211456 - DNA, 406 bp, Glycine max
aaagtaaatatatatagtatatattgaaagttaaaattacaatttacttattaaattacataattattggaaaacttagcagtaaaaggaaattaaacacttgaaatcatcaacaacaaagcttactacacttatgctttgttgcagggtggcaaaggagaaccacagagacaatcatttccaacaaaagcacttgccggaaacttattcttgggaagctgaccacaaagatggttatagctaacattcaacttctcaagcccaacaacactgtttggaaccttcccaaacacccaattacgagacaaatccaaaaacttaaacctctccccaaaccttaacttccccaaatcaaacttcaactttgtccccgaagcccaaaaccccaccaaatactcagtactat

SEQ ID NO: 211457 - DNA, 528 bp, Glycine max
  unsure (1)..(528): unsure at all n locations
ttgcaattgaagttaaaagccttagccttccctacaactccaaacacaaagacatcatcatccatggctgcctccgtctccactgtcggagctgtcaacagagctcttttgaacctgaatggttctggagctggagcttcagctcccagttcagccttctttgggaccagcttgaagaaggttattgcctcaagggtccccaacagcaaggtttccggtggaagcttcaagattgttgctgtagaagagaagaaagagattgaagagacccagcagaccgacaaggacagatggaagggtcttgcctatgatatctcagacgaccaacaagacatcacaagaggaaagggtttggttgactcccttttccaagctccacaggatgctggaactcactatgcagtcatgagctcctacgagtacctcagcactggacttcgccagtacttggacaacaaaatggatggattctacattgctccagcttttatggacaagctngntgttcacatctncaagaacttcatg

SEQ ID NO: 211458 - DNA, 595 bp, Glycine max
  unsure (1)..(595): unsure at all n locations
agtgattccactataggagaaagttctaataatctcgatgaaagtcaaaaatataagcatttgtggcttgaatgcgaaaattgttatggattaaattataaaaaattttttaaatcaaaaatgaatatttgtgaatactgtggatatcatttgaaaatgggcagttcagatagaatcgaacttttgattgattcgggtacttggaatcctatggatgaagacatggtttctctggatcctattgaatttcattccgaagaggaaccttataaagatcgtattgattcttatcaaagaaaaacgggattaactgaggctgttcaaacaggtactggtcaactaaatggtattcctgtagctattggaattatggattttcagtttatggggngcagtatgggatccgcagtaggtgagaaaatcacccgtttggtagaatatgctactaatcaactnttacctcttattctggtatgtgcgtnccgaggagcgcgtatgcaagaaggaagtttgagcttgatccanatggctaaaatctctcttgcttatatgaatatcaaaaaaaataaaaagttattctatgtatccatactta

SEQ ID NO: 211459 - DNA, 477 bp, Glycine max
  unsure (1)..(477): unsure at all n locations
atattattatataaagatagtctataatcactagaatttctatatatttatacttagtatataataattctagtgattatagctaagccaatatatatcataatataatataccctatgcttattcaaagaatttatggctatgccttatcatttttagtcaaagaaaagaaattatggaattgaaataactcactcagaacgccctttaaaagattacgcggtacgattgaatcaaataagcccttatggaataaatattcagctgcttgtgaaccttcaggtactgccttattcaatgtttgttcaattactcttttaccagcaaatgcaatataagcatttggttcggcaataatgatatcccccaacatgccaaaactagcagttacccccccagtagtgggagatgtaagtatggatacatagaataactttntaattttttgataatcatataaagcagaagagatcttag

SEQ ID NO: 211460 - DNA, 313 bp, Glycine max
gttaacattaatgtatataataatagctgactgacccagacagaaaactgattagataaaaaacaaaactaaaaacagaaaaaacagaataataatagaaaaaaaattgaagacttaaagaatacgacaatcaacaaaaaaaagaagaacaaccaaaaaagcaacagaaacgacgggaaagataaaaagggcgagaataatccaatagaagaacatccagacataagaacactgaaaaatcagatcttgagcagtaggaacaggagctcgcaaaaaagaaagccgaaaggatgacagagacagcagataaagc

SEQ ID NO: 211461 - DNA, 529 bp, Glycine max
  unsure (1)..(529): unsure at all n locations
aacacgatgaggaagagggagagaagcaaagccatggagaaagagaggcttcaagtgatggacttgagtggcatgtccttggagtttcttcccaaaccttcgcttgatttagccaccatttgcaagttggacctatctaataacaatctccaggaaattccggaatccttaacggctagacttctaaacgtggaagtgttggacgtgcgttccaaccagctaaactcccttcccaattccattggctgcctctctaagctcaaggttttgaatgtctcaggcaacttcatcgaatccctccccaaaaccattgagaattgcagagccttagaagagctgaatgcaaacttcaacaagctgagcaagctgccagacacaatangggtttgagctcataaacctaaagaagctctcagtgaactccaacaagcttgtgtttctttcaagctccactttacactttacagctntgaaagttcttgatgcacgattgatttgcctaanggcacttcctgaggaccttgagaac

SEQ ID NO: 211462 - DNA, 530 bp, Glycine max
gagagaacttctttggagcattcagtcaaagaagtggctttgcttcaagaggaattggagaagaaaactgccgagtttagagaaacaagtgccgttcttcaggttaaagagtcagagcttgctgatgctaagctagaaatccagcgtttgaaatctgaaaaggcttctcttcagggtatcttggaggagaaagacttggagctttccagtgctaggaaaatgctgggggatgttaaccaggaaatctatgatcttaagatgcttatgcacagtatagaaacccagctcattgaagcatacagtatgctaagggacaaagatgagcatgtgaaggtaatccagaacaagttgaataatacaaaccagaaggcttttgatgctgaaactgtggtagaaagaattttagatctcacaaacagacttgctgctttcattaaggatgaagatatgaactcatcaaaaccactactagatgaaatgggtaaccaactacttgatcaactattggagatacctgctatgaattgaat

SEQ ID NO: 211463 - DNA, 493 bp, Glycine max
gaacttgaactatcgtgtcttcttggctttctctgttcaggatcaacatggatattgtatcacgagctttgctatttccgttggctatacttgtgctcatattaagcacaccttgctcaggtgcttttgggaagagtggaactaatgtgaaaacagctatttttctgtcccccaagtttgaacttggaccaggatcggtagccaataaatatgattatgacgctgattttccaagaggtcatatagcacttaagagtttcaatgctgaagtagttgatgaagcagggaaccctgtgcctcttcatgaaacttatctccaccactgggttgttgtaagatactatcaacctaaatatgtgacgacacacacaaactatgatggacataggatacttcacaactctgaccatatatttgtgaggaacagcggcttatgccagagagatactctaggacaatactatggccttggatctgaaacacgaggaacagc

SEQ ID NO: 211464 - DNA, 417 bp, Glycine max
aagcctcatgttcctttagaatctttctttctctatagggatcggaaaaacgcatgacaataagtccttaaagcttggtgtgacatggctggggagataatatatatcatgattatgctattcaaccttataatgcagggggattatatatatgcgcttccactattcgatattctgcagaaactcctccatttgagcggcattaagatgacatatattgtgagcttgcagagttatgatactgatgaactggagaagccatattgtaatcttctactaagggcggcatctatatggtgatgaaagacatggaccgggatagaactggacttgctgactcgcctctgatgagatactcggatacccataattagagctgcatgagacaactgctgactgcgcttcactattgtgatg

SEQ ID NO: 211465 - DNA, 346 bp, Glycine max
ctctgttggaactgatgccatgggaaacattaatatagaagagctgaggaacgctgctgaaacacacaaggattacttatctgcacttatggtgacatattctttaacccaaggagtttatgaggaaaggattgacaagaattgcattattatgcaaggataatggatgtcaatgatatatggatggcgccaacatgaatgcttaggtgggactcacaagcccgggttggataggatcagatggatgacatctaaatgtccacaagacatttagcatcccttatggacgatgtggccctggcatggaacctatatgatgtaacaaacacttgtgacccattttacc

SEQ ID NO: 211466 - DNA, 528 bp, Glycine max
atacgaattactttttttttttttcctgtgattggatgaaacttaagagcagtggattatcatcattgtcacatatgatgaagcaatattcaacaagtgcaagaactgtatgaataggaataagagtttatgtacaacgggaaatgaaaatagttgtcatttgaacacattatgctgtggcagctgcttgttcttcaacagcctgtgatgctgggagaagggtgcaaatgaggttgcggtcaccgtacacattatcaacacgtcctgtggtaggccagaactttgcagtacggagccaaggagctgggaaggctgcatattccctggagtatggttttgtccatgcatcagccatgagcagtgatggtggatgaggggcgcccttaagtacattgttgttaatgtcaacctttcctttctcaatctcagcaatttcttgtctaatggaaataagagcatcacagaacctgtctaactcggccttgctttcactctcagtaggctcaatcatgagtgtgccaggcacag

SEQ ID NO: 211467 - DNA, 505 bp, Glycine max
ctcagggttattcagttgggtcatctcttgtggaggaagacaagcttagccttgcaactacacttcttgaaaaggccaaggctaaaggggtttctttgttgcttccaactgatgttgtcatagcagacaagtttgctgctgatgctaacagcaagactgtgccggcatcaagcatcccagatgggtggatggggttggatattggtcctgattccatcaagacatttggtgaagcattggatacgactcagaccattatttggaatggaccaatgggtgtttttgagtttgataagtttgccacaggaacagaggctatagccaagaaactggcagagctgagtgggaagggagtgacaaccatcattggaggaggtgactccgttgccgctgtggagaaagttggacttgcagacaagatgagccacatcttcactggtggtggtgccagcttagagcttcttgagggaaagcaacttcctggtgttcttgctcttgatgatgc

SEQ ID NO: 211468 - DNA, 464 bp, Glycine max
  unsure (1)..(464): unsure at all n locations
aatgcgtaaagcaacgttcatatcacacgggcaaaacaattagtatcccatccaacaaaaatcataaaagttaaaattcaataaaaaagcatcaaataagttttaaacagataaatggatgaaagcaactacacatttagtccacttcctcaatcttggggccagcaccacttccaccagaaggagcagcataatcatcctcggctgccccagcaccagcaccacccatgttaggaccagcaccaccttggtacatcttggcaatgataggattgcagatgctttccaattccttcattttgtcctcaaattcatctgcttctgcgagctggttgctgtctagccactggatagcttgctcaattgcgtactcaatcttcttcttgtcagtaggatcaagtttctcaccaattntgtcatccttcacagtggtcctcatgttgtatgcatagttttccaaagca

SEQ ID NO: 211469 - DNA, 507 bp, Glycine max
  unsure (1)..(507): unsure at all n locations
ctacaaaggttgctgtaggagataagatattgaagtagtgctaagtgcctaacacctgcagtgaacaatggcctctgcatcagcatctcttctcaagtcttcacttgttcttgacaagtctgagtgggtgaagggacaaacacttcgccaaccttctgctgcatcagttgtgagatgcaaccccaccaccccatcaggcctcacaatcagagctggttcctatgctgatgagctcgttaagaccgcgaaaacagtggcttcaccagggaggggtattttggccatggatgagtccaatgctacctgtgggaagcgtttggcttcaattgggctagagaacactngaagctaaccgcaggcgtaccgtaccctccttgtgacagttccaggacttggtcagtacatctctggtgccattctctttgaggaaactctctaccaatccacaactgatggcaggaagattgttgacgtgctcctcgagcaaaacattgttcccggtattaa

SEQ ID NO: 211470 - DNA, 543 bp, Glycine max
ttgtaactaatatttacactgttcgtgcagcatcctggaaatattgcagttgatgatgtcaatggtggaagattgatcttttatgattttggaatgatgggaagtatcagtcaaaatatccgagaaggtttacttgaagctttttatggaatttatgagaagaatccagataaggtccttcaatcaatgattcaaatgggtgttcttgtcccaactggagatatgactgctgttaaacgaacagcacagttcttcctcaacagttttgaagagcgtttggctgcacaaaggagagagagagcgttattggtgatcctgctactgcttctagtccagcaaatttgtgctaccaagaagcaagatcatggttgccccctttcttcctgcggcaaaatcaccaacataacttacccatttcgattaaagggccaccctaaaagctgcggcgacaataggtatgagctagcttgtgaaaacaatgttactgtgttacatttgtactctggaaaatatcatgtgcaggcaatcaactacaataatttc

SEQ ID NO: 211471 - DNA, 459 bp, Glycine max
cgggaaccggaaagacccttttggcgagggctgtggcgggggaagctggggtgccgtttttctcgtgcgcggcttcggagttcgttgaactttttgtgggagttggtgcgtcgagggtgagagatttgtttgagaaggcgaaggggaaggcgccgtgcattgttttcattgatgagattgacgccgttgggaggcagagaggggcggagctcggaggtgggaatgacgagagggaacagactattaaccagcttctgacggagatggatggcttttctggcaattctggtgttattagtttggctgccactaacagaccggatggtcttgattccgcgttgttgaagcctggccggttcgacaggcaagttactgtggatagacctgatggtggcggcagagttaaaattcttcaagtgctttctagaggaaaagcacttgcaaaggatgttgactttg

SEQ ID NO: 211472 - DNA, 443 bp, Glycine max
cattcgaaagtgtaactcagccgtagaaccatattttttatttatttattgcgtaagctgctgtgctaattgttttttctccttgaatttgataaaataattattgattcttacagtgtacaagtcagagcgtattttatagtacaaacataattctgtgacttgcgtgtatgattatgcaacatataattcggcttttccatcaatgaatagactcatgaactcttcaccatccacagtttctttttctatgagaagttgagcaagcttgtgaaggatatcaatgtgagttgagataatatgtgttgccctagaatatgctctctctaccagttccctcacttccgcatccactacatccgcagttgccatggagtaatccttttgcgatgacatctgttgacccaagaatggatttccaccaggtccaccaatggcaactt

SEQ ID NO: 211473 - DNA, 479 bp, Glycine max
aaggcagaaagcaagctcatcctagagttttaaaaatggcagcagcctcctccatggctctctcttccccatccttggctggcaaggccgtgaagctgggcccatcagcccccgaagtcgggagggtcagcatgaggaagaccgtcaccaagcaggcctcctccggaagcccatggtacggcccagaccgcgtcaagtacttgggcccattctctggcgagcccccgtcctacctcactggcgagttcccaggtgactacggctgggacactgctgggctttcggccgacccagaaaccttcgccagaaaccgtgagctcgaagtgatccactccaggtgggccatgctcggggccttgggctgcgtcttccccgaactgttgtcccgcaacggggtcaagtttggagaagctgtgtggttcaaggcccggtcccagatcttcagcgagggtgggctggactacttgggcaacccaagc

SEQ ID NO: 211474 - DNA, 433 bp, Glycine max
  unsure (1)..(433): unsure at all n locations
gtaaaaagcaagtaacattaagttggattgggatacacaagataattcacattatctgaagtacattgcaataacatatacttcaccaaacacaaatctaaaaactctcaaaagtccacaagtcatccttttctttcatgctcacttgccggggacgaagttggtggcgtaggcccaggcattgttgttgactgggtccgcaaggtgatcagcaaggttctccaatggacccttaccggtgacaatggcctgaacaaagaacccaaacatagagaacatggccaatctcccgttcttgagttccttcaccttaagctcagcanaagcctctgggtcatcagcaaggcccaatgggtcaaagctgccaccagggtagattgggtcagtgacctcaccgaggggcccaccagcaatacgatgacccttaacagca

SEQ ID NO: 211475 - DNA, 534 bp, Glycine max
gcctttgtttttttttttatatttaaacacactcattgcacatagtaatgcgctttatttaggtgaataaaatattacatactagttcacaaatgcaaaaggacactcatcaaccagatatttgagactcttacagttcttaagaagtcggagtcagcataaggatagtggcgttagaactcagaatttcattcttaacgccaaaaagaacagccagtaaagctactggaaaaggatcaactctagtaagaaaaacaattttcttacctctcccaagtgctgtgcgaatgcttttgatgatatctgaggagcgattgttaactgcagaactaatccaagcagtggtgggtaaaccaccacgtccactaccacatgtaacatttacaacggcagcttctgaaggtaattgacttacaggataaagacgattcacaaaaattggtaaccaagaattcactggaaaatttccatcaaagaattcttggtgttagccaacacaagcttatcatcaaaaacaatcttgtatggaaaagc

SEQ ID NO: 211476 - DNA, 430 bp, Glycine max
ctctcgtagacatcacaaaccttccctccattcatcccacgcatggctgccatgaactctagcgtattggcctgtagctatgccatatcaggtgcagcgtgttcggagctcaatgggaaggtcacttccgtggcctatgttgcatgctctggctacaagttgccattgatcaaagctgaggccagagttcctaaagccaaagaatctgaaggaggaaggagaggtgcccttgttctcttggcagctacccttttcacctctgcagcttccaattcttctgccaatgctgggatcattgaagattaccttgagaggagcaaggccaacaaggaattgaatgacaagaagaggttagctactactggagcaaactttgcaagagcatacaccgtggaattcggtagttgcaagttccctgagaacttcactg

SEQ ID NO: 211477 - DNA, 500 bp, Glycine max
ataataaaaactaataatgttacattacatgggtaataaatgtaaacccatacggattgcgataatggaaacttgcaaatgatttaaacataacggaatgtaacttcattgggttactggtggcaattaacgtacgcttgccaactgcacacaatgtctttgagagaaggtctgacttggttctcacagaatctaatgtattcaagcgtgtcttcagcaaacttggcgaactcaagcaccgtaaccttcggcgccaccttgaatacctagaccgtcatggacagatttcccttgctgacttccgtctgcccctgcatcctgaccacgaactgcttcttgcacgttaccctaaaggccagcttgttctacacccgatccaggttctacatcaccgccgaagccgaaaactaggtaatgaacatggacggcgaccgcttgctcgtctcaaacaaattcctcagatcgaacccattcgactaggacgagattatctcaaaagc

SEQ ID NO: 211478 - DNA, 356 bp, Glycine max
ggatagagaaagagagggagtaagtgggttaaggaaagaaaactagagaaacgaacctaacacaccacaggtccttgaaacgacgacggaaatggccgattcgagctcgcacatgcgttacacctttgagtgccgctacgatcccgatttctcgcccgatacggcgtgcttcgacaacctgcgacgtcgaaacttgcgctcctacgcaggatccggcgcggcggttcacggtatgtgctgcctcatgctacggttacctcccaacttccagcgccagctaagcaccaaggcgcgccgcatctgcagcaacatctgcgtcgagcaaatcgtcggcgcttagtggacggacagcagct

SEQ ID NO: 211479 - DNA, 499 bp, Glycine max
aatcaaatagaggtttcaatttcaacagttcatgacaggttccataacatccaaattagagaccattgatcttaacacaattccaacagaacattagacgatcaaaatgcaattgaatcgccagatgtgatagcaaacaggtagcacaattataaaggaaaaaaacttgggtgaatcaggaaaactgtctatatagcttccagagcttgcaggacatcagccttgaaatcctcgaaatcttcaactccaaagctgaagcgaaccaggttggcataaatcttgtacttggccctttctgactgaggaagatcccagtgagacaaaatagcaggttgatccacaatgctctcacagccaccaaacgaggccgcaatatatgggattctcaatgaatcagtagattttattgcggtatgtagatctccatcaatctcaaaactgacaacagcaccgaaaccagtcatctgcctcttggcaagctcatgttcagggtgactcg

SEQ ID NO: 211480 - DNA, 341 bp, Glycine max
gtttcatacccacatacccattgtgggttctctctcttgctccgccaacgaccgtgccccactcttcagcgacaccgccggcggcaactacctctgcgcccaatgcgattccatttctagaaagctcgccgaaacaacctacgccgtcgacaacacctaccttctgttgtcagcgtatcttgtcttcgccatgcagctcggattcgccatgctctgcgccggctccgtgagagccaaaaacaccatgaacatcatgctcaccaacgtcctcgacgccgtcgtcggcgggctctactactacctattcagctttgcattcgccttcggcggcccactcacgg

SEQ ID NO: 211481 - DNA, 510 bp, Glycine max
  unsure (1)..(510): unsure at all n locations
gaagaccctgtccccgaggccgaaggctctatcaacgacagcgacgtctctcagctcaagaaggccatcctcaacttgggtgtcgacaacagcaagcttatcaggaccgctttcgccagcgcttccacattccgaggtggcgacaagcgtggtggtgccaacggcgctcgtattcgtctcgagccgcagaagaactgggaggtcaacaacccacgtgagctcagcgaggtgctctccgctctggagaaggtccagaaggacttcaacggctcgaacaagaaggtctctatggccgacttgatcgtccttgctggtgtcgctgctttggagaaggcgtccggcgcatccgtgccattcacacctggtcgcaccgactgctacccaggaacagactgacgccaagtcgttcgagcacctcgagcctttcgccgacggctttcgcaactacggccacggtactgaccgcgtncgcaccgagcacatgctcatcgacagggcggagctgcttac
